United States Patent Application Publication US 2004/0123343 A1 - sequence listing, part 37

SEQ ID NO: 101745 - DNA, 3225 bp, Oryza sativa
  Clone ID: PAT_MRT4530_99336C.1
atgtatgggtcggatgatggggaagacgattctgaaatagctgcagccaaatgggtgaggagtaaaaaggtcataccatgccaatgggtaaaaattcctaaaaaagagaagtatgactttgatattaccaaagctgacaagatctttgatctactactccgagagaagcaaattcagcttcctgctggtcatacaatcccatcggctgaggaattgggcaaaaagaggtattgcaaatggcataattctggatctcattctactaatgattgcaaggtttttagacagcaaatccaggttgccactgaagggggaaagattaggttcgatgattccaaaaagccaatgaaagtcgatgctggccaaacagccgataggatccgtgcaaagggttttcaagtaaattcggctaagattatcaacaagtatcagaggaaattcttctggaatgaagggatgaggttgccatctatcgaaaactgccctgggtgcagtgatatcatcgagagctcgagccggtcatataataagggtaatcggctaaggcaggcaagacttcctattcatcaaagattgggtccgatgaatcaagatcatggccaagaggatgaggtaatcaggaagaatcaatggtgtccttctggtattttcacaaaaaatcagaagagaagggttcaaagattgaggaacagggagcgccttcaggaggttgaacaagaaatcaaccatcggctgaggaaaccaaagccaagacaggagtggcgtgttaagaatcaggttcctgtagccgatgatgctgcagccgatgaggcgaagaggaagttggataggaacgccgaggatctcatcaagacaaatatggtgctcaaatactttggtggtaatccatcggaaaccaaaggtgttctaaatgtggagctgacagtcggcagtaagactattcctaccacgttttttgtcatcgatgggaagggttcgtgcagcttgttgcttggaagggattggattcacgccaattgttgcattccttcaactatgcatcaatgcttgattcaatggcaaggcgacaagatagagatcgtgccagtcgacagccaattgaagatggagaacccaagctattactttgagggcgtcgtggagggttctaatgtctacaccaaggatacagtggatgatctcgatgacaagcaaggtcaaggtttcatgtcggccgatgagttggaagaaataaacataggtccaagcgatcggccaaggccgacatttattagcaagaatttgtctccagagtttagaaccaagctgatagagctcttaaaagagtttagagattgcttcgcttgggagtattatgagatgcctagactcagccgatcgattgtcgaacatcggctacctatcaagccaggggttagaccacgccagcaacctctgaggaggtgtaaagctgatatgcttgaacctgtcaaagctgagatcaaacgattgtatgatgctggttttatccgtccctgccgatatgctgaatgggtttctagtatagtttcagttattaaaaagaatggcaagtctaaagaagtagaggaccacatagccgatttaaggaaggttttcgagagaaccaaaaaatatggcttgaagatgaatccgacaaaatgtgtttttggtgtgtcggccggccaatttttgggatttcttgttcatgaaagggggaccgaggtaactcaaaggagcgttaatgcgatcaagaagattcagcccctggaaaataagacagaactacaagagatgatcggcaagatttctaacttgtctggaaggttgaggcattatctattatctaacgagtgcactgttatatgcaaagccgacgtagtcaggtatatgctatcggctccaatattaaagggaagagttggaaagtggatattctccttgactgagtttgatcttcggtatgagtcgccgaaagcgattaagggacaagctatagccgattttattgtagagcatcgtgatgattcaatcggctcggttgaaatagtgccatggactttattctttgatggatcggtatgtactcatagttgtggcatcggcttagttataatttcccctaggggggcatgtttcgagtttgcttatactattaaaccatatgcgaccaataatcaagctgagtatgaggcagtgctcaggggtttgcaattactcaaggaagttgaagccgataccattgaaatcatgggggattctttgctagtaatcagccaattggcaggagaatatgaatgcaagaacgatacattgatggtttataatgagaagtgccaggaactaatgaaagagtttcggctggttactttaaagcatgtatctcgagaacaaaatattgaagctaatgatttagcccaaggggcatcggggtataagccgatgatcaaagatgttaaagttgaaattgcagcgatgacagccgatgattggaggaaattaagatataaggcattaaagtatacactgttggatggtgaactttattatcagacgattgatggagtattacttaagtgcttaagtgccgatcaggctaaggttgcaatcggcaaagttcatgaaggaatctgtgctaatgggcaagccgaggcatctaataaaagtttgatcaaattgattaagcggaaaatttctgattatcctcggcaatggcatactcggttggccgaagcgttgtggtcttataggatggcttgtcatggatcaattcaagttcctccttacaaacttgtttatgggcatgaggctgttttgccatgggaggttagaatcggctctcgccgaactgagttacaaaacgatttaacagccgatgagtattacaaccttatggccgatgagagggaggatctggttcagtcacgattgcgagcccttgcgaaggttaccaaggataaggaacgtgttgctcggcattataataagaaagtggtacccaaagatttttcggaaggagaacttgtatggaagctgattttgcggattggtacttgtgatagtaaattcggcaagtggtcgccgaactgggaaggaccgttccaaattcataaggttgtgtctaagggagcatatatgttgcaagggcttgatggtgaagtctatgggcgagcactcaatggcaagtatttgaagaaatcttacccaagtgtttgggttaatgcatga

SEQ ID NO: 101746 - DNA, 717 bp, Oryza sativa
  Clone ID: PAT_MRT4530_99337C.1
ctttcgcgtccgcccacgcgtccggagcggtgcgcccacacgtggagcgcgcaccccggcgacatcagagctcgtcgacgccggggactctgcgcggcggctagggagttcgcccgccggagcaagggctgggcgggacaaagagaagaaatctgcagcgaacccatggcgattctgcccctctcgatttcccactctcttacctccgccttgtccgccacctcctccggcatcggcaggccagttgcccgcctcctccacccgcgggtcccctcccgtcccaccgtcatctgcctcgccgcgccgcccaaggtacccgtccccatcgcctcaccggcttcactaggggacgacccttccaaatgggacccggccgagtgcgacgcccttctccgcggcggcgagcaggtcgcctccgtgctccaggagatgctcaagctgatggaagacatggagatggatggctcgtttgaatcattggctgtggagttgatcgctcaaggagtcattgggaaaagagttgatgagatggaatctggctttctaatggcacttgattacatgatacagcttgctgagaaggatagtgacaatgagcgtaaatctctccttgaggtagtcaagcagacagtgctggatcatctcacaaaaaaatgccctccacatgttcaagtggttggacttctttgccagactgaaaagaggatagcagacatg

SEQ ID NO: 101747 - DNA, 792 bp, Oryza sativa
  Clone ID: PAT_MRT4530_99338C.1
tgggtggaggcgattcctttgaagaaagttgattctggggatgcaattcaattcgttcaagaacatataatctaccgatttggtattcctcaaactattataactgatcaggggtcaatcttcgtgtctgacgagtttgttcagtttgccgatagcatgggtatcaaattattgaattcttcaccttattatgcacaagctaatgggcaagccgaggcgtttaataaaagtttgatcaaattgattaagcggaaaatttctgattatcctcgacaatggcatactaggttggccgaagcattgtggtcttataggatggcttgtcatggatcgatccaagtccctccttacaaacttgtttatgggcatgaggctgttttgccatgggaggttacaattggctctctaagaatggaatcacaaaacgatttaacagctgatgagtattacaaccttatggccgatgagagggaggatctggttcagacacgattgcgagcccttgcaaaggttaccaaggataatgaacgtattgcttggcattataataagaaagtggtacctaaggatttttcggaaggagaacttgtctggaaattgattttgccgattggtactcgtgatagtaaattcggcaagtggtcgccgaattgggaaggaccgttccaaatttataaggttgtgtccaagggagcatatatgttgcaagggcttgatagtgaagtctatgggcgagcactcaatggcaagtatttgaagaaatattacccaagtgtttgggttaacgcatga

SEQ ID NO: 101748 - DNA, 203 bp, Oryza sativa
  Clone ID: PAT_MRT4530_99339C.1
ccgatgcggtggaggaggtgatggtaacggcagtgcccgctactcccgccgacgtttgtctagcaccctcggaggcggcggtagacggcgaaggcaccctcagtagtgatagtggacgacgacgccctcaatggcagttgtggacggcaacaacgatgcccgaggtcttccccccgtcggctcagctcttcatggagtcatag

SEQ ID NO: 101749 - DNA, 1406 bp, Oryza sativa
  Clone ID: PAT_MRT4530_9933C.1
gcacagtcaaaactaaagtgtactatgcatcaaattggacgcgataaaaagcatattgacacaaagaaatgtatacagtttcatcgccgccgattgtgctgctttctcttgtccaagcgactagaaagggttctacttcgacgatcgcggaacggacatacactgacgacgatgtcgtgggagggcaggcggcgacagggccggggaagtacgccgtgatattggacgccggcagcacggggacgagggtacacgtctttaggttcgacaggatgatggatcttctcaagatcggcgacgacatcgagttgttgttacaggtggttcctggactgagctcgtacgctggacgaccgcgggaggcagccaactccatacagcctctgcttgataaggccatccacgttgtccctaactggcttatgaagaaaactccccttaaacttggggcaactgctggactcatacttattggagatgaaaaggcaaaccagattcttgaagcggtcagagatgttgtccacaccaagagcaaatttcagtacaatccaaactggatcaatgttcttacgggatctcaagaaggatcttacatgtgggttgctcttaactatcttcttgatagactgggtgaagattactcgaaaacagtaggcgtgattgatcttggaggtggatccgtacaaatggcctatgccgtctcatcaagcattgctgctaacgccccagaggtgcctaatgggcaggatccctatattacagaggagtatcttaaagggagagattacaacatttatgtgcacagttacttgcattatggcgctcaggcttctcgcgtagagatactgaagagaaagaatgggccatttagcaactgcatgttgcgtggattcaaaggcaaattcacctacaacggggagcagtacgaagcaatggcagcaccacaaggtgcagactaccacaaatgcagacaagatgtggtgaaggcactgaacctagactcgccctgcgaaaccaaaaattgcagcttcaacggcgtgtggaacggcggcggcggcgttgggcaggacgagatctacgtcacatccagcttctactacatagcctccgagattgggttcatcgacagtgaggcgcccagtgcaaagtctacaccagcagcgtacaaggctgcatcagagaaggtttgtatactgagcatcgaagaagcgaaagcagcatacccaatagctcgtgatcacgcctacttatgcatggatctcatctatcaatacaccttgcttgtcgatggcttcggtctggatccaaataagaagataatgctggtaaacaaggtgaagcatggggagtactacattgacgcggcttggccattgggtacagctattgaagctgtatcacccaaa

SEQ ID NO: 101750 - DNA, 2948 bp, Oryza sativa
  Clone ID: PAT_MRT4530_99340C.1
atgccgatcgatccagagaaattcacgcctgagcagaaggcggagtttgaagcaaccctgcaacaggcacgggatcagttcctgaactcatttatgcagacccacgaggggacacttgttcaaaagtacaaaataaaagtggttactgatagtcctgggaccggttcttctaaagatggagaagtgaaacaagctccaggcggctcggctcagccgagtactaaaggtgctaccgacggctccccgagcgatcaaggcgacaattctcaaggagtccatggcgtacaaggtgatggtgctcaggagccacaaggagggaatcttaaccagaatagtgaactagcacaagattttttcaataacttccaagatcgggttgattacgctgtgcatcatgctttgatcaatcagtccggggtattagtcaatacattgtcaaacatgatgaagacaatagtcgatggttcgatagctgagcatcaggctgcaggcccagtttacttgcatggagtgcagcagcagccgattcagcagacaccaccaatccagccagttgtacaaccaatccaacaacagccacaaggagcagctcagcaacgaccgtgggccgatgtgattgccgatgtaatgagagaacaatttgggcttaaaccaaaagagactggaagcttgtatcggcagccttatcctgagtggtttgaaagagttcctctccccaatcggtttaaagttccagatttctccaagttttcgggacaagagggcgtgtcaacttatgagcacatcaaccgattccttgctcagtgtggtgaagcatcggctgtagacgctctgagatttaggttattccggttatctctgtctggatcagcttttacttggttttcctctttgccatgtgggtcgatcaatagttgggccgatttggagaagcaatttcacagctatttctatagttgggttcatgagatgaagttgtccgacttgacagcgatcaagcagcggcatgatgaacccgtgcacgagtatattcagaggttcagggagatgaggaacaaatgctttagcttgagtttaactgatgctcagttagccgatttggccttccagggtatgattcctccaatcagggagaaattatcgtccgaagactttgatagcttatcgcatctaatacagaagataaccttgcatgagcataggtcggcggaagtcaggagaagctctaagaaagttaatcatgtttgtccatacatgtatggatcagatgacgaggaagatgattctaaaatagctgcagccgaatgggtgaggagcaaaaaggtcataccatgccaatgggtaaaaagttttggaaaagaggaaaagtatgattttgatatcaccaaggctgacaagatctttgatttactactccgagaaaagcagattcagcttcctgttggtcatacaataccatcggctgaggaattaggcaagaagaggtattgcaaatggcataattctgggtctcattctactaacgattgcaaggtttttagacagcaaatccaagttgccattgaagggggaaagattaggtttgatgattccaaaaagccgatgaaggtcgatggtaatcctttccctgttaatatggtgcatacagccggtcaagcagccgatagggttcgtgcaaagggttttcgagtgaattcggctaggattatcaacaagtatcagaggaagtatgacaagcagcaggagaagcattatgaagaatacgacgatggttttgatcctcattggggttgtgagttctttagattctgttggaacgaagggatgaggttgccatccattgaaaactgccctgggtgcagtgatatcgttgagagctcgagccggtcatatagtagagccgatgaggcgaagaggttggcaaaaggraagaacgttgtagcagcaccaattaacatggtctttacattgccagccgaattcgggattgatcaggccgatgtcgatgaagtggaagagagatcggctaagttggtcctgtcaccagagcaagcagaattcgagaaacccgaggggacagggaatcgacatcttaaaccattatatataaacggctacgtcaatgggaagtcgatgtctaagatgatggtcgatggtggggccgcggtaaatttgatgccttatgctacgttcaagaagttgggtaggaacgccgaggatctcatcaagacaaatatggtgctcaaagactttggtggtaatccatcggaaaccagaggtgttctaaatgtggagctaacagtcggtagcaagactattcctactacgttttttgtcatcgatgggaagggttcgtatagcttgttgcttggaagggattggattcacgctaattgttgcattccttcgactatgcatcaatgcttgattcaatggcaaggcgacaagatagagatcgtgccagccgacagccaatcgaagatggagaacccaagctattactttgagggcgtcgtggagggttcaaatgtctacgctaaggatacagtagatgatctcgatgacaagcaaggtcaaggttttatgtcggccgatgagttggaagaaatagacatagatccaggcgatcggccaaggccgacatttattagcaaaaatttgtctccagagtttagaactaagctgatagagctcctaaaagagtttagagattgcttcgcttgggagtattatgagatgcctggacttagccgatcgattgttgaacatcagctacctatcaagccaggggttagaccacgccagcaacctccgaggagatgtaaagccgatatgctcgaacctgttaaagctgagatcaaacgattgtatgatgctggttttattcgtccctgccgatatgctgaatggggttctagcatagttcgggttattaaaaagaatggcag

SEQ ID NO: 101751 - DNA, 859 bp, Oryza sativa
  Clone ID: PAT_MRT4530_99341C.1
ttaaattacacgcaaaatagccctgaggccggtctgaccgtcgctgtccctgcggtctgaccggacctggctgccagtctgaccgtcggtacacttgcagtctgaccgctggccgtgaccggtctgtatgcctgtaccagtcccaggaaatagcgctggtacaacaggaagacagaatatcacaacaacagcggtctctttattaagagtaggattacaaccaaggttggaacagcaccggtgcaccaacagccacgaatcaaacacgtcggaacaagaggctccctgccaatcgttcaccgacaccggctgctccaacagcctcgaatcaaacacgtcggaacgagaggctccctgccaatcgttcaccgacaccggctcacatcctcccatgaccgtgggcacggctgttcgaatagttattaaccttgtgccaggaagcccaggggtcctccccgacaccaccccagcgaatccacttgtcccttggcagcaagatttccctggcttgccttgctcgagatcttgagcttcttcctcgaaatccgcccgccgcgccgctgcgggcgccccgcagccgagtggcgcggcctggtccggcctcccgagtgactcggggccgtccggcctcccgagtgactcggggccgactgggccggaccgagtgactcgggccgactggacacggaggccgagtgggccaaggaggggtgggaggccgagtggcccgaggccaactgggccgagcgggaaagaggccgagtggccgagtggagaggagggggccgatgggccgcggcaggccgcgacctacgcgggcggctggtccggtggaccgtgtccaccgcgcgggcgctag

SEQ ID NO: 101752 - DNA, 3418 bp, Oryza sativa
  Clone ID: PAT_MRT4530_99342C.1
atttgagggaggtaaggagctagggttcacgggagagagaggaagtaggccgggcgggaggaggatgatgacccggcgcatgggacccacgcagggagtgcggtcagcgcgcgtgcggcgcggtgacaacctatgtcaatttcttccaaatcatcagccgacacaaaaccctgtccttgcttgtcatcgagatcatctaatgtgtccttagtgtagacattcgaaccctccacgacgccctcaaaataatagcttgggttctccatcttcaattggctgtcggctggcacaatttcaatcttgtcgtcttgccactgaatcaagcattgatgcatagttgaaggaatacaataattggcatgaatccaatcccttccgagcaacaagctgtaagaacccttcccatcgatgacaaagaacgttgtagggatggttttgttgctgactgtcagctccacattcaaaacccctttggtttctgatggattgccgccaaagtccatgagcaccatgtttgtcttgatgagatctttggcatttctgcccagtttcctgaacgtggtgtaaggcatcaagtttactgcagccccaccatcgaccatcatcttggacatcggcttcccattaacgtaaccatctatatacaatggcttaagatgccgatgctctgtaccctctggcttctcgaaaactgcctgctccggtgataaaatcaacttagccgattcgtcttcaattttatcgacatcggcttgtttgatcccaatttcaacaggcaatgtgaaaaccatgttaaccgaagcagttacaacactttttcacttagccaaccttcttgcttcatcatccgtggcttcatcagctacaggaacttgattcttaacacgccactcctgcctcggctttgttttccttctcttctgattctttgtaaagataccagaaggacaccattgagttttcctgttttcattgtcctcctggccacgaccttggtttactggacccaatctttgatgaacaggaaccattgtctgccttagccgattgcccctgctatacaatcggcttgagctctccgcaatatcactgcacccaggacagtcctcaatagatggcagccttataccttcatcaccttcctcataatgcttctcctgctgtttgtcatacttcctctgatatttgttgataatcttagccgaatttacctgaaaccctcttgcacgacctccatcggctgtccagccagctgtatgtaccatattgacaggaaaaggattgccatcaaccttcatcggcctcttagaatcatcaaacttgattttgcctccttcaatagccgcttggactgctgcctgaagaccttgcaatcattagtagtatgagacccagaattatgccacttgcaataccttttcttgcccaattctttagccgatggaattgtgtgaccagcgggaagttgaatctgcttttctcggagtagcaagtcaaaaatcttgtcagccttggtgatatcaaagtcatacctctcctcttttctagaattcttcacccattggtatggtataacctttttgctccttacccattcgagtgcagctatcttagaatcatcatccccatcatccgatccatatatatatacatatatatatataaggacaaacatgattaacctttctagaattcttcctagcctctgcaaacctctgttcatgcaaggttaccttctgtgtaagatgtgacaagctttcgaagtcttcagatgagaatttctccctgattggagcaatcataccctgaaaagccaaatcgactaactgggcatcagtcaaacttaagctgtagcacttattcctcatttctctgaacctctgaatatactcatgcacaggctcatcatgtctctgcttgattgctgtcaaatcagacagtttcatctcatgtaccccactgtagaaatagctgtgaaaatgcttctccaaatcggcccaactgttaatcgacccatatggcaaagaagaaaaccaagtgaaagccgatccagacaaagacaaccagaacaacataaccctcaaggcatccatagccgatgcttcaccacactgagataaaaatcggctaacatgttcataagttgatgtgctatcttgccctgagaattttgaaaaatctggaactttgaaccgattaggtagaggaactctctcaaaccattcagggtaaggttgtcagtacaaatttctagcaactttcggcctaagcccaaactgctccttcatgacatcgtgccatctagttgtacatgatgaaccaaatgctccgggacaacttgatttgcagcatgctgcacaggctgaccaccaggtgtcgcaaactcggttgcacaacctgctgccttggcgttgtttgctgaatcggctgctgctgggttggatcaacggtatgttgaggaggtaagaacatagatgcaacctagtcttgtgttagccgattcacgttctgtccgctgtgttgtggttattctctcaccagcaaacggggattaaccaattggcctggtgccgacggagctgcaggaggtgcgggagccgatactggtgccgtcagctgagccgatggtgcattgtgagggattgactggacaactggttgattatcggtgattaatggccgataattcgggaaccctcctcctggtagataaaccggtcctgtagcttgatgctcagccattgaaccatcaaccattgattttaccatgcttgccaaagtattggttaatatgccagattgattgatcaaagcatggtgtacaacatagtcaacctgatcttgaactccctgagcaccatcaccttgaactccctgtactccttgagagttgtcaccttgatttccttgagaaccatatgtagcacctttatcactcggttgagccgagccatctggagcttgtttcacctctccatccttagaagaaccagtcctaggaacatcagcaactacctttaccttatacttctgcaccaccgttctcttgcgcgtttgcataaatgaacttaagaactggttacgtgcttactgcatcattgcttcaaatccttcttttgatcaggtgtcagcttgtctggagtgatggtcacgatgttgctctcattaacctcggacaggcctaactgctggatcttctctttaacagaaccggggctagccgaggacggtgatgctggtggcttctcctccatggagaaaaactgttgtcgcggttctgacttcttatcaggtccaactaggcgtgccaaaagcgtgttgatgaaaaacacgaggcttgggagatccgctttgttccagtgcaggtccaaaactcgcctccgggtatgctaacgtgccagttgatttgatcctgcaa

SEQ ID NO: 101753 - DNA, 817 bp, Oryza sativa
  Clone ID: PAT_MRT4530_99343C.1
atgagagaacaatttgggcttaaaccaaaagagactggaagcttgtatcgacagccttatcctgagtggtttgaaagagtccctctccccaatcggtttaaagttccagatttctccaagttttcgggaaaagaaggcgtgtcaacttatgagcacatcagccgattccctgctcagtgtggtgaagcattggctgtagacgctctgagagttaggttactccggttatctttgtctggatcagcttttacttggttttcctctttgccatatgggtcgatcaatagttgggccgatttggagaagcaatttcatagctatttctacagtggggttcatgagatgaagttgaccgacttgacagtgatcaagcagcgacatgatgaacccgtgcacgagtacattcagagattcagggagatgaggaacaaatgctttagcttgagtttgactgatgctcaactagccgatttggccttccagggtatgattcctccgatcagggagaagttctcgtccaaagactttgatagcttatcgtatctaatacagaaggtaaccttgcatgagcataggtcggcggaagtcaggaaaagctctaagaaagttaatcatgtttgtccatacatgtatgggtcggatgacaaggaagatgattctgaaatagctgcaaccgaatgggtgaggagcaaaaaggtcataccatgccaatgggtaaaaagtcctgggaaagagaaaaagtatgactttgatatcaccaaggcttacaagatttttgatttactactccgagaaaagcaaattcagctccctactg

SEQ ID NO: 101754 - DNA, 211 bp, Oryza sativa
  Clone ID: PAT_MRT4530_99344C.1
ggctgcaggaatcggcacgaggcccccctttttttttttttttttttttttttttttttttgtaattgatattctgatagagcgattcagttctgttgcaaataataatatttgcctatacaagaagcttcaaaaacaacatagacgaataatgtctaccacttactaatactactactactaagctttcaaataaatcaaagaattcata

SEQ ID NO: 101755 - DNA, 2706 bp, Oryza sativa
  Clone ID: PAT_MRT4530_99345C.1
atggctttgatcctcattggagttgcgagttttttagattttgttggaatgaagaatcagaaaagaagggttcagagattgaggaacagggagcgctttcaggaggttgaacaggaaattaaccatcggctgaagaaagtaaagccgtggcaggagtggcgtgttaagaatcaggttcctatagctgatgaggccgcagccgatgaggcaaaaaggttagctaaggggaaaagtgtcgtaactgcttcgatcaacatggttttcacattgtctgctgattttgggagcaagcaagccgatgtcgatgaagttgaagaagaattggctaagttgattttgtcgccagagcaagcgatttttgagaaactagtggggacaaagaatcagcatcttaagccattgtatataaatggttatgtcaatgggaagccgatgtccaagatgatggtagatggtggggctgcagtgaacttgatgccttacgctacattcagaaagttgggtagaaacgctgaagatctcatcaagacaaacatggtgctcaaagaattatgtggcaatccgtcagaaaccaaaggagttttgaatgtggaattgacagtcggcagcaaaactatccctacaacattctttgtcatcgatgggaagggttcctacagtttgttgctgaaagagattgattcatgccaattgtgcgacaggattgagatcgtgccagccgatagccaattgaagatggagagcccaaattgttattttgagggcgtcgtggaggactcaggagtctacgtcaaggacataatggatgatctcgatgacaagcagggacaaggttttatgtcggctgatgatttggaagaaattgatataggtccaggggttaggccacaccagcaacctccgaggagatgtaaggctgatatgcttgaacctatcaaagctgaaattaaacgattgtatgatgctggttttattcatccttgccgatacgctgaatgggtttatagtatagttcctgttattaagaagaacggcaaggtcagggtgtgcattgatttccgagatctgaataaatctacactgaaggatgaatacccaatgccagtagccgatcagctggttgacgccgcatcaggaaacaaaattttgagttttatggatggaaacgcaggatataatcaaatctttatggctgaagaagatatccataagatagcttttagatgtcctggtgcaatcggcttatttgaatgggttcttatgacttttggcttgaagagtgctggagctacatatcaaagagccattaattacatatatcatgatctaatcggctggttggttgaagtctacattgatgatgtggttgtgaaatctaaagaaatagaggatcatatagccgatttaaggaagtttttggggtttcttgttcatgagaggcggatcgaagtagctcaaaggagtgtgaatgcgatcaagaagattcagcctccagagaacaagacggaactacaagagatgatcggcaaaataaattttgttagaaggtttatttctaatttgtctaggaggttggaaccttttacaccattgttgagattgaaagccgatcagcagtttacttggggggaagagcagcaaaagggtttggataatattaaagaatatcttagctcttctcctgttttgattcctccacagaaagggataccttttagattgtatctgtcggctggaagggttggaaagtggatattttccttaactgagtttgatcttcggtatgagtcgccgaaggcgattaagggacaagctatagccgattttattgtggaacatcgtgatgattcaatcggctcagttgaaatggtgccatggactttattctttgatggatcgctgagtatgaagcagttacttaaggaagttgaagccgatgctattgacatcatgggggatactttgctggtaatcagtcagttggcaggagaatacgaatgcaagaatgatgtgttaatagtttataatgagaagtgccaagaattgatgaaggaatttcggctggttactttgaagcatgtatctcgagaacaaaatattgaagctaatgatttagcccaaggggcatcggggcataagccgatgatcaaagatgttaaggttgaaattgcagctatgacaatcgatgattggaggtatgatgtgcaccagtatttacagaatccatctcaatcggcttctaggaaattgagatataaggcgttgaagtacgctgtattggatgatgagctttactatcggatgattgatggggtgttgctcaagtgtttgagtgccgatcaggctaaagttgcaatcggcgaagtccatgagggaatttgtggcactcatcaatcggctcataagatgaagtggttgcttcggcgtgcagggtatttttggccgacaatgctggaggattgtttcagatattataaaggatgtcaggattgccaaaaaattggagcaatacaaagggcaccagcatcggctatgaatcctatcattaagccatggtcgtttagaggttggggaattgatatgatcggtatgataaatccaccatcgtgtaaaggacataagtttatattggtggcgactgattatttcaccaaatgggcagaggcgattcctttgaagaaagttgattctaggaacgctatataa

SEQ ID NO: 101756 - DNA, 643 bp, Oryza sativa
  Clone ID: PAT_MRT4530_99346C.1
aaggtagccttgcatgaacaaaggtatgcagaggctaggagaaattctagaaaggttaatcatgtttgcccttatatatatggatcggatgatgaggatgatgattctgagatagctgtagccgagtgggtaagaagtaagaatgttataccatgccaatgggtaaagagctcaggtaaagaggaaaggtatgactttgatataaccaaggttgataagatttttgacttgctactccgagagaagcagattcaacttcctgccggtcacacaatttcatcggctgaagaattgggcaagaaaagatattgcaagtggcataattctggatctcatacgactaatgattgcaaggtcttcaggcagcagatccaagcggctattgaaggaggcaaaatcaagtttgacgactctaagaggccgatgaaggttgatggcaatccttttcctgttaatatggtgcatacagctggccgaacagctgataggggccgtgtaaggggttttcagatgaattcggctaagattataaacaaatgtcagaagaagtatgacaagcagcaggagaagcatcatgaagaagacgatgatggttttgatcctcattggggttgtgagttctttagattttgttggaatgaag

SEQ ID NO: 101757 - DNA, 318 bp, Oryza sativa
  Clone ID: PAT_MRT4530_99347C.1
atgaaccttggtgctggatcggctgaacgatttgttgtcttaacggcgtctgctgaatcggctggagaggctgctgcattggtggtgtttgctgaactggttgaggcggcagaaacgtggcagcaacctgatcttgggtcagccgattcgcaacctgcccgccatgctgtggctgctctctcattaacaaccgagggttcactggctggtctggtgccattgctgacagaacaggcaggggagttgacgccagtgctgtcggctgagatgttggtgcaacggagggaaccgcctaagttgatggttgaacatcggtaa

SEQ ID NO: 101758 - DNA, 6027 bp, Oryza sativa
  Clone ID: PAT_MRT4530_99348C.1
ttacagaatcaaatcaactggcacgctaatacatccgaaggcgagttttggacctgcactggagttaagcagatctcccaggccacgtgttttctgtcaacacgcttttggcacgcccagtgggacttgattagaagtcagacgtcagttcttcctcatggccgagaaacaagcaccaccaccatcaagcccaggttccattaaaggcaaggcattgaagccaggattgactgacatcattgatgacaatgtcatgccaatcaatccagagaaattcacgcctgagcagaagcaggagtttgaagcaatgatgcagcaagcacgggatcagtatctgagctcgttcatgcaaacccgcaagggaacgcttgttcagaagtataagataaatgtggttgctgatagtcctggaaccggttcttctaaagatggagaggtgaagcaagctccagaaggctcggctcagccgagcaacaaaggtgctactgatggttctctaggaaatcaaggcgacaaccctcaaggagtgcacggagctcaaggtgatgctgctcaaggctttcaagatcgggttgattacactgtgcatcatgctctgatcaatcagtccggggttttagtcaatacattgtcaaacatgatgaagacaatagccgatggttcgatagctaagcatcaggctacgggcccggtttacttgcaaggaggtgtcttcccgaattatcgatctctggtcatcgatgttcaaccagctgtgcaagcggttccctctattgcacccacaactcagccaacggcgccaacatcaactcccttgcccgctacatcagctatggcgctaggccagccgatgaaccctcggttgttaatgagggagcatccacagcctactgggcagatcgcgaatccgccgacccatgatcaggttgctgccatgtttttgccacctccacctattgttgatccagtgcagcagcagccgattcagcagacactaccaatccagccagttgtacagccgatccaacaacacctggtgggcaacctgcgcagcaatttgtaaaccaagttgtctcagagcatttggttcaccatgcacagccggatggcacgatgtgatgagggagcagtttggacttaaaccaaaagaaactagaagtttgtatcggcagccttaccctgagtggtttgaaagagttcctcttcccaatcggtttaaagttccagatttctccaagtttttgggacaagagggcgtgtcaacttatgagcacatcagccgattccttgctcagtggggtgaagcatcggctgtagacgccttgagagtttggttgtttcggttatctctgtccggatcagcttttacttggttttcttctttgccgtatgggtcgatcaatagttgggccgatttggagaagcaattccacagctatttctacagcggggtccatgagatgaagttgtccgacttgacagcgatcaagcagcggcatgatgaacccatgcacgagtatattcaaaggttcagaaagatgaggaacaagtgctttagcttgagtttgaccgatgctcagttagccgatttggctttccagggtatgtccctccaatcagggagaaattctcatccgaagacttcgatagcttatcgcacctgatacagaaggtgaccttgcatgagcataggtcagcggaagtcaggaaaagctctaagaaagttaatcacgtttgtccatatatgtatgggtcggatgacgaagaagatgattctgagatagctgcagccgaatgggtgaggagcaaaaaggttataccatgccaatgggtaaaaagtcctgggaaagaggagaagtatgattttgatatcaccaaagctgacaagattttcgatttgctactccgagaaaagcagattcagcttcctgctggtcatacgatcccatcggctgaggaattaggcaagaagagatattgcaaatggcataattccaggtctcattctaccaatgattgtaaggtctttagacagcaaatccaggttgccattgaggggggaaagattaagtttgatgattccaagaagccgatgaaggtcgatgggaatccttttcccgttaatatggtgcatacagctggtcaagcaaccgatagggaccatgcaaagggttttcaagtaaattcggctaagattatcaacaagtatcagaggaagtatgataagcagcaggagaggcgttatgaggagtacgatgatgggatgaggttgccatctattgaaaactgtcctgggtgcagtgatatcatcgagagctcaagccgaccacgtaatagggatgatcggctgagacagacaagactccctgttcatcaaaggttgggtccgatgaatcaagatcgtggccaagaggatgaggtgatcaggaagaatcaatggtgtccttctggtattttcacgaagaatcagaaaaggaggaaaccaaagccaagacaggagtggcgtgtcaagaatcaggttcccgtagccgatgatgctgcagccaatgaagtgaagaagttggcaaaaggaaagagtgttatagcggcaccgattaatatggtctttacattgccacctgaattctggatcgatcaggccgatgttgatgaggtggaagaggaatcggctaagttggtcttgtcaccagaacaggcagtattcgagaaacccgaggggacagagaatcggcatcttaaaccattgtatgtaaatggctacatcaacgggaagccgatgtctaagatgatggtcgatggtggggccgcggtgaatttgataccttatgctacgttcaggaagctgggtaggaacgccgaggatcttatgaagataaatatggtgctcaaagactttggtggtaatccatcagagaccaaaggtgttccaaatgtggaactaacagtcggcagcaagactattcctaccacgttttttgtcatcgatgggaagggttagtacaacttgttgctcgaaagggattggattcatgccaactgttgcatcccttcgactatgcatcaatgcttgattcaatggcaaggcaacaagatagagatcgtgccagccgacagccaatcgaagatggagaacccaagctattactttgagggcgttgtggagggttcgaatgtctacgctaaggatacagtagatgatctcaatgacaagcaaggtcaaggttttatgtcggccaatgatttggaagaaatagacataggtccagagtttagaaccaagctgatagagttcctaaaagagtttagagattgctttgcttgggagtactatgagatgcccggacttagccgatcgatcgttgaacatcggccaggggttagaccacgtcagcaacctccgaggagatgtaaagccgatatgctcgaacctgttaaagctgagattaaacgattgtatgatgctggttttattcgtccctgccgatatgctgaatgggtttctagcatagttccagttattaaaaagaatgacttgaataaagctacaccaaaggacgaatatccaatgccggtagccgatcagctggttgatgccgcgtcagggaacaaatttttgagttttatggatgggaatgcaggatataatcagatctttatggccgagggagatatccataagacggcttttagatgtcctggtgcaatcggcttatttgaatgggttgtcatgactttcggcttaaagagtgctggagcaacttatcaaagggccatgaactatatatatcatgatttaatcggctggttggttgaagtctatattgacgatgtggttgttaagtctaaagaagtggaggaccacatagccgatttaaggaaagttttcgagagaaccaggaagtatggcttgaagatgaatccaacaaaatgtgcttttggtgtgtcggctggccagtttttgggatttcttgttcatgaaagggggattgaggtgaaccaaaggagcgttaatgcgatcaagaaaattaagcccccagaaaataagacggagctacaagagatgatcggcaagataaattttgttagaaggttcatttctaatttgtctggaaggttggaaccttttacacccttattgaggttaaaggccgatcaacaattcacttggggagcagagcagcaaaaagctttggataatatcaaggagtatctcagctctcctcctgttttgatccctccacagaaaggaatactgtttaggttatatttatcggctggcgagaggtcaatcggctcggttctgattcaagaattggaagggaaggagcgagttgtgttctatctcagtcgacggctcttggatgctgagactcggtattctcctgtggaaaagttgtgcttgtgcctgtatttttcgtgtacaaggttgaggcattatttattatctaacgagtgcactgttatatgcaaagccgatgtagtcagttacatgctgtcggctccaatattaaagggacgagttgggaaatggatattttctttgactgagtttgatcttcggtatgaatcaccgaaggcgattaagggacaagctatagctgattttattgtggaacatcatgacgattcaatcggctcggtggagatagtaccatggactttatattctttgatggatcggtgtgcactcatggttgtggcatcggcttagttataatttcccctaggggggcatctttcgagttcgcttatactatcaaaccgtatgcgactaataatcaagctgaatatgaagcagtgcttaaggggttgcaattactcaaggaggttgaagccgatactattgaaatcatgggggattcttatctagtaatcagccaattggctggagaatatgaatgcaagaatgatacattgatggtttataatgagaagtgcctggaactaatgaaagagttttggctggttactttgaagcatgtatctcgagaacaaaatcttgaagctaatgatttggcccaaggggcatcggggtataagccgatgatcaaagatgttaaagttgagattgcagcaatgtcagccgatgattggaggtatgatgtgcatcagtatttgagtaatccatctcaatcggcttctaggaaattacgatataaggcattgaactatacactgttggatgatgagctttattatcggacgattgatggggtattacttaagtgcttgagtgccgatcaggccaaggttgcaatcggtgaagttcatgaagggatctgtggtactcatcaatcggctcacaagatgaagtggttgcttcggcgtgcagggtacttttggccgacaatgctggaagatttattcagatattataaggggtgtcaggattgtcagaagtttggagcaattcagcgagcaccggcgtcggctatgaatcctattattaaaccatggcaatttagaggttaggggattgacattatcggtatgataaacccaccatcgagtaaagggcataaatttatattggtggcaactgattatttcaccaagtgggtagaagcgattcctttgaagaaagttgattcgggggatgctattcaatttgttcaagagcatataatctatcgatttggtcttcctcaaactatcactatggatcaaggttcaatcttcgtgtccgatgagtttattcagtttgccgatagcgtgggtatcaagttgttgaattcttcaccttattatgcacaagctaatgggcaagccgaggcatctaataagagtttgattaagttgatcaagcggaagatttctgattatcctcggcaatggcatactcgattggccgaagcattatggtcttataggatggcttgtcatggatcgatccaagttcctccttacaaacctgtttatggacatgaggctgttttaccatgggaagttagaatcggctctcgacgaacggagttgctcaatggcaaatacttgaagaaatattacccaagtgtgtgggttaacgca

SEQ ID NO: 101759 - DNA, 968 bp, Oryza sativa
  Clone ID: PAT_MRT4530_99349C.1
atggccgagaaacagccaccaccaccatctagcccaggctccgttaaaggcaaggcgttgaagctgggattgactgacatcattgatgacaacgtcatgccgatcgatccagagaaattcacacctgagcagaaggaggagtttgaagcaacgctgcagcagaagtataaaataaaagtggttgctgatagtcctgggactggttcttccaaagatggagaagtgaaacaagctccaggtggctcagctcagccgagtactaaaggtgctaccgacgactccccgagcgatcaaggcgacaattctcaaggagttcatggcgttcaaggtgatggtagtcaggagccgcaaggaggaaatcttaaccagaatagtgaactagcgcaagattttttcaataacttccaagatcgggttgattacgctgtgcatcatgctttgatcaatcagtccggggtattagtcaatacattgtcaaacatgatgaagacaatagccgatggtttgatagctgagcatcaggctgcaggcccagtttacttgcaaggagcagccgattcagcagacaccaccaatccaggcggttgtacaaccaatccaacaacaggtcgtacaaccattcagtagacgccaccaaggcagcagcctcagcagccgatccaacagactccgttgagacagcagatcgttcagccgattcagcacccggggtcagtgaatgcatcggccgggttcacagtacctggtggtcagcctatacagcagtttgtaaattaggtcatcctagaacatttggttcaccatgcacagccggacggcacagtgatgcctcagatggttcctgaacacttggtgcgcaacatccagccgaatcttcataattaccaagggggtaactgtcacgcccggaattccgcacccgagggcgcgggcggctgacggctgggccccacatggcagccgcgggg

SEQ ID NO: 101760 - DNA, 426 bp, Oryza sativa
  Clone ID: PAT_MRT4530_9934C.1
cccacgcgtgcggcggaaaacctgctctcctcctgctcatcctgctcccaattgggccggcaccaataaagtacacaatgcggagcgcccccgccgaccccgacgccgaggaaccctaaccctagctctccccgccgacgcgatggagggcggcggcgccagcgcacacgccgggatcaaccgggtgctgtggacggaggccgagatcgccgaccggatgtcggaggtggtcgacgagctcgccgccgacctccgcgccctgcgcgagcccgacgacgtcgtcggcgtcgccacgggggcgctgctcttcctcgccgacctgcaacgacgtgtcgacgcgccgctcgccgcggacctcgagcgcgccgagacgtacggcgactgcaccgagtgcagaggccggccagggatcaccttcaacctcaa

SEQ ID NO: 101761 - DNA, 453 bp, Oryza sativa
  Clone ID: PAT_MRT4530_99350C.1
atgtcgacagaaaagcaatctccatcgtcggcaagcaagccgccgattcctccgcaaaccaagcttccgaaaccttcagggactaatctaccatcaaccggggctaagtccacggtcaatgagacaaacatcgtcccagttaccggaaaagttgttcaaaaatacaaagtgaaggtagttgctgccgatgaggtcggaacaagctcatctcaaagtggtaaaagtgcggcagatggctcgggcgacaagggtgacggccttcaggatggtgtggttgaagacctttgtgaagatggtgccaaaatacaagaagaacctcctaggcgcatgaatttccaagaccaagtcgattacgccgtgcaacacgccttgatcaaccagtccggggtgctcgtcaatacattgacaaatatgatcaaatctgtgattgacggcacaatagctgaacactag

SEQ ID NO: 101762 - DNA, 259 bp, Oryza sativa
  Clone ID: PAT_MRT4530_99351C.1
tgctctatgcgatatattcataactctcttttgtagatcaagatcacttactggctcaaaccaacctgagccatctaatatgattgcagccatgccatgtcttggagagcaaacacctccagttgcaccgaaaaaagccaagagcaagacaaagggaaagccaccatgttctgctgttccaaacagcccagctatgggcacaaggagcaaaaataagagccctgcaatgggcactaggagcaaaagaaagcttatggac

SEQ ID NO: 101763 - DNA, 1054 bp, Oryza sativa
  Clone ID: PAT_MRT4530_99352C.1
ccggggatcctctagagtcgacctgcaggcatgcaagcttggcgaggatgcagccggtgctccagaggtcgacggcgattgcgtcggacggcagcggcgagtggtggactcgccctcggttggcttcgacgtgcggggcgaaggcttgccgccgccgtcggcgtcggaggtagaggacgtggacggggctccggaagcttckccgccttcggaaggaggaagcggcggcggggactcgtcgccggcgatctccgccaggaccgccatcctttctctggtgaacggcgttttgagggatcggtgacgaagcagcggaggagcggtgcgtgctgccgggaggttgcgacggtggcggcggggactgggacgacgatgacaacggcggtggcgacggcttagcgagagaagagggagcagcgtgcggcgacgtcggtggtggaagaggagggagcggcacgcggcagcgtcaacggcgggagacgaggaagcggcgtgcggcggtgtcggcggctagagaggagggagcggcaggcggcgcgcggcggcgtcagcggcgagagaggagggagcggcggtgggggtgggagagggagggggaagagtggggagttcgccgccttaagagtgattgccgtgggaggcggcagcccggcggtgggcggcggatcgggcgggcggccccaccgaagccgcggggtcgggagcgggcggtggaccggtgtaggcagcgggggtaaagcagaaggattgataggaggaggcggccggtggtggtgccccgccgccggagacggggaagacggccgccatcggcttgagcaagaagaggacagggaagggagggggagggtgaggggtggggagggaagggggccggccggggggcctcgccggcgccgttgactcccttcgacccgccggcgaggcgggcggcgggggatcaggcggtggcaagatgggcgcgcgaggggagcggcagcggcggaatgcgcgagggggagggggatcgggaggaaaagttagggttagggctgtacacgaatctcaaagcata

SEQ ID NO: 101764 - DNA, 693 bp, Oryza sativa
  Clone ID: PAT_MRT4530_99353C.1
atgcccaggccgtcgaggcctagcatgaccacggctgacgcgctggggaccccgtcgtcacggcgaggagccgaggagcatggaggctgtcccggggcgccggcctgggggcgagggcgcaaggccgcgccagcctgggcgcgcggcgacggggcgtgccggcctggggcgacggggcgacgggccgatggggcgccggcgaggctaggcggcggcgatggctacggcgaggccaggcggcggcagcggcgtgcggctagggttagggtgcggctggcgtgcggcaaaaacagggagagagcaggagaagagagaatgagagtagagctgaaaatagagcaggggcaaattagtcattttcatacatgggtctcatatataagcaacaacatttttagtggcatagaggtaaaagactccatcgttgacctctcgtctccctcggcgtcgacgaggttgtcggcgcggacgtgctcgttcgccaacgacacgtccagctctgtggactcccaacgcccaacggcaagcccaacacgggaggctgtacaagggacacccctctccacgccgctggagcattcgcccgctcgccagcgccgctgctgctccagccttcgcccgcttgccagcgccgccgctccaacacccgtcgtcccgctcactaccgccacggtcgaaggggaaaagaaatga

SEQ ID NO: 101765 - DNA, 159 bp, Oryza sativa
  Clone ID: PAT_MRT4530_99354C.1
atggcggagcggagcctgttggcgagctgtcagcaggctgcaactctcctggccttctgggacacctcgggctcctttggaacaaagggttttaaaaattttgaagaaattcaatcatatggaaagctttccactaaggccctttcatcgaagaaatag

SEQ ID NO: 101766 - DNA, 477 bp, Oryza sativa
  Clone ID: PAT_MRT4530_99355C.1
cgtacacttgcgcgccgctgaattcctaaccctagcccttgcctccgcctctcctccatggccgacgcccccgcgtccccgttcgcgtagccctccatgggatccgcccgcgccgacgacgacgaagggaggagaccgaccgggggagaagaatgaggtgctgcgccagccgagtggcgtccgccgggtgccggtccatgggagttgcgggtggggtgaaggcgacgttgctattctgagccgccgccgccgggagttgacgtcgtcggccccgttctacgagcccttgaccgagcgcccggtgatcctatataattaactgggcgacctacgccgtctatgctgcgatgtgtcggtcgcacgactgtacctgctgaccgacaagcgtagcgaacgctctcaccgatccacgcgctgacccggccttctcctttggctcatatagctctgcttactctctgcttgctgattctatag

SEQ ID NO: 101767 - DNA, 467 bp, Oryza sativa
  unsure (1)..(467): unsure at all n locations
  Clone ID: PAT_MRT4530_99356C.1
cgtgaatgcagttgaatgtgctatgctgagaggctgatgtgcttgagtgtgcctggggaccgtgatggcctggtgcgctgttgactgcatntgggtgttgccggaatngtgttgggtgatggaacattgccatgacatcctgggaatggacaaccatgggatgacgtgatgtgcaaatggggtnggttgctgcgtggtgcagggactgtgttgctgggtgccttgcatggttgcgtgctncctattggttgcgtaacgcacggcancacagggcctgcgtgcgggtgcgtgaacctgtggccccanatactggtgataatgttggagctgagagctaccttgcgtgatggattgaatgctgcttggtgacccnaaatgtgcatgcagtgataaaattgggatcgatggaaaaagaacaataaataggaaaaaaaaagagtaaattccaagagaaaaaaaaaaaaaaa

SEQ ID NO: 101768 - DNA, 455 bp, Oryza sativa
  unsure (1)..(455): unsure at all n locations
  Clone ID: PAT_MRT4530_99357C.1
cgggccggccggggtacgcgtgggtgnagactgtgagagagtagggcatttgtcaggagaataaataaacaaggtgtctatatcttcagctgatttttattaaagtatatatgatggttgtggttttaattacatttattctaccacaataagtccagtgaatcacatattgcttgtttgaggacaactgtttgatcttgcacgaatctaatctgttgaactagctggagattcagttgtatattttggaatcgcatattccttatctacagttctacacatttgcgcttgaggcgtgatagttatattttctaacctgtgggatgactatgtatgtgcctggaagactggaccttattccatcgtaccaaagaccaaggaagcagctgatttatagttttgacaacttcgcaggtagcaataagcccccttgggnctaggttgctccgcatttt

SEQ ID NO: 101769 - DNA, 1782 bp, Oryza sativa
  Clone ID: PAT_MRT4530_99358C.1
atggcgttggctggattgcccctctccgtctttgccatcgctgtccatttttgccttgttttctcctcctcctcttctcctccggtttgccctgcaaacggccaccgtgaccgaacggcgtaccacttccaacccgccaagaactggcagaacgggcctgtgtactacaatggcatgtaccacctcttctaccagtacaacccgcacggcgcgctctgggacgtcggcaacctctcctgggggcactccgtctccggcgacctcgtgaactgggccgccctcgacaacgcgctcgatcccacagcgccattcgacgccaatggttgcgcgtcggggtcagtcaccatcctccccgacggcgtgcccgtcgtcatgtactccggcatcgacgcccgccgccggcaggtccagaacgtcgcgttccccaagaaccctcgcgacccgctcctccgcgagtggaccaagcccgggtacaacccggtcatccctgtccccgccgacgtctcgccggacaatttccgggaccccaccaccgcctggctcggcagcgacggcctgtggcggttcgccatctccgccgtggccgacggcgtgggcgcgacgctcgtgtaccggagcgccgacttcctgcggtgggagcgcaacgcggcgccgctgcacgcctcgcgggacgcggtcatggccgagtgccccgacctgttccccgtcgccgagcacggcgaggacgggctcgacctcgacgcgtcggcgatcggcggcgccggcgccggcgtgaggcacgtcctcaaggtcagcatgccggacaccctcgaggactactacatggtcggacggtacgacgacgcggacgacacgttcaccgtgccgccggaggacctggaagcccacggcgatgactaccggcggtggcggcggatcgaccacggccacctgtacgcgtccaagacgttctacgacgcgggcaagaaacggcgcgtgctgtgggcgtgggtgaacgagtccgacagcgaggccgacgacgtcaccaagggctggtccggccttcagtcgtttccgcgggcggtgtggctggacgagggcgggaggcagctggtgcagtggccggtggaggagatcgagacgctgaggcggaaacgcggcgttctgctcggcggaaacgaggtggaggcgggcgggctgcgcgagatcggcggcatcgcgggctcgcaggcggacgtggaggtagcgttcgagatcgcgagcctcgcgggcgccgaccgcctcgagcccgaccatttgcgtgaccccgacgcgctgtgcggggagaatggcgcggcggtgcacggcggaatcggcccgttcgggctgctcgtcatggcatccggcgacctgcgcgagcgcaccgccgttttcttcagggtgttcaggctctcgcacgggtacacggtcctcatgtgcacggacctgacacggtcaacttcaagagcaggggtgtacaagccatcccacggaggattcgtggacatagacatagagaaggacagggctatatcgcttcgaaccctgatcgatcattcgatcgtggagagttttggcggtggggggcggacgtgcatgacggctcgagtgtaccctgaacatgtagcaacggggagcagccacctgtacgtgttcaacaatgcgtcagatgcggtgaaggtgtccaagctggaggcatgggagctcgcgacggctagtgtcaatgctggagacgacgggctgatttcgtatggtggtcctgtatgtgctgctcaagtgcagtaa

SEQ ID NO: 101770 - DNA, 309 bp, Oryza sativa
  unsure (1)..(309): unsure at all n locations
  Clone ID: PAT_MRT4530_99359C.1
agatacggcaccaataccaatctctgactcctccggcctccggcggccggcgagagagatcccaccctcaccgacgacgncgagcgaccaccatgtcctcctccaccttcagcggcgatgagaccgcccctttcttcggcttcctcggcgccgcctccgccctcgtattctcctgtaagctcccaatcttccccttnactttctcggggccagatctgatctgagatgaggttgacacacgacgcatgcaaggcatgggcgctgnctacgnaccgccaagagcgacgtgggcgtggcgtccatgggggt

SEQ ID NO: 101771 - DNA, 399 bp, Oryza sativa
  Clone ID: PAT_MRT4530_9935C.1
ggggacaggcccccaggaaaattcaaaaaattctttcccgggaaaaaaaaaaaaaaaggtgggaaaaaccggggtccttaataaaaaaaccccccccatgggggcccccctttggaagggccccccttaaaaaaaaaaaaaaggggggggggacccaatttttctttgaatggaaaggttttttagagaaattttgtttggcagttgcgtggccaaaaaagggttaaaaaatttttactttaaaggggccaaaaaaaaggggctttgggggggcccctgaaagaacggcctaagctgggggaccccagggggggggggcttaaggaaaaaaaaaaactgtttaaaccccttttgtttccccttggggccaagggaaacaaaaagtttggggcccccccc

SEQ ID NO: 101772 - DNA, 411 bp, Oryza sativa
  unsure (1)..(411): unsure at all n locations
  Clone ID: PAT_MRT4530_99360C.1
ctgcaggaattcggcacgagctaaacaacatgcaatgagaagataacaaactaccatatggattgatacaatacgggagagtcttatttttgtaatctgggttcaaacggatgaattatttcctcagctcatcaatgtgcaaatgtgacaattgttgcgctggtcatttggtgtgaaaaaaagaaaaagctaaagcccctcgttacagataagatttgttaagccgggccattcattcgatttgaagaggaatggctcctgtgtggtgttgattgtctcctgtagttttgttgcgtcaaagtttttccatagcaaatgatgtgtaacattccaggtggaactcctttatttgttccatgaaatctgaaaagcatttggacaaaaaaaaaaaaaaaaaaaaaaaaanaaaaa

SEQ ID NO: 101773 - DNA, 357 bp, Oryza sativa
  Clone ID: PAT_MRT4530_99361C.1
atgggacaaggaaaggagaaaaaacaaaaacactacatcaaaacggttttcgaaatcacagaagacataggtggtgtgttccagccgaggcttgagctcacctttcttcaactgggcgtgaagacaggggtttcgatcctagggccaactaatgctctgataccatctcctgtcacaccccaatctgataccgccgtacaacggcacctgacaggagcgtgtcgtagggaaaacggcgtgaaccgcttcctacgaaaccgcgatctcggttgcagctcagaacaacccgagaatgcaaccgacgacacggacgaggaaacaccaacaacagcagcagcagcggaaccaacgaactaa

SEQ ID NO: 101774 - DNA, 1192 bp, Oryza sativa
  Clone ID: PAT_MRT4530_99362C.1
cccgcgtccggcccctccagcccgcgtcctcgtgcctccttccgcgcgccgccccctagctctagagccttccctctcctcctcctccacatccaccggagagagtgtgtttattggttcttggaggagagatgtccaagatggcggaggagaaggtgctggcggcgccggccaccgtcgacggcgggatgcagtcctccggggacctgcaggcttcgtcggcggcggcggcgcgtgtgcggcccgtcgagacgctcctccgcgccgcgccgctggggctctgcgtcgccgccatggccatcatgctccgcaactcggtcaccaacgagtacggcaccgtctcctactccgacctcggcggcttcaagtacctggtgtacgcgaacgggctctgcgccgcctactcgctggcgtcggcgttctacatcgccgtgccgaggccggcgacgttgtcccgctcctgggtcgttttcctcctcgaccaggtgttcacgtacctgatcctggcagcgggggcggcgtcggcggagctactgtacctggcgtacaacggcgacaaggaggtgacgtggagcgaggcgtgcggcgtcttcggtggattctgccggcaggcgaggacgtcggtggccatcaccttcgcctccgttgcctgctacatcctcctctccctcatctcctcctaccgcctcttcagcgcctacgacccaccccagccttccctcggcaacaagggcgtcgagatcgccgccttcccccgctgatcgccgccgccgccggagacgaagaagaagacgaccacccagacgaccaccaccaccacgacatccccagctactaagcttgagctgctgcgtgcttgggtactactactagctaggcgagagcatgattaagtaataataataagtacttttatctctccagctaaatatatagtgatgagtgctttttaatttcttcttgtgctctgttatatatatatgtgattatctctgacctgatcatgatcatcgtcgtcatatactcatatatctctactcgaactcgtggtatgtatggttgttgattcgatcagctgtggtgaactgattgacccgttacaaagattgcaaactggatatgtatctgcggttagagaatgggtggtctaatttgagatcttgaatgggtgttgcttaaaaaaaaaaaaaaa

SEQ ID NO: 101775 - DNA, 530 bp, Oryza sativa
  Clone ID: PAT_MRT4530_99363C.1
gcagataaactaactagctaactgatttacctaatggcacacgtagacccttttttaataaaaccaaaagaaaaggaatgccttcagcatctgttcttatgatgacactataacattgtaggccattccacatttctctacacaatgatcataagtcactgcatttctgaataactttaccacaaccttcatacctgcaacactctgacacctcaattaaactggagaaaacataaactgaaacgcatggtaatatacagaaacatgtggatccttttaagcatgagcatattcaggggggcttctggtctcaagttcaattgggagtccaagaacaggtatcggaacaggatctttcctgtaaccttcttcttcgcagcacaatttccacctgaactgcctcactagttagtgcatggttaccaatatctcggtcctcgcaaactcgtttccagggcacattcttgggcctcccccaaatggcacgaagcaataaggtgggattgaagtggtggttgtcaaatctagta

SEQ ID NO: 101776 - DNA, 966 bp, Oryza sativa
  Clone ID: PAT_MRT4530_99364C.1
ttggttttttttttttttgggggatcaggttatatataatcacatatttatataacagagcacaagaagaaattaaaaagcactcatcactatatatttagctggagagataaaaggacttattattattacttaatcatgctctcgcctagctggtagtagtacccaagcacgcagcagctcaagctcagtatctggggatgtcctggcggtggtggtcgtctgggtggccctctttttttttgtctccggcggcggtggcaatcagcgggggaaggcggcgatctcgaccccctttttgcccagggaaggctggggtgggtcgtacgcgcttaagaggcggtaggaggagatgagggagaggaggatgtagcaggcaacggaggcgaaggtgatggccaccgacgtcctcgcctgccggcagaatccaccgaagacgccgcacgcctcgctccacgtcacctccttgtcgccgttgtacgccaggtacagtagctccgccgacgccgcccccgctgccaggatcaggtacgtgaacacctcagtgagctcgacacagacataacggaaattcgggaacgaaatttcaagaacatctgaaatttcaggaatttccatcctctggtcgaggaggaaaacgacccaggagcgggacaacgtcgccggcctcggcacggcgatgtagaacgccgacgccagcgagtaggcggcgcagagcccgttcgcgtacaccaggtacttgaagccgccgaggtcggagtaggagacggtgccgtactcgttggtgaccgagttgcggagcatgatggccatggcggcgacgcagagccccagcggcgcggcgcggaggagcgtctcgacgggccgcacacgcgccgccgccgccgacgaagcctgcaggtccccggaggactgcatcccgccgtcgacggtggccggcgccgccagcaccttctcctccgccat

SEQ ID NO: 101777 - DNA, 2658 bp, Oryza sativa
  Clone ID: PAT_MRT4530_99365C.1
atgagcgtgcaggggacgcagaggctaggcgcggcgcagccggcggctgcctcgacttaattcgtgggccatgcgtccggccacttttcgggtggagccatgaggcggtcccggatgtggccaaggatattcgtgctcgggatgctgcaattaaggaaatagcaaataaatgaacaggcattgcagtggctgcgtgagctgctgattctgcagcccagaaaaagtatgaacagagaagactgctttgttcggtgagcgagcgcctaagacaagcaatggaaagacaaatggaataatcaatgctcaagctaagacaatctgaagaaaaggtaattagcttgagtaaagagaaggaccaattgctgaaggaaagagatgctgcacttcaggaggctcatatgtggcgcactgagctagggtaaagctagagcagcaagtcagtaatacaagaagcaactattgccagagcagatgagaaggtaagggcatctgaagcagatgctgcagctcggataaaggaagctgctgaaaagttacatgctgttgagaaagaaaaagaggagcttctatcccttgttggtattcttcaatcacaagtccagagagagcaaagcagcacgaagcaggtatgcgaagagagatctgaatcatgctccggcaccgataactcccctcccttgacaaagcacgtcgatgcatcagatgacgatgtcgacaaagcttgtgtgagtgactcaagatctgtcctagtttccaatgataacactgaagtccaactggccgtggatggggtcgacatccgtcctatcggtgatgcggagtggggtagtttccagcagtcggaagcattgatcgccgatgtgcgggaggtctccccagaatcagaaggcggcagcttggatatccctgtggtcaaccccccaccagtgagcgatcatatccagggaggcgcaacccacccctgaaggcctggagccaaatacattctgggattgttgtgattattgaggataaccgactgggatttgaatcctttcgagaattgctgtggcaggagttcgcaccggtgcctggttgtatgttcattgtattaaaactatacgactcaaataaaagatagcggtggcttgtgtgtgtaaaaaaaaagaaaaaaacaatcttttataatcttataattagaatatataaatgtactagaaagcaataagccagcagaaaccaaggtctataataacggacagcgataatgcaatgatgaaagcaatctgccaagtgctcccagataccgaccatcgtgtatgctcgtggcatatcgagagagtagagcattatgaggtatgtgtttctgaattgcgtgaaaaagtggctgagtttgattcgaaagcatctcaatcatggcctgctactatcactgatagtcctgaaatcgaagagtctgcagggcatattttcacatctgcaaattttgatctagttcaaaaggagcttcagaagttagatggtctccatgttgatgtagtacaagatggtaagggtgagaggtacatggtgacatctaagcaaaaaagtgcgagaaaatgctatgttgattacactcgcattggaggaaaccatgatattaggtgcagttgccgaaagatggagcgtgaagggatcccttgcaagcatattctctcggtattgaagcatctggaggtgaaggaaatcccaaagtgttgtgtgctgcagcgcctatcgaagaacgcaaaagccggtcttccttctgttcgaaaaagtgatttgcatgtttggacagagaaacaaaagaattattatgaattgaatgctcgagggtccgaactttttgacttggcatccaatagtcgtgagttgtttagggaggtgaaagaatacatggagagtcaactatcaaaaataagttcttctaatgcagcaaccaagaagcacacgcatgttgacgaggttggtgaaacatcacataggcctgaaggatctgttttagatcccatctgtgtagccacaaagggtgcacctaggagaatgaaaggatgggatgagcatcggccaagattgtgcagtcgttgtcaccaaccaggccatgacattcgccgttgtccagaggcaaagcgagaagaacaagatttggcccttattgagagtctgaaaattgctgtaatattgtatgacataaatttacactgtttggagactcttcgggtgaaagatgaggagttgcagaatttggccaacaatattcgtgctcgggatgctacaattaagaaaatagcagataaattaacacagactgcagaggccgcggaagctgctgcttctgtagctcatacgttggatggacatagaatacttctatgttcagagattgagcgcctaagacattacaagcaatggaaagacaaatggaacaatccatgctcattattgagcaaagagaaggatcaattgctgaaagaaagagatgctgcacttcaggaggctcatatgtggcgcactgagctagggaaagctagagagcaagcagtggtacaagaagcaactattgccagagcagatgagaagttaagggcatctgaagcagatgcttgggtgtactatctccatattgctatctgctattctgctgtagtagtgcctgactaa

SEQ ID NO: 101778 - DNA, 1636 bp, Oryza sativa
  unsure (1)..(1636): unsure at all n locations
  Clone ID: PAT_MRT4530_99366C.1
caggaattcggcacgaggcttctcccctctcctctcctgcttctcgcgcccgccccgccgctcccgcggggcgaaccgggggaaaggcggccgtctcgcgtcggcgagatttctgttttacaaggttggtggtgacgattttgctatccacttagccgaccagagtgaatttggaagttgcaatgggtgaaaacgctcaaggtagtggtcgccgcccctttggagatttaacaaatgtccttggcaagcgcccagccccatcgaatttggagaaaagtgcaggtggaatcaagattgtccgggttgaaaaggctgttgagccaagaaaagagtttgatgaaactgcaaaagcaagtggtggagcgacacgaaacacattgcccctttttgatagtattgccaaagagaatttaatgaggccctcaatttttcgggaaactaagatgcagcacatggctgctgaggcagctgtgttgctatccaaggaatccgatgacatgaggagttgtgccatgtcattaggctcatctggcttgcatgataaggagcaggagtcttcgctggaatcagaaggtggctgtgaagaagatgatgatgatgacatggatagtgaatacttggcatataccagagatagtactaaaacggcaactaatgatggtgaatgtcttactcaagaggagatggctggatcatcagggaatcagaagccactatcttcactggacttcacaacaggttgtgatgacatgccatgttccgatgtccatcaccattcactgggaaatagtgaactggaaaatgacgataccactaagtcgtgtgcttgttctttctgtcttaaggcattgaagaagagcataaagttcgctagattgctgggcaagagaagccaaggagatgaatattctgttaatgcaggcagatacaacttgaaacgggctgcagagatggagtttgagctatatcaacagcaaagatcactcttccttcatacagaaaatgtccttatccgtgagagcgcacagcttcattcatctcttgtgaagttaaaggnaattcagagagaactgcaagacagatctcgagacggctagcagttcgttgttgggaaaatgaatctttcatggttgtgctgttaaactgcttttgcctgggattcttcagatcagctgggccagtttgagtcaagttgtgcattgagattggttgattgctaggaagattagtggttattgccagtcaggaagtttggttatagtgatggtactacctatatgcagtgttcagcatctttgtttgtaaaaatcgtgtgggaaggtcggaactccaagttagcgacatgattctcctcagttgtaactggcagttagcttgcgccatgtggtatctgtatgttgtttcctgctcccaagcataatggtggaagaacgatgatttgacttctttttttttcttgcttgccgcccctcaatgttcaggtctgtttgcttacaatggctaacatgtagtaagaactctgcagatttgctgttactacgtgtactatccttgacttgcgtgagccggccgatgcctgtatcgctgtaaccacaagcattgtcaaggattttcaatctgatctttaacattctct

SEQ ID NO: 101779 - DNA, 1022 bp, Oryza sativa
  Clone ID: PAT_MRT4530_99367C.1
aacaaatgtccttggcaagcgcccagccccatcgaatttggagaaaagtgcaggtggaatcaagattgtccgggttgaaaaggctgttgagccaagaaaagagtttgatgaaactgcaaaagcaagtggtggagcgacacgaaacacattgcccctttttgatagtattgccaaagagaatttaatgaggccctcaatttttcgggaaactaagatgcagcacatggctgctgaggcagctgtgttgctatccaaggaatccgatgacatgaggagttgtgccatgtcattaggctcatctggcttgcatgataaggagcaggagtcttcgctggaatcagaaggtggctgtgaagaagatgatgatgatgacatggatagtgaatacttggcatataccagagatagtactaaaacggcaactaatgatggtgaatgtcttactcaagaggagatggctggatcatcagggaatcagaagccactatcttcactggacttcacaacaggttgtgatgacatgccatgttccgatgtccatcaccattcactgggaaatagtgaactggaaaatgacgataccactaagtcgtgtgcttgttctttctgtcttaaggctgcattcatgtggaccgatctccattatcaggacacaaggggacggcttgctgcattgaagaagagcataaagttcgctagattgctgggcaagagaagccaaggagatgaatattctgttaatgcaggcagatacaacttgaaacgggctgcagagatggagtttgagctatatcaacagcaaagatcactcttccttcatacagaaaatgtccttatccgtgagagcgcacagcttcattcatctcttgtgaagttaaaggaattcagagagaactgcaagacagatctcgagacggctagcagttcgttgttgggaaaatgaatctttcatggttgtgctgttaaactgcttttgcctgggattcttcagatcagctgggccagtttgagtcaagtgtgca

SEQ ID NO: 101780 - DNA, 353 bp, Oryza sativa
  unsure (1)..(353): unsure at all n locations
  Clone ID: PAT_MRT4530_99368C.1
cgttttaggaaaatggccaaacccacccaacccaaaccaaccggactatcacgccgctgttcgcccgcgcgaccgccggcggaatactcataggccgaccgccagacgcgttgggtgtttccacaagaaggattgctgtccttggatcaccatgggctcctgacttcaggggtttttccccatggaggggtggtttanccccccttgccggaaagggattattggcccccaaccttgccccacggagcaagggttttggctggcagggcgcccctaaaatgtgggaacgccccccctctaggggcgggcgggagatccctttatatttaaaaaggcccgtggggatatggggc

SEQ ID NO: 101781 - DNA, 341 bp, Oryza sativa
  Clone ID: PAT_MRT4530_99369C.1
aaacacgggggcaaagggggtttttggccccaggtaacaaaccctttttccaatcggacaaggtcaggcataaacactgggggaaaaaacagggggccacatcaccacctcaggggggggggcatatgggcaaaaaaggctaaaaaaaccacaacgggctaaggcattggtcgggacaacaaaacacaatgggtaaggcccaacacaagctaaaagctgggaaaaagaggctaaaaaaattaccggaggggccccgaaggaccacgtacgttttaaaaaaaaaaggagggggggggaaaaaggctttttttttaagccgggggggggagggggggttactt

SEQ ID NO: 101782 - DNA, 333 bp, Oryza sativa
  Clone ID: PAT_MRT4530_9936C.1
gcgcagtggaagaaaatgctaagaaggcgaaggaaccctcgcgaagtagcgcgcgtcgatgtaaaggaagtagtcgatcgcatcggctcgaccttctcctcctcgtgcgttctcctcatcgtgctcccacaccgatcagcaccacaaagcagcggcacctctaccggatccatgactcgggcctccaaggcccgtaggactcctattcggatctctatccgaagttcatgcacactcagctgtaacccgaaaactcattttcggtccacgtgtcaacagcggcccctagcagaacgtattgaccaaccagacatacacaaagatcatatcggt

SEQ ID NO: 101783 - DNA, 5988 bp, Oryza sativa
  Clone ID: PAT_MRT4530_99370C.1
ttgcaggatcaaatcaactggcacgctaacatacccgaaggcgagttttggacctgcattggagttaagcagatctcccaggcctcgtgttttacatcaacacgcttttggcacgcctggtgggactgataagaagtcagcaagcaattcttcctcatggccgagaaaccaccgctgtcgccatcctcggttagtctaggcattgttaaggaaaagatccagaagttgggattgactgacgtcaatgaaggaaatgtcgtgcccattgatccagaaaaattcacacctgatcagaagaaagatttcgacgcgatgatgcagcaggcacgggatcagttcttgaactcattcatgcagactcgcaagggaacattggttcagaagtataaagtaaaggtagttgccgatgatactgggaccagttcttctaaaggtgaagacgggaaacaagctctggacggctcggcgctacagacggttctctaggaggtcaaggtgacaattctcagggagtccatggggttcaaggtgatggggcgcatggagttcaagatcggatcgactatgttgtgcaccatgctttgatcaatcagtctagggtgttagtcaataccttatcaaacatgatgaagtcaatagccgatggttcaatagctgagcatcaggctgcaggcccagtttatttgcaagcaggtgtcttcccaaattatcggcctttgatcaccgatgctcagccatctattcaggcagttccccccattgttccatcagctcagccgacagcgcctgcatcgactcccctatctactccgtcagcgttggcaccaggccagctggtgaaccctcggttattaataagagaacagccacaacatagtgggcaggttgcgaatcggctaatgcaagatgaggttgctgccacgtttctgccacctcaacctactattgatccaatacagcagcagccgattcaatagacacccccgattcaacagattgtacaaccaagtttgcgacgcctggtggacagcctgtacaacaatatttaaatcaagttgtcccagaacacttggttcaccacgtatagccggatggcacgacgtaatgagggaacaatttgggcttaaaccaaaagagactataagcttgtatcggcagccttaccctgagtgctttgagagagttcctcttcccaatcggttcaaagttccagatttctccaaattttcaggacaagatggtgtgtcaacttatgagcacattagccgacttttagctcagtgttgtaaagcatcggttgtggacgctctgagggttaggttgttccggttatctttgtctggatcggctttgtcttggttttcctctttgccgtatgggtcgatcaatagttgggccgatttggagaagcaattccacagctatttctatagtggggttcatgagatgaaattatctgacttgacggtgattaagcagcggcatgatgaacctatgcacgagtatattcagagattcagggagatgaggaacaaatgcttcagcttgagtttaactgacgcccagttagccaatctggcctttcagggtatgattgctccgattagggagaaattctcgtctaaagactttgatagcttgtcatatctgatacagaaggtaaccttgcacgagcataggtctgtggaagctaggaaatgctctaagaaggttaatcatgtttgtccttacatatatgggtcggatgatgatgaggatgactctgaaatagctacagccgaatgggtgaggagtaagaatgtcatatcgtgccaatgggtaaagagatctggaaaagaagagaggtatgactttgatataaacaaggctgataagatttttgacttgctacttcgagagaagcagattcaacttcctgccggtcacataattccatcggctgaagaattgggcaagaaaaggtattgcaagtggcacaactctgggtctcatatgactaatgattgcaaggtcttcaggcggcagatccaagcggctattgaagggggcaaaattaagtttgacgactctaagaggccgatgaaggttgatggcaatccttttcctgttaatatggtgcatacagctggccgaacagccgatgggggccgtgtaaggggttttcggatgaattcggctaagattatcaacaaatatcagaggaagtataacaagcagtaggagaagcattatgaagcagatgatgatggtatgaggctgccctctcttaaagactgtcctgggtgcagtgatgttgccgagaattcaagccgatcatatggtatgggtagtcggctaaggcagacaagagttcctattcatcaaagatcgggtccagtgaatcaagatcatgaccaagaggacaatgaaatcaggaaaaatcagtggtgtccttctggtattttcacgaagaattagaaaagaaggaaagcaaagccgaggcaggagtggcgtgttaagaatcaggttcctgtagccgatgaggctgcagccgatgaggcaagaaagttagctaaggggaaaagtgtcgtaactacttcaatcaacatggttttcacatgtcgatgtcgatgaagttgaagaagaatcgggtaaattgattttgtcgccagagcaagcggtttttgagaaactagaggggacagagaatcggcatcttaagccattgtatataaatggttatgtcaatgggaagccgatgtccaagatgatggtcgatagtggggctgcagtgaacttgatgccttacgctacattcagaaagttgggtagaaacgctgaagatctcatcaagacaaacatggtgctcaaagactttggtggcaatccgtcagaaaccaaaggagttttgaatgtggaactgacagtcggcagcaaaactatccctacaacattctttgtcatcgatgggaagggttcctacagcttgttgcttggaagggattgtattcatgccaattgttgtcttccttcgaccatgcatcaatgcttgattcaatggcaaggcgacaggattgagatcgtgccagccgatagccaattgaagatggagagcccaaattgttattttgagggcatcgtggagggctcaggagtctacgtcaaggacacggtggatgatctcgatgacaaggaaggacaaggttttatgtcggccggtgatttggaagaagttgatataggtccagaatttagaaccaagttgatagagctgttgaaagaattcaaagattgcttcgcttgggaatattatgagatgcctggactcaaccgatcgattgtagaacatcggctacctatcaaaccggggttaggccacaccagcaacctctgaggagatgtaaggccgatatgcttgaacctgtcaaagctgaaattgaacgattgtatgatgctggttttattcgtccttgccgatacgctgaatgggtttctagtatagttcctgttattaagaagactgatttgaataaaactacaccaaaggatgaatacccaatgccagtggccgatcagctagttgacgccgcgtcaggaaacaaaattttgagttttatggatggaaataatcaaatctttatggctgaagaagatatccataagacagcttttagatgtcctggtggaatcggcttatttgaatgggttgttatgactttcggtttgaagagtgctggagctacatatcaaagagccattaattacatatatcatgatctaatcggctggttggttgaagtctacattgatgatgtggttgtgaaatctaaagaaatagaggatcatatagccgatttaaagaaggtttttgagagaaccagaaaatatggcctgaagataaatccgacaaaatgtgcttgtggtgtatcagctggccaatttttggggtttcttgttcatgagagggggatcgaagtaactcaaaggagtgttaatgcgatcaagaagattcagcctccagagaacaagacggaactacaagagatgatcggcaaaataaattttgttagaatgtttatttctaatttgtctgggaggttggaaccttttacaccattgttgagatcgaaagccgatcagcagtttacttggggggcagcgcagcaaaaggctttggataatattaaagaatatcttagctctcctcctgttttgattcctccacagaaagggatacgttttagattgtatctatcagctggtgagaagtcaatcggctcagtcttgattcaggagttggatgaaaaagaacgagttgtattttatctcagtcgtcggctcttggatgctgaaactagatattcccctgtggagaagttatgcttgtgtctgtatttttcgtgtacaaggttgaggcattatctactatccaacgagtgtactgttatatgcaaggctgatgttatcaaatacatgttatcggctccaatattgaaaggaagggttggaaagtggatattttccttaactgagtttgatcttcggtatgagtcgccgaaggtgattaagggacaagctatagccgattttattgtggaacatcgtgatgattcaatcggctcggttgaaatggtgccatggactttattctttgatggatcggtatgtactcatggttgtggtatcggcctagttataatttcccctaggggggcatgtttcgagtttgcttatactattaagccttacgcgactaataatcaagctgagtatgaagcagtgctcaaagggttgcagttactcaaggaagttgaagccgatgctattgaaatcatgggggattctttgctagtaatcagtcagttggcaggagaatacgaatgcaagaatgatacgttaatggtttataatgagaagtgccaagaattgatgaaggaatttcagctggttactttgaagcatgtatctcgagaacaaaatattaaagctaatgatttggcccaaggggcatcggggtataagccgatgatcaaagatgttaaggttgaaattgcagctatgacagccgatgattggaggtatgatgtgcaccagtatttacggaatccatctcaatcggcttctaggaaattgcgatataaggcgttgaagtacactctattggatgatgagctttactatcggacgattgatggggtgttgctcaagtgtttgagtgccgattaggctaaagttgcaatcggcgaagtccatgagggaatttgtggcactcatcaatcggctcttaagatgaagtggttgcttcggcgtgcggggtatttttggccgacaatgctggaggattgtttcagatattacaaaggatgtcaggattgccaaaaatttcgagcaatacaaagggcaccagcatcggctatgaatcctatcattaaaccatggccgtttagaggttgggagattgatatgatcagtatgataaatccgccatcgagtaaaggacataagtttatattggtggcgactgattatttcaccaaatgggtagaggcgattcctttgaagaaagttgattctggggacgctatacaatttgttcaagaacatataatttatcgatttggtattcctcaaaccattacaaccgatcaaggttcgattttcgtgtccgatgaatttgttcagtttgtcgatagcgtgggtatcaaatttttgaattcttcaccatattatgcacaagctaatgggtatgctgaggcatctaacaagagcttgataaaattgattaagaggaaaatttctgattatcctcggcagtggcatactcgtttagctgaagcgttgtggtcttatcggatggcttgtcatggttcaattcaagttcctccttataagcttgtttatggacatgaagccgttttgccatgggaagttagaatcggctccagaaggatagaattgctcaatggcaaatacttgaagaaatatttcccaagtgtttgggttaacgca

SEQ ID NO: 101784 - DNA, 1959 bp, Oryza sativa
  Clone ID: PAT_MRT4530_99371C.1
atggatgaagtcgggtgtagatggaaattataaagggaaaatgaaggctaaaagagttgaggaaaggtagtagagatgtaatatggaggagggttggtgaaaaatgataggggctaagttatgaatgaatgtaaagggtataaggaagtagtggggattagatcggtaatattgtataaaggtaggatgggttagaaaatatgtaaagtatttaagaagggttccaaggccatggaatgcggagtaaagatgtgtattgtgggttggcctgggttggcttgggacgagctggaacccaggtcgggttgccagttcggtccaaatcatcgtaggccttgggttaaggcagttcatgttatcaagaaaaacggcaagatcagggtatgtattgatttccgaaacctgaataaggctaccccgacagacgaatatccaatgccagtagcctatgagctagttgatgctgcctcgggacacaaaattttgagttttatggatggtaatgcgggatacaatcagacctttatggctgaagaagatatccataagacaacttttaggcgtcctggtgcaatcggctcgtttgagtgggttgtgatgactttcggcttgaagagtgcttgggctacatatcaaagagccatgaattatatatatcacgatctgatcggctggttagttcaggtctacattgatgatgtggttgtaaagtctaaagaggtagaagaccacatagccgatttaaggaaggtttttgagagaaccaggaaatatggcctaaagatgaacccgacaaagtgtgctttcggcatatcggctggccagtttttgggatttcttgttcacgataggggaatcgaggtaactcaaaggagtgttaatgcaatcaagaagattcagcctccgaagaacaagatagaactacaggagatgatcggcaagataaattttgttagaaggtttatttctaatttgtctggaagattagagccttttacaccattgttgagattgaatgccgatcaacagtttacttggggggtagagcaacaaaaagcgttggacgatattaaggaatatcttagctctcctccagttttgattcctccccagaagggggtaccttttcggttatatctgtcggccgctgagtatgaagcagtgctcaaagggttacagttactcaaggaggttgaagccgatgctattgaaatcatgggggattctttgctagcaataagtcaattggcaggagaatatgagtgcaagaatgatacattaatggtttataatgagaagtgccaagaattgatgaaggattttcgggtgaaatttggagcaattcagcaagcaccggcgtcggctatgaatcctatcattaaaccatggggtattgatatgatcggaatgattaatcctccatcgagtaaaggagataagtttatattggtggcgaccgattatttcaccaaatgggtagaggcgattcccttgaagaaggttgattctggggatgcgatacattttattcaagaacatataatctatcgatttggtatccctcaaaccattacaaccgatcagggttcaatttttgtatccgatgagtttgttcagtttgccgacagcatgggtgtcaaattgttgaattcttcgccatattatgcacaagctaatgggcaagctgaggcatctaacaagagtttgaacaaactgattaaaagaaagatttctgattatcctcggcaacggcatactcggttggctgaagcgttgtggtcttatcggatggcttgtcatggatcgatccaagtccctccttataagcttgtttatggacatgaagctgttttgccatgcgaggttagaatcggctcaagcagaactgagctgcaagataatttaacagctgatgagtattgtaaccttatggccgatgaaagggaggacttggtttag

SEQ ID NO: 101785 - DNA, 469 bp, Oryza sativa
  unsure (1)..(469): unsure at all n locations
  Clone ID: PAT_MRT4530_99372C.1
ggccgacaacgcggtcgagcttctcctgcgccatcgcctgcaccctcgggttcctcgccagctccgccatcgcccactccgccgttatcaccgcggtgtccgagccggcagcgatcatgtcccagaggaggccgatgacagtgtcgtcgctgaggtcgtattggtccctgagggtgaagagggcgtcaacgaagtgctgcttggcgccgtgccgctcgagctcgcgggcgtgctcntccatgatccgcctggtgaagcggtctnaccttgcgctgtgggcgttgtagagctcctcgtccaccaggttcagccaccgtagcaccgggatgtgctccgcgatgggcaccgacgcgccgatcttgatcccgtctttcacgatcgccttcagttcgcacccttgctcntccagctcaccagcggcatctatgaaccgtttcccgaaggtcagccgtgtgatgttattaaaggc

SEQ ID NO: 101786 - DNA, 192 bp, Oryza sativa
  Clone ID: PAT_MRT4530_99373C.1
atggtcgctgttgagctgcttcttgcgactgttgctgtgttggttcaaactgattatattgagaagcaaactgaggttgggttagccctccttgctgatactgaacttgaggggaaaaaggctgatattgataattcatattacccccttggcaattttggcaaagaaatcaatggcggtgccatcggctga

SEQ ID NO: 101787 - DNA, 281 bp, Oryza sativa
  Clone ID: PAT_MRT4530_99374C.1
tcggtattagagcgcgagcgaacaaccattggccggagcgtttgaggcgaatcgcgaattctacattccgagattccacgcgcgccacctgttcgacgaaccgcctgcctgcgcggcaacgaggctccacgcgcgccacctgtatgacaaaacgcctctgcccgcgtgctcggccgcaatgtagggctcaccctctaagagcaggggggtcacgggccccacgcacaccgacgacggggactggatcagcgacgacccggacgaaatcattctcaaaaaca

SEQ ID NO: 101788 - DNA, 984 bp, Oryza sativa
  Clone ID: PAT_MRT4530_99375C.1
atggtggtccgtcccaaggccgcggcaaatggaggcagaggggtagagagacggcacggagggggagggagtagaaaaatctggcggcctcctccgagtccgactgggtcgcggccggaggtgttcgtcgagagcccgcggatgagcacgttcggaggggatcagggcggaattggtggaggacggcaagtggcaagggcgaggacggcgggcaagaaggcacagacgccggcgagctcggacgcggcctcaacctcatgcaagctcctctccttctccgcgctttcccatcgagccggtgagcttctccgacaaggacagtggcggcggcgcagaccgaagtggcgtggcaatgagctccccggcgacaccgaggtcggtgacgcggagcggagcgtgtggacaacgacgaggctctccctcactcggctccacggcggcgtacgacggcaaaccgcccgccccctcctctccttgtcggggccggacggcggtgacctcgacggcgggatggctgcacgcatggcgaggatcaaatcaactggcacgctaacacacctgaaggcgagctttggacctgcactggagttaagcagatctcccaggcctcgtgttttacgtcaacagccggcgagggtggcggtggcaccgaacgacgctagggacgcggcggacgggaagccccggggcgaggacggcgggcaagaaggcatggacttcggcgcggcggcgcctctcatcgtcgggtccagaggccacagacgctggcgcctccctccccctaccccgctccgcagcgacgggctctcggtggggtcttcctcgcggaggtcgccgcgtgacctcgtcttcctcgcggacgacgagcggcggcacggccgtcctcacggcggtcgtcgtcgaccggagccacgcgacctcgtcttcctctcaaagccgggcgaagcggcggtccgagcggcgacggctacgacgccgggctga

SEQ ID NO: 101789 - DNA, 461 bp, Oryza sativa
  Clone ID: PAT_MRT4530_99376C.1
tgtttctggttcatcgtcttctgcgccatgggaggtgagatggtaagtggggaccatgtactatactagttatgtggtgtagaggaaacatctcgaaatattatcttaacttaaaaagaaaccgttgcatgccgccctgagactatcgtactggctagcccaaccaaggcaacagcagatcttaagctggttctgttgatactggatctacatcttttaccttagtttaacactatttttcaaggggattactactcttgtgtggtggtgggagcgggagatcaagagccaaaaagtccgcaaaaaaaattctacttggttcattcatctggtttagtctgccaaagcagaagtcagtggcgagatcttgcttctactccattcgcatcattgtgctgccaatctgacctcagagaagagggagattccgcagctgtagagagcggagtatctccggcgat

SEQ ID NO: 101790 - DNA, 549 bp, Oryza sativa
  Clone ID: PAT_MRT4530_99377C.1
ctattgttgatccagtgcagcagcagccgattcagcagacaccaccaatccagccggttgtgcaaccaatccaacaacaggtcgtacaaccagctcagcaaacaccaccaagccagcagcctctgcaaccaattcagcaaacaccaccaaggcagcagcctctgcagccgatccaacagactccattaaggcaacaaatcgttcagccgatttagcaccaggggtcaatgaacgcatcggctgggttcgcagcacctggtagttagcccatacaacaatttgtgaaccaagtcgtcccagaacatttggttcaccatgtacagccagacggcacagtaatgcctcaggttgttcctgagcacttggtgcgcaacatccaaccgaaccttcataattactaagggggtaacttgagttatcaatatcagcctccttccccgcaagcccaatatcagctagggggattggctcaaccccagttcgcatctcagcctccttccccgcaagcccaatatcagccagggggattggctcaaccccagttcgcat

SEQ ID NO: 101791 - DNA, 1612 bp, Oryza sativa
  Clone ID: PAT_MRT4530_99378C.1
aaaatggcatgtgtgtttttattcttcttctccaagagtcgaagtacagtagtgcgaggagaaccaacaagctaatgacacgaaacaactaggattaggggagttgtacaaatggaatagcgtgcacataaaggtcttccttcctcctagcagtgatccccatcgtttccgtcatatccaaatcactatggagagtgccctcagggagagtccaatcaaaatgaaacaaaagatttgcgagagccagctcaatattagcaatcccaaattgcatcccagggcatattcttcgcccagcaccgaatggtatgaactcgaagttgttacctttgtgttctattgtactaccctcgaacctctctggcataaacttctccgactcatcccaaaactcgttatctgtgcaaatagcccatacattcacgagtaccgtagctcctttcggtatgtcatagccgagtatttggcattgctcctggcactcccttggtagagccaatggcccgggagtgtgcagccgcagggtctccttgatgatacattgtagataggttaggttagttaggccttcctcggttacctccattttgtccttgtaggcttccctaacctcggcttgcgctctggacatcaccccagggttcctcatcagctccgccatggcccattgcagcgtcgtcgtcgccgtctcgctcccacccgagaaaaggtcaaaaatgactgctctgattatgcccatggtgagctcgaagtgcaggcttccttctgcttggagccggaggaggacgtcgatgaggtcctcctcgcgttctcctccctgacacgacctcttcttctcgaggtgctccctgatgactcggtccatgaactccatgagggactcgacgaacgcctccgccctgcgcagcgtcgtgctgctcatcgcccgcgccagcctcgacgacgggaacaggtcggccatggtgaggctgcccgccagccgcaccgcctcgtcgacgtaccggagcagggcgtcgcgctcccggaaccgctcgcccatcacgatgtgcaccgtcgtgtccgtgacgtagttgccgaggagctcgctcagattcgtcacgagcggcggcgaggcgacgccgatggcccggacgagccgcgccgcctcctcctcgcggatggcgcggaacgccaggatgcgcctggggctcagcagctcgaggcggcagatcttgcgcacctgccgccagtgctcgccgtagggcgcgaacgtgatgcccgcgccgcgcctggtgcacaccttcaccacggcgctcagcggccgcgacgagaagttgtcgtcgtgcgtccgcaggatctctctggccgcgccggccgtggacgcgacgacgaccacaggggcgtcgccgaaggcgaggagcatgagggggccgtggcggcgggccaggtcgcgcagcgcgcggtgcgggagcgcgccgaagaacaggtggtggaggctgccgatgagcgggaggcgccatggcccaggaggtagccgcaggtcgctgtcgcgtgagccatggaggaagagcgtgatgaggtagtgtagaagaggaagaagagctagcaagcagcagaacacagctgcgtccat

SEQ ID NO: 101792 - DNA, 744 bp, Oryza sativa
  unsure (1)..(744): unsure at all n locations
  Clone ID: PAT_MRT4530_99379C.1
ggggaggcaaaattcagtttggcgactttaaaaggctaataaaggttaagctgggccaacaacccattagggcccggccaaggggtttccaggtgaattggggtaaggttttccaccaaatttcagagaaggtatgcaagcaccaggagaggcatcataaagaagaagncgatggttttattcctcatgagggttgtgagttttttagattttgttgaaatgaaggtctaaagcttcccgtctattgaagactgtcttgggtgcagtgatatgccaagaattcaagccgatcatatggtaggggcaatcggctaaggcagacaagagttcctgttcatcaaagattgggtccagtgaatcaagatcatggccaagaggacaatgaaatcaggaaaaatcagtggtgtctttctggtattttcacgaagaatcaaaagagaagggttcaaagattgaggaacagggagtgcttttaggaggttgaacaggaattaaccatcggttgcagaaaacaaagtcgaggcaggagtggcgtgttaagatcaggttcctgtagccgatgaagctacagctgaggaggcaaaaaggttagttaaggggaaaagtgtcgtaactgcttcggtcaacatggttttcacgttgcctgccgagattgggaccaagcaagccgatgtcgatgaagttgaagaagaatcagccaaattgattttgttggggctgcaggaatacgatcgcagctctact

SEQ ID NO: 101793 - DNA, 756 bp, Oryza sativa
  Clone ID: PAT_MRT4530_9937C.1
atggagctgtgcctccaccggtggacggctgcatggaaggcggccaccgccgtttctccctttcccctctccttttcctgcaatatagcagcggaggtggtctgggcggagaaggccgtggcagggagggccaccacctttgcgcgagcgctctctgctgctaggagcagtgccgtttgctcccccttctcttccgctaggtccgccttctcctccgccaccggccgccagcggatgggtggatgggccaccatgctgccgccgcgtgacgacaccacacgccgccacccggagtacgagctggtgccgaacgccggcagggacatggtcacagttgggggtgaagaatatccggttttatggttcaggagagatcgggcgccggccgtccgccgcctcgccggcctcccgcccggctgcctcgggctccgccgccgcctagggagcgtcgccgcccgctgccagccgcctatgcggccggtgcccgcctgctgccgcctcgggttccgccgcccgcccgaggagctccgccgcctcgccggcctcgccgacctcgctagccgcctgctcggccgcccaccaccggccttgcaagccacctgcccggccgccggcctcgcctacctcgcaagccgccgcctcggccacccgccaccggcctcgcaggccgcctgcccagccgcccgccgctccgcgccctccctgccgccgcgcgccgcccggcctcacgtggtaggaggaggaggaagagaatag

SEQ ID NO: 101794 - DNA, 1138 bp, Oryza sativa
  Clone ID: PAT_MRT4530_99380C.1
tcctcttccccttcctcctcctcctcctcctcccggaattcccgggtcgtttccgggtccgctcctcctcctcatccagctcgctcgctcgctcgcggcggagaatccagcccgagcaggctggcttgtgcttgagctagaatctccggccccgtcgcaggctccgtatcaaccaagatataagctccacacggtttattgaacatttgtgccagactattggggtgaacattcagtcaagtcttcaaagtgtttattccaaaacaaatgcaatgagttgtcatacaaggggcttgttgaaggaatacaacatatatttataggcgatcacctatatttttctgactcatgggcgactgggttataggagcactgatcaacattgtggggagtgttgccataaactttggtaccaaccttctgaaattgggccatgatcagagagagaagctttcgacaaccaacaacaatcaaggcaatgacaaatttgttccgaagtcagttatgcattttcaaacttggagaataggcatactgttctttgctgcgggaaactgcctcaacttcatgtccttcgcatatgccgcacagtcacttcttgcagctcttggatcgattcaatttgtgtccaatattgcatttgcttactttgtgttgaacaagaccatttcagtgaaagtcatggtagcaacaacatttattgtatttggcaatatcttcctagtttcctttggtaatcatcaatctccagtttacaccccggagcagctagttgcgaaatacagcaatttagtgtttgttctctattgcatgtcactggtctttgtggttgcattcaatcagtatctctacaggagtggagaaactatcatttcggatagtgcgaaacatactggctcacattggcggacattgttgccattttcttatgctattgtatctggtgctattggatcctgttctgtcttatttgccaaatcattgtcaaacatgctgaggctaacaatgagcagcagataccagttccatagctggttcacatactcaatgcttctgttgttcctctttacagctggcttttggatggcgagattgaatgaaggcctgtctctttttgatgcaatactgattgttccaa

SEQ ID NO: 101795 - DNA, 1026 bp, Oryza sativa
  unsure (1)..(1026): unsure at all n locations
  Clone ID: PAT_MRT4530_99381C.1
aagttagaatcttttacaccattattgagattgaaggccgattagcaatttacttggggggcagaacaacagaaggcgttggataatattaaggaatatttgagttctcctccagttttgattcctccacagaaaggaataccttttcggttatatttatcggccggtgataagtcaatcggctcggtcttgatttaagagctcgagggaaaagagagggttctattctatttgagccgtcggctcttggatgcagagactagatattctcctgtggagaagttatgcttgtgtttgtatttttcatgtacgaggttaagacattatctactgtccaatgaatgtaccgttgtatgcaaggccgatgttgtcaagtatatgttatcggctcctattctgaaaaggaaggattggaaagtggatattttcattgactgagtttgatcttcggtgtgagtcaccgaaggcgatcaaaggacaagctgtagccgattttattgttgaccatcgtgatgattctattggctcggttgagattgtgccatggactttattcttcgatgggtcagtttgtacttatggttgtggtatcggcttggttataatctcccctcggggggcatgctttgagtttgcctatattattaaactttatgcaactaataatcaagtagagtatgaggcagttctcaaggggttgcagctacttcagaaagttgaagctgatactattgaaatcatgggggattctttgttggtgatcagtcaattggcaggagaatatgattgtaagaatgatatgttgctggtttataatgagaagtgccaagaactgatgaagaaatttcggctagtaactctgaagcatgtgtctcgagagcagaatattgaagctaatgatttagcccaaggggtgtcaggatataagccgctgatcaaagatgttcagattgaagttgctgccatactagccgatgattggagatatgatgtctatcggtatttacnnaggatccccatctctgt

SEQ ID NO: 101796 - DNA, 930 bp, Oryza sativa
  Clone ID: PAT_MRT4530_99382C.1
cttggacgaaggcgccggttagccgcgaggcagccgcccagcgctcgcgttcccccctcctgatccgtggggttgctcagcggggcgccgtgccggaggagatgcagaggctgggggatttcaggctcccgcccttcttcaactacccgccttacttcacattgcagcctgtgcgagaaacacgtgaaaagcaagtgcagctgtggaaagatctgatacttgattattgtagaagtcaaaagctatatataatctccctagaagaagatttcccattgttctccaatccaaagatcgagagatctcttagccatgaagcaaaggaagtattccttgctgctcttgtttatgaaggacgtgcagaatggatggacaaaggtcataagaagtgcctcattctttggttgcggatacaagattgggctaactacatattaaattttgtaaaggataatgggctggaagatagtgtaatgactgttgaagaaatacgttcaggaattgaaacacgtgggactgaacttgccggaattgaccgtggtgttctcatgagggctttgaagttactggaacagaagggcaaagcagcgatttttaagggcacttcagctgatgatgaaggtgtaaaattttcggcttagtgtctggggcctgtgtggcagatcaattatcctgaccagcatctttgaatgacgagaattcttgccaaccaggacgctgatcacgtcctccccaaacatatttatctgccttactgttcactgctgctgctgttaaatgccatgttggcctgtccatctttgactgaaaaaacactgtaatcagaacttaattcatttccacaagcatacctacaaaaccctcctgttgttgtgtgataaaactaggaacttgtcttgcatctcatgcaaataaattttctatttaatc

SEQ ID NO: 101797 - DNA, 385 bp, Oryza sativa
  Clone ID: PAT_MRT4530_99383C.1
agcacgcgtgcccgagccgcgccgctcaaatcgccgcgccgcccgttgcttcccgtgcgcgcgcgccgtggtggccgaccgcctggtcgccgccgccgtcagcctctgccacgcttttccgcgcctgccgcccgtgtcgccgctccgctccacaccgcccggccgtcatcgccgtcgtcatcaacccgaccccgccactccgcgcgctagcctccaagggacggaggcagagctcctcctccctctgccacgtcgccctctctccctttttcttttcccaaagaagcaaggaggcaagcccccttttcctcttcctttcttctttttcctcccatcgccggcgtcacctcctgtcgccgttttggccgtgaccgccgagcgctag

SEQ ID NO: 101798 - DNA, 1098 bp, Oryza sativa
  Clone ID: PAT_MRT4530_99384C.1
atggcaacggcagcggaggacgggtgctgcggcggcggcgctcgacagcgccagagcgaggtggaggcgaaaatggcgatgctcggcgacggcggaggaggagacgctgcccagcgcatggacggcggtcagatccgcgtccccgacaacatggagtccggatccggacgccggcggccggaggaggcgcctcgcagcggcggcgctcggcgacggtggggaccgaggcggagatggctgctcgcctcgccgacggcgacggcgctcggagacgccgacgcgacggccacggaggtggacgcggccgcggcggcggaggcagaggcggcggcgcgaggggaacgcggagacggaggcggcgacggcggcgggagagcgggagggagagggcgagcgagagacgagagggagaagggggcggcggcggataggtggcaaggcgacaagattgaaatcgtgccagctgacagccaattgaagatagagaacccaagctattattttgagggcgtcttggagggttcagatgtctacaacaaggacacaatagatgatctcaatgacaagcaaggacagggttttacgtcggccgatgatttggaagaaattgatataggtctaggtgatcgaccaaggccgacatttattagggttaggccacaccagcaacctccgaggagatgtaaagccgatatgcttgaacctgtcaagactgaaattaaacgattatatgatgctggttttatttgttcttgccgatatgctgagtgggtttctagtatagttcctattatcaagaagaacggcaaggtcagggtgtgcattgatttccgaaacttaaataaagctaccccgaaagacgaatacctaatgccggtagccgatcagctggttgatgctgcctcggggcataaaattttgagttttatggatggtaatgcaggatacaatcaaatctttatggccgaagaagatatccataagacagcttttaggtgtcctggtgcaatcggcttgttcgagtgggttgtaatgactttcggtttaaagagtgctagagctacatatcaaagagccatgaattacatctatcattag

SEQ ID NO: 101799 - DNA, 1779 bp, Oryza sativa
  Clone ID: PAT_MRT4530_99385C.1
atgaggctcaaggaggagcctgcccttagtttagctgtggtcgaactcgaaattgaccatgctattaaatctgtttatattgttgcgccggatgggatagtggagccagttccagttcaaggagactatatcgttggggaagataaattctacgagctattgggtttgagggctgaagatgaggttgcagatgaggctagacaagctgctgctcgaggtggaggtcctgatgttgctggtgctgctgcaggtggtgttggcggtgctgcagcagctgctgctgctcctggtgcttctcctgttgctgatgaggatgatataactggggcagcaattcctgtcgatgatcaagtaccaggggagagggtcatggcctatgaccccaataattcttgcatgaaggctggcacagtgtaccctaacatgaaggaatttagattggcaatgagacagtttgctataaatgctgagtttgagttgaagttggtgactgtgttacaagacttgcatacatgcacttctagcagcagaagaaagactaccacaccaacagctaaatgggtggcaagtaacgcaattcctattcttaaaaagaatccaggcttagaaaaggttgtacatactgtgtttgagcatgctgagcagagggaatgcttctggcatttgatgaagaactttgtgaagagatttggtggtgatgtgcactcacacatatacccagcagcaagggcatacaggaaagagatttggcaaagtcacacaaaagaagttattgaagcttgtagtgatgttcttccttggcttgaagcctatcatccattgaagtggatgaggagtggtttcaatccagcaataaaacaagacagagtgttggttatggtattgtggaacaagaggagaagaattgcagagaagatgactgggaacatcttgcctgctgtaacacagaagcttaaggcaagaactaggggtttgggtcacctctcagtagtgaaatctgatagcttctgtgcagagattgttgacaacagcaccacccatgagaaacatgttgtgaaggcttacaatcagtactgctcatgtgaggagtggcagcacactggaaagccctgtcagcatgcattggctttgataacctctcaacaaaatagggatgtcaacattgaggactttgtgaatccctatttttcagttgagctgttcaggaaggcttataggagaattatagagccattgggtgacaagtcttactggccacaggttgaattgccatgggtgttgggtgcacctttgccaaagaagacaaatggaagatacataaagcttaggatcaaaagttgcctggagggtggtggcaagtctaaagccaaaactactccaactgataatgactcagggaagagggtgctgaggaagccaaggaggaacactacaaaatatgggaacacttctgacattcctagtcccaaaagaccaacagtgcagacaatacttgaagaaagtctaggaagaattacaagaagccggctagcatcattgatgaagggaggagctcagaacattccagcttctaattcacagccagctgacattccatcttcaagctctcagcctgctgacattagggcttcaagctctcaacctactgctgacattggggcttcaagctctcagcctgctgcttcaagctctcaggctacaagcaatgcagcaccaagctggcaacccagaatgtctcctagaaagaagctcacaccaaagaagaaacttaaaacctga

SEQ ID NO: 101800 - DNA, 570 bp, Oryza sativa
  Clone ID: PAT_MRT4530_99386C.1
atgcaaactgaggttgagccaatccccctggctgatattgggcttgcggggaaggaggttgatattgataactcaagttacccccttggtaattatgaaggttcggctggatattacgcaccaagtgctcaggaacaacctgaggcattactgtgccatccggctgtacgtggtgaaccaaatgttccgggacaacttggtttaaacattgttgtacaggctgaccaccaggcgttgcaaacccggccgatgcgcttattgacccctggtgctgaatcggctgaacgatttgctgtcttaacggagtctattggatcggctgcagaggctgctgccttggtggtgtttgctgaactggttgcacgacctgttgctggattggttttacaacctgctgaattggaggtgtctgttgaatcggctgctgctgaactggatcaaccgcatgttgaggcggcaaaaacatggcagcaacttgatcttgggttggtcgattcgcaacctgcccactatgctgtggatgctctctcattaacaacagagggttcatcggctggcctggcgccatag

SEQ ID NO: 101801 - DNA, 5262 bp, Oryza sativa
  Clone ID: PAT_MRT4530_99387C.1
tcctcctctttcgtttgccccctctcccgtcctctcccgtgacccgtagagccgtcgccaccgtgcaagccgccgccgccgtcgcttcttctgaaccctcggttgttaatgagggaacatccacaacctactgggcagattgcgaatcaaccaacccaagatcaagttgctgccatgcttttgccacctccacctattgttgatccagtgcagcagcagccgattcagcagacatcaccaatccagccagttgtacagccgggtttgcagcacctggtgggcaacctgcgcaacaatttgtaaaccaggtcgtcccagagcatttggttcaccatgcacaaccggatggcacgatgtaatgagggagcaattcggacttaaaccaaaagaaactggaagtttgtattggcagccttaccctgagtggtttgaaagagttcctcttcccaatcggtttaaagttctagatttctccaagttttcgagacaagagggcgtgtcgacttatgagcacatcagccgattccttgctcagtgcggtgaagcatcggctgtagacaccttgagagttaggttgttccggttatctctgtccggatcagcttttacttggttttcctctttgccatatgggtcgatcaatagttgggccgatttggagaagcaattccacagctatttctacagtggggtccatgagatgaagttatccgacctgacagcgatcaagcagcggcatgatgagcctgtgcacgagtatattcagaggttcagagagatgcggaacaagtgctttagcttgagtctgactgatgctcagttagccgatttggccttccagggtatgattcctccaatcagggagaaattttcatccgaagacttcgatagcttatcgcatctgatacagaaggtaaccttgcttgagcataggtcggcggaagtcaggaaaagctcaaagaaagttaatcacgtttgtccatatatgtatgggtcggatgacgaagaagatgattctgaaatagctgcagccgaatgggtaaggagcaaaaaaggttataccatgccaatgggtaaagagtcccgggaaagaggagaagtatgactttgatatcaccaaagctgacaaaatttttgatttgctactccgagaaaagcagattcagctccctaccgatcatacgatcccatcggctgaggaattaggcaagaagagatattgcaaatggcataattctgggtctcattctactaatgattgtaaggtctttagatagcaaatccaggttgccattgaagggggaaagattaggtttgatgattccaagaagccgatgaaggtcgattggaatccttttcctattaatatggtgcatacagctggtcaagcagccgatagagcccgtgcaaagggttttcaagtaaattcggctaagattatcaacaagtatcagaagaagtatgacaagcagcaggagaggagttatgaagaatacgacgatgggatgaggttgccatccattgaaaactgccctggatgcagtgatatcatcgagagctcaagccgaccacataatagggataatcggctgaaacaggcaagactctctgttcatcaaagattgggtccgatgagtcaagatcgtggccaagaagatgaggtgatcagaaagaatcaatggtgtccttctggtattttcacgaagaatcagaaaaggaggaaaccaagaccaagacaggagtggcgtgtctagaatcaggttcccgtagccgatgatgctgcagccgatgaggtgaagaggttagcaaaaggaaagagtgttatagcggcaccaattaacatggtctttacactaccagccgaattcggggtcgatcaggccgatctcgatgaagtggaagaggaatcagctaagttggtcctgtcaccagaacaggcagtattcgagaaacccgaggggacagagaatcggcatcttaaaccattatatataaacggctacgtcaatgggaagccgatgtctaagatgatggtcgatggtggggccgcggtgaatttgatgccttatgctacgttcaggaagctgggtaggaacgccaaggatctcatcaagacaaatatggtactcaaggactttggtggtaatccatcggagaccaaaggtgttctaaatgtggaactaacggtcggcagcaagactattcctaccacgttttttgtcatcgatgggaagggttcgtatagcttgttgcttggaagggattggattcatgccaattgttgcatcccttcgactatgcatcaatgcttgattcaatggcaaggcgacaagatagagatcgtgccagccgacagccaattgaagatggagaacccaagctattactttgagagcgtcgtggagggttcgaatgtctacgctaaggatacagtagatgatctcgatgacaagcaaggccaaggttttatgtcggccgatgatttggaagaaatagacataggtccagagtttagaaccaagctgattgagctcctaaaagaatttagagattgcttcgcttgggagtattatgagatgcccggactcagccgatcgattgtcgaacatcggctacctatcaagccaggggttagaccacgccagcaacctccgaggagatgcaaagccgatatgctcgagccggttaaagctgagattaaacgattgtatgatgctggtttcattcatccctgtcgatatgccgaatgggtttctagcatagttccagttattaaaaagaatgacttgaataaagctacaccaaaggacgaatatccaatgccagtggccgatcaattagtcgatgctgcatcagggaacaaaattttgcgttttatggataggaatgtaggatataatcagatctttatggctgaagaggatatccataagacagcttttagatgccctggtgcaattggcttatttgagtgggtcgtcatgacttttggcttgaagagtgctggagcaacatatcaaagggccatgaattatatatatcatgatttaatcggctggttggttgaagtctatattgacgatgtggttgttaaatctaaagaggtggaggaccacatagccgatttaaggaaagtttttgagagaaccagaaagtatggcttgaagatgaatccgacaaaatgtgcttttggtgtgtcggctggccaatttttgggatttcttgttcatgagagggggattgaagtgactcgaaggagcgttaatgcgatcaagaagattcagcccccagaaaataagacagagctacaagagatgatcggcaagataaattttgttagaagatttatttctaatctgtctggaagattggaaccttttacacccttattgagattaaaagccgatcagcaatttacttaggtagcagagcagcaaaaggctttggataatattaaggagtatctcagctctcctcctgttttgattcctccacagaaaggaataccgtttaggttatatttatcgactggtgagaagtcaatcggctcggtgttgattcaagagttggaagggaaggagcgagttgtattttatctcagtcgacggctcttggatgctgagactcggtattctcctgtggagaagttatgcttgtgtctatattttttgtgtacgaggttgaggcattatctattatctaacgagtgcaccgttatatgcaaagccgatgtagtcaggtacatgctgttggctccaatattaaagggacgagttggaaagtggatattttccttgactgagtttgatcttcggtatgaatcaccaaaggcgatgaagggacaagctatagccgattttattgtagaacatcgtgatgattcaatcggctcggtggagatagtaccatggactttattctttgatggatcggtatgtactcatggttgtggcatcggcttagttataatttcccctaggggggcatgtttcgagttcgcttatactattcaaccatatgcgaccaataatcaagctgaatatgaagcagtacttaaggggttgcaattactcaaggaagttcaaggcgatactattgaaattatgggggattctttgctagtaatcagccaattggcaggagaatatgaatgcaagaatgatacattgatggtttataatgagaaatgtctggaactaatgaaagagtttcggctggttactttgaagcatgtatctcgagaacaaaatcttgaagctaatgatttggctcaaggggcatcggggtataagccgatgatcaaagatgttaaagttgaaattgcagcagtatcagccgatgattggaggtatgatgtgcatcagtatttgagtaatccatctcactcggcttccaggaaattaaggtataaggcattaaagtatacactgttggatgatgagctttattattggacgattgatggggtattacttaagtgcttgagtgccgatcaggccaaggttgcaatcggcgaagttcacgaagggatctgtggtactcatcaatcggctcacaagatgaagtggttgcttcggcgtgcagggtacttttggccgacaatgctggaagattgtttcagatattataaagggtgtcaggattgtcagaagtttggagcaattcagcgagcaccggcatcggctatgaatcctattattaaaccatggccgttcagaggttggggaattgatatgatcggtataataaacccaccatcgagtaaagggcataaatttatattggtggcaactgattatttcaccaagtgggtagaggcgattcctttgaagaaggttgattctggggatgctattcaatttgttcaggaacacataatctatcgatttggtcttcctcagactattactacggatcaaggttcaatcttcgtgtccgacgagtttgttcagtttgccgatagcgtgggtatcaagttgttgaattcttcaccttattatgcacaagctaatgggcaagccgaggcatctaataaaagtttgatcaaattggttaagcaaaaaatttctgattatcctcggcaatggcatactcggttggccgaagcattgtggtcttataggatggcctgtcatggatcgattcaagttccatataatcgaggctgttttgccatgggaagttagaatcggctctcgacgaacggagctgctcaatggcaaatatttgaagaaatattaccaaagtgtttgggttaacgca

SEQ ID NO: 101802 - DNA, 174 bp, Oryza sativa
  Clone ID: PAT_MRT4530_99388C.1
atggctggtgtggacccagagtggtcaaagtgtgcagaaaagacttgtgttggtctgatggcagtctatatccaagaaaaactgccagatgtaactaggcccgccctgggagaggctactgctacctaccaacgtcctggaagggcgctgaaagaacctcgatgtcgcctatag

SEQ ID NO: 101803 - DNA, 420 bp, Oryza sativa
  Clone ID: PAT_MRT4530_99389C.1
atgtgaactggggttgagccaatccccctggctgatattgggcttgcggggaaggaggctgatattgatagcccaggttaccctcttggtaattatgaagattcggctggatgttgcgcaccaagtgttctcagggaccatctgaggcatcactgtgccgtccggctgtgcatggttgaccaccaggtgctgcaaactcagccgatgcatttattgaccccgggtgccgaatcggctgaacagtctgctgtctcaacggagtctgttgcatcggctgctaaagctgctgccttggtggtgttagctgagctggttgtacgacctgttgttggactggtaggggagttgatgccggcgccgtcagctgagttgtggttgcaacaaagggaactgcttgaacaggtggctgaacatcggtga

SEQ ID NO: 101804 - DNA, 2023 bp, Oryza sativa
  Clone ID: PAT_MRT4530_9938C.1
aatcgtaacagctacacaaatgctaagatttcactaacttaaaagatgttccgtgggataacataaaaggtactcttctcttacagaagtctttaaagtagatctacattttaaagtctctattgcatatagaagagaacatgatatatagtttgtagcatcatgcatcgagtctaagttagctaagcagttactactatatcggtaagcctggctggggtcgggctctgcgttgcagattattatcctagaatcccgcttcattcatcatccagacagaagctgcatgacatcctacagaaggggaacctgaagcaacagcaatcgtcccaactccagactcgccaaaagactctcccaagtaagcattagcggatggtttcctctctatccatcaatcagtttcttccatctcatcatcagactgtggattctctacctcactaccactgctcataccattatttgccgacaagaagtaatccttcactgagctgtcttcaaccttgtacttcacaaacttgaccacatttgcgtcttcagccccgcaatccttccttttcctcatgccattagccatcgccttcatagactgagcagcagccataaaagcattgtctgctgtttccatctcaacagcttcttcatcctcaccagctcttgtgtccataacctccccaccgctctgcttgtcaatgaagaaaaggtcagcatctgagtgagtcatcctgctctggtaaccattcttgacctcgtcatacatcagcctctccctaatcctggaaacattctctccaaatactttgaagcccttatcttccagatctacaagccacttgagaagagcttgaggtgtgatagcagctggtttgctgagttggttgaagccaacttgactagtagcgcacttggcaaaataagtggggatgtttgaagtgaagaaggcattcatgaaagacatcgcccttccttgatcacctttgctcctggcgtcattgatggcatcatgagtgataagcaatcttgacacataaaggggcaaaagggagctatcagcttgatcaactcctgctcctttgttaatgaaagaataatccaccaaaatcagagcatcataaaggacatctctcaccaagatttcatcatcagcactcagtagtgaataaacaggtagcggaggattcacgagcatgttcagcagaacccctgcgaaatccatcagcacaacggtcatcacaatcgggtcactgcacctgaatccgaagaattgctggttctggaagaccgagatggagctcactgcccagatcctgagctccttctgcagctcggcgcgtgacgcgcctgccgcgccctgcaccttgaggcagagcctgagcaggaacgcctcggcaaccaccgccccggcgaggaaggcgacgctgcagccttccctcatgagctcccgcctggcgtcctccccgacaagagggaagagcacctggaacgggcacctgtccctcgagtggcgcacgctccacaccttcaccagctcgccgaaggccggtagcaggctcccggcgtcggcgccggcgccggcgccatcgccggcggcgggggcggcgcggctgctgcagatgctgatgtagctgaggacggcctcgaccagggcctcggcctccctccggggcttggcggagtggtagagctcggagacgacgggggcgaggagggcgagcggcttggcggcggagcgggaggaggcggtgaaggcggagaggaggtggaggaggctgcggaggtcgccggggttgtcgtggaaggagagcgcggagaagaaccagacggcctccagcggcgggtccgggtaggtgttgagcacccgggagaagagggagcggaagttggtgaggtccgggtcgggcgcggcggagacggcggcgaggaagcgggaggtggagtcgcggaggagggactcgaggctggagaagcagcaggcggcgcccatggaggggaagtccaccacgatggagccggcggccat

SEQ ID NO: 101805 - DNA, 1567 bp, Oryza sativa
  Clone ID: PAT_MRT4530_99390C.1
tcatccttggaagcctacctcgtacggctgtccggcgccgacgccccggacggacaagtacaccacccacccggacacgaagcaccaccgcaccacctgccccgccaccgccaccgccgccttacttcgccggcggaagccgtccaccgtgcacatcaccaccccgttgaaggtctccgcgccggcgtccacgtgcctctcgacgcgccgcgcgcgcgtcccgaaccggccgtccatgatccgcctcgccatctcctcccgccgcaccgcccagtccgcgccctgccgcccgaggtggtagctcacgtggacgggcggcggcggcggcggcgtcgtgcgcggtgcgtccctcgccgggctgtcccactcggcgaccacgtagaggacgtgctccggcagcgccgccaccgatgccggctcgtcgccgtatccggcggccatccactccggctgctcgtaccgggacggctggctgcagtagtgcgcgtcccacgctgggaggtggtcgccgccgccgtcgtcctgcgtcatggcctgcaagcggtggaagctcccgaaggcggcggcggaggcgaagcggaagtgcggcggcagcgcgtccatggaggacagagcgagcgccatgacgtcagcgctctcagagaggtcgagctccacgaacagctccagcttctcgccggtgccgccgccgtccgcgtacaggaacacgacgtgcgcgcgcgggcggcgccacggtgatgtgaggtccgggaacgcgaacgcgtgcgccgtggcgcccggcgacgccggcggcttgacggagaagctcaccgctctccgcgcgagcagcgacgccgcgaccggctggaacggcacaaaccgcttggcgcggccgccgctctcgacgagcttcacgaagtcgcagacgccgtccgccagccgctcgaaccgccgcacggtgccgccgctcagccgctgctcgtctccgccgccgaaggcgaagagcttcttgccggcggcccgagcaacgcgcctcggaaaccaaaggcggcgcgcatcatcatcgtcgacacacaggcgccgccgccgccgccgcctgtactcccgcaggacgcactcgccctcgtcggcggcgcgcttgagcttgtcgcgccaccgcacgagcgggcggttggtgatgtgccagccgtcggcctcctcgacggcggcctgaatcttgagcagcgccacctccatcctctcctcgtcatgctcggctccatcgccggcggccacctcctcctcaccgcggctgatgaggtacgagcatatccggccgacggcctcgccgacgaccgccgagccgacgatctccaccaccgacggtcgctgcatattcttcgcttacaagtactccaactatggtggtctctacgcacatggtcatgtcaatattccaaaagttttgacaaaattacaccgaaagataaacaatgtattcatgagtaatgtgaaactgaaatcttacatgttttggattattattaattatatttgatttgcatgcggttaagtttaaaaaaaaaaaaaaaaaaaaaaaaaaaaaaaa

SEQ ID NO: 101806 - DNA, 419 bp, Oryza sativa
  Clone ID: PAT_MRT4530_99391C.1
acccacgcttccggaactttgcagaggtggtgaaggctctacatgaatgattcgcatgggtatcctttaagaccaatcacaatgctagtgacagtcaaatcacaaggaatgccttcattcttcaatctctacccagttagcgtttatgccaatactttattaaacttcatagtaagactctaagcatctctaattcatccgctacttataaaatagctattttttttcctaagcttagacctcatcatgatactaattttttatcaactatatataactaatttttaacaatcttctgtttgaatatttgaaaagatttcctataaaaatttaaatatttcttcctctttaaaaaatccaaacttacttactctttcattagcaatttcatagcttttttttataataatcgaccctta

SEQ ID NO: 101807 - DNA, 273 bp, Oryza sativa
  Clone ID: PAT_MRT4530_99392C.1
atggacactcttctcgtcgagccgcactccgcttttgacctcggtgtacttcgtcttttgatagataaaatcgtgctcaaacacatcaaggctcaggcgttccacattcatctatggatccagatggatgcggcgtttttctccggcaggcgccatcttgcttctccggcaagggacgcggcgaggcacaaggatacgacggctagaactagcaagcggcggtgcggcggcggcggagagctgtgcgagagtcacgagacagggagtggatga

SEQ ID NO: 101808 - DNA, 492 bp, Oryza sativa
  Clone ID: PAT_MRT4530_99393C.1
cagacaggaccgctgaatttcattcgtttgcgctcaagaacctcgcacatgtgtgccctacacagatggcctatgttaaagaaccctaaactcgggaccttacagtcctgacaagaaaacactgccttgaatcgacacttcaggacgaacctcacttataatgtgcgaaaacaacttgttgtgaagcacattctctccttacaggccaataaccgggtaattggtgtaatataaacgcgcaataaatccggaactaagtgatcccaccgaaagaatacccgcagacaaccataaaacctgtgacctactccaagcctacgaaggtatcatcaaatcgttagaaacttggccgaagatatttgtacagccttgccagttggacttttctctggattcccaggaaccaccaaggtagcggcatgtgccggaagcttaatctttagcaaaccaccaaggtttccacccgctctcctgcatctaccgggcctggcg

SEQ ID NO: 101809 - DNA, 218 bp, Oryza sativa
  Clone ID: PAT_MRT4530_99394C.1
ttcacgaacaaacacaccatttatctagactgtgattgtatgcatgaatacatctagagcatgtacagcgtcttgtactgtgagcgtgcatatacatacttcacacttttaaatccatgtgtattttgtgccaagacatactggtacatgtaggggcatatatacatgcgagataaacaatagattaagttcagattgctttgttttcaaagttttat

SEQ ID NO: 101810 - DNA, 420 bp, Oryza sativa
  Clone ID: PAT_MRT4530_99395C.1
atggccgacccgccgccgccgcaccatccgccgtgcgccgcgtgcgcgcaccagggccggcccagctgcccggcgggctgcccgctggcgccctacttcccggccgaccggccggagcgcttcgagtacgcgaacctcctcttcggcgtggacggcatcctccgccgcctggaggcggccggcccggaccccgggacccggcgcgccaccatggcgtccatcgtcttcgtgtcggacgcgagggccgccgaccccgtgcacggcgcctacggcgtcatacggaacctccagcaggagctcgccagcgtcaaggccgagatcgccgccatccggcagaagcagcagcaagcccagccgccgccgccgccgctggacggcccccccccccccccggtcatttttttctcttctcctctctag

SEQ ID NO: 101811 - DNA, 396 bp, Oryza sativa
  unsure (1)..(396): unsure at all n locations
  Clone ID: PAT_MRT4530_99396C.1
cggcacgagggaccacctgtgtgctatatgctaatctccacaaatggggcagcaattagcctgtcgggggaggggggcaacaatcaagccatgacaaaaaggcaaaaggccagccgcagagcaaaaaaataagaaggctgagaagagaaganaactggttctaagttcatcacataagatgaagaccaagcgtcgagtggagatactacccaagcgacgcgccaaccaaagagggcgatgccaaaaatcagaacatcatgaagagacgccccaaccaaagagggcgattgctaaaatcagaacatcatgaagcgacgccccaaacaaagagggcgatgcctaaaatcagagcatcatgaaggttattgagccaactggtcattatgatgctccccc

SEQ ID NO: 101812 - DNA, 1926 bp, Oryza sativa
  Clone ID: PAT_MRT4530_99397C.1
atgcgtaaggagaaaataccgcatcaggcgccattcgccattcaggctgcgcaactgttgggaagggcgatcggtgcgggcctcttcgctattacgccagctggcgaaagggggatgtgctgcaaggcgattaagttgggtaacgccagggttttcccagtcacgacgtttgcaagaagaggcaggatctatctcccaatggacgagctcgagatggccggactctctgaagatgacatcttcgacggccgcgtcacggacagatggagatgttttatgagggatcagatcacgagagcgagggcgtttttcagacaggccgaagaaggcgccagcgagctcaatcaggagagccgatggccggtttgggcttctctacttctgtaccgacaaatccttgacgagatcgaggccaacgattacaacaacttcaccaagagggcctacgtcccaaaggcaaagaagattgtggctctgcctaaagcttactacagatcactcatgctcccctcttcagatagcaaaccagagatcttgtgcccgtcatattcagatgatatactacattatctgaagtctggatgccggtgccgagctgttgcgcttcgagtctcctctccgatgctcgcgccatcggccggcggcgcctcctccgcccgccatgttcgggagctcctgcggcggtgcggctccgtgcaccgtctcaaccagctccacgcccacctcgtcgtccacggcgtggacgacgtcacctctcagatcctcgcgtcctactgcgcgctaccggctggtggtggggtgtggtatgcccgccaactgttcgacagaattcctgatccggacaggttcgtttacaacagtcttatcagagcctactgcaatagccattgcccccaagaagcgctgcctcttcttcgtggcatgatccggcgaggcatcctgccgaacgagttcacgctgccattcctcctcaaggcgtgcgcgagggtacaggcgtgggagcatgtgatggtcacccatggcgtggttgttaagctgggatttgtggggcaggtgtttgtggggaatgctcttctgcattcttatgcttcggccgggtcactgggggattctcgccggttctttgatgagatggtggacaggaatgtggtgtcatggaactcaatgatcaacggatatgcgcaggctggaaatactagggaggcgtgctccttgtttgaggggatgagacgtcagggactcttggctgatgagttcacgctggtcagcctgctttttgcctgctcagcggagggaaatcttgaatttggtaagcttgtgcactctcatttgctggttagaggatgtcggattgatttgatccttgccaatgctttggtggacatgtatggtaagtgtggggatttgttgatggctcatacatgctttgacatgatgcccttcaagaatgctgtttcatggacatctatgctttgtgctctggccaaacgtgcgtctattgatgccgcaagagattggtttgaacagataccagagaagagcataatatcttggaatgccatgatctcttgctatgttcaaggtggccgattccatgaagcgctggatctttataaccgtatgaaattgctaggcctcgctccagacgagtttaccttggctgctgtcctctctgcctgtgggcaacttggcgatttggcttctggaaagatgatacatgactgtatcagagataacttccataatccaggtgttgctctatttaattcacttcttgacatgtatgcaaggtgtggtcaggtagacactgccataagcttgttcagtgaaatgcctagtaaaaatgttatctcatggaatgcgattattggggcgctagcgatgcatggacgtgcacaggatgcactaatgttcttcagatctatg

SEQ ID NO: 101813 - DNA, 1722 bp, Oryza sativa
  Clone ID: PAT_MRT4530_99398C.1
atgccgccgggtagcgactctcctctcctccttgtccgtctcgatctggtcggattcggagcagcggtgctgcggtggttgaggaggccgaggcggtggcgtggatccggagcggcgagggtcaaggaggccgaggtggattggtctctcttctcctcccttggcggtgaatgtggagaaagaggaggaggcaaggcgttaactgagctcgtacggccggcgctggcgaagaaggcgacggaagaagatatcaccgaattccacaagataaatgccgctttctgcagcagctgggttgagatgggggaagaaatcaagaacggagaggagggaccagacatggctgcaccgggcgaggaggagcaggagcaggggaggaaaggcatcccgtctctgctctcctccagggaggagaacatcgcctctaacatcactcagctgattggatggacaccgcttgttgagatgaagaacatcgcgaagaacgaaggcgtacaggctcgattggttgggaagatggaagcataccagccactctgctctgtcaaggacaggagtgccctcagaatgattgaagatgcagaggagaaagggttgatcacacctggtgttaccacgctgattgagccaacgagtggtaatctcggtatcggtttggtgctggttgctgttcagaaaggctacaggtttattgctgtcatgcctgctaaatattcgcttgacaagcagatgctactgaggtttttgggtgctgaattgatattgacagatcctgcaattgggtttaatggtatgatggacaaggtggaagagctcatgaagagcataccaaattctcattgtctcaatcaagtaacaaacccagcaaatccagaggcacactttatgtggactggacctgaaatatggaaagacacagccggcaaagtggatgtgtttgtggcctctgttggttcaggtggcacattgacaggtgtagggaggtatctgaagatgaaaaatccatctataaatattgtgtgcgtggaaccttcagaaagccctgtaatttcaggtggttcaccagggccacacaagattcaaggcactggggcaggtttcatacctgaaattttggacaaatctgtcatcgatgaagtagtgacagtaaacacagaggaatccatggcaatggcgaggaggctggcgaaggaggaaggattgcttgttggcatatcttctggtgcaaatgtagctgcttgcatcaagattgcagacagagaggagaacaaggggaaaatgattgtgacaatgttcccgagcggcggtgaaagatacatgaactctgatctctttgcacctgttagagaggaatgtgataatatgaccttctgatgatgtcttggagctgctctccttttcaggcactgtacacatgtgttttccacttttcctccatattgttacttaagatatgcttcatagttcagagcacactatacatttttcttgttgcttctttgttgaggaagagcaagaatttcagcataatgtgatgtgctcctttgtgcatgtgttgtaaatttattgtatatcctaatatgccggcaaagtggttgtctatgacctacacaagttgaaataaaaaaaaatgggaccaatctaggaagaaaaaaaaaaaaattgaaaaaaaaaaaaaaaaaaaaaaaaaaaaaaaatctccctcgtgccgaattcctgcag

SEQ ID NO: 101814 - DNA, 1113 bp, Oryza sativa
  Clone ID: PAT_MRT4530_99399C.1
ctcctccgcggcgctccgcctcccgaccgcgccgcgccgatggaggccaccgccgccgccgccgcagcgcccgcgagatccgcgctccccttccggagccgcgtcgccgccgcagcacgcccaggacgcgcgccggcgctgtcggccgccccgggaaggcgcctcgtcgcgcgccgcgccgcgggcgacggccaggcggtggaggctcaggaggcgctccccatcgagaaaaggttccctcccttcccgagcgtcatggacatcaaccagatccgcgagatcctgccccacaggtttccattcctcctggttgatagagttattgagtacaagggaggagaatatgcagttgggatcaagaatgtcacgataaatgataacttcttccctgggcatttccccgaacgacccataatgcctggtgttctcatggttgaggctatggcccaggttgggggtctggtgatgttgcagcctgaaattggcggatctcgggacaatttcttctttgcaggaattgataaagtgaggttccgtaagccagtaattgcaggggataccttgatcatgagaatgactctgaccaagtatcagaaaagatttggtcttgccaagatggaaggaaaagcttacgttggtggtgacctagtgtgcgagggggagttcctcctggttagcgcaaccgaatagaggaaagaacatgatgaggtggccaacaatggattgtccatctttcttgatcctaagaggctcaaattacaggatggtgagattccaaacacgatggaggaagagaaaccatcagcaggtgttcaacctgatcctactgtgccaaccatggccttatcatggatgctaccaactcagggccaagagactatccatgacactatgaacactgcatatgagatgtcatcttcagaaacgccgccactcagagcagaccaagccgccgccgcggcgccgatggacgtcgaggttcagctccggcagcggcagcctcaggcgccgccgtgtcagcaggctcatttctggtcagttagtaatgatgaagacatgtgggctggatattggaaatatttggcgagtgaaatatcaatttgtttcttctga

SEQ ID NO: 101815 - DNA, 2332 bp, Oryza sativa
  Clone ID: PAT_MRT4530_9939C.1
gcacgaggcaactccccttccatcccccatcgggctcctcccccccattcttccagaaccttccagcaacctcctcccgatccctcccctcccttccccttcccttccccgcacgcgccatggtgtcgtgacgtcggcggcgggagcggaagatggaccccttctccaagtcccccgacgacgacgacctccgccccgaggcggaggcggcgaggcggccgcagccgcagccgcagccgcgggagtggcggttcgcgcaggtcttcggggagcgcgcggcgggggaggacgtgcaggaagttgacatcatctctgcaattgagtttgacaaatccggtgaccatcttgccactggagatagaggtggtcgtgtagttttatttgaaaggactgactccagggatagcgccagtcggagtgaacttgagagacaagattacccgattgccaggcatcctgaattccgttacaagactgaatttcagagtcatgaacctgagttcgactacctaaaaagtttggaaatagaggagaagattaacaagatcaagtggtgccaaacagccaacaacgccctctttctcttatctacaaatgataaaacaatcaagtattggaaggtgcaagagaggaaagtaaaacgaatttcagtgatgaatttgaatacctctcaaagttcaggcaatggcacaacttctagttcaagcagcagtagttctagagcgattcttccaaatggtggatgctcagagaagttatacaacttcccaaacaacgacctattatttcctcctggaggatgcacatcattgcgtctgcctgtggtagtcactggccaagatttgaaccttgtaccaagatgccggcgtgtatattcacatgctcatgattaccatattaattccatttcaaataatagtgacggggagacatacatatcagcagatgatctgcgaataaatctttggaacctggaaattagcaaccaaagctttaatattgttgatgtgaagcctgcaaacatggaggacctaactgaggtgatcacatgcgcggagttccacccaactcattgtaagacattgggaagcctccaaacatggaagacctaacggaggtcattacatgtgcggagttccacccatgtcattgtaatacactggcctatagcagttcaaagggttctatccggagatccttttttcacagagataattgcatcggtatcagatacaaaatttgcgagggatgtgaagcacctggatcaagatccttatttacagagataattgcgtcaatatcggatagaaaattttcaagggatggcagatacatcctatgtcgcgataagatgactctcaagctatgggatctaaacatggattcaggtcctgtttcaaccttccaggttcatgaacatttaaggcccaagttatgtgatctgtatgagaacgactcaatatttgacaaatttgagtgttgtcttagtggggatggactccatgttgcaactggttcatatggtaatttatttcgggttttttcctgtactcctgggagcgacgcagcgaccactgaggaggcaagcagaaaccccatgagaaatccggttgtaaaccgctaatggaaattcttacgatctttcaacaaagttgctccatcttgcatggcacccaactgagaattccatcgcgtgtgctgctgcaaatagcttgtacatgtactatgcataggtaacaggctagagagaaaattgtttttttggtttggttgacgtgaagccttctactttcacatgcaaccagggagatggtgcaaaggacattgttgtcaatttcatgactggggccaaaagaggcagtcggtttccacgagaccactcccgatgctacttgcgacagtaacaggctcctccgttccgattctttagtaaatgttaaatatatctaatcatatcaacatttttggtcccaagatatgattgtagctgccttgtagccagaatcagcagttgaaagataaagcagtagataggcgatgctgatgctaatttcaccggaggtcacagaaaatatctgcttaacagggctgtaagatttttttttcttttctttttcatttcttcacatgtaatgccacctagccagggctaacaaccatctcttgtcatggacatccaaatctttgaacataaaattttactacaattattttatttagaacaaaaatccctgaacaatagataactcagttattgtagttaatctttcatttctcccctattcattcaataatctacacgtgatccaaaaaaaaaaaaaaaaaaaaaaaa

SEQ ID NO: 101816 - DNA, 357 bp, Oryza sativa
  Clone ID: PAT_MRT4530_993C.1
tgggctgaattcattggttgaggtgaaccagtctggtcttgtaatggagacaatgattgatattacaccaaaagatccactcccaacaccttcggttggcccacttgacccagactgttctagagaaggcttagttctctgtgacaaagagaggatcaaaggacaacagggagtaagcttagatgcaatggttggaattcttacccgtctaggaagagacatggagcaaattggtgttgataaaagctttaagtttggctgaaaaggttgcatctataatggaaggagcacaacctctcctttcacaggtacagttttctgacgatttagccgatacccgcattaaccctaaagcga

SEQ ID NO: 101817 - DNA, 393 bp, Oryza sativa
  Clone ID: PAT_MRT4530_99400C.1
gatcgccgtgatgacgacgacgacgacgacgagcgccatcggctccctcctcgtgctcctgcttgtggtggtggtgggaggggtgttcaccaagatattactggtgaagtactattcctggactctgctataaggcgcaagagattctatagcggcaccattactttcactgacgggtactgatggtgctttaacgctaacacagaagtgatgaagatcatagacgggttctgagcgaataatacatggtatgttgtctggataaagggtggaacatattactcaagaccctatagtacgcacggatcgacttgtaccttagcatgagctcaggaatgcaaatatcgatcatatgactcctatgcagttggctaaacctgggagctgcataac

SEQ ID NO: 101818 - DNA, 331 bp, Oryza sativa
  unsure (1)..(331): unsure at all n locations
  Clone ID: PAT_MRT4530_99401C.1
attatcagggaaagtttcttattttcatttttttcttttttnatactcaaaaattttaacatggtaaattcactccaaacagaggtgcgggatacaaaacttaattttttttaactacaaaaaattttccattcctccatgaacctataagcttttacacccaaaccacacaaattacaatgcacgagccttttttcttcacttgcaaattaaatggggcttgagtagccaagcattcatctggggttctgtaaccgagttaagcgttgcttaccactaagttaccggggatgatttttctgtaaggggagacctacacgtccccgaggaa

SEQ ID NO: 101819 - DNA, 681 bp, Oryza sativa
  Clone ID: PAT_MRT4530_99402C.1
atgactgttgttgcatgggctcgaactgactgtactgagacgcaaactgaggttgagccagtccccctagctgatattgggcttgcggggaaggatgctgatattgataattcaagttgcccctctggtaattatgaaggttcagctgcatattacgtgccaaatgctcgggaacaacttgaggcattattgtgccatccggctgtacatggtgaaccaagtgttctgggacgacttgatttaaaaattgttgtacaggctgtccaccaggcgtcacaaacccagccgatgcgcaggcttggtgctgaatcggctgaacgatttgctgtcttaacggcgtttgctgaatcggccgcggaggctgttgccttggtggcgtttgctggactggttgcacaacttgttgctggactggttgtacaacctgctgaatcgggagtgtctgttgaatcggctgctgctgtattggatcaacagcaggttgaggcggcagaaacatggcagcaacctgatcttgcgtcggccgattcacaacctgcccactatgctgtggctgctctctcattaacaactgagggttcaccagctggcctggtgccaatgctgacggagcaggtaagggagtcgatgccggcgccgtcggctgagctaatggtgcgacgggggaaactacctgaatag

SEQ ID NO: 101820 - DNA, 542 bp, Oryza sativa
  Clone ID: PAT_MRT4530_99403C.1
tttcaaactccctgtactccttgggagttgtcaccttgatttccttgagaaccatctaaagcacctttgtcactcggttgagccgagccatctggagcttgtttcacctctccatccttggaagaaccagtaccaggaacatcagcaactacctttaccttatacttctgcaccactgagccttgcgggtttgcataaatgagctcaagaactggttacgtgcctgctgcatcatcgcttcaaaatccttcttttgattaggtatcagcttgtctggagtgatgttcacgatgttgccttcattaacctcggataggcccaactactgaatcttctctttaatagaactggggctagccgaggacagcgatgctggcggcttgtcgtccatgagagaaaatttctgacttctaatctgtcccaccgggtgtgccaaaagcgtgttgatggaaaacacgaggcctggaagatctgcttaactccagtgcaggtccaaactcgccttcgggtatgctagcgtgccagttgatttgatcctgtaa

SEQ ID NO: 101821 - DNA, 629 bp, Oryza sativa
  Clone ID: PAT_MRT4530_99404C.1
ccggccgggagctccaactcatctttcaatcatccaactacttacaatcttttagaccctcggtgggttatactcgtcttttcacaacaaacaaacaaccctcaacacttctttctacaacaaccaacaccatcaaaatgaagttctccatcgtcttcgccggcctcttcgcctccaccgccatcgccactccccagggcaatgtcacccccaacaccatgggcgccctcgagaagcgcgcctctttccccatccccgcctccaagggctccgtcacctacaagaaggtcgagtacatctccggcaccttcgacggtggcacgaagacctacggccgtggtgtcaagtgcactggtcaggctgaaggtggcgacagcgacgccgtcttcatcctcaagaacggtgccaccctcaagaacgctatcatcggcgccgaccagatcgagggtgttcactgcgagggctcttgcaccatcgagaacgtctggtggaagaaggtctgcgaggatgctctctccctcaagggtgacggtaacgctctcatcaagggcggtggtaccaccggtgctgctgacaagggcatccagcacaacgggctcgggacggtcaccatcgatggcttcaccggt

SEQ ID NO: 101822 - DNA, 6048 bp, Oryza sativa
  Clone ID: PAT_MRT4530_99405C.1
ttgcaggatcaaatcaactggcacgctagcatacccgaaggcgagttttcgacctgcactggagttaagcagatctgccaggcctcgtgtttttcatcaacatgcttttggcatgcccggtgggaccgattagaagtcaacagcagttttccccatgaccgagaaactgccgccatcgccgtccttggctagtccaggttctgttaaagaaaaaaatccagcagctgagcttatctgaggttaatgaaggcaacatcgtgaccatcactccagacaagttgacacctgatcaacaaaaagattttgacgcaatgatgcagcaagcacggaaccagttcttaaactcattcatgcagacccgcaaggggacagtggtgcagaagtatatcgtgaaggtagttgctgatgttcctgggaccggttcttctaaggatggagaagggaaacaagctccagatggttcggctcaaccaagtaataaaggtgctgcagatggttctcaaggaaatcagggtgatagctctcaaggagtacagggtgttcaaggtgatggtgctcacggagttcaagatcaggttgactatgccgtgcaccatgctttgatcaatcagtctggaatattagtcaatactttgtcaaacatcgtgaaaacaatggttgatggttcaatggccgagtatcaagctacaggaccagtttatctaccaggaggaatgttcccaaattatcggccattaatcactgataatcaaccagttgtccagtcaatctctcttaatgcaccatcggctcaaccgacggcacaagtattggttcctacacttgctgcaccaccattggctccaggccaattagttaatccccggttgctggtgagagaacaaccacaacatagtggacagaatgtgaatcggctaacacaagaataggttgcatctatgttcttacctcctcaacatactgttgatccagcccagcagcagccgacttaacaaacaccaccaaggcagcaggttgtgcagccgagtttgcaacgcctggtaatcagcctggacagcatgctgcgaatcaagtggttccagagcacttagttcataatgtgcaaccatatcaaacaatgttatgaaggagcagtttgggcttaggccaaaagacgctggaaatttgtaccgacagccttaccctgaatggtttgagagagttcctctacctaatcggtttaaagttccagacttttccaaattctcaggacaggatagcacatcaacttatgaacacattagccgatttttagcttagtgtggtgaagcatcggctgtggatgcctcgagggttaggttgttccggttgtctttgtctggatcagctttcacttggttttcttctttgccatatgggtcgattaacagttgggccgatttggagaagcattttcacagctctttctacagtggggtacatgagatgaaattgtctgatttaacaacaatcaagcaaagacatgatgagcctgtgcatgagtatattcagagattcagagagatgaggaataagtgctatagcttgagtttgactgatgctcagttagcgatttggcttttcagggtatgattgctccgatcagggagaaattctcatctgaagagtttgatagcttgtcgcatcttacgtagaaagtaaccctgcatgaacagaggtttgcaaaggctaggaagaactctagaaaggttaatcatgtttgtccttacatatatggatcggatgatgatgacgatgatgactccgaaatagcggcggccgaatgggtaagaagcaaaaaggttataccgtgccaatgggtgaagaattctggaaaagaggagaggtatgactttgatattaccaaggctgacaagattttggatttactactctgagagaagcagattcaacttcctgctggtcatacaattccatcggctgaagaattgggcaagaagaggtattgcaagtggcataattctaggtctcatactactaatgattgcaaaatcttcaggcagcagatccaagcagctattgatgggggcaaaatcaagtttgatgattctaagaggccgatgaaggttgatggtaatccttttcctgtcaatacggtgcatacagctggccgaacagccaatggaggacgtgcaaaaggttttcaggtgaattcagcttagattatcaataagtatcagaagaaatatgacaggcagcaggaaaagcgttacgaagaagatgatgatggtatgaggctgctgtctattgaagactgtcctgggtgcagcaatgttgcagaaagttcaagccgatcgtataacagaggcaatcggctagggcaagcaagagttcctgttcatcaaaggttgggcccggtgaaccaaggttgtaaccaagaagacaatgaagataggaagactcaatggtgtccttctggtatatttacaaagaatcagaaaagaaggaaaacaaagccaaagcaggagtggcgcgttaagaaacaagctcctgtagccgatgagggcgcaaccgatgaagcaaagagattggccaaagggaaaagtattgtaaccgcatcggttaacatggtttttacgttgcctgcagagtttgggatcaagcaagccgatgtcgatgaggttgaagaggaatcggctaaattgattttgtcaccagagcaagcagtcttcgagaagccagagggtacagagaattggcatctcaaaccgttgtatataaatggttatgtcaatgggaagccgatgtccaagatgatggtcgatggtggggctatagtaaatttgatgccttatgctacgttcagaaagttgggcagaaatactgaggatctcatcaagacaaatatggtacttaaggattttggtggcaatccatcaaagaccaaaggagttttgaatgtggagctgacagtcggcaacaaaaccatccctacaacgttctttgtcatcgatgggaagggttcttacagcttgttgcttggaagggattggatccacgccaattgttgtattccttcaactatgcatcaatgcttgatttagtggcaaggcgacaagattgaaattgtgccagccgacagccaattgaagatggagaacccaagctattattttgagggcgtcgtggagcgttcaaatgtctacactaaggacacagtagatgatctcgatgacaaacaaggacagggtttcatgtcagccgatgatttggaagaaattgacataggtccagaattcagaacaaagttgatagagctgttgaaagaattcagagattgcttcgcttgggagtattatgaaatgcctggactcagccgatcgattgttgaacatcggctacctattaaaccgggggttagaccacaccaactacctccgagaagatgcaaagccgatatgcttgaacctgtcaaggctgagattaaacgattatatgatgctggttttattcgtccttgccgatatgccgagtgggtttctagtatagttcaagttatcaagaaaaatgacttgaataaggctaccccaaaagatgaatattcaatgccagtagccgatcagctggttgatgctgcctcaggacacaagattttgagttttatggacggtaatgcaggttataatcaaatctttatggccgaagaagatatccataagacaacttttaggtgtcctggtgcaatcggcttgtttgagtgggttgtaattgatgtagggctattacctgacaattcaggggcccgaacctgtataaaaatcctcgtctccgtctcttttacctcagtctcgtgtatatcctagcaccgacgatccccatactatgcaaataccagaaccgcatagccgatttgaggaaggtttttgagagtaccaggaaatatggcctaaagatgaacccgacaaaatgtgcttttggcgtatcggctggctagtttttgggatttcttgttcatgagagggggatcgatgtgattcaaaggagtgttaatgcgattaagaagattcaacctccggagaacaagacagaattgcaagagttgatcggcaagataaattttgttaggaggtttatttctaatttgtctagccggttagagccttttacaccattgctaagattgaaagccgatcagcagtttacttgggggggtagagcaacagaaagcattggacaatattaaggaatatcttagctctcctccagttttgattcctccacagaaggggataccttttcggttatatctgtcggccggtgagaagtcaatcaatcggctcagtcttgattcaggagcttgaagggaaagaaagagttgtattttatctaagtcgttggctcttggatgcagaaactagatattcccctattgagaagttgtgcttgtgcttatatttttcatgtacaaggttaaggcattacctattgtccaatgaatgcactgtcatatgcaaggccgatgttgtcaagtacatgttatcggctccaattttgaaaggaaggattggaaagtggatattttccttaactgagtttgatcttcggtataagtcaccgaaggcggtcaaaggacaagctatagccgattttattgtagaacatcgtgatgattcaatcggctcagttgagattgtaccatggactttattctttgatgggtcagtgtgcactcatggttgtggcatcggcttggttattatttcccctcggggggaaagttttgagtttgcttatactatcaaaccttatgcaaccaataatcaggctgagtatgaggcagttctcaaagggttgcagttactcaaggaggttgaagccgatgctattgaaatcatgggggattctttgctagtaatcagtcaattggtaggagagtatgagtgcaaaaatgatacattgatggtttataatgaaaggtgccgagaattaatgaaggagtttcggctagttactttgaagcatgtatctcgagaacaaaacattaaagctaatgatttgtcccaaggggcatcggggtattagccgatgatcaaagatgttaaggttgaggttgttgtaataacagccgatgattggagatatgatgtgcatcaatatctgcagaatccgtctcaatcggcttctcggaaattaaggtataaagcgttgaagtacactttattggatgatgaactctattataggatgattgatggggtgttgctgaagtttttgagtgccaatcaggttaaggttgcaattggcgaagttcatgaagggatttgtggtacccatcaatcggctcataagatgaagtggttgctttggcgtgcagggtatttttggccgacaatgctagaagattgtttcaggtattacaaagggtatcaagattgtcagaaatttggagcgattcaaagggcaccggcgtcggctatgaatcctatcattaaaccatggccatttagaggttggggaattgatatgatcggcataattaatccaccatcgagtaaaggacataagtttatattggtggcgaccgattattttaccaagtgggtagaggcgattcctttgaagaatattgattctttggatgctatacaatttgttcaagaacatataatctatcgatttggtatccctcaaaccattacaaccgatcaaggttcaattttcgtgtccgatgagtttgttcagtttgccgatagcatgggtatcaaattgttgaattcttcaccatattatgcacaagctaatgggcaggccgaggcatctaacaagagcttgatcaaattgattaagagaaagatttctgattatcctcggcagtggcatactcgattgaccgaagcattgtggtcttatcggatggcttgtcatggatcgatccaagtccctccttataagcttgtttatggacatgaagctgttttgccatgggaggttcgaatcggctcaaggagaacggaattgctaaatggcaagtatttgaagaaatattacccaaatgtttgggttaatgca

SEQ ID NO: 101823 - DNA, 612 bp, Oryza sativa
  Clone ID: PAT_MRT4530_99406C.1
atggccgagaaacaaccaccaccaccatccccagctagcccaggctctgttaaggaaaagaagtacaaaatagaagtggttgctgatgatccagggaccagttcttctaaggatggagatggaaaacaagctccagacggctcggctcagctgagtaacaaaagtgctatcgacagctctctaggaaatcaaggtgacaattctcaaggagtccatggagtgcaaggtgacggggtgcatggagtgcaaggtgatggtgctcaggggttgcaaggaggaaatcataatcagaatagtgatgcggcacaagattttttcagtaatttccaagatcgggttgactacgctgtgcatcatgctttgatcaatcaatctggggtgttagtcaataccttatcaaacatgatgaagtccatagccgatggttcaatagctgagcatcaggctgcaggcccggtttatttgcaaggaggtgtctttccaaattatcggtctttgattaccgatgttcagccatcaactcaggcggtttcctccgctgcaccaacatctcagccgacggtgttggcaactttttgtgacaagttgacaagcacgatcgcagcaccttaa

SEQ ID NO: 101824 - DNA, 198 bp, Oryza sativa
  Clone ID: PAT_MRT4530_99407C.1
atgggtaatatatatggctgcgcaagggaacctctccaactcaccttggagaggaaaggtgggaaaggggaaggaggaggtccgatgggcctgctaccattgttgacgccttccggcatcgaccagacctggtggtgcgacggtggcaacaggggaatcggcgacgcacgagcagtggcggacgcaggattaaaataa

SEQ ID NO: 101825 - DNA, 926 bp, Oryza sativa
  Clone ID: PAT_MRT4530_99408C.1
atggcgccgtccaagcagtacgacgaaggcgggcagctccagctcatggatgcagagaggatcgaggaggaggaggagtgcttcgagtccatcgacaagttaatctcgcaagggataaactctggagatgtgaagaagctgcaggatgctggtatctacacttgcaatggcctcatgatgcatacaaagaagagcctgacaggaatcaagggattatctgaagcaaaggtagacaagatctgtgaagcagctgaaaagcttctgagccagggcttcatgacaggaagtgatctccttatcaagcggaagtctgttgttcggatcaccactgggagccaggcacttgatgagctgcttggcggagggattgaaacactctgcatcacagaggcatttggagagttccgatcagggaagacccagttggctcacactctatgtgtctccactcagatcatatatgctcgtgcatacacctatgagcaccagtacaacttgctccttggcctcgctgccaagatggctgaagagcctttcaggcttctgattgtggattctgtgattgcactattccgtgttgatttcagtggcaggggtgaacttgcagagcgccagcaaaaattggcacagatgctctcccgccttactaagatagctgaggagttcaatgttgcagtgtacatcaccaaccaagtgattgcggacccaggtggtggaatgttcataactgacccgaagaaacctgcgggaggccacgttctggcgcatgcagccaccatccggttgatgctgaggaaaggcaaaggagagcagcgtgtctgcaagatctttgatgcccctaacctgcctgagggagaagctatatccttttgcattgtgcatacatgtttactgaaactacttgttcaattggttaccttggttca

SEQ ID NO: 101826 - DNA, 555 bp, Oryza sativa
  Clone ID: PAT_MRT4530_99409C.1
atgcgaactggggctgagccgatccccctggctgatattgggcttgcggggaaggaggctgatattgataactcaagttacccccttggtaattatgaagatttggctggatattgcgcaccaagtgctcaggaatcatctgaggcatcactgtgccatccggctgctgaccaccaggtactgctaacccggccgatgcatttactgaccccgggtgctaaatcggctgaacgatctgctgcctcaacggagtctgttggatcggctgcaggggctgctgccttggtggtgtatgctgaatcggttgcagaggctgctgccttggtggtgtttgctgagctggttgtacgacctgttgttggattggttgtacaaccggctggattgggggtgcctgctgaatcggctgttgctgtactggatcgacaacaggtggaggtggcagaaacatggcagcaacttgatcttgagttagccgattcgcagcctgcccgccatgctgtggctattcccttgttaacaaccgagggttcaccggctgtcccggcgtcatag

SEQ ID NO: 101827 - DNA, 2376 bp, Oryza sativa
  Clone ID: PAT_MRT4530_9940C.1
ttatctcccccctcccccacacacatctcccgggctcgatttaaccctcctgcggggtcgaacacgacaacgccttctcctccgcctactcccccaacgcatcgccccaccccatccatccagattcctccctcctcctcctcctcctcttcctcctcccccgatcccgccccgatgcgatgcccccgcggcgcgatcgcgtgatggacccctcctccaagtcccccgacgacgacgacctccgccccgaggcggaggcggcgaggcggccgcagccgcagccgcagccgcgggagtggcggttcgcgcaggtcttcggggaacgcgcggcgggggaggacgtgcaggaagttgacatcatctctgcaattgagtttgacaaatccggtgaccatcttgccactggagatagaggtggtcgtgtagttttatttgaaaggactgactccagggatagcgccagtcggagtgaacttgagagacaagattacccgattgccaggcatcctgaattccgttacaagactgaatttcagagtcatgaacctgagttcgactacctaaaaagtttggaaatagaggagaagattaacaagatcaagtggtgccaaacagccaacaacgccctctttctcttatctacaaatgataaaacaatcaagtattggaaggtgcaagagaggaaagtaaaacgaatttcagtgatgaatttgaatacctctcaaagttcaggcaatggcacaacttctagttcaagcagcagtagttctagagcgattcttccaaatggtggatgctcagagaagttatacaacttcccaaacaacgacctattatttcctcctggaggatgcacatcattgcgtctgcctgtggtcactggccaagatttgaaccttgtaccaagatgccggcgtgtatattcacatgctcatgattaccatattaattccatttcaaataatagtgacggggagacatacatatcagcagatgatctgcgaataaatctttggaacctggaaattagcaaccaaagctttaatattgttgatgtgaagcctgcaaacatggaggacctaactgaggtgatcacatgcgcggagttccacccaactcattgtaatacattagcctatagtagctcgaagggctctatcaggcttattgatctgcggcaatcagcactatgtgacaaccatgctaagttatttgaggagcatgaggcacctggatcgagatccttttttacagagataattgcatcggtttcagatataaaatttgcaagggatggaaggcacattcttagtcgtgattatatgactctcaagttatgggatataaacatggattcaggcccagttgcaactttccaagttcatgaatatttaagacctaagctctgtgatctatatgaaaatgattcaatatttgacaaatttgaatgttgtctgagtggggatggacttcgtgttgcaactggctcttacagcaatttatttcgtgtttttggttgtactcctggaagtgcggaggcaaccaccttggaagcaagcagaaatcctatgaggcgccaggttgctaatccaacaaggcctgcacggaccctgacctcattgacccgtgccgtgaggagaggtggagaaaatccgggagttgatgctaatggaaattcttacgatctttcaacaaagttgctccatcttgcatggcacccaactgagaattccatcgcatgtgctgctgcaaatagcttgtacatgtattatgcatagagaaggtgcttgagaaaatttattgtttttggttcgctcttggaggccgcgtgccttcacatgcaaccagagatatggtgcaggatgttgtcgtcaattcctcccttggggccaaaagaggccgttgatgcccacaagatggcttttgttgctgtgactgcgtccttgttgattctttagtacatgtgtaaattatgtcctaatcatcagaagttttggtcccaaaggatgtggtcgcagttgccgtacattccaaagttagcagtccaaggcacaaatcaaagatagaaaggattcattgtgctaatttctgcagtaaaggacataagcaaatatgcattgcaatgggtgtatgattatcttttacatgtaatgccaatcagacaaggctaatcagttgttttagaacaaaaatccctgaacaatagataactcagttattgtagttattcttcatttctcttctattcattggaccgttgaaataagtcagcactagagtaactgctattgtttgggattcttaaccaggatggattttctttttgactggtctggactttttttcgctatgataaaatgaggttatattagaact

SEQ ID NO: 101828 - DNA, 242 bp, Oryza sativa
  Clone ID: PAT_MRT4530_99410C.1
gatatagcttctccctcaggcaggttaggggcatcaaagatcttgcagacacgctgctctcctttgcctttcctcagcatcaaccggatggtggctgcatgcgccagaacgtggcctcccgcaggtttcttcgggtcagtatgaacattccaccacctggccatgcctaccagaagcctgaaaggctcttcagccatcttggcagcgaggccaaggagcaagttgtactggtgctcataggt

SEQ ID NO: 101829 - DNA, 522 bp, Oryza sativa
  Clone ID: PAT_MRT4530_99411C.1
ctacctccgcctttgcctccaccacacctttgccttctcctttcctcctcctctcattctccgcctcgagcgccccttctcctcctgcccgtcgtggtgtcgctcgaccgcgccccgctcggccgcatgtggcacatcaagctcaatgccaagacacatcacatcagccacccgcggtgcatctctccttatccccatcagcgctagggatatcgcaacaacgacgacaaagaggacgagaaggcggtagcagtgtccatggcgacggtggatctggcggagggtgcagccagcaaggcaaaggctggcaattggtggattggtggaggacaacgagcaatgcgaaggctggcgacgaccacatcttctctggatctggttgtaggttgcggcggaggaaggcgcaggcacaggcggcaatggtgtgaccacgacatcaagtggtccaatgttgttcatcttcaatccgagctcagcgtactcggccgacggtgcggcagacgggctggcggaggacgacat

SEQ ID NO: 101830 - DNA, 409 bp, Oryza sativa
  Clone ID: PAT_MRT4530_99412C.1
atggcggagatgtgcgtgggcgccaatggtcctcctcgtcaccgtgccgccgccccttcaccgtcaccgcctatcctcctcatcactgagccgacaccatccctctgcctccgctcctcctaccatatctgtggttgctgccacccctccacagccaccgcctcccattcgccatcgtcggcagtcctcctcgtcactgagccgacgccacccctcctacccttcatggagctgctgcctcccctctgccgagttgtcaccgtctcttcgaccactgccagcggccctcctcgtcggcgagtcaatgttgcctctctgccaccgatcctaccctccgcgaagcagccgggggcactccgcagctgctgtcgtgctgccgccaccgctcctcctgcccttcgcgctttga

SEQ ID NO: 101831 - DNA, 390 bp, Oryza sativa
  Clone ID: PAT_MRT4530_99413C.1
atggtgaggctggcgacgacagctccaggggtgtcgtcgaggaggctgaggaggtcgtcagccgtggagatgtggagggagtgggagcggcggcgggcacgggagcagcagccgcggtgcggggaggtggcgggcgggacggcggcagagtgcgccgcggttttctgctgcttccccttcactgtaatcaagctcgtcgtcctcgcgaccgtttgcatccccgccgcgctctgccgccgcgccgtccaaggtggcgttgccgcgtggcggggaggcgcgggcgtcgacggggaggcgagaacggcgcaggcgtgcagtggttgtgcgagggccgcgacgccggtgggggaagcgatggggctaggcgcgacggtgggagaggaggtctag

SEQ ID NO: 101832 - DNA, 338 bp, Oryza sativa
  unsure (1)..(338): unsure at all n locations
  Clone ID: PAT_MRT4530_99414C.1
ttttcagccggcctgaacgaattgtgccaattgctgagagatttgggatggatgccaatgctgttcttgataacatcatatatgctcgtgcatacacctatgagcaccagtacaacttgctccttggcctcgctgccaagatggctgaagagcctttcaggcttctgcaaaaattggcacagatgctctccgcccttactaagatagctgaggagttcaatgttgcagtgtacatcaccanccaagtgattgcggacccaggtggtggaatgttcatactgacccgaagaaacctgcgggaggccacgttctggcgcatgcagccaccatccggttga

SEQ ID NO: 101833 - DNA, 3099 bp, Oryza sativa
  Clone ID: PAT_MRT4530_99415C.1
atggctttgatcctcattggagttgcgagttttttagattttgttggaatgaagaatcagaaaagaagggttcagagattgaggaacagggagcgctttcaggaggttgaacaggaaattaaccatcggctgaagaaagtaaagccgtggcaggagtggcgtgttaagaatcaggttcctatagctgatgaggccgcagccgatgaggcaaaaaggttagctaaggggaaaagtgtcgtaactgcttcgatcaacatggttttcacattgtctgctgattttgggagcaagcaagccgatgtcgatgaagttgaagaagaattggctaagttgattttgtcgccagagcaagcgatttttgagaaactagtggggacaaagaatcagcatcttaagccattgtatataaatggttatgtcaatgggaagccgatgtccaagatgatggtagatggtggggctgcagtgaacttgatgccttacgctacattcagaaagttgggtagaaacgctgaagatctcatcaagacaaacatggtgctcaaagaattatgtggcaatccgtcagaaaccaaaggagttttgaatgtggaattgacagtcggcagcaaaactatccctacaacattctttgtcatcgatgggaagggttcctacagtttgttgcttgaaagagattggattcatgccaattgttgtattccttcgaccatgcatcaatgcttgattcattggcaaggcgacaggattgagatcgtgccagccgatagccaattgaagatggagagcccaaattgttattttgagggcgtcgtggaggactcaggagtctacgtcaaggacataatggatgatctcgatgacaagcagggacaaggttttatgtcggctgatgatttggaagaaattgatataggtccaggggttaggccacaccagcaacctccgaggagatgtaaggctgatatgcttgaacctatcaaagctgaaattaaacgattgtatgatgctggttttattcatccttgccgatacgctgaatgggtttatagtatagttcctgttattaagaagaacggcaaggtcagggtgtgcattgatttccgagatctgaataaatctacactgaaggatgaatacccaatgccagtagccgatcagctggttgacgccgcatcaggaaacaaaattttgagttttatggatggaaacgcaggatataatcaaatctttatggctgaagaagatatccataagatagcttttagatgtcctggtgcaatcggcttatttgaatgggttcttatgacttttggcttgaagagtgctggagctacatatcaaagagccattaattacatatatcatgatctaatcggctggttggttgaagtctacattgatgatgtggttgtgaaatctaaagaaatagaggatcatatagccgatttaaggaagtttttggggtttcttgttcatgagaggcggatcgaagtagctcaaaggagtgtgaatgcgatcaagaagattcagcctccagagaacaagacggaactacaagagatgatcggcaaaataaattttgttagaaggtttatttctaatttgtctaggaggttggaaccttttacaccattgttgagattgaaagccgatcagcagtttacttggggggaagagcagcaaaagggtttggataatattaaagaatatcttagctcttctcctgttttgattcctccacagaaagggataccttttagattgtatctgtcggctggaagggttggaaagtggatattttccttaactgagtttgatcttcggtatgagtcgccgaaggcgattaagggacaagctatagccgattttattgtggaacatcgtgatgattcaatcggctcagttgaaatggtgccatggactttattctttgatggatcgctgagtatgaagcagttacttaaggaagttgaagccgatgctattgacatcatgggggatactttgctggtaatcagtcagttggcaggagaatacgaatgcaagaatgatgtgttaatagtttataatgagaagtgccaagaattgatgaaggaatttcggctggttactttgaagcatgtatctcgagaacaaaatattgaagctaatgatttagcccaaggggcatcggggcataagccgatgatcaaagatgttaaggttgaaattgcagctatgacaatcgatgattggaggtatgatgtgcaccagtatttacagaatccatctcaatcggcttctaggaaattgagatataaggcgttgaagtacgctgtattggatgatgagctttactatcggatgattgatggggtgttgctcaagtgtttgagtgccgatcaggctaaagttgcaatcggcgaagtccatgagggaatttgtggcactcatcaatcggctcataagatgaagtggttgcttcggcgtgcagggtatttttggccgacaatgctggaggattgtttcagatattataaaggatgtcaggattgccaaaaaattggagcaatacaaagggcaccagcatcggctatgaatcctatcattaagccatggtcgtttagaggttggggaattgatatgatcggttcgatttttgtgtccgatgaatttgttcagtttgccgatagcgtgggtatcaaatttttgaattcttcaccatattatgcacaagctaatgtgcaggctgatgcatctaacaagagcttgatcaaagtgattaagaggaaaatttcttattatcctcggcagtggcatactcgtttagccgaagcgttgtggtcttatcggatggcttgtcatggatcaattcaagttcctccttataagcttgtttatggacatgaagctgttttgccatgggaagttagaatcggctccagaaggatagaattgcaagacgatttgacggccgatgagtattataaccttatggctgatgaaagggaggacttggttcaatcgcatttacgagcccttgctaaggttaccaaagttaaggaacgagttgataggcattataacaagaaagtggtgcccaaaactttttcgtaa

SEQ ID NO: 101834 - DNA, 1578 bp, Oryza sativa
  Clone ID: PAT_MRT4530_99416C.1
cccacgcgtccgcccacgcgtccaccctcagccgccacactcccatgtcccatccactctcctctcctctccggcggtgggtacaggcgatgacagcgtgcggcggcgtcctcctcctccattgccgctcgcggtgccggcttactctcccccaccgcttaccacgcctcctccgtctccgccgtcgccaggctcgggagcggcggatctgccgccgatagcgccggcttccgcgccggcatccgtctccgccgctgccgggcacgggagcggtggatccgccgccaccatccactcccccaccaccgccgatcccctctctatgcatgcctcacgccgtcgcataccctcccgatttccctctccaatgatggatggtttggtttggtttggtttgtctgcttgcgagcagcttctggttgctgtgcgtgttcggctgtttctagtttctctcccccaatttcgtgcgttctggagataaattagcgggaggctgtttctagtttttctcccccaatttcgtgcgtttctagtttattatttttcgcggaagtctgttcggatcaccactgggagccaggcacttgatgagctgcttggcggagggattgaaacactctgcatcacagaggcatttggagagttccgatcagggaagacccagttggctcacactctatgtgtctccactcagcttccaattcacatgcatggggggaacgggaaggttgcttacattgacactgagggaacattccggcctgaacgaattgtgccaattgctgagagatttgggatggatgccaatgctgttcttgataacatcatatatgctcgtgcatacacctatgagcaccagtacaacttgctccttggcctcgctgccaagatggctgaagagcctttcaggcttctgattgtggattctgtgattgcactattccgtgttgatttcagtggcaggggtgaacttgcagagcgccagcaaaaattggcacagatgctctcccgccttactaagatagctgaggagttcaatgttgcagtgtacatcaccaaccaagtgattgcggacccaggtggtggaatgttcataactgacccgaagaaacctgcgggaggccacgttctggcgcatgcagccaccatccggttgatgctgaggaaaggcaaaggagagcagcgtgtctgcaagatctttgatgcccctaacctgcctgagggagaagctgttttccaggtaacatcaggtggaataatggatgcgaaagactgaatgttcactgagggtgcttcctgtgttcaaattgttcaggtttctccaagtaaatttctgcataggccatataggttaggtacattgataaaagaatacaactactgctgctgctatgtttttgccactgctgaggaaagaggcaacctcatttatcaagacggttatatctcacattgggtattatgagttatgtgatcaacagttgtactgaaacaagtgctagtattgtcttaagtgaaaatataagaggttaacatgttggtttccccagatacaaaaaaaaaaaaaaaaaaaaaaaa

SEQ ID NO: 101835 - DNA, 579 bp, Oryza sativa
  Clone ID: PAT_MRT4530_99417C.1
atggccgagaaaccgccagcatcgccatcctcggctggtgaacttggttctgttaaagctaaggtccacaagctgggtctatctgaggttgataaagccaacattgtggctcgtcactatggacaaattacacctgaacagcaaaaggatcttgaggtaatgatgcagaaacaacggaatcagttcttgagctcattcacgaagactcgcaagggaacacttgttcagaagtacaaagtaaaagtaattgccgatgttcctgggacagctccagatgacgcggctcaaccgagtattaaaggtgctgcagatgactttcaaggagatcaaggtgatggctctcaagaaattcaaggtgatggtgttcagggagttcaaggtggaggtcttaatcatgacggcaatgcagcacaattacagtttaacaacttccaggatcaggttgactatgccgtgcactatgctttgatcaatcaatctagaatattagtcaacactttgtcaaacatggtgaagacaatggttgatggttcaatggctgaatatcaggctacaggacaagtttatctactaggaggg

SEQ ID NO: 101836 - DNA, 406 bp, Oryza sativa
  Clone ID: PAT_MRT4530_99418C.1
gggtttttttttttttttttttttttttttttttttttttttttttttttttttttttttttttttttttttttttggggggaaaaaaaatatatatatatatatttttttattcccacccaataaaacaaaatcccttcccctttttttcccaaaaaaaggaagcctgcccctcctgaacaccttattttatttgggccttacattacatttttcaaaacacaccccccccctttccccaattttttaaaaaaaaatttccatttttatttgggcccgcccctaaaataaaattacttattttttttgggcccctactaataaaagctcgggcctgaacccacggaagggatccgggatcaaagggaaaatgggtcaagggctggttaattaccagccccccctt

SEQ ID NO: 101837 - DNA, 1206 bp, Oryza sativa
  Clone ID: PAT_MRT4530_99419C.1
atggggtcacttgatggcgacgctgccacctcgccgtccttctccagcaccgggagcagcggcgacggcaacggcggcggcggcggcggcggtagggtcgggatatacgcgtgcttcgcgcttggcgggtcgaacagcctcgagtgctacgagcccggggccaacacgtggcgccgcgtgggcgagctccccggcgtccccgacggccacgtgctgaagggcttcgccgtcgtcgcgctcggcgacttcgtctacgtcatcggcggccggctgtgccggagggagcgcggcggcggcggcgagtaccgcgacaccgacgtcgacgtgcgcggcgacgtggtccggtacgacgcgcgccgcggggagtgggggcggtgcgcgccgctcctcgtcccgcgcttcgacttcgcgtgcgcgccgtgcggcgggaagatctgcgtcgccggcgggcagcgctcgctgtccggcgcccgtggcacggcggcggcggaggtgttcgacgccgacaagggcgggtggtcgcggctccccgacatgagcacgcggcggtacaagtgcgtcggggtgacgtggcacggccgcttccacgtcgtgggggggttcgcggagagcacgtcgtcgtcgtcgccggccgccgccgccgacgacgaggcggcggcggcgccgccggggagggccaccgcgctgctgctgctgctgccgcagtcgtcggcgctggagcggagctcggcggaggtgttcgactgcgcgaggggcgtgtgggagatcatcccggggatgtggcagctcgacgtgccgccgaaccagatcgtggcggtggccggccggctgctcagctccggcgactgcctcaacagctggaagggccacgtcgaggtgtacgacggcgagctcaacatctggagcatcatggaccactcggcgatgccggacatgccgctgctcgccgccctcccgccgtcggcgcagcggcggtaccacaccatggccgtcgtcggcaatcagctctacttcctcgccggctaccaggtggcggcgggcggcgacggcggcttcaggaccgtctccctggtgcacagcttcgacaccagtgcaaaccccgggctgatgccgccatggagaagcttccagcccaccatggatcaggatggcgtggaagacggcagcaaggaattgttcagccagtgctgctccgtgcagctctag

SEQ ID NO: 101838 - DNA, 2114 bp, Oryza sativa
  Clone ID: PAT_MRT4530_9941C.1
tcatcgcctctgaagcggtgacactctaaaacgcggcatgctgctttccaaaacatcaggttgtgaagaacttcccgtgccattctcgctctttgctgatgaacagcgacgaccagcgatccatctctgaaccatgtggttgatgtgatcgtgcatcctctgatttccaccgtcgatgcacatctcctcgaggcaaatggcgttctccgcgaagaacttgatcagccggactccgatgcagtcgttgtgttcgtccagatgaaactggattccaactcttctcagcgagctccgcaagcaatggaagattcggccgctcaatccatggatgtcaccactgacatcgtccaggctttggttcatgcaggagatctttgtcggcggcggcggcggcggcggcttcggccagcctcgccggcgggcgaggcggtggaccgactcgtcgaggtccgcctgccagcgcctccgcaggacgtcgcggcagtagccgccgttcttggtggaatccggcggcaccatgcgggtgaggcggatcgcgaggtcgcggaggttggggcagcagcggagcaggttggcgatggccaccgtggtggacgtcgtcgtcgtccggccgccgctcgccgccgcgtcggcgtggcgcgcggtcaggtcgaggcgctcgacgccgtggagcgggaggaggagcgcgcggcgcgccgccgcgcgccccgcgacggcgatgtgcttgaggtggctcaccttcagcttcagggacttggcgccgcggaagttgtggaggaaaagccagaagcgcgcgcggagcacggcggtggtgtcgcggtagtggtgaggcccgtcgtcgtggaggaagtggagctccgcgcgcgccaccaccgtgtcatccggcggcggcgccgccgccggcgagacgagggagaaccgccgcgcgaagccccgtgtacttgaacgatcgaagcctcggcgcgtcgatctccatggcgccctcgcagtcgctggcgtcgtcgtcgccgttgtggtggctcccgtggcccctgcacttggccagcacgagcgcggtggtggccgcggaagcggaggcgggcgcagcagccgtcttctttcgtcccggcgaggaagacggactcgaggtgcacggtggcgagcgccggcgcggagtcgacgacgccctgcaggtcctcgacctgcacgacgcacagccgcagccgcagcgtcgtcagccgcgggagcgccaggacgccggcggcggcggcggcggcggagaggccgccgcacccggcgagatcaagcacgcggagcgtctccgtcgacggctgggtgccgccgctgccgccgagggagaggtggaactccccttcttccatctccgtgacctccctgtcggacgacggccagtacgcttcgacgacggcggcggcgacgcggagctcctcgacgcggcgcgccgccgggtgggacaccacgccggcgaccacgtcgtgcttcctctcccagtcctccgggtcgcggtgcaggaacgcgtcggccgtcagctgcatgcagatgcgcatgcgctccgtctccacgtgcatggtgagccgcctgacgtggccgccggcggcggcggcgagcgcggcgtgggcggagcggacgaacgcgtcgcgggcggagaagaattcccgctcctggtcgcggcgaacgtggacggcgaggttgacggcgccggtggagcgccagagcgagcgccagcgggaggagaggaggccggtggacgcggcctccctcgccggcgcgaagtggaggatgcgctggatgaggtcgtcggggagatcggagatgcggttcgcccctgcacgcaccgactgtccgcgatggtggcgaggggacccggccggttcgagctcgtcggcgcctcggcggtgttcgcgatgatgcccgtggcgtccatgaagcggtcgccgaggcgcacgaaccacgtgtagttggggctcttcttgtccaccatcgggcacggcacggcatggacgctggcggcagaggcgcggcaggccaggcacgtccacatccccgtccacctcgtcgaactccacggtgacgcgctcgtggagcacggggaggtgcagcatgagcgcgagcat

SEQ ID NO: 101839 - DNA, 222 bp, Oryza sativa
  Clone ID: PAT_MRT4530_99420C.1
atgccgagagggaaagggaggaggaaggcgctgacaacgaggctgaggtggcgcggccgcgtggtggtggctggtggcggtggccggtggcgggaggcggatgcggcatgggtagcggtggtgccggggccgcagttgcctttctgccccaccgcgaagctgacaggtgaagaagaggaggaagccctttcggccatcaccggccctggtgccaacagctag

SEQ ID NO: 101840 - DNA, 1349 bp, Oryza sativa
  Clone ID: PAT_MRT4530_99421C.1
cgccggccgcctccgcctacaggtgcggggggtctgtgtgagcagatggcgccgtccaagcagtacgacgaaggcgggcagctccagctcatggatgcagagaggatcgaggaggaggaggagtgcttcgagtccatcgacaagttaatctcgcaagggataaactctggagatgtgaagaagctgcaggatgctggtatctacacttgcaatggcctcatgatgcatacaaagaagagcctgacaggaatcaagggattatctgaagcaaaggtagacaagatctgtgaagcagctgaaaagcttctgagccagggcttcatgacaggaagtgatctccttatcaagcggaagtctgttgttcggatcaccactgggagccaggcacttgatgagctgcttggcggtggcattgatactccccgcaccccggtggcatttggagagttccgatcagggaagacccagttggctcacactctatgtgtctccactcagcttccaattcacatgcatggggggaatgggaaggtcgcttatatcgatactgagggaacattccggcctgaacgaattgtgccgattgctgagagatttgggatggatgccaatgctgttcttgataatatcatatatgctcgtgcatacacctatgagcaccagtacaaccttctccttggccttgccgctaagatggctgaagagcctttcaggcctctgattgtggattctgtgatcgcactattccgtgtcgatttcagtggcaggggtgaacttgcagagcgccagcaaaaattggcacagatgctctcccgccttactaaaatagctgaggagttcaatgttgcagtgtacatcaccaaccaagtgattgccgacccaggtggtggaatgttcataactgacctgaaaaaaccagcgggaggccacgtgctggcgcatgcagctaccatccggttgatgctgaggaaaggcaaaggagagcagcgtgtctgcaagatctttgatgcccctaacctgcctgagggagaagctgttttccaggtaacatcaggtggaataatggatgcgaaagactgaatgttcattgagggtgcttcctgtcttcaaattattcaggtttctcctagtaaattcctgcataggccatataggtttggtacattgactaaactactactgctactttgccactgtcgaggaaatatgcaacctcatttatccagacgattataccttaaaatgggtatttttctatgcttatgagatcaacagttgtactgaaacaaatacagtattggcttaagtgaaaatatataagagggttacatgatggtaaaaaaaaaaac

SEQ ID NO: 101841 - DNA, 1134 bp, Oryza sativa
  unsure (1)..(1134): unsure at all n locations
  Clone ID: PAT_MRT4530_99422C.1
ttaaggtctacatcgatgatgtgatggttaagtctaaagaaataagggcccccatagccgatttaggaaaggttttttaaaagaacaagaaaatatggcctaaagatgaatctgacgaaatgtgctttgggtgtatcggctggcccagtttttggnatttcttgttcttgaaagggggattgaggtaactcaaaggagtgttaatgcgatcaagaagattcagcctccggagaataagacagaattataggagatgatcggcaaggtaaattttgttaggaggtttatttctaatttgtttggaaggttagaaccttttacaccattgttgagattgaaagccgatcagcaatttactttgggggcagagcagcaaaaggctttggatgatattaaggatatcttagctctactcctggtttgattcctccacagaaaggaataccgtttaggttatatttatcggccggtgagaagtcaatcgtctcagtcttcattccggagttggaagggaaggaacgagtcgtattttatcttagtcgtcggctcttggatgctaaaactcggtactcccctgttgagaagttatgcttgtgtctgtatttttcgtgtacaaggttgaggcattatctactatctaacgagtgtactgttatatgtaaagccgacgtagtcagatacatactatcggctccaatattgaaaggaagagttgggaagtggatattttccttaaccgaatttgatcttcggtatgagtctccaaaggcaatttagggacaagctatagccaattttattgtggaacatcgtgatgattcaatcggctcggttgaaatagtaccgtggactttattctttgatggatcggtgtgtactcatggctgtggtatcggcttagtaataatctcccctaggggggcatgtttatagtttgcttatactattaaaccgtatgcgactaataatcaagctgagtatgaggcagtgctcaaggggttgcaactactcagggaagttgaagccgataccattgaaatcatgggggattctctgttagtaatcagtcaattggnnnnnnnnnnnnnnnnnnnnnnnnnnnnnnnnnnnnnnncgagggcgntatagtcgcgt

SEQ ID NO: 101842 - DNA, 1481 bp, Oryza sativa
  Clone ID: PAT_MRT4530_99423C.1
aaacaaccaccaccaccatcaagcccaggttccgttaaaggcaaggcgtcgaagccgggattaactgacatcattgatgacaacgtcatgccaatcgatccagagaaattcacgcctgagcagaagcaggagtttgaagcgacgctgcagcaagcacgagatcagttcctgaactcgttcatgcaaacccgcaaggggacacttgttcagaagtataaaataaaattggttgctgataatcttgggaccggttcttctaaatatggagaggtgaaaaaagctccagaaggctcggctcagccgagcaacaaaggtgctactgatggttctctaggaaatcaaggcgacaaccctcaaggggtccatggagtacaaggtgatagagtgcatggagctcaaggtggtggtgctcaagggccgcaaggaggaaatcttaatcagagtaacgagctagcacaagattttttcaataacttccaagatcgggttgattacgctgtgcatcatgctctgatcaatcagtccggggtattagtcaatacattgtcaaacatgatgaagacaatagccgatggttcgatagtcgagcatcaggctacaggcccagtttacttgcaaggaggtgtcttcccgaattatcgatctttgatcacgaatgttcagccatctgttcaagcggttcgctccgttgcacccacaattcagccgacggcgccagcatcaactcccctgcatgtgcagcagcagccgattcagcagacaccaccaatccagccagttgtacagccaatccaacaacaggtcgtacaaccagctcagcaaacaccaccaaggcagcagcctctgcaaccaattcagcaaacgccaccaaggcagcagcttcagccgatccaacagactctggtgagacagcagatcattcagccaattcagcacccggggtcggcaaatgcatcgccggagtttgcaccacctggtgggcaacttgcgcagcaatttgtaaaccaagtcgtcctagaacatttggttcaccatgcacagccggcgggcatagtgatgcctcagatggttcctgagcacttggtgcgcaacatccagccgaatctccataattatcaaggggggcaagagggcgtgtcaacttatgagcacatcagccgattccttgctcagtgtggtgaagcatcggctatagacactctgaaagttaggttgtttcggttatctctatctggatcagcttttacttggttttcctctttcccatatgggtcaatcaacagctgggccgatttggaaaagcaattccacagctacttctacagtggggttcatgagatgaagttgtctgacttgacagcgattaagcagtggcatgatgaacccgtgcacaagtatattcagaggttcagagagatgaggaacaagtgctttagcttgagtttgaccgatgctcagttagccgatttggcccttcaagg

SEQ ID NO: 101843 - DNA, 711 bp, Oryza sativa
  Clone ID: PAT_MRT4530_99424C.1
atggctgaaatcgaaactatctccagcctcgccgacgccgacgatgtcctggaaaacagggggatcaatcaggttgaagggatcaatcaggttcaatttcgtctagacgagcagatatccctcgtagctgcaacagaagtcaaggtgaggacccgtcctggaaggctcggattcaggttgttaaatcctgaactcatggattgcaagttccaaacaaaggtcaagctggacgaggcctacgagcggatgttcacagagtgtatgattgagtgtgaccaagagctcgtccctctcgaggcccacatcgccgagctgaagagactgttgctgctgcccaacaacgagattgaagatatcggacccgatattatgcagaggggtcgaggattgcagcaggtgctgtatctgcatccaccgtttcctttgtatcctgagtacgagtatcatcctcctccgcaaccgcaaataccgtaccaaccagcatatgccactgctaaagaaagagagaatgcaagatctcgagaccgccgtgctcagagagcgtggtggcatgccaaccttactcttctggagactaagaaaaagatcttggaagggaaaagaatagacctggagagagggctgagcagtatgatcagtggcttgggaagcgaagctggccatgctgttgtcaggtgtcccttgcagatatctgctgcaggggaggaataa

SEQ ID NO: 101844 - DNA, 783 bp, Oryza sativa
  Clone ID: PAT_MRT4530_99425C.1
atggcaattaaggaccggttcacgggaaaccctaggagacttactgtgcttaccacaagcggaagtggagctgaagatcttcctagtgggagctgtcctgttgaagttggtttcgtcgctgccgtcaaggattgcctgtggagtggagtccccccgctgcagaacgaggcaggcgttatgccttgtcatatccatggcggcgccgctctggacaagcaactcgtccccaccgcctccaaagccaatggcaccaccctcgctgtccgcaagcctccctccaaggaccgccatagcaaggtcgacggccgcggccgccgcgtccgcatgcccatcatctgcgctgcccgtgttttccagctcacccgcaagcttggcctaaagtccgacggccagactatcgagtggctcctccgcgaggctgagccatccatcattggcgccactggcaccggcaccaccctagcctcctcctccccacgccgcccccttcatcctcggcaagcgcctccatgggctgacttcggccaattctggagctttgcggccgtgcgggagatgatggccgccaccgcggcgcccgccatgcttggggaggccttcgccgccacaaagcagcaacctggaaggagccaaccaaggaggaggatgtgctccaccaccggtgaggtcacggccgccgcctccgcacctcgcggactgctcgccggcgcggccggtgcccggcggctctcggttcctgccgcgacctcaccgctcagcccggatgtcctcctctacggataa

SEQ ID NO: 101845 - DNA, 1449 bp, Oryza sativa
  Clone ID: PAT_MRT4530_99426C.1
tctccttcccgtagaagcccccccagcttggcgagcccgcccccatcatcgcgccctcccccgccgcatggtgcatcgccgcccctaacaccagaccgcccaatctaaatcaaatcctcgggtacacaaacttggcacgaagcaatcgctcgaactcctccacatttgcagcctccatacacatgagcacccgcacggcggcggcgtccccgccgtcaccatccgctgccccgccgtccatcacgtagaagaaccctccgcgcaatgactccgcacgggacatcgcccatggcttcccccacccgaagtccaccgcgtcgtacagcggaatgcccagccagctcaccacccgcagctccgtctccggcaggctgccattgtccggacgatcgggcatccccgccatctcgttgtagtcgatcgccgaccgcagcatctcgtcgtcgtttaggcggccaatcacgcccttaattcgggcggcgatggcggccagcgtccccgatacgatgtcctccaccgcggcggcggcgaacacctcgacgagcgcgttgccgaagtagcggtccgggaggggtggcctcatgcgccggcggatgttcacggggaagcggacgagcgtctgggagcacagcggcagccggcgtgcgacgcaggcgcactgccacacaagggcggtcacggcgctgaaggtgctcgcgccgccgccgcagatccgcttgagggtggcgatctggtcgtcggagatggagaagatcttggcggagatgaggcccgagcccgacgccgacggcggacggaggtttagcttggggcagaacacggaggaggcgtcagggtggatggcgagccgggggcgcgcgcggaggagggcgcggtcgtggcagggcagctccaccacggcggcgtcgccgtcccggcagaaagcagcccatgtttgcaagaagtggaacatgctatggccgtcgacggcggcatggtgcatcgccgtccctaacactataccgccccatctcaagaaggtcacctgtacggcgagcacggcagacggcggctcagtacgggggatgaacagcctcttcaactccggcgacggcttgagatcagtcaagatgtcatcgacggcgagctccgaccgagccaccgcaaagaagacgccatcggcgttgcagtcaatctcgggccggccgtcgccgccgacgcggaagcggccggcgagggggtagaaggccaccagcgccttggccagagcctccttgagcctgcccacgtcgaagaagccgccgccgccgccggcggcatcatggcggcggcggtagaagtgcacgagcggggtgagggctcctctgttggccaagacgatgtcgaggggagaaagccagaggacatgcttcggcgtcttctcgctgggcactacgaagcaacactccatcctgcagcccggggatccac

SEQ ID NO: 101846 - DNA, 585 bp, Oryza sativa
  Clone ID: PAT_MRT4530_99427C.1
atggcgggcgccgcggtggcggccatcatctcccgcacggccgcaaagctccagaattggccgaagtcagcccctgcggagagcacccagaagccctcgacgggggcgtcagaagcaagagtgggcgagggggaggtggccaagcttgcgggtgagctggaaaacacgggcagcgcagatgatgggcatgcggacgcggcggccgcggccgtcgaccttgctatggcggtccttggagggaggcttgcggacagcgagggtggtgccattggctttggaggcggtggggacgagttgcttgtccagagcggcgccgccatggatatgacaaggcataacgcctgcctcgctgtcacgcccagaaattcacgaaccagaatttctaagctgaatcggggggactccactccacaggcaatccttgacggcagcgacgaaaccaacttcaacaggacagctcccactaggaagatcttcagctctggtgtggggggaaaagagagcaagactaagtactacccactgtactcagcaagtcataccggaagaggaggtatgatgcaggatataaccaaaggaggataa

SEQ ID NO: 101847 - DNA, 363 bp, Oryza sativa
  Clone ID: PAT_MRT4530_99428C.1
atgtcaggatgccacctcatctcactccctccctcctcctccctctcttctcttctcctcttctcttggatggagttgagggcgcggcggacggcggaggttagcgtcggtgtgggcgaagcgaaagagtccggggccaccgcggggggcgccgccggtggcggcggcgacgatggcgatggcgtgtggatgcaccagccagctaagaagacatcgtggacccaccaaccgtcgcccggcacggcgatgaccggatccgggaccacgtccatggtcggcgacctcctcggcatggcgagcatgctcccgaagaccaccgggtcgccgatgtcctccgatggtggctgtaatctgttggaatga

SEQ ID NO: 101848 - DNA, 546 bp, Oryza sativa
  Clone ID: PAT_MRT4530_99429C.1
atggccatgtataccagagttgtgcggcggcggcatgacggcgaggagcaggatggtgtcgccgtgctggacgacgtgcgctatgatgacgattccagcacaagtggcaatgctaattacaagtgtgagaagagaaaccatcatttaggagcatgggaggaaactcgcatggatctcgttggagaggaggttgttagggaggtgtatctcaccaaggggaaggctgttggagccagatcttgtcggagagtatgtcgggggcaaatcttcttgccggggggtgggggtgggggtgggggggaggctgttgagtacagatctcaccgtagggaaggccgtcgagggaagatcttattagataggacagttataggggcagatctagtcatagaggaggtcatcggtgcacatattatcggaaataaggccataatgggtggatcttatgaaagggcataccagtcaggggcggcggatctcgttagagaagaggccattaggggatcaatcttgccagagcctagaagagaggccaccaacgagtaa

SEQ ID NO: 101849 - DNA, 202 bp, Oryza sativa
  Clone ID: PAT_MRT4530_9942C.1
aattaacgatcgatagaaaggactgacggctatgtgaacacacagattgacctaagagtatatcgttcataggtcaagtacatatacgcggcacagtgcgacaacatttgtccgatatgatcgaaatggatacacaagaagcgagacacagacaactctcgacaaacatgattcttcaacagagactatgatcaggacgcat

SEQ ID NO: 101850 - DNA, 914 bp, Oryza sativa
  Clone ID: PAT_MRT4530_99430C.1
cgacgaggggatcaccggcatcaacctctccaaggaactccccgtcgtcgccgccaacgcgctcaaggggcacctcgtcgccttcggcctcgccgtcctcccaacctccgagctcctacgcgtcgccatctccttcatcaaccacaaaatcatcaacaaattcttcaccaccaccaaggacagcaacaacaactactaccggcctggatttcacaggttgttccagcacttctgcatccacccgggagcgcggggggtgctcgacgaggtgcagcgggggctggggctcaccgacgacgacatggagtgcgtcgcacatgacgctgcaccggttcgggaacatggcgagcagctcgctgctgtacgagcttgcgtacatcgaggccaaggggaggatgaggaagggtgatcgggtgtgcatgatctccttcagcccaggtatcgactgcagcagcgtcgtgtgggagtgcatcaagccaacagatcaccaccgtccaccatggaccctgggccgcctgcatcgaccgctaccctgtgcagcttcccaaaattgtcaaaaggactgcatagtgcgcgctgttactacttccttccaccaataatatcgcatgcatgcaacacgtttaattagttatatatgaccactatatatatgtactacctctgtcccgtaacttcctctgtttcacaatgttagtcattctatcatttcccacattcatattaatgtgaatgaatctagatagatatatatgtttagattcattaacatcaatataaatcaatataaatgtgggaaatgttagaatgacttatattgtgaaacggagggagtacataataaccaaaataagttcatgttagggtatatttgtgcatgtacttaatatcaatgtaccttggttatggtggac

SEQ ID NO: 101851 - DNA, 272 bp, Oryza sativa
  Clone ID: PAT_MRT4530_99431C.1
tacatacaagcttgagctgggtgagagagagagagagagagagagagttcttggagggatcgggtgatcgagagatgagatcgagggtggcgctggagacgttggcggaggagccgggcggcggcgaggaggaggcggcgcgttcgaagtaattggatctgcacgtgcgtctgtaccggttggcgcgccgcttgctttccgactctgtgaagacgactgcacctatgttgacttgcgagtctgctatccgtactaactgatgacatggacac

SEQ ID NO: 101852 - DNA, 429 bp, Oryza sativa
  Clone ID: PAT_MRT4530_99432C.1
atggacgacgatgtttggatcgctaccgtgctaaacggtattacagaacaaagcaaggaccactacgcaaaattaatcccgcatgcttacaacctactttatctcgaccgccaaattctgatccaacggtggccagagaccgatgccaggatcgccaaattcttggtctcccggacccggagggagctaaacggtattactgcaaagggagggcccccttgtaaaagtatatctttgaccaactgggcgggcccacatgtcggcgtgatggcgagaaacgacactccaagccttcgtcgcggcagccgctcgccggagctccgccctctccggctaaccgccgccaccggatttcgtcgactctacgccggagatgctgttccaccggcgcctgagctgcctgccaaaagcaatcgctcctgtcagtga

SEQ ID NO: 101853 - DNA, 273 bp, Oryza sativa
  Clone ID: PAT_MRT4530_99433C.1
atggctttgctgatgtggtccaacctcgccccacgatcgggctatggctgcgtcccctttgacctcactgactttcgtgaccactcgtcgtcgccggccaagacattggggttctccgccttcgatgtagacgctgccaacaacaaaaacaacaaccatgacaccgacgatgaggatgcatgcctcgacgacgtatcgaggctgcagcacctgtttgaagagaaggggttggttgctgtggagaacactgatatggcgttgaggaaagggtga

SEQ ID NO: 101854 - DNA, 458 bp, Oryza sativa
  Clone ID: PAT_MRT4530_99434C.1
ctgcaggtgaaaatgttatcttttggtgttccattgaaagaggtacgtatgcaaactaaatgctgcaggtatttaaatattcacaatttgcacacttatgatctatttcttaaacttaaaaccattttcaatggtttaattgacaaatgaacacttttttgtttgcatagaataaaaaatgtgatgatgttcttatgtttctattaaattgactaattgttccatcccttggtcccatcccaaaaatactggatttgcaagccaatacgttcagtgattaacgagagtcttcctcaggatcatattattgtccttgaaaaaccatccactatagctgctacttccactcctgatcatagcatgccatctgaaaatgtacagaagaaggtgcatgcaaatggcttggacgttgcaccagtttacaagctcatgaaaactagcaaatctggcatgttctt

SEQ ID NO: 101855 - DNA, 768 bp, Oryza sativa
  Clone ID: PAT_MRT4530_99435C.1
atgtggagacaaggggtgtcttgctttggcgttggcgcatttcatgtaacgggtttgtatggtcctgggatatgggtgtctgatccttatggactaactggaaaagtacaagctgtaaatcctgcgtggggtgcagaaggttttgatccttttgttccagggggaatagcttctcatcatattgctgcggctttcgtagttgccggaactatgtggtatgggtcagcaactaccccaattgaattgtttgggcctactcgttatcagtgggatcagggatactttcagcaagaaatatatcgaagagttagtgatgggttagccgaaaatctcagtttatcagaagcttggtctaaaattcccaaaaaattagccttttttgattatattggtaataatccggcaaaggggggattattcagagcaggctcaatggacaatggggatggaatagctgttggatggttaggacatcctatctttagagataaagaagggcgcgaactttttgtacgccgtatgcctactttttttgaaacatttccggttgttttggtagatgaagagggaattgtgagagcggacgttccttttagaagagcagaatccaaatatagtgttgaacaagtaggcataacggtggagttctatgggggcgaacttaatggaacttggatgctcaagtggaatttggaacattccaaaaagtcggagatccaactacgaggagacagccagtctgaggccgcattgctttggtatctttga

SEQ ID NO: 101856 - DNA, 255 bp, Oryza sativa
  Clone ID: PAT_MRT4530_99436C.1
atggcgcggcggcagagggaagtaaaacgggaagaaaagagggggagctcgggcttgggttttataggtgaggaggagagatttcggaattgggatctggatgagaggaaggagtcgacggaggattcaagatggggttttggatattttggatctggggaagtattcggcgatgattcaaagagagggatagaatttcagagtttgatttggagacatgagtcggaagaggaatttcgaggaggcaatttttga

SEQ ID NO: 101857 - DNA, 1026 bp, Oryza sativa
  Clone ID: PAT_MRT4530_99437C.1
atggctttatacgaattagcggtttttgatccctctgatcctgttctggatccaatgtggagacaaggggtggcttgctttggctttggcgcatttcatgtaacgggtttgtatggtcctgggatatgggtgtctgatccttatggactaactggaaaagtacaagctgtaaatccggcgtggggtgcagaaggttttgatccttttgttccggggggaatagcttctcatcatattgctgcggctttcgtagttgccggaactatgtggtatgggtcagcaactaccccaattgaattgtttgggcctactcgttatcagtgggatcagggatactttcagcaagaaatatatcgaagagttagtgatgggttagccgaaaatcttagtttatcagaagcttggtctaaaattcccgaaaaattagccttttatgattatattggtaataatccggcaaaggggggattattcagagcaggctcaatggacaatggggatggaatagctgttggatggttaggacatcctatctttagagataaagaagggcgcgaactttttgtacgccgtatgcctactttttttgaaacatttccggttgttttggtagatgaagagggaattgtgagagcggacgttccttttagaagagcagaatccaaatatagtgttgaacaagtaggcgtaacggtggagttctatggtggcgaacttaatggagtaagttattctgatcctgctactgtaaaaaaatatgcgaggcattcccaattaggggaaatttttgaattagatcgggctactttgaaatcagatggtgtttttcgcagcagtccaaggggttggttcacttttggtcatgctacctttgctttgctcttctttttcggacacatttggcatggggctagaaccttgttccgagatgtttttgctggtattgatccagacttggatgctcaagtggaatttggaacattccaaaaagtcggagatccaactacgaggagacagccagtctga

SEQ ID NO: 101858 - DNA, 189 bp, Oryza sativa
  unsure (1)..(189): unsure at all n locations
  Clone ID: PAT_MRT4530_99438C.1
tgcgtcaccctttttattnggnngggnnnnnnnnnnnnttnnnnnaggnnattaaaaagggggtcccagtacaagggaaaaacggctgggcaaattgtgggaagggccattggttcgggcctcttcgttattaacgcaacctgcgaaaaggggaatgttctccaagccgataaagttggtaacgcccag

SEQ ID NO: 101859 - DNA, 630 bp, Oryza sativa
  Clone ID: PAT_MRT4530_99439C.1
gaacgggactggtcgtctctcccgtcggatatgctggcgctcgtccttgagcggctcgggtggtcgagccacccccggcttcgcgctgacgtgccggcactggcgctccgccgtgtcgcccttctatccagcgtggatcaccccgctcctactcagctgcgcggatgtcgtcggtcgaaccaacatcagggtgtactgcgtcaacacgaccctggcgctacagctcacccgctcgaccgaacggagttcaacgtggaagcagggacacagctaattccggcggcgcgatcagcaacccggtgctccacgatggcttgctttgacagccacctctttgagtcggaccaaggtgagctcatggctgtcctcgtcggctacaatggtgcacctatccatgtcactaagctcaatgagacgacgatggagtgggacaagttagagacctgggaaggacgggcgctgttcacgggaacatacacaacaatgatgaggaagactaagttcaagtcgatgcaaaacaaggttttccttcccaagttgtatgagtggcctaagaccatccatttgaccttattgttcgtgatggtgaagcagcatttgtaccaaagtcatactcaccatctagcataa

SEQ ID NO: 101860 - DNA, 579 bp, Oryza sativa
  Clone ID: PAT_MRT4530_9943C.1
atgtggagcagccgctggagcggggtgcgcccggcgtggctgctactcgcgtccagagccgccgccgcggtcgccctcgccggcgtgctactctgggacgcgctgacctacgacctcaccatcatggtgtactacacggaagcgagtacgactcaatcgatgcacgcgtggaacttgcagatagctacgctcttttctgcatacggatgcttcatgtactcaatgcaccaccgccatgtcaccatgctacccgagatcgacgagagcttggtaggactcagcggcagcctaatggagatcaaccatggcgccgatcagaagggaggagctggactgaaccagctggggcgcttcatgcagattgtctaccaggtcttgggcggcgcggttgtgctgacggatgtggtcttctgggctctgatagtacccttcatgtactcctctcatttcagcctcaatgcagtgagtgacagtggccgtacccattccttaaccctgcagcaccatgggctccactatggtatttctgcatcgcactactccatttggcgtgctacaccgtgtattgggccattgtaa

SEQ ID NO: 101861 - DNA, 1155 bp, Oryza sativa
  Clone ID: PAT_MRT4530_99440C.1
atggctttatacgaattagcagtttttgatccctctgatcctgttctggatccaatgtggagacaaggggtggcttgctttggctttggcgcatttcatgtaacgggtttgtatggtcctgggatatgggtgtctgatccttatggactaactggaaaagtacaagctgtaaatccggcgtggggtgcagaaggttttgatccttttgttccggggggaatagcttctcatcatattgctgcgggtacattgggcatattagcgggcctattccatcttagtgtccgtccacctcaacgtctatacaaaggattacgtatgggcaatattgaaactgtactttccagtagtatcgctgctgttttttttgcagctttcgtagttgccggaactatgtggtatgggtcagcaactaccccaattgaattgtttgggcctactcgttatcagtgggatcagggatactttcagcaagaaatatatcgaagagttagtgatgggttagccgaaaatctcagtttatcagaagcttggtctaaaattcccgaaaaattagccttttatgattatattggtaataatccggcaaaggggggattattcagagcaggctcaatggacaatggggatggaatagctgttggatggttaggacatcctatctttagagataaagaagggcgcgaactttttgtacgccgtatgcctactttttttgaaacatttccggttgttttggtagatgaagagggaattgtgagagcggacgttccttttagaagagcagaatccaaatatagtgttgaacaagtaggcgtaacggtggagttctatggtggcgaacttaatggagtaagttattctgatcctgctactgtaaaaaaatatgcgaggcgttcccaattaggggaaatttttgaattagatcgggctactttgaaatcagatggtgtttttcgcagcagtccaaggggttggttcacttttggtcatgctacctttgctttgctcttctttttcggacacatttggcatggggctagaaccttgttccgagatgtttttgctggtattgatccagacttggatgctcaagtggaatttggaacattccaaaaagtcggagatccaactacgaggagacagccagtctga

SEQ ID NO: 101862 - DNA, 726 bp, Oryza sativa
  Clone ID: PAT_MRT4530_99441C.1
atggctcacggagggtgtactgcgtcaacacgaccctggcgctacagctcacctgcgcgacgcaagatggcgacggcgagtgggggccttgggaccgaacgggagttcaacgtggaagcagggacacagctaattccggcggcgccgatcagcaacccggtgctccacgatggcttgctgtacgttcttggtggagatgggaagctggcggtgtatgatccatgtaaccacgccgataattttagacttcttggtaagcctgacaactttggtattgaccaccaagaagttgacagccacctcttcgagtcggaccaaggtgagctcatggctgtcctcgtcggctacaatggcgcacctgtccatgtcgctaagctcaatgaggcgacgatggagtgggacaagttggagaccttggaaggacgtgcgctgttcacgggaacatacacaacaatgatgaggaagactaggttcaaatcgatgcaaaacaaggttttccttcccaggttgtatgagtggcctgagaccgtccatgttgatcttattgtccgtgatggtgaagcagcatttgtaccaaagtcgtactcaccgtctagcataaagaagatcacctctagtatgaatatttggtcatatggaattgggcggcaagaagaagaggcaagagagttttggggattggagagggtagactatagtatatgggttgattttagtactagctag

SEQ ID NO: 101863 - DNA, 1054 bp, Oryza sativa
  Clone ID: PAT_MRT4530_99442C.1
ctagattattctactacatacacgtcatacttagtatgatgtttttctggattaaaatataccgattcatgactatatttccaacaatctaaaaacttgataggtctttcccgtacttggctttgctgcatcactaaaatttcatgcatttgatggttcaaactataagagattgaaaccacgtgcactactgtggttgataaccatgcaatgcttctttatttttcatggggcaagacaaccgaacgacctttctcgcctgaggaggaggctaagttcgagtctgcagattgcttgttccgtggagcattgatcaatgtattagctgacaacataatggatgtgtacatgcacatgccttcagggaaggacttctgggatgcatttgaggtcaagttcgaagtcttcgatgttggcagtgagttgtatgtcatggagcagttctatgactactagatggtcgatgtctgttctgtagtagaacaagctcttgagattcaaatactggcaatggatcttgagaacaatagctgccgaacaagttcatggcaggtggcattattaccaaattgccaccttcttggtcagactttgccacttctctaaaacacaaagaggcaagagttcaatgttactgatatcattagttctttgggtgttgaggataaggcgagagcaaaggacaaccgcggcaaaaaggtcgagagaactcttatgcatctcaagataacaagaagatttcaaacttaatactacaaccaattttaagaagaaatgcaagagaaaggcatagcgccacagctttatgtgcggtgagtctggtcattggaccaagaatagtcccgatcgcaaggacaaaagtctgcaaacatggttaaatcagtgatcctactatatttgtaaaatccaaacaagagtaataatagccctatctcaacctacgtggtattccgctcattcattctctatattcttgtgtgcaattctctctctcactcaatccctctcgctcaatcaatcttatacactttcaacacgttatcagaactttcgc

SEQ ID NO: 101864 - DNA, 410 bp, Oryza sativa
  unsure (1)..(410): unsure at all n locations
  Clone ID: PAT_MRT4530_99443C.1
ctgctggaatactgcgcgaggaaagcatatgctacacaggggattaactcatcactcacttaactagttgaatcttggaccatgtcggacaggtgcggcaactgctactgtgctgacagtgagccagtgcggtgaagaaaggaaccagctatggcgtcactgtagttgaagccganaagagccacttccaggaggtcgcgccggcgaggagaacggtggctgtaagtgcggcaccagctgatcctgcaccgactgcaccgtgcggaaagtgaagtcacaaatcagccgaacactcgccgccggcgagtcacctaccttaattcgtccacaataaaaaccacccatatgagtgtggtttgtgtgtgtgctgattattgctgaattaaacccgcgtgtgatcgattaattaa

SEQ ID NO: 101865 - DNA, 756 bp, Oryza sativa
  Clone ID: PAT_MRT4530_99444C.1
atggagagggagcggcgcacgccctctgccgcaaccagcctccaccaccgtcgcctcctcacgcttgtcgatgccatcggcagcagcaaagcagtgtgcggatgtggagaaagagggaggggagagaggagaatacaacctcaccgtcgcccctctcttttccaccgccaccaagcttgtcagcggccgcccgtcggagcgaggagcttccccttccccttcttccactcggacggcaccatcatgcgcccctttgtcccccgacacgccgccctccgccttcggcccggtcctctcccgcgacgtgccgctcgacgcctccctcaccacctccccaaccccgtcccgccgccgccaccggcatccaagctccccatcattctctacttccacggcggcagcttcgtcctcttctccactgacaatgtcttctaccacgcctcgtgcgaggccatggctgcgaccgtgccagccatcatcgtctccctcgactaccgcctcgcgcccgagcaccacctccccgccgcctacgtctctaccgtgctctggctctgcgacgcggcggcgggggacccatggatcgccgcgtcggcgagggaggtcgcgggtgtaggggccgtcgccgtcgggtgcctggccctctcttccctaccctactccggccgccaccactcctccccgccgccaccgctccgccccgccgctcaggctgagagagagaagagggagagagaaggggatagagagaagtggtag

SEQ ID NO: 101866 - DNA, 1037 bp, Oryza sativa
  Clone ID: PAT_MRT4530_99445C.1
agcgttcaatcgatcgatcgatccccgcggctcggtttgtgttgcgttcttccagatcgatttgatagatgggtgctcatggagaccaccgccaccaccaccaccatcaagaagccggggtgctcgtcgacgaggaggaggaggaggtgatcgagcaggcttgcggtggcccgacgagcggcgtggtggagcaagaggtggggggagacggtggtggagtgtgccaagatgctgccggcatggtgttcgaggcgaccagtagcgtcgggagcgtgagcgccaccatggggccgccgccgatcatgtgctggccaccgccggcgcagcctgtccacggtgcaatccaccaccaccacaacctaggcggcggcggcggccagcagagcccgttcttcccgctgctgccgcccctgccccctcagcccccgccgccacccccgttcttcgccgacttctacgcgcggcgggcgctccagtacgcgtacgaccactccggcggcgcgtcgtcgtcgtccgacccgctcggcctcggcgggctctacatgggtcaccacggctcccacgtcgccggcatgatgatgccgccgcccttcgctccgtcgccgttcggcgacctcggccggatgaccgcgcaggagatcatggacgccaaggcgctggccgcgtccaagagccacagcgaggccgagcgccgccgccgcgagcggatcaacgcgcacctcgcccgcctccgcagcctcctccccaacacaaccaagacggacaaggcgtcgctgctcgcggaggtgatccagcacgtcaaggagctgaagcggcagacgtcggagatcacggaggaggcgtgcccgctccccaccgagtcggacgagctcaccgtcgacgcgtcgagcgacgaggacgggcgcctcgtcgtgcgcgcgtcgctctgctgcgacgaccgcaccgacctcctgccggacctcatccgcgcgctcaaggcgctccggctgcgcgcgctcaaggccgagatcaccacactcggcggccgcgtcaagaac

SEQ ID NO: 101867 - DNA, 1378 bp, Oryza sativa
  Clone ID: PAT_MRT4530_99446C.1
gtgggcccaacatccggtgagcagctttgggcccaacgttcacctttgggcttcgcaccgtggctgggccgacttttaagcacgcggtcgcatcatatagggttttcgaagctcgccggcggcgagcaccacccagaccccaggtgaggttgtgagcgttgcggtggccggcgagatggacgactggtaaggtttcgtcgtcgggggcgacggcgcggcggcggagtcgaggaagggtgctcgggaagcggcggctccaggccgacgacgacgaggacgaagaagaagcgccgacttcgagaagagcgagggattcctgagattcatcggcaagaccgcggaggagtacgccgcatcgaaggcggccttcgcgtcgagacccaggaggatagagaccgcggaggagtgggaggcgagggtgaggaagaacatcgaggagcaggacaaagcatacgaagagatgatgcggtcgcaggacgacgatgaatccaactgggactatatcgcgtatcgcaattcctggaacgatacatggtccggcagccgtggttcattcgaggaagtcagtgaggatcccccaatgcatttcactcataagcctgcgctgggttactactctgccagtgccttggatactctacagatcttctctgtcaaggtagcagcgacgagtggaggtttacagtggccgcttgatgtgttcggtatagtttccatccgtgacagtgttgatcgtaatcgcaatgttgtcttccaccgcacaagggacaactgccaaaccctcactgaacaggaacgaaatttagtgctggtagggcccacccgtgctgttgtgttgtcaatgccggatcctctgatcatcgatgttgaaatgaaagtgaagggcaccactgaatctgaggacaagcgcttgagcttactagctgtgccactcttatgtgctggtaagtattactcacacgtgcttaaatctggttcttacacaagcaagctaagcacactggagttcagacttggctacatcgtgtcatctgtggaggccacaatatctgtgcgtgtcattcgtgggtcatggcctgatggttttcatggtcagtttgctgcatataccactggtgtcagattcaggaaaatagtcctgcttgattctagaggtgatcagaacgtagtaactgtcagtggtgatggcacgattgagctttcacggcgtgttgtttctgttgagaaggttggaaagctgaaggttcttgtcagggcatgggagctcgttgatcataacaatgtcgtggaacaagtgaaggttttcacaccattagaagctggctttgttgatgatgagagaattctcctgcttgattctagaggtgatcagaaagta

SEQ ID NO: 101868 - DNA, 1180 bp, Oryza sativa
  unsure (1)..(1180): unsure at all n locations
  Clone ID: PAT_MRT4530_99447C.1
gctctttctcttctctctctcagccatgaccggctattgccgccaccgcccaatctccctcaccanagctccactaaccaaatcctcgcgccattagcttcgcctcgacgagttgattccatttttcccctttcccctctccctccactcttgaaataaaccaccacagccacttcttttatcgccggagttgagctcctgccgtcgccgttccggcctcctcctttgtttccttcgctagccgacagcttctccggatgcgcgtcgctcgggaacacgtttcgccgccgacgtcgccgccttccggccaccggagagccgacgccccgcttaccctctcctctctcttctctcggctcactgtgaggcagagaaaagaagagacggaagaagaagaagcaaaagaaaaaggaagctgacaggtcttgaggattcttctgacacactagataatatcattcaatctcaggacatcgagcaaggaggcaactatagccgcgaagggcaaatttaaccattaccatgtacaggtgaatggtttgtgatactcgagtataaattatatggtatatttctaaaccctgatcgagatgacgtggtgtcatacgatcagttccccttaaatacctcgggaatgccagaacttctctcgctgctgttaacattacgttcagagcatatgaggatataagttcatggaacaggtgggccatgactaaagccgatgattatcagcaagtcgtggactgcgggtaaagcgtacatctgctgcagtagaatatctttgaaactattcgaatagccgtactcatggagttgagtaccgggactcatatggtaccctggttagaaatctaaagtttatatgttttacaaactcttctataacttttccagattgtccaatactgctttctgcaaagaaccctattatatgtcaatgcataacatatttccgtgataacttgctgagtattgcgaatactcacccttgctcttattaaccctttttcagatttgggtgaagaggaggacccctatgactattactatgatgaccctgataacttagaaaatccttagaggttataccttcctagttagaatgtactagaacttccgctgtgtaatattagcatctatgtttaattaggtgagtacctaccctcgtaaaacccct

SEQ ID NO: 101869 - DNA, 747 bp, Oryza sativa
  Clone ID: PAT_MRT4530_99448C.1
atggtcgttgctgagctgctccgtgcgattgctgctgcatgggctcaaactgaccaaactggggaacgaattgttgctgggccgatccccctggttgatactgggcttgcggggatagaggctgatactgatagcttaagttgcccccttggtaattatgcagattcggctggatattgcgtaccaagtgctcaggaaccatctggggtatcacggtgccgtccggttgtacgtgatgaaccaaatgttctggggtggcttgattcacaacttgctgcgcaggttgccccccaggtgctgcgaacccagccgatgcattggctgaccccaagtgctggatcggctgttgccgtaccggagtctgttgaatcggctgaagccgttgccttggcggtgtttgctagattggttggagatgctgctgggttaacggcgcttgttgaaccggctgcgcaacttgttgttgggccggttgtaccatcggctgaaccggttgcgcctgctgtatgggctgtacggcctattgttggattggttgcaccaccggctaaattggtggtgcctgctgcgctggctgcgcgacctgttgttggatcgactgcaccgcctcggtggtgcttgttggatcggctattgttgcgccggatcaacaactggtggtggtgggaggaacatagcagcaacctgatcttgagttggctgattcgaggtctgtccagcaggctgtggatactccctcatcagtaa

SEQ ID NO: 101870 - DNA, 3003 bp, Oryza sativa
  Clone ID: PAT_MRT4530_99449C.1
atggcgtccccgcggccgccgccggcgagcctgcggagcttcctggacgcgcacttcgcctcccccgaggacctcgcctccgcaccggcgctcgctgagctcctgcgccgcgagtgcgtgggcctggatgcatccctccgccgcctcgaggcgcagctcgcgtccgtatccgcctcctggctcgcgcgctccgccggcgctcgcgcatctctccgccgcatccgctcccgaggcgggggattcggagtggaggaggatgatggcgaggagacgctgcggagcgcggagctgccggcgcttgtgcaggagatccatcggatcgacgccattcgactctatgcggaagctgctctacagttggaagcttttgttggtaacctagaagatgcaacgttttccatcgttagacaggcctcaaagttgaacttgtcctcggtatttaggccagcatctaatgaaatgcaatggaagcaagaaaagttgctccaggctgttgatgccatgagggatattgaactagagttgctacggatcagcacgaataggccacaatggaccaatcttatcatggctgttgattctagagtggacaaaaccctagcaattttgagacctaaagcactaacagattatcgagctctacttgcagcacttggctggccaccttccttgtcttcaccagatgcagcaaataataagtactcggaaattccaaaccccctcatcttaatgaatgaggcaaataaagagaagtattcacaaagttttctagcactgtgtgctctgcaacatgcgcaagccaactgtgaagcgcgtcaatgccaagcgaaaggagcaagtgctagcatgtcagattcaaagtactttgataaaactgctgcatgctttgataatggactttgggcaattgatgagttggttcagcctattgcttccaggttggaatatcattttgctaaatggtctgaacagccggagttcatttttgcccttgtttacaaaatagcaagagattttatgggtggtgtggatgatatattgcagcctttgattgatcgagcaagacttgtgggattgagtgctaaagagtcttgggtaactggaatggtgaaaatgcttctaggttaccttgagaggcaaattttcccagtccttgtcacatcttatcaggctactgatgacaaatttgaagtacattcctcatggatgcacttgaatgacctgatgattacttttgataaaagaatgcagttgcttgcagattcaggaatacagaagatagcttcaatttctgaaggcctgtccaggtccttatctgtcttttccatatatagcgagcattctgattggcttcacatgtgggctggtgtagagcttaattctgcacaacataagctcaaatctgagatggaggatgagataaattggtcatatagtattaaagagcttggtctacaagagatcactagtaattttcttctgtctacaagagaagattacaaagctccaacaatttctgaatttgtggtcaaaactgcatctgctatgattgaaagaggccatgctctgccaaataggggattaaggattcagtataacagatcctcttcagtccagttcctgagtgatttctttcttgtcttacgtgaacgatgtgaagccctacaactgacaaatacagctttagaagatgattctttactaaaagcttcatttgcaattaatgctgctcgatattgtgaatatgttcttcgggaatgggatgacgacatagttttcctggagatgggtgcccataggaaacatgttgatgaaggccagggacaaggccacaaacacagtgcccaacatccatgttctttctttggcgatgaaatcgccttcttggctaaattggggaccgattatctggaacagattatgtcttccgttctgctcgagtttgaagatctatcctgggactatgtccaaaacattggattgcccaatgagcagatccatccagttgatgaggtcctggatgaagaaaatctcggagtatctcctggatttgttgcctctctagaagttgtgagagacagaaccaccaaactgatgctacatcttaattcgaaggatttccttgatctgtggaggagtatagcagaaggcctcgactacttcatctacagcagcatacgatggggggagttgacattctctgaccaaggagttgtacagctaagagtcgatacgaaggcccttctccacatctttaggcccttctgtttaagacctgaagccttttttccattcataagtgattccctgaggctgttagccatgagaaagacagatgcacgatacctgttggaagtgctcaagaatgccaaggagaatgacagttgcctgaggcaacaaggactgcaacatgtaaatgcaagccaagctatgaaaatcttaggtagcaaaaggtctgatggataatcttcttaccttagcgtagaagacctgctggagatgatcagaatatgattttgcctatgctgggctgctctatgtcactatgatgacggcaatcttctgcctgtcctccttccaggaaacatctcttctgagaagtttaacacgtggttagtggttaccggctgcaattccaggcccactccaagcataatgcgcctgttggaacgcaggatagcaaaacagtttgcgtttcaagattgaagagacttatctggtgttcgcagcagcttcgcgttgaaacaagttttggcatgtactacattctctccagggtgatgagacctgcgagtcttggacgacaaattggagatggccgctttgcaacgcaaaagtccgccgccgccgccccctgtttatcgcttctttgaccggctcgatcgtaatcaacccaaacacatcatgttgcatgcaaagctagcagatgtaacaacaaaatattcaagatatcgtctgcctcaaattctctgagtaatatagtcaatgttcaccgtctcgcag

SEQ ID NO: 101871 - DNA, 281 bp, Oryza sativa
  unsure (1)..(281): unsure at all n locations
  Clone ID: PAT_MRT4530_9944C.1
ancttcttatttcccacgaaacgagancccccatagatnccacagggtgcagcaacagagctcctaaggagtcctttagggaaaaacaaacccccacaccccacgacaattccactactaagtgccactttgtgggtgcttttgtagtagtgncctccattaggatacaaaagcaatgcaccaacacatgcctgatagagatgcctagcccactcttagaaggaacacaggtttcccccgtgcctttattagggtttgaaggaatagcccatccccccccc

SEQ ID NO: 101872 - DNA, 855 bp, Oryza sativa
  Clone ID: PAT_MRT4530_99450C.1
atggcggcggtgatagcaggtggcggtggagctgtgagatcagaagatttgttgaagaaccgaagggtggtgatgtctccttgtggtggcgtcggcggcagcgctggccactgctgcgggctccccatcctgctccgtgcgttgacggtggtggctacttgtggcctttaccgatcagcgcccggctgcattggctggagtaggctggtccctattccgcaggctgtgagagggggcggcgatcgtaggcgtcggctgcaggtgtcggtggcaggctgctgctatgctatgaaggtgacacagttggcggacgcctcggtgctggtgcatgtagcaaatatcttccatggcgtctccattctccgatctaggcggcacttgtttgacagcagcttgcttctctcaagtggacattcccttggcggtctggattggaggctgtggcctctaaacaatgaagcattgattttgcttttgctggatttgagttttaagtgcttcaagacttcttcagcaatccctggccttctagaaagacagaagttctatcgccaccatctgattaagggtatgtttggttgggctgtggcttttgaaaaagcagctgtggcttttggaaaagcacttagtagaccccacatgtcatgtcatggtgttgctgctcagagcagcatgaagccggcggtggcgctggggagacggtgccgaagagaggtgaggcgcgggggaaacagtgctggagagaggagcaacgacagcggagataaatgtgggcaaaagtctgccgcaaagacttatggtatcttagagtttgttagagataatagtcgtgtccggtatgggcatatcttgtaa

SEQ ID NO: 101873 - DNA, 362 bp, Oryza sativa
  unsure (1)..(362): unsure at all n locations
  Clone ID: PAT_MRT4530_99451C.1
anacaccttgcgatcaccctctcaccaccgctacagatcaccattgtgaggctccccngccggagctggaggttggagggagtggaggaagagccgtgctgccgccgtcgccataggggaagccgggtagccgctggacatcaagaaaagccgtcaagcaccttacgtcgccgctgtctgcccctgtcctgcaccgtgtcgagctccactttgccgcgttttgccatctcgccgtctcgcggtacaccctcgtgcccgtagcgtcctccatacatctaattgctagcgccggctccaaaatcggcgattagggcccatggccgtgcgncccngcgccgtttcgtcgcgagcgagcccttcgt

SEQ ID NO: 101874 - DNA, 711 bp, Oryza sativa
  Clone ID: PAT_MRT4530_99452C.1
gcggctccatctgtcgcatccacgactcaaccaacagcgccagcatcaacgcccttacctgctacatcggccacggcgtcagctcagccgatcaaccctcgattgctaatgagggaacatccacagcttgctggacaaacctcgaatcagccgactcaagatcagccgatccaataacaggtcgcgcagccagctcagcagacaccaccaattcagccagtggtacagccgatccagtaacaggtcgtgcagccagttcagcaagcaccatcaacgcagcagcatctccaaccaatccagcaaacaccgccaaggcaacgacctcagctgatccagcagactccgtacatggggggcaacctgcgcagcagtttgtgaatcaagttatcccagagcatttggttcatcatgcacaaccggatggcaccgtgcttccatccccgcaagcccaatatcaaccagcgggatcggcccagcaacagttcactcctcagtttggtcagttcgagcccatgcagcagcaaccacaaggagcagctcagcaacgaccatgggctgatgtcattgctgatgtaatgagggagcaatttgggcttagaccaaaagagactgggagtttgtatcggcagtcttatcccaagtggtttgaaagggttccccttcctaatcggtttaaaatccctgatttctccaagttctcagggcaagagg

SEQ ID NO: 101875 - DNA, 215 bp, Oryza sativa
  Clone ID: PAT_MRT4530_99453C.1
gttctgttttttgcaacaggctcggcggactagtggggagggttattttagaccgcggtgcgtgcaccagcacatgacggagttgtgcgcatagcctgtcggtgacaccggggtgaccacgttcaccgtgaaccacgaggccacggatattaccagccttgcgcgactcgaccgcctgctgccgtccctgcttgagaccgccgacccgacccaca

SEQ ID NO: 101876 - DNA, 501 bp, Oryza sativa
  Clone ID: PAT_MRT4530_99454C.1
atgaggaataagtgctacaacttgagtttgactgatgcccagttagccgatttggcttttcagggtatgattgctccaattagggaaaagttctcatctgaagactttgatagcttgtcgcatcttacgcagaaggtaaccttgcatgaacagaggtttgcagaggccagaaaaaactctagaaaggttaatcatgtttctccttacatatatggatcggatgatgaggatgaggatgactccgaaatagcagcagccgaatgggttagaagcaagaaagttataccatgccaatgggtaaagaattctggaaaggaggaaaggtatgactttgatgttactaaggctgataagatttttgatgtgccacttcgggagaaacagattcaacttcctgctagtcatacaatcccatcggctaaagaattgggcaagaagaggtattgcaagtggcataattctgggtctcatgctaccaatgattgcaaagtctttaggtag

SEQ ID NO: 101877 - DNA, 420 bp, Oryza sativa
  Clone ID: PAT_MRT4530_99455C.1
atggtgcttgctgagctggctgctcaacctgttgctggatcggctgcactaccggctgaattggtagtgactgctgcgctggctgcacgacctgctgttggaccggctgcaccaccggctgaattggtggtgtctgctgtgctggctgtacgacctgctgttggaccggctgcaccaccggctgaattggtggtgcctgctggatcggctgctgctgcactggatcaacaattggtggtggtgggagaaacattgcagcaacctgatcttgagtcggctaattcgaggtctgtccagcaggctgtgggtactccctcattagcaatcgaggatccatcggctgagctgacgtcgccgtggccgatgcagcaagtaaaggcgttgatgctggcgctgttggttgagtcgcaggtgcgatag

SEQ ID NO: 101878 - DNA, 644 bp, Oryza sativa
  Clone ID: PAT_MRT4530_99456C.1
gagcggccgccaccgcggtgaacaccaacacctgctccgaggaaaggtgcgtttcctgatgcttgtaggagggttctaccctctgcgtcagggaattcaagcttgagcccagaggccacaatcaagccctgtcctccatgcaaatgcccagcacctaacctcttgggtggaccatccgtcttcatcttccctccaaagatcaaggatgtactcatgatctccctgagccccatagtcacatgtgtggtggtggatgtgagcgaggatgacccagatgtccagatcagctggtttgtgaacaacgtggaagtacacacagctcagacacaaacccatagagaggattacaacagtactctcccggcggtcagtgccctccccatccagcaccaggactggatgagtggcaaggagttcaaatgcaaggtcaacaacaaagacctcccagcccccatcggagagaaccatctcaaaacccaaagggcagtaagagctccacaggtatatgtcttgcctccaccagaagaagagatgactaagaaacaggtaactctgacctgcatggccacagacttcatgcctgaagacatttacgtggagtggaccaacaacggggaaacagagctaaactacaagaacactga

SEQ ID NO: 101879 - DNA, 4392 bp, Oryza sativa
  Clone ID: PAT_MRT4530_99457C.1
atgttgcagcaagcccaggatcaggtcttgaactcattcatgcagccccgcaagggaacattggttcagaagtataaagtaaaggaagtcaaggtgacaactctcaaggggtgcatggagttcaagacccgcaagggaacattggttcagaagtataaagtaaaggtagttgccgatgaccctgggaccagttcttccaaaggtgaagacgggaaacaagctccaaatggcttggctcaactgagtgacaaagctgctaccgacggttctctaggaagtcaagctgacaactctcaaggggtgcatggagttcaaggtgatggtgctcaggggttgcaacgtggaaatcttaatcagaatagtgatgcggcacaagattttttcaataatttccaagaccgggtcgactatgttgtgcaccatgctttgatcaatcagtctggggtgttagtcaataccttatcaaacatgacgaagtcaatagccgatggatcaatagctgagcatcaggctgcaggcccagtttatttgcaaggagcattagccgattcaacagacactcccgagtcagcaggttgtacaaccaatccagcaacaagttgtgtaaccagtccagcaaacgccaccaaggcaacagcctccgcggccgattcagcgaacgccattaagatagcaaatcattcagccgattcagcaccaaggctcaatgagcgcatcggccagggagcagctcagcaacgaccgtgggccgatgtgattgctgatgtaatgagggaacagtttgggcttaaaccaaaagagactggaagcttgtatcggctgccttaccctgagtggtttgagagagttcctctcaacattcagttcaaagttccggacttctccaaatttttgggacaagatggtgtgtcaacttatgagcacattagccgatttttagctcagtgcggtaaagcatcggttgtggacgctctgagggttaggttgttccagttatctttgtttggatcggcttttacttggttttcttctttgccatatgggttcatcaatagttgggccgatttggagaagcaattccacagctatttctacagtggggttcatgagatgaagttatccgacttaacggcgattaagcagcggcatgatgactctgagatagctgcagccgaatgggtgaggagtaaaaaggtcataccgtgccaatgggtgaatagttctagaaaggaagagaagtatgattttgatattactaaagctgacaagatttttgatctgctactccgagagaagcaaattcaactccctgctggtcaaacgattccatcggctgaggaattaagtaaaaagagatattgcaaatggtataattctgggtctcattctactatcgattgcaaggtgtttagacaacagattcaggtggccattgagggaggcaagattaagtttgatgattccaaaaagccgatgagggtcgatggtaacccatttcccgttaacatggtacacacagctagccgaacaactgatacggggcgcatgaggggttatcaagtaagttcggctagaattataaacaaatatcaaaggaaatacgacaagcaacaggaaaagcatcatgaagaagataatggtagctctgatcctcattggggctgtgagttcttcaggttctgttggaatgaaggtatgaggttaccatctatcgaggattgtcctggatgcagtgatgttgcagggggttcaagccgattgtacgatggaggcaattggccaaaacagacaagagtacttgttcatcagagattgggcccagtaaaccaacgtggtgattcgaaagatgatgaaaataagaagactgaatggtgtcctcttagtatttttacgaagaatcagaaaagaagggttcaaagattgaggagtagggaatgcttccagcaggtcgaacaagaaattaatcatcggctgaagaaagcaaaatcgaggcaggagtggtgtgttaagaatcaggctcctgtagccgatgatgttgcagctgatgaggcaaagaggttggcaaaaggaaagagtgttgtgacggcaccagttaacatggtttttaccttgccagccgaattcgggatcgatcaagccgatgtcgacgaggtggaagaggaatcggctaagttggttctatcaccagaacaggcggtgttcgagaagcctgaggggacagagaatcgacatcttaaaccattgaagttgggtagaaatgccgaggatcttatcaagacaaatatagtgctcaaggactttggtggcaatccatcggaaaccaaaggtgttctaaatgtggagctgacagtcggcagcgacaaaatagagatcgtactagccgacagccagttgaagttggagaacccaagctattattttgagggcgttgtggagggttcaagtgtctacactaaggatacggtagatgatctcgatgacaagcaaggtgaaggttttatgtcagccgatgatttggaagaaatagatataggtccaggtgatcggccaaggccgacatttattagtaagaatttgtctctagaatttagaaccaagctgatagagctcttaaaagagtttagagattgcttcgcttgggagtattatgagatgcctggactcagccaatcaattgtagaacatcggctacctatcaaaccaggggttaggccgcaccagcagcctccgaggagatgtaaagccaatatgcttgaacctatcaaagctgagattaagagtttatatgatgctggttttattcgtccttgccaatatgctgagtgggtttctagcatagttcctgtcatcaagaagaacggcaaggtgagggtatgcattgattttagagatctgaataaagctacaccgaaagatgaatatccaatgccagtagccgatcagctggttgatgccgtgttagggaacaaaattttgagttttatggatggaaacgcagggtataatcaaatttttatggctgaagaagatatccataagacagcttttagatgttctggtgcaatcggcttatttgaatgggttgttttgactttcggcttgaagagtgctggagctacatatcaacgggccatgaattatatttatcatgatctaatcgactggctggttgaggtctatattgatgatgtggttgttaaatctaaggaaataaaagagcacatagccgatttaagaaaagttttcgagaggcccaggaaatatggcttgaagatgaatccgacaaagtgtgcttttggtgtatcggatgggcagttcttgggatttcttgtccacgagaggggaattgagataactcagagaagtatcaatgcgatcaaaaagattaagcccccggaaaacaagaccgaattggaagaaatgatcggcaagattaattttgttcgaagcacaaggttaaggcattatttactgtccaatgaatgtactattatatgcaaggccaacattgttagatatatgttatcggctccaatattgaaaggaagggttggaaagtggatattttccttaactgagtttgatcttcggtatgagtcaccgaaggcgattaagggacaagctatagccgattttattgtggaacatcgtgatgattcaatcggctcggttgaaatggtgccatggagtttattctttgatggatcggtgtgtaatcatggttgtgctgagtgtgaagcagtgcttaaagggttgcaattgctcaaagaagttgaagccgatgctactgaaatcatgggggattctttactggtaatcaatcaattggcaggggagtatgaatgcaggaatgatacgttaatagtttataatgagaagtgccaagaactgatgaaggaactttggctggttactttaaagcatgtatctcgagaacaaaatattgaagctaatgatctggcccaaggggcatcagggtataagccgatgatcaaagatgttaaggttgaaattgcagcaataacagccgatgattggagggtattaacgtatcttagccgattacaagaatttttaagtcctattacacaaaagttattgagacaagtactgctggatagccgaaatagctctttgcctaatttgttcgacttcttcaatggcttgggcatcttgagtgtcacgaccggaagtaacccaacgggcgttccttacgtgcgtgtattatttcttgtcccaggaggcaagactgagccacaaactaagccttacccactagacatgtggaagtacggtagtgctttgcaacagaggcccgaagaccggtccttatatggccgaggtgctactatcaaaaccatgcaccccgagcccagcctaaaaccattttga

SEQ ID NO: 101880 - DNA, 246 bp, Oryza sativa
  Clone ID: PAT_MRT4530_99458C.1
ttgaatattgaacgggggaacgcgtacttacccacaagatatgggcatgccatggcaccatttatggggtgcgcctggccaccggaactcacgctggccgtgctagcgtcgggcggtgcccttctcgacagctgcatgctccgggctcgagcaactgaaggcagctgcttgaacgtaggctacacggtgaggatggacagggaacaagcttggcaggaagctcacatccgaccgtacccgagcgca

SEQ ID NO: 101881 - DNA, 3544 bp, Oryza sativa
  Clone ID: PAT_MRT4530_99459C.1
ttgcagaatcaaatcaactggcacgcttgcacacccgaaggcaagttttggacctacactggagttaagcagatctcctaggcctcgtgttttacgtcaacacgcttttggcacgcccggtgggaccaattagaagtcagcaagcagtcttctccatggccgagaaaccaccgccatcatcgtcctcggctagcccaggttctgttaaagaaaagatccagaagttaggtttgtcagacgttaatgaagggaacatcgtgaccattgatcaagaaaagttcacacctgatcaaaagaaagattttgaagcgatgatgtagcaagcacgggatcagttcttgaactcattcatgcagacccgcaagggaacacttgttcagaagtataaaataaaggtagttgctgatgatcctgggaccagttcttctaaggatgaagaagggaaacaagctccagatggctcggctcaaccgaggtgacaaaggtgctacagatggttttccagcaaatcaaggtgacaactctcaaggagtgcgtggggttcaaggtgatggttctcagggagttcaagatcaggttgactatgctgtccaccatgctttcatcaaccaatttggaattttaaccaatactttggttgatggttcaatggctgagtatcaagctacaggaccagtttacctaccaggaggagtatatcctaattatcggccattaatcactgataatcaaccaatcgtccggtcaatccctcttaatgtaccatcggctcagccgacggcaccagtatcggctcctgcacctgctccaccaccttcggctccaggccaaataattaatccccgattgttggtgagggaacagccacagcacattggacagaatgtgaatcggctaacgcaagaccaggttgcatctatgttcttgcctcctcaacataccattgatccaacgttgttcatccgattcagcaaacacccccaatccagcaggttgtgcaaaccagtttgcaacacctggtagtcaacctgtgcagcatgctgcgaatcaagttgttccagagcacttggttcatcacgtacaatcggatggcacaatgtcatgaaggagcagtttgggcttaggccgaaagatgctggaaatttgtaccgacagccctatcctgaatggtttgagagggttcccctacctaatcggtttaaggtaccagacttttcaaaattttcagggcaagatagtacattgacttacgagcacattagctgatttttagcccagtgtggaaaagcatcggctgtggatgccttgagggttaggttgttccggttatctttgtctggatcggcttttacttggttttcttctttaccatatggatcaattaacagttgggctgatctagaaaaacagtttcacagctatttttatagtggggttcatgagatgaaattgtctgatctgacatcgatcaaacaaaagcatgatgagcctgtacatgagtatattcagagattcagatagatgaggaataagtgctacagcttaagcttgactgatgcccagttagccgacttggcttttcagggtatgatccctccaattaggragaaattctcatctgaggattttgaaaacttgtcccatcttagacagaaggtgaccttgcatgaacaaaggtttgtggaggctaggaagaattcaggaaggttaatcatgtatgtccttatatatatggatcggatgatgaagatgatgattctgagatagatgcagccgaatgggtaagaagtaaaatagttacaccatgccaatgggtaaagagttctgaaaagaggaaaggtatgactttgatatcactaaggccgacaagatttttgacttgctactccgagagaagcagattcaacttcctgctggtcacacaattccctgctgaataattgggcaagaaaaggtattgcaagtggcacaattctgggtctcataccactaatgattgcaagatcttcaggcagcagatccaagcggctattaaagggggcaaaatcaaatttgatgactctaagaggtcgatgaaggttgatggaaatccttttcctgttaatatggtgcatacagctggccgaacagccgatgggggccgtgcaagaggttttcaggtaaattcggctaagactatcaacaaatatcagaggaggtatgacaagcagcaggagaagcattatgaagaagatgacgatggtatgaggctgtcgtctattggggactgtcctaggtgcagtgatgttgcggagagctcaagccgatcatatagtaggggcaatcggctaaggtagacaagacttcctgttcatcaaaggttgggtccagtgaaccaagtacatggccaggaggacgatgaaaacagaaaaactgcatggtgtccttctggtatctttacgaagaatcaaaagagaaggaagacaaagccgaagcaggagtggcgtgttaagaatcaagttcctgtagttgaggaagccacagccgatgaagcaaaaaggttggccaaaggaaaaagtgttgtaactgctccgatcaacatggttttcacgttgcctgccgagtttgggaataagcaagccgatattgacgaagttgaagaagaatcggctaagttgattttgtcaccagagcaggcagtttttgagaagctagaggggacggagaatcggcatcttaagccattgtatataaattgttatgtcaatgggaagccaatgtccaagatgatggtcgacggtggggctgcggtaaatttgatgccttacactacgtttaggaagttgggcagaaatgctgaagatctcatcaagacaaacatggtgctcaaagactttggcggcaatccatcagaaaccaaaggagttctgaatgtggggttgacagtcggcaacaaaaccatccctacaacattctttgtcctcgatgggaagggttcttatagcttgttggttggaagagattggattcatgctaattgttgcattccttcaaccatgcatcaatgcttgattcagtggcaaggcgacaagattgaaattgtgctagccgacagccaattgaagatggagaacccaagctattattttgagggcgtcgtggagagttcagaggtctgcaacaaggacacaatagatgatctcgatgacaaacaaagacagggttttatgtcggccgatgatttggaagaaattgatataggtccagagtttagaaccaagttgatagagctgttgagagaattcagagattgcttcgcttgggagtattatgaaatgcttggactcagccgatcaattgttgaacatcggctacctatcaaaccaggggttaggaaacaggaacaacctacgaggagatgcaaagccgatatgcttgaacctgtcaaggctgagattaaacgattatatgatgctggttttattcgtccctgccgatatgctgagtgggtttctagtatttttggaatcattttgaaaaatgatttctccccggacagagaggg

SEQ ID NO: 101882 - DNA, 817 bp, Oryza sativa
  Clone ID: PAT_MRT4530_9945C.1
ttttttttttttttttaatctgaacagatgactagcgcttgcgattctcattgccaacttattttctagtgtttcaatcttccataacagtatactttacacgagcaacagagatagcctacccaatatataccatcattattggttcctacaagaatcacagtggtaattgtactacatctttaatctcctttttttggagagcctacagtcgatcagagtctcacagataacttgatatctcctaacaggggcgcttggcaactctgtccatcgctttatggaaacaattgtggtataagtagggaactaactcttgtacaacctagatcatcttaatggcttcgatggtaacttcttaacaaggctggtgttgccggttaccaataatcgagcgcccttcaccagttcctccttaatcataaaaaggagagcagaagcaaaaacactttgtacgatttttgtgctcattcctttataaagccctgacaaaccttcataacgtatcatctttgtgatcgcatcaaatgtgcctttgtagcggtgcctcttgtcatcatcaattatttgcttcacctgaagtcttgccttcacaactagaagaggatatgtaacaacagtcgcacccagtttggcaacagcaccaagaaggaaaatttcaagagcagtcagtccatcagctcccttcaaattagaggcacgtctctttttcaacttcttcaaaagagtctcgtacaacatgaattggatttttgggcttctgcaaaggtgtagttccagctcctattatggttagcaaccctgccccacgcgaaag

SEQ ID NO: 101883 - DNA, 4797 bp, Oryza sativa
  Clone ID: PAT_MRT4530_99460C.1
atgtccccatatcagatagtatacgggaagtcatgtcgactacccgtagaacttgagcacagagcatacttggccatcaggaattggaatatggattttgagggagcaggagaatggagaaaaatgaaattagctgaaattgaagaatggagagagaaggcttaccacaacgcgaagatatacaaagaaaggacgaagcgctggcacaacaaaagaattaaaatcaagaaattcaagccaggagacaaagtactgatgttcaactccagggttaagcttttcggccatgggaaactgcgcagtaaatgggaaggaccgttcgacgtcatcgacacctcttcgcacggggcaatcacactctgcagcgaatctggtaacatatttaagacccgcaaggggacacttgttcagaagtacaaaataaaagtggttgctgctgatccggggaccagttcttctaaggatggagatgggaaacaagctccagacggctcggctcagctgagtaaccaaagtgctaccgacagctctctaggaaatcaaggtgacaattctcaaggagtccatggagtgcaaggtgacggggtgcatggagttcatggagttcaaggtgatggtgcccaggggttgcaaggagaaaatcttaatcagaatagtgatacggcacaagattttttcagtaatttccaagatcgggttgactacgctgtgcatcatgctttcatcaatcaatctaggccggatggcacagtaatacctcaagttgttcctgagcatttggtacgtaatatccagccgaaccttcataattaccaagggggtaacttgaattaccaagatcagcctccttccccacaagctcaatatcagccaggtggattggctcaacctcagttggcgcctcaatatggtcagttcgagcccatgcagcaacagtcacaaggggtagctcagcaacgaccgtgggccgatgtgattgctgacgtaatgagggaacagtttgggcttaaaccaaaagagactggaagcttgtattggcagccttaccctgagtggtttgagagagttcctcttcccaatcggttcaaagttccagacttctccaaatttttgggacaagatggtgtgtcaacttatgagcacattagccgtttcttagctcagtgtggtgaagcatcggctgtagacgctctaaaggttaggttattccggttatctttgtttggatcggcttttacttggttttcctctttgccgtatgggtcgatcaatagctgggccgatttggagaagcaattccacagctatttctacagtggggttcatgagatgaaattatccgaattgacagcgattatgcggcggtatgatgaacctgtgcatgagtatattcagagattcagggagatgaggaacaaatgctttagcttgagtttaactgatgcccagttagtcgatctggcttttcagggtatgattgctccgattagggagaaattctcgtctgaggactttgatagcttgtcacatctgatacagaaagtaaccttgcatgagcataggtccgcggaagttaggaaaaactctaagaaggttaatcatgtttgtccgtacatgtatgggttggatgatgacgaggacgattctgaaatagctgtagccgagtgggtgaggagtaaaaaggtcataccatgccaatgggtaaaaagttctggaaaagaggagaagtatgactttgatattactaaagctgacaagatctttgatttgctactccgagagaagcaaattcaacttcctgctggtcatacaatcccatcggctaaggaattaggcaaaaagaggtattgcaaatggcataattctgggtcccattctactaacgattgcaaggtttttagacagcagattcaagtggccattgagggaggcaatattaggtttgatgattccaaaaagccgatgaatgtcgatgctggccaaacagccgatagggcccgtgcaaggggttttcgggtgaattcggctaagattatcaacaaatatcagaagaagtatgacaagcagcagaagaagcatcatgagaaatacgatgatggttttgatcctcattggggttgtgagttctttagattctgctggaatgaagatcatggccaagaggacgatgtaatcaggaagaatcaatggtgtccttatggtattttcacgaagaatcagaagagaagggttcagagattaaggaatagggagcaccttcaggaggttgaacaaaaaattaatcatcggctgaagaaagcaaagccaaggcaggagtggcatgttaagaatcaggttcctgtagccgatgatattgcagccgatgaggcaaagaggttggcaaaagggaagagtgttgtgacggcaccggttaacatggtctttaccctgccagccgaattcgggatcgaccaagccgatgtcgatgaggtggaagaggaatcggctaagttggttctgtcaccagaacaggcagtgatcgagaaacccgaggggacagagaatcggcatcttaaaccattgcatataaacggctacgtcaatgggaagccgatgtctaaaatgatggttgatggtggggccgcggtaaatttgatgccctatgctacgttcaggaagttgggtagaaatatcgaggatctcatcaagacaaacatggtgctcaaagattttggtggcaatccatcagaaaccaaaggtgttctaaatgtggagctgacagtcggcagtaagactgttcctaccacgttttttgtcatcgatgggaaaggttcttacagcttattgcttggaagggattggattcacgccaattgttgcattccttcaactatgtatcaatgtttgattcagtggcaaggcgacaaaatagagattgtgccagtcgacagccaattgaagatggagaacccaatctattattttgagggcgtcgtggagggttcaagtgtctacactacggacatggtagatgatctcgatgacaagcaaggtcaaggtttcatgtcggccgatgatttggaagaagtggacataggtccaggcgatcggccaaggccgacatttattagtaggaacttatctccagagtttagaaccaagctgatagagctcttaaaagagtttagagattgcttcgcttgggagtattacgagatgcctggactcagccgattgattgttgaacatcggctacctatcaaaccaggggttaggccacatcaacaacctccgaggagatgcaaggccgacatgcttgaaccggtcaaggctgagattaaaagattatatgatgctggttttattcgtccttgccgatatgctgagtgtgtttctagtatagttcctgttatcaagaaaaacagcaaggtcagggtatgcattgatttccgaaatttgaataaggccaccctgaaagatgaatacccaataccagtagccgatcaactagttgatgcttcttcgggacttaagattttgagttttatggacggaaacgcaggatacaatcaaatttttatggccgaagaagacattcacaagacagcttttaggtgtcctggtgcaatcggtttatttgaatgggttgtcatgactttcggcttgaagagtgctggagctacatatcaaagagccatgaattatatatatcacgatctaatcggctggttggttgaagtctatattgatgatgtggttgttaagtctaaagagataaaggaccatatagttgatttgaggaaggttttcgagagaaccagaaaatatggcctgaagatgaatccgacaaagtgtgcttttggtgtatcggctggccagtttttgggatttcttgttcatgagagggggatcgaggtaactcaaaggagtgttaatgcgataaagaagattcagcctccggagaacaagacagaattacaagagatgatcggcaagataaattttgttagaaggattatttctaatttgtctggaaggttagaaccttttgcaccattgttgagattgaaagccgatcagcagtttacttgggaggcagagcagcaaaaggctttggataatattaaggaatatcttagttgtcctcctgttttgattcttccacagaaaggaataccgtttaggttatatttgtcggccggtgagaagtcaatcggctcggtcttgattcaggagttggaagggaaggaacgagttgtattctatctcagtcgtcggctcttggatgctaaaactagatattcccctgtggagaagttatgcttgtgtttgtatttttcatgtacaaggctgaggcattatctactgtccaacgagtgtattgttgtatgtaaggctgatgttgtcaagtacatgctatcggctccaatattgaaaggaagggttggaaagtggatattttccttaaccgagtttgatcttcggtatgagtcaccgaaggcgattaagggacaagctatagctgattttattgtggaacatcgtgatgattcaatcggctcggttgaaatagtgccatggactttattctttgatggatcggtgtgtactcatggttgtggtatctgcctagttataatttcccctaggggggcatgtttcgagtttgcttatactattaaaccgggggcatgtttcgagtttgcttatactattaaaccgtatgtgactaataatcaagctgagtatgaggcagtgctcaaagggttgcaattactcaaggaagttgaagccgataccattgaaatcatggggtaa

SEQ ID NO: 101884 - DNA, 555 bp, Oryza sativa
  Clone ID: PAT_MRT4530_99461C.1
atggcctgtcgcatctgcctcccaccaccggacctcaccgcgcggccacgcctcctcggcctcgtcatcgccatcttcctcttccctccctctcgacatctccccagttcagtggtggcgcaagggtgcgggttggcagctcccgtcgcagcagcggtgcaggggcgcgggtcggcagctcccggcgcagcagctgctcggtggctcctcaccgcagcggtggctcgagacctccacggcggcgaggtggcgaggaggaggttgggcgaggagcagcagaagcagttgaggacgctgcggacggcggaggttggcgtcggcgtgggcgaagcgacagagtccggggccaccgcggggggcgccgccgacggcggcggcggcgacggcggcggcgtgtggatgcaccaaccagctaagaagatgtcatggacccaccagtcgtcgcccgccacggcggtgaccagatccgagaccacgtccatggtcggcgacctccttggcatggcgagcacgccgtcgctgtcctccggtgatggctgtaatctgttggaataa

SEQ ID NO: 101885 - DNA, 444 bp, Oryza sativa
  Clone ID: PAT_MRT4530_99462C.1
gcgcccacgcgtccgctttcaccattttggaacatctacgctcacagcgtcgtgtatattactcaaggccgtgcccggggtcaagttgtcaacaacaatgtgaagacagtgttcaacggcgagcttcgccgcgtacagttgcttattataccacaacactatgcatttgtaaagaacgctcaaagagaatgatgtgctgacattgcatctaagaccaatcctagctctatggctagccacatatcacgacagagtttcatcttgcgtgctctgccaaatgatgttctagcacatgcatatcgcatctcaagagaagaggctcatacgctcatgcatactagaggagatgagttctgcgcattcactccaatgcaatgcacgagctaccaagacgttgataacgcgacagaatcctcttacgtcagcttgcgcataaagaatgac

SEQ ID NO: 101886 - DNA, 1494 bp, Oryza sativa
  Clone ID: PAT_MRT4530_99463C.1
atgacgctgccaagcccgaggatggtcgtaccggcgaaggatcagtcgccggacaagccgtcgggcttcaggaagagcatcaacccgatctacgccgacgccgtcgtcgtcgacatggccgccgccgccgcccgtccgtccaggacggcggcggcggccgccgtcgaagacgacgacgatggcggcgctgctccggcgctggtgcggcggcacacgggcggcgccggggacgggaggtgggaggcgatccgggcggcgagcgcgcgcgagtcgccgctcagcctgggacacttccgccttctgcggcggctcgggtacggcgacatcggcagcgtgtacctcgtcgagctccgcggcggagggagcggcgcgctgttcgccatgaaggtgatggacaagagctcgctggtgagccgcaacaagctcgcccgcgcgcagacggagcgcgagatcctcggcctcctcgaccaccccttcctccccaccctctactcccacttcgagaccgacaagttctactgcctcctcatggagttctgctccggcggcaacctccattccctccgccagaagcagcccaacaagtgcttctccgagcacgccgccaggttctacgcgtcggaggtgttgctggcgctggagtacctgcacatgctgggggtggtgtaccgcgacctcaagccggagaacgtgctcgtcagggaggaaggccacatcatgctctccgacttcgacctctcgctccgctgctccgtcagcccggcgctggtccgctcgccgtcgggccgtgtcggtgccggcgccggactggtgcacggctgcgtgctcccgcggattctcccgagaaggagcggcaagaagaagaagaagcagaaggggaatgaccaggaggtgacgtcagcgaccggcgacggcaacggcaagaacaggccgccgccggcgacgtcgctggagttcaccgcggagccgacgggggcgaggtcgatgtcgttcgtgggcacgcacgagtacctggcgccggagatcatccgcggcgaggggcacggcagcgccgtcgactggtggacgttcggcgtgttcctgtacgagctgctgcacgggacgacgccgttcaagggctccggcaaccgcgccacgctgttcaacgtcgtcggccagccgctccggttcccggacgcgccggcggccagcgccgccgccagggacctcatccgcggcctgctcgtcaaggagccccagtccaggctcgcctaccgccgcggcgccaccgaggtcaagcagcacccgttcttcgacggcgtcaactgggcgctggtcaggagcgccatgccaccctacatcccggaggcggacgtcgccgccgccgccgtggactgccgctcgccgctcgcgcgcgcgacgcagggcggcggaacgccgaagaagagcgccgccggtgggaaggccagctcgccacgggatgatccgtcctacgttgaattcgagtacttctag

SEQ ID NO: 101887 - DNA, 1110 bp, Oryza sativa
  Clone ID: PAT_MRT4530_99464C.1
atggcgaggaaaggcaaggacctaatcagccagctgcccgacgacatcctagtgcacatcctgtcgatggtccgctacaaggaagcggtgcgaaccaccgtggtgtcgcggcggtggaagcacctccacaccaagctccccgccgtgtcgttcaccatgtcggtgctcgggctccagggctcccccttgtccacgcagagcaagcagcgcgtcgagagcatggcgcgcacgcttcgccggcgctgcgcggggccagaccacgacaccgtgcagcggctccgtctgtcctaccgcaaggacgtgcccatggagtgccggtacgccgacgagttcatcgcgctcgccgccgcgtcgtcgttggtgctgttcctcaactgcccaaagaacctacgtaacaacgacgccgggccgtggtccttgcatctgccggctgccaccccctgcttgtcaatggaatcgtgctggtactcggtgaggccgcctcacgtccatggccccggcgccagcgcactcaagtcgctcaccttcaaagacagcttcatggtgctccacccaggctatctccaggacaccgccttcccgtcgctggaggagctccagatctccggctgcaccctctccggcagcatcgagatcacgtcggccaccatgccgcgcctcaagcacctccgcatcgtcgatgtcagcatcatctcgctcggcacggaggccgcaatcaccgtcctcgccgatgagctggccacgctgcgcgtgtcctgccacgacggcggcaagcccgacccgccggccagtcacgagatgctctgcgtggagacgcccttccgcgccagcttcaccgagtactcgtgcttccgcctgcgcgcccccaagctgcgggtgttcgaatggcgctgcagctacgccaaggaggtgcgcgtcgacgccgtcggccgcctctccgacgtcgtgatcgagctgttcgccggcaggctgcctcggtgctacaacgaggccaagaggttcctgcaaatggaggattgcgacaagttgatgaagcacatcctgcaagggatcatgcctggccgctggaagtacgtccaaaggctatctagcgacagccaattacgctaa

SEQ ID NO: 101888 - DNA, 1017 bp, Oryza sativa
  unsure (1)..(1017): unsure at all n locations
  Clone ID: PAT_MRT4530_99465C.1
atgggggtggcgcgcggagttcactcgggcttgcctcgctcgcccccatctgccaccggtcgacacttattatattctggcccattaacctcgaaaccttatgatataacaagtaggccctatgaggcccagttcggcccattccatgtcccctcgcggcctcaccgtgggccagaccagccgaacccaccaagcggcatcttcttccttccgccccggccgccggtccgaccactgcttcctcccacctgcggagacggaaccctaaaaaatttcttcttccccttctcgtccgggcagcggaaggagctctaagccagaagaagcatcatgcctaagataaaaacaagtggtgtgaaatatcccgatgggtgggagcttatagaacccaccctctcagagctccattccaagatgagagaagctgagaatgatccgcatgatgggagaaggaagtgcgaggcactgtggcccatcttcaagatcaatcaccagaggagccgatatctttatgacctatactacaacaggaaggagatatcccaggagttgtatgagttctgccttgaccagggacatgctgaccgtaacctcatcgccaaatggaagaagcaaggctatgagcgtctctgctgcctgcgctgtatccagacacgagaccacaactttgcgaccacctgtgtttgcagggttcctaagcacctaagggaagaacaggtgatagagtgtgtccactgtggttgcaaaggttgtgctagtggtgactaagtatccactattgggattacttttcaagttacatcaggagcaagttgatgaatgtaaactgaataactgatgtagtgatatctctgatgtacttggaaaaatgcctagcctgtctagagagtagactgaatgtactcgtaagatgatggatgtggtaatgtgaaaaaaacttgagttcttctaccaaaaaaaaaaaaaaaaatttccantcnttntaaaaaaaaaaaaaaaaaaaaaaaaaaaaaaaaa

SEQ ID NO: 101889 - DNA, 309 bp, Oryza sativa
  Clone ID: PAT_MRT4530_99466C.1
gtttatttacacaaaccttacacaactccagggggggttttattaaaaacatggggttcttcaacaacatcactatccggggaaaccaatcttccatcaacaccctcaacgacctagcaagtatcaacaagcccaagagcccctataataccaacacagttaattatccatctaatcgattgctctacaccacccttatagtaaacctaccgctaatatacgtgaaaccacttaactacctaacaaaggaattgcttgaacaactcctataggaccaccatgacagttatcttcaacccagagacatcc

SEQ ID NO: 101890 - DNA, 3574 bp, Oryza sativa
  Clone ID: PAT_MRT4530_99467C.1
atgtatataaagaaagttgtgatagaaggatttaagagctacagggaggagatctcaacagaacctttcagccccaaagttaatgtagttgttggggcaaatggatctggcaaatcaaatttcttccatgctatacggtttgtcctcagtgacatgtttcaaaacctgcgcagtgaagacaggggcgctcttcttcatgaaggtgctggtcactcggttgtctcggcttttgttgagatagtgtttgataattcagacaaccgtattccagttgacaaagaggaggtacgcctgcgcaggacagttgcttcaaagaaggatgaatactacttggatgggaagcatgttagtaaaactgaagtcatgaatctgctagagagtgctggattttctcgctctaatccatactacgttgtccagcagggaaagattgcatcccttaccctaatgaaagattccgaacggctggatctcctcaaagagatcggtgccaacaaaagaaagcagattgatcaagttgtccactacttggaggaaaggttgagagaacttgatgaagagaaagaagaactgaagaagtaccagcagctggacaaacaaagaagatcacttgagtataccatactggaccatgaactaaatgaggctaggaacgaattagcttcgatggatgataaccgaagaaaaatttctgaaagaatgtcccatgcggataatgaagtggtagatgtacgtgagaaggtgaagacttttgacaaagaaataaaatactcaactaaggggataaatgataccaaggctcaaaaggaaggtgtagagaagaagcgtacagaagcactgaaggtagttgctcagattgagcttgatttgagagacataaaagacagaatcttgaacgagaaacgggcaaaggatgaagctgcgaaggatttacaaagcgtgaggatggagagtgaaaagtcaaagtccgaattagctgaaattagtaaggtgcatcaagccaaattaaaggaagaggaagaaatatcaaaaagcataatggaccgtgagaagcggttaagtatattgtaccaaaagcaggggagggcaacccaattcgcaaacaaagctgccagagataagtggcttcaaaaggaaattgatgatcttgagcgtgtgcttttatcaaatcgaaagcaggaaggtttacttcaagaagaaatccagaagcttaaagatgaaatcaataacttgaatagctacattgagtcccggaaaagtgaatcaagcaaattagagtctgcactagcaaagaaacacaatgactacaatgacttgaggaagcagagagatgagcttcaagaagaaaggaaatcattttggaaggaggaagctgatgtgacagctgaaattgataggctaaaggatgatcttgtgaaggcacaaaagagtttggaccatgcaacacctggggatatcagaagaggcttgaattctgttagcagaatcatcagggaccatggtattacaggagtttttggtcctgttttagagctggttgattgtgaagagaagttcttcactgctgttgaggtcactgcagggaacagaacagtaatatgccgagacctggaaactgcgaccaaagttgcacgcggcaatgggctggattgcatcacacttgatggtgatcaagttgccagaaaaggtggcatgacaggaggtttctatgactctagacgctcaaaactgaagtttgtgaaaataattagggacaataaaactgcaattgagaaaaaggcagcacatctagagaatcaaatggatgctgagcgtgaccatgccaaatcagagttggaacaatttaaggttgacatcgctagcgctatgaagcaaatggtatcacttgacaaggcacttggaaagaaggaaaaatcacttgacaacatccggaaccaaattgagcaaatccaatctggcattgcaatgaaaaatgatgaaatgggcactgaacttattgatcagttaacttcagaagaacgagatcttctttcacgattgaaccctgaaattactgaactaaaggagaagtttctcttatgtaaaaacagtcgcatcgagattgaaacaaggaaagaagaactggaaaccaatctatcaactaatcttatgaggcgccagaaagagcttgaagcaataatttcatctgcagactctaagaccttgcctcttgaagctgaatcgaaagagcaagaactaaaaagttcgaagaggagtcttgatgaattgactgcaatgttgaaggctaatgtcgatgctattaataacttcacaaggaagatggaggaactgaaaagacagagagatgatctgaaggcactagaagctaacctggagcagaccgtacaagatggtgccaaggatttggaacagctcatgagcagcaggagcatgcatttagctaagcaagaggagtgtatgaagaagatccgagacttgggctcattgcctgcagatgcttttgaaacgtacaagcggaaaaataagaagcagctgcagaagatgctttatgactgcaatgagcaattgcagcagttcagtcatgtcaacaaaaaagctcttgaccagtatgttaacttcaccgaacaacgtgaacaactacagagaagacgggctgaacttgatgctggtgatcagaaaatcagagaactaatatcagttttagaccaaaggaaggacgaatcaatcgaacgtacatttaaaggtgttgcaaggcacttccgtgaagtgttctctgaactagtgcaaggtggccatggacatttggttatgatgaggaaaaaggatggtgatgcagatgatgatgataatgatgaggatgggcctcgtgaaccagatcctgaagggagaattgagaagtacattggtgtaaaagtcaaggtttcctttactggcaagggagaaacacagtctatgaaacagttgtctggtggacagaagacagtggtggcattgacactgatttttgccattcagcgttgtgatccagccccattctatctgtttgatgagatcgatgctgctctggatccacagtacagaacagctgtcggcaatatgatccgccgtctagctgacatggctgacactcagtttatagcaacgacattccgaccagaaattgcaaaagttgctgataagatctatggtgtgacgcacaagaacagggttagctacatcaatgtggtgtcaaaggagcaagctctggacttcattgagcatgaccagacacacaacgctagctgagactaaatgcgcttttgccagtggtgtgctgcaggcagatgctaacgtagaggtagtggaagcaggctgaaatctggctttgcctggatgttctatttccatggttggataattgtactagttgtgaatatgtagttagcctttggacttgtaagtttcagctgatgggtagattgtgttatcattatgttctgtttaggatagcacatgtattcagtggtacatgcatcggcgacgtggttgtaacatcgctatttattcttgtatacattataacctaccgcttact

SEQ ID NO: 101891 - DNA, 1983 bp, Oryza sativa
  unsure (1)..(1983): unsure at all n locations
  Clone ID: PAT_MRT4530_99468C.1
atgtcgcgggctctcctcccgcgcggcagcattctactcgtccttcgaccgcgagtcccgtccacaccccaccgatgcttcgcgattggggcggcggcggcagttgacggcggcgagacgtggcgggggcaactccggcagggggagggggaggggaggagcagggcggtgaaggtgtcggtgtggtgggacttccagagctgccacctcccgcagggcgccaacccgtgccgcgtcgccacgcgcgtcacggcggcgctgcgggacgccggcatccgcggccccgtcgacatcaccgccttaggcgacgcctacatgctcccccgcgccgtccaggaggctctcgccgccaccggcgtcgccttctcgcacgtcccttccagtttcgtcttccaaacccatcccaatttcgttactcatcgaaagtcagatgactctatggcagagtcagaggactccctggcagagtcaagggactccaaggcttttcaaccacataccaatcttccaaatcttcgagcagagcttagaaagaatcatgtgttcatggataaaggattatttggcttcaaaaacttctcttctcttctccaagccatgcctgatgttgtgaagtttatagatcctctaccaggtgaaagaaaccagcctgctgtggttggggtttccaagagatcaatggagcctgctgagcaaatttacaagggaaagagttctgctcaaagcagtggtgagttcaaacgcctcgttcagactcttaatgagaaaccaccatcatcacatgtcccatcttcttcatcagatattttatctgcggaccgcaagaaagttctagcagttgatgccccatcttcccaatctgacttgttatctaggaaccaagagaaagctccccctgttgatttgactacacaacctgaaacacctgcaagctgtatggaagctgatgtggagagtgttgctggagcttctgcctttacaggagagcaaattactgttgacaaaaaggggctatttgaaaggatttgtgtactatggaatgatacagagcctgttaagcctatgctttctccgtctcaagatgatacccattctaaaggctccaatgatttactaactcagtatgccaatagtaacgaacataacagtcttttgacaaggaccttgaagatcttttccacaactgacaattcagatggagacaatgttgacagcacttcagcaattagcagcagtttctcaaatatgactgccaatgaccattcggacaaattaaatgtcaaggagaatgtagggaatacgatcatccattctagtagatcagttgacacgagcaacgctgaacataaagttgggtttatagaaaaaagcaaaggaatatttagctgggctgcaaagtggtgggcgtctggaaaaccagacacagatgacaatttaagttcagtacatatcaatgatggaacaagggaagaatcagaaaaagaatctgcatttgtaaagacagctgctactgcaagtgaacagcaagtaggagttgaactgttcatgaaaccttacttctgggatgcactacagcaatatttgtctacccctcatggatcagatcttgtttcaaaagcaaagacaagcaagaaacagcacggcattggtggtatagtggactgctctagaatcaacagagctcaagattacttgggcaatgacccaaatgggggattcttgctagtgtacttcgccgggctcgacggaggagaaggggagcacgaggaggcgtcggcggaggcggcggtggaagaggtcggcggcgagcgcggcgtagccgccggcgaaggtggggtagttgtanagcgcgaggtgcgcggggccgtcggcgtccttggagtgcgcgcggatggcctcgagggccgcctccgagcggaaggctcgccggagctcggtcgccgccggcgaggcaacgccgatgaggcggtggcggcggcttag

SEQ ID NO: 101892 - DNA, 380 bp, Oryza sativa
  Clone ID: PAT_MRT4530_99469C.1
ataaaatccgcaagtgcacggatataccgagtacgtacccggacagggaggacttaagtgatctcaagagctgtcaccacctctacacctacctcaaacgggaaatgtccgaactgcaccgcaaccgtcattgggagaacatctggagcatccacgccaaacccaggatgaacggtgatcggggggttcggccgaaccagagggttcggtcaaacctgggctgggccctcctggcctggccttcggtcgatgttggcggtatggattgtcatttaacaaccgccaacaatggggcatggcatcgggtccacgagattgatcgccgcaagactaaggctatgttcgtctgttcgctggagcctgttcccaactggaacagt

SEQ ID NO: 101893 - DNA, 279 bp, Oryza sativa
  Clone ID: PAT_MRT4530_9946C.1
tttttggtttgtttcattaatttgaaatgcacttttttcacaggaacgagataaagggctccttttttttctatcgcaacattctcatgggcacccaatattggcaacaccggcacaccatcatgatctatgggcaagaggctcgacaatatgcaaaacacgcaggccagatgattgtcgtgacaccacgttacccaataagttggtgtaggctggagaacgaaacccgcagtgagcatggtatattttgcggaatgacccagggcattcaaaatccgg

SEQ ID NO: 101894 - DNA, 2226 bp, Oryza sativa
  Clone ID: PAT_MRT4530_99470C.1
cggacgcgtgggttgttctggtacacaaccccagggcagtcaatcagaaatattcttttagtcagagtaatgtactgccacaccttcgtctctccaggaattggagccactttgcaaacactcttggagcgtaacgtgttgataactgatgactgccctggggttgtgtaccagaacagtgagtggatccccgggctgcgggtccccgggctgcagccacccgcccccctcctctcctctcctctctcccgccgaccaggagaaagaaggaaaaagaagaagaaaaatcctctgcgatggcgaagaagaaggagagggcggtgaacgtgtcggggaagccgcgccactcgctcgacgtcaaccgcgccaatgacaagaagggcgcgggcggcggcgccgggggcggcggcggcggccgttcggcggccacggtgcggcggctcaagatgtacaagatgaggcccctcagggaccgaggcgggaagatcctgaagcacgacctccagtccaaggagctccccaacacccgcatcgagcccgatcgccgctggttcggaaatacacgagtcgttaatcagaaagagcttgaattctttcgggaggaactccagagtcggctttccaataactataatgtgatactgaaagagcggaagcttccactgtcactactgcaggatcatcaaaagcaagctagggcgcatcttcttgacactgaaccttttgagcatgcatttggaccaaagggcaagaggaaacgcccaaaactaatggctcttgattatgaatctctattgaagaaagctgatgattctcaaggtgcatttgaggataagcatgctacagtagtccatctgaaacagctgaacctgttggataaatccgatgaggaaggggtgagtagtgacaggactgctgccgccatgaaagcgatagcgggaataatctcatcacagcagcagatgaatgttccttgccaaaaggaatttggtgtaactaatgaagatagtgaagtcgcggagcaatcagagtgatctacaaaaggctaggaaccctgcatgataaagaacagggcacaattttgccaaatacctagagattttatgaagatttggtgtctaacaggaatgttacgatgaatgttacgatcgttcagttcaccggtgcgttctactgcaacgaaagaccggaatcaagggtgtgggactgggaaacttctgtaacttcatatattgtgtgggcctttgttgtagaccagatagagtgttttggtagcttaatataaccattttgttccaactgtacttgaaacaaatttattccgatacattaattccgcaaagtcattcgtatttgtatggggtctaaagaaactgatattgttcttaagggcgtggtgcgtgtgacaaatttggcggatgcttctgagcacattggtgaagttctgagacgtgtaaaaaaggagcatcttaaaagagcttacaaaattgaagactgggttgatgataatgattttcttgtccaactgagcaagaccactggaaagctactcaggggtggggagcctgatcttacaacaacggccaagatggtgcttcatgactggcagaggggcaagattcccttttttgtgcctccaccacagcaaggtgaagatagtccatctgaaacagctgaacctgtggagaaatccgatgaggaaggggtgagcagtgacagaactgctgccgccatgaaagcgatagcgggaataatctcatcacagcagcagatgaatgttccttgccaaaaggaatttggtgtaactaatgaagatagtgaagtcgcggagcaatcagagtgatctacaaaaggctaggaaccctgcatgataaagaacagggcacaattttgccaaatacctagagattttatgaagatttggtgtctaacaggaatgttacgatgaatgttacgatcgttcagttcaccggtgcgttctactgcaacgaaagagcgttcactgcaacgaaagactggaatcaagggtgtgggactgggaaacttctgtaacttcatatattgtgtgggcctttgttgtagaccagatagagtgttttggtagcttaatataaccattttgttccaactgtacttgaaacaaatttattccgatacattaattccgcaaagtcgttcgtaaaaaaaaaaaaaaaaaaaaaaaaaaaaaaaaaaaaaaaaaaaaaa

SEQ ID NO: 101895 - DNA, 626 bp, Oryza sativa
  Clone ID: PAT_MRT4530_99471C.1
tcgatcggtccacgaccggctcacgggagacggggacgatgacgtcggcaatgacgtcaccaccggcggcggcggctcggcggctcgacagctcggacggcgcaagctcaccggcgaacggcggcgctagggcacaaacggagggcaccaacgggtagcggacggcacggcgaactcaccggcgaccaaagcgacggcggaagaggaacggacggcaccggcggcgaggttgaagcggcggcggtcttcgggtcgacggcggcaacgtgaaggaaggtttagggttcggaggagagagacgaaaccgattcgatctcgaatccaacgatttccaaaccgatttagccgatgtttccaaaggagaaaaggcggaggagatcccgaggatcatttcccctctatcaattcggccggagaaggaaagaagcggccggatttggaaggaaacgacggcggcgcggcgctagggtttcggacggctgcggcgcgacgaagacgacgacctgacaggcgggacccacctgtcagcgacagcgagggcgcggctgcggactgggccggactgggccgaggagagagagaacggttttgggccgactttcggcccaaagccaaaagagactttt

SEQ ID NO: 101896 - DNA, 213 bp, Oryza sativa
  unsure (1)..(213): unsure at all n locations
  Clone ID: PAT_MRT4530_99472C.1
aacatacacacatttcacaagaacctgcgagaaagaagagaagtgtgtgtcgagatgatgatgctccggctcgtcggcgccgaagctaggagganggtggncaccggagctgccggcggcgagcggtggctntcggcggcggcggcggcgccaccaagggaaggctcgaggggaaanttgcaatattaaccggggnagcaagcggnctcggga

SEQ ID NO: 101897 - DNA, 500 bp, Oryza sativa
  unsure (1)..(500): unsure at all n locations
  Clone ID: PAT_MRT4530_99473C.1
aggggacagcagcatcggccaacgctttaggtgtggcgaacggccgacgggaggcggtacagtgcggcgatgccactgattgccggcgggggcgcacctccggtgggtttccggcgaggatacggtgaggctgagaagaaggatggcgtcgtagtgccggggaatgcggtggcgacatcagccgccgcacgggcgagcnggcatagccgcctgaagttggccggcggcgcggaacaaaaagaagcacgccgggaataggtggtgagcccacggtagaccgcgggaggggggctataactggagaacggatcgaggggttccattttataggggagaagagggagccgcccacgggagagacggggaccggcggcggaattcgtggtcggcggccatgaaaggtgaccggggttggcgcgggcgttcccgacgattgggggcacgaatcaagggggaaattggggggaattgaacaggaaggaaaggggattaattccccc

SEQ ID NO: 101898 - DNA, 704 bp, Oryza sativa
  Clone ID: PAT_MRT4530_99474C.1
cgtctctttcccgcaaccttcgattttcgtttattcgcatccatcggagagagaaaacaatcaataagcgaccatgttggtgtaccaagatcttctcaccggtgatgagcttctgtctgactctttcccttacaaggagattgagaatggaatcctctgggaagtagaaggaaagtgggttactgtgggagctgtagatgttaacattggtgccaatccatctgctgaagaaggtggtgaggatgaaggtgttgatgactctactcaaaaggttgttgacattgtcgacaccttcagacttcaggagcaaccaacttatgacaagaagggattcatcgcttacattaagaaatacattaagcttttgacacccaagctcagcgaagaagatcaagctgtcttcaagaagggtattgagggagctaccaagtttttgctccccaggctcagtgacttccaattctttgttggggagggtatgcatgatgacagcactttggtctttgcttactacaaggagggttcaactaacccaacatttttgtacttcgctcatggtttgaaaaaaaacaagtgctgaaaaagaagctctcgttgggttactgtggtcggtcgcagcgactctctaagtttatgtttctttatattgtcctgtgtttcgtcgtcgtcccccattaaaattacctgccagtttacttttctct

SEQ ID NO: 101899 - DNA, 660 bp, Oryza sativa
  Clone ID: PAT_MRT4530_99475C.1
atggaggcaagcctacaggtgcaggtgcaggactatgcatacctttgtggggcctatgatgtgaaggtggtaaattgctggaatgttgctttggaggtgcagcaactggaatgccatgttttctatggatactgggagaatttgaaggagaataggcaggcaaagaatggtgatgccttccctttggaggtgccacaactggacctgcatgggtatttccatgatcggaactgcatgatcctggccaaactagaccaacaaggaggcccccaaaactcccacagagcagaccagcacagcacagagcacaccactgcacatacctccagctccacggatcacgagcacgcagacgaccaaggtggcggcgagcgcaagtacacagccaccaatccacgcgcctcccgctcgtcctcctcctccacgccgccccatctcctgtcctcccttccccgcctcccagcccagcggcagagctcgggattcgccacgatcacatctctctcattcaccccggaggaaaaggtcggcactcctccgccgcagcccggcgacacagcaccggcgcgcggggcagccgcggaagcggacggcgggcgggagacggaggagaggagaggagagggcgccgtgctgcggtggacttgtggcgagtggtga

SEQ ID NO: 101900 - DNA, 390 bp, Oryza sativa
  Clone ID: PAT_MRT4530_99476C.1
atgggcttttatatccttcggctttgtggatacccccactccggcggcgacgccggcgagcaaaccattccgccgcgccgccgcctatccgcttcgccggccggcggccgcccactgcctccctcgacgcactggctccgccagggagtactcacacgcggccgaagcttgcctgctcattcgatcgacagccctgctggcgtcgcctgcggggcacgacggcgacgccctccgcggcaggccgccctccttggatttcttcggatcaggggtagctggtatgctcctgtaatcctctttgcttcaagtcgtcatccttttggtttggggatcagttctgccaatttcctagttaggttgaggctgtacgcggtggaattccagggctag

SEQ ID NO: 101901 - DNA, 4295 bp, Oryza sativa
  Clone ID: PAT_MRT4530_99477C.1
aaagtatgacaccttggaggagaagacatgtccaaataagatgttacttaacatgaagtcaaggagtatgacacgagaactagaatcttcatgcatataagcaagagcccgtgcagcaccaagtgcaattttaagcctagcatcccaatcaagtggagcagttcccttatatgatccgtgcaagtgagattccacactaccatttggaacaagctcatacacaagacaccggatatgttctactctgaatctatcctgaatctttgtgtaccacagtgctcgcttgagctaccagttgataaacccctctccctattgtgcccggttctacctaccctaagaggacctgaacttgaatatcgtcgaaaagaaccagatgcatcaagagtgtcataatgtgctgatgcattgaacagctcagcagatacaacaggttctacgtccacatccaggcttgctctacttataatcccagaatcctgaatatgtaaatcttggctgaaacttcctgattcattgaactcgctgccttcatcgcataccaacttcaaagcttgaacaacttcacccataaatgggcgctgatccacctcaggctgcacgcacatagaagcaatagctgctacttttgcaatgctatcgaataggatgctatttccaagtgatggatcaattattgtttccaagccatctctgctagtaagaaaaggacaagcccatgcaactaaattttcttgccctggaggtctcaaaatatccaccggtttccttcctgtaagaagctcaatttttttgaatctttttataggatgacaggcaaaaatacccttcatttcatctgatatttcacttaccttccatgcgaaaggaatggctacacttgggaaggtacatgaacatttacagttgatgaaccgcagttgatgaaccggctttactttccactaaaaaaaaggaaccggctttatacatctctagaactgtataaacagagacgggacgggacgagatgttggtactcttgcagtcttgctcagtgctcttcgaaaactggtccttgtcccggcagcaggaaagcagcgatcccctggtccatgtgccggcagaagcctggtgatatcgctcagtgctgtacccagatattcaccatgaatatgaaaagtgtggcttgctcaaaagcatcccaagaaaacagggccacatcgtcggaaggggcctgccagctgaatcctatcaatcgatcccggcgctcactgtcccaccggtggtcaggctaggtcagccagaagaatcctgccattctcgacaataggaaaaccaaaacctaaagatcaacaaaaaaaaacacgtggacgctgaggcggaggcgcggtggccgtggtggtggtggcggaccaaaccgaaaggcctggcctcccttcgccgcgatccgcgcgcgtcacaaacggacagcgattagctgtcgtctacccgactctgctcgcggcagcgagggaacctgttgcttctattttcgaggtcagagttcgcgccacgccgcacacgtaggggcgctgatccacgtaaggctgcacgcacatagatgcaatagctgctacttttgcaatgctgtcaaataggatgctatttccaagtgatggatcaattattgtttccaagccatctctgctagtaagaaaaggacaagcccatgcaactaaattttcttgccctggaggtctcaaaatatccaccggtttcgttcccggaggaagaccttggtggacgacaccatagctgtagacatcactcttatgcagagggtttatgttgacctgcttgtgccaaaacctttcaaatactaaaagtgctgttgccttgtcaaatttttctcccagtggcacaagatcaataaggacaactgttttctctgggtcctcagttgcagcatttgctcccattacacgaacttgactttgtttcatgagcactccagatgcaatatcttgtgcaagttctgataccaatgcaaagaatgtgtacaaagctatacctaaacgaagctcaacttttattggccacacacaaagacatgtagttccagggagactattggtcagaggatcttgacaatttaacgccatgcaatctggagaatttgaaggcgtctgtgcatatacctatcaacttaaccaggtttctgtgatgcaatcggctaagcatctcaacctcagctaaaaattcccgtgtaccttgctggtcgtccctcttaagaattttgacagcaacccgttctccatcctcaagaataccttcataaacacgtccaaaaccaccctcgccaataattctggagttgtcaaatctttgtgtagctctttccatctcaatcaagctaaatgttttcgctgtccctttatatgtcactatgcttgagctgaaagatggagatgctgaaataggtctgcttcctagcctgctcccaacaactgcagacccaggacctgcaggcttcggtggcataggtgactcttcagttaaatggttgcggtttctaatcttgaaacaaattaccaacgcagctccagaacataaaataaaagcaaagacacttgaaagaacaattataacaattatgcccctgctttttgtttctctgtggtttcccacatcaacagcaagtggatgcaaccttggatcattaacattgctaagaccattgttcatcccgggagctgttggtggcgacggaggaagaccttggtaggtaacatataacacatcatagtttccaaaatgcatagagtttatgttgacctgcttgtgccaaaacctttcaaatactaaaagtgctgttgccttgtcaaatttttctcccagtggcacaagatcaataaggacaactgttttctctgggtcctcagttgcagcatttgctcccattacacgaacttgactttgtttcatgagcactccagatgcaatatcttgtgcaagttctgataccaatgcaaagaatgtgtacaaagctatacctaaacgaagctcaacttttattggccacacacaaagacatgtagttccagggagactattggtcagaggatcttgacaatttaacgccatgcaatatgaactcagaggcggtggcggaaatgattggggtgctggtgccaaactcttgggctttttaaatgcatgactgtcaggcggattcacaggtggtagaccaggttctggagaatttgaaggcgagtgatattcatggggatgacgtggtgcatacgcaggatttcctcgtgcatttccttcagatggaggcaagcctacaggtgcaggtgcaggactatggtgtaagccagaacgtccatgtttcgttttttttttattatcagctttatgtggagttgggctggggactgtcagcatacctttgtggggcctatgatgtgaaggtggtaaattgctggaatgttgctttggaggtgcagcaactggaatgccatgttttctatggatactgggagaatttgaaggagaataggcaggtccttttacacgggtattatttacaggcaaagaatggtgatgccttccctttggaggtgccacaactggacctgcatgggtatttccatgtgtattatttacaagcatggaatgatgatgcctttcttttgaatgtgctgcaattggaactccatgggccttcccatggttggtgggatggattattgatgctggagacactgctggtcctctgtggctgatcgttgggcttggtgcatatagttcctgctgtacgttaacacgtctgctagttgctgcaggtggttttacatttagtcctaagctttggagtcttggggtttgtaactgtgacggatgaagtacaatattcaagttatcttgtggatgtccgcctgttatggaaagaagaatttttcgagcgaaggcaggagcatgatattgcttcaaacctccagctccacggatcacgagcacgcagacgaccaaggtggcggcgagcgcaagtacacagccaccaatccacgcgcctcccgcttgtcctcctcctccacgccgccccatctcctgtcctcccttccccgcctcccagcccagcggcagagctcgggattcgccacgatcacatctctcttattccccccggaggaaaaggttggcaatcctccgccgcagtccggctactcagccccggcgcgcgggtcaaccccggtaacggacgtcgggtgtggcggcgtgccagctaggttggaataaacggaagcctcgggcggccccggaatttcgga

SEQ ID NO: 101902 - DNA, 355 bp, Oryza sativa
  unsure (1)..(355): unsure at all n locations
  Clone ID: PAT_MRT4530_99478C.1
ggacgcgtncgccacgcgtncgncacgcgtncgaaaaggacttcgatataaagagagaggcttgtggaaaatctttcactgctgtttacaagagttacaccgcaactgtgtcgaaaaacttcctcgaaatccatctgttctgggctggaaagggcacttggtgcattcctattcaagggtactaccggccattgatcttaacattaagcattacttcaaattttacttctactgggcgaaacggggtacccaaaagggaaaggtaaggtggggccattggtgggatattgattggtgccttaagtggagggatagccaccctatttggaatatttatggtcattaaggaaaggag

SEQ ID NO: 101903 - DNA, 391 bp, Oryza sativa
  unsure (1)..(391): unsure at all n locations
  Clone ID: PAT_MRT4530_99479C.1
gngaatttttagctgagcttgagatgcttagccgattgcatcacagaaacctggttaagttgataggtatatgcacagaagaacatatccggtgtcttgtgtatgagcttgttccaaatggtagtgtggaatctcacttgcacggatcagataagggaactgctccacttgattgggatgctaggcttaaaattgcacttggtgctgcacgtgctcttgcttatttgcatgaagattctagtccccgtgtcatacaccgtgacttcaagtcaagtaacatcttattggaacatgacttcacccccaaggtgtcagactttggcctagcaagaacagccataggtgaggggaatgagcatatttcaactcgtgttatgggaactttcgggta

SEQ ID NO: 101904 - DNA, 246 bp, Oryza sativa
  Clone ID: PAT_MRT4530_9947C.1
atggggtgcctgcaaaggtgggaaaaacactataggtgccagttttcgctggttttagctattccagcacctataatgccgacgtatatgtgtccttttagtagtgagatatcagagtcatactcggaggggataaggatgttgtcatatcgtgtggggtctgttgtcttcaagttctacttggagaccaagatgatatgtggtataaatagacaccccagagaggtacagggcactgaatcttag

SEQ ID NO: 101905 - DNA, 943 bp, Oryza sativa
  Clone ID: PAT_MRT4530_99480C.1
actgtcagcatacctttgtggggcctatgatgtgaaggtggtaaattgctggaatgttgctttggaggtgcagcaactggaatgccatgttttctatggatactgggagaatttgaaggagaataggcaggtccttttacacgggtattatttacaggcaaagaatggtgatgccttccctttggaggtgccacaactggacctgcatgggtatttccatgtgtattatttacaagcatgaaatgatgatgcctttcttttgaatgtgctgcaattggaactccatgggccttcccatggttggtgggatggattattgatgctggagacactgctggtctattggggtatggcttatttgcaggaagtggaggataagatctgatgggaggtgggaaaactgggggtgaagttgttggaagtggaggaatagcaagacctctgtggctgatcgttgggcttggtgcatatagttcctgctgtacgttaacacgtctgctagttgctgcaggtggttttacatttagtcctaagctttggagtcttggggtttgtaactgtgacggatgaagtacaatattcaagttatcttgtggatgtccgcttgttatggaaagaagaatttttcgagcgaaggcaggagcatgatattgcttcaaacctccagctccacggatcacgagcacgcagacgaccaaggtggcggcgagcgcaagtacacagccaccaatccacgcgcataacgctcgtcctcctcctccacgccgccccatctcctgtcctcccttccccgcctcccagcccagcggcagagctcgggattcgccacgatcacatctctctcattcaccccggaggaaaaggtcggcactcctccgccgcagcccggcgacacagcaccggcgcgcggggcagccgcggaagcggacggcgggtgacggcg

SEQ ID NO: 101906 - DNA, 105 bp, Oryza sativa
  Clone ID: PAT_MRT4530_99481C.1
gcagaccggtgtagccgggacatccgccgcgcgaggaccgtcgtgctgcaaaggatcatccaccatcctaactgacccttggggagcagagttcaagattgcgag

SEQ ID NO: 101907 - DNA, 532 bp, Oryza sativa
  Clone ID: PAT_MRT4530_99482C.1
gacaggcaaaaatacccttcatttcatctgatatttcacttaccttccatgcgaaaggaatggctacacttgggaaggtacatgaacatttacagttgatgaaccgcagttgatgaaccggctttactttccactaaaaaaaaggaaccggctttatagatctctagaactgtataaacagagacgggacgggacgagatgttggtactcttgcagtcttgctcagtgctcttcgaaaactggtccttgtcccggcagaagctggtgatattgctcagtgctcttcacagatattcacaatgaatatgaaatgtggcttgcgaaaagaagccaatgaacacagccccacatcgtcaaaagaagcctgcaagctgactactctgaatctatcctgaatctttgtgtaccacagtgctcgcttgagctaccagttgataaacccctctccctattgtgcccggttctacctaccctaagaggacctgaacttgaatatcgtcgaaaagaaccagatgcatcaagagtgtcataa

SEQ ID NO: 101908 - DNA, 820 bp, Oryza sativa
  Clone ID: PAT_MRT4530_99483C.1
tccttgaccttgattcgcctataatgtcatactttggtttgtttcttgcacattctgttattgtgatagaatgtgtctctccattcctccagttctgacaggtgcatatgttggtgccgtccgacttgtcccaaatccatattctaagtccggatggcccagtgcgccctatgttccagctcaacaggcaggtggcaagtcttttcatagacaagctagtatggtgacattccgatggacgtcttgtatgcggttctacatgcccaaagagcatcaggtagcttatgcttccatgttttcccctctcattgacggctttctgcggaatattcttgatttgcttattgtatgtttctactttaccacctgtttgggggcggtatggagttgcaatgttgtgttgtgctccaagctcttgtaagaagttcttggaggtcttatcgataaaatgagaccctcagttagtaatcaccatggacacatagtcgacggccaccaggatgtgctcgcagtcatgggactttgggaagggtttcatgtagttgataccccatacattaaagagttccacttgaatattgtatgttaggggcatcgcatcgcgagcggtgatacctacatgcttctggcaccttgcacatctttgaatgaattcttttgtatcttcatacattgtaggccaaaaggatccattctgccagatctttgattggctgaagagacaaaaaaaaggaggagaaaatgctgatattaggtccttccctaatattcgcatttttggtgaccagggatgtccgcctggcctgagtttgtcccatga

SEQ ID NO: 101909 - DNA, 1314 bp, Oryza sativa
  Clone ID: PAT_MRT4530_99484C.1
atgtgcgccgcccggtcgttccccaactgggtgatgctagagcgcttcatcttccgcgtggacgacgacaaggagttccccgacgacgtcatcagggcgtcaggcctcacctctcaggagaatcccttccacgtcgccttccgcctctccaatcccccaggcatctctcgcatctacgtgcagttgccaggctttccaaattcaaggaatgtcttgccgttctccgtcgtggcgacccaccgtcacctcgtcctgttttccctcatctccaccgtcaaagatcaaattgacgtgcaggacttagtcatctatgacgcctctgccaccttgcagacgctccctccttgtaccgagctggacaatgtcctcctgagaatgatcgccgcatggccccaggtggtcctagctcaactctgtttgctgcggtcgcacatatcaaaggtagcgagcagcggttggcgcaccatccgtctgccgatccacgtccatggcaaccccgatgatgtgcatcagctctactcctggaagaccgacactgtgatccccttcgacaaccagctgtgctggattgactacatgcgaggcatcctcttttatgaccctgccgcgattgtcgtctctttccttccgttccctgtggatcatgagactcctcgtcgcaacaaggaatgcttctggttgtaccgtggtgtgtctgtccttgatgccagcggtgtgctcaaattcatcgacgtcgcccgcgatgatggacttggctttgagtctctcaggcgtgatgctggttttactgtcacctgctacagcctcgtgttgggagaacataagaagaagaagaagaaacacaggagaaccatggagtggagggaggactacaagatcacctccaatgagctctggtctatcaacagccttgactgcctcccacgcaccttactcatgttccctcaagtggacattgacaggccacatatagtgcacttccttgcccctgaattacggtatgtcatcaagaagatgtgggtcgtcgccattgacatgaacaccaagatcgtggagtcatcttctctgtatatcaatgggaaggaggaccttcaaactgaggacgctggcctgacccgtgcaaagtcgcgctttccgcagtccttcctcccatctgacttctccaagttcatcactttctcaagtacatcttcctgcccagctaccattttgctttcttctaaatatgctatggttcctggagaggattctgtcgtttctcgacattggttgaaggagctatttcatgttgtggtctacttttatgctgtgtga

SEQ ID NO: 101910 - DNA, 306 bp, Oryza sativa
  Clone ID: PAT_MRT4530_99485C.1
atggccatgctcgggaggaagagagggggatcgtcgtcggccaagctgccaccccacgccgaggacccgcgtgcggctcctccgccgccgcaggccggcctcaccgccaccgacggtgggcaggaggtggccatgtcgcaattcgtcgcgcagctaggcatgtgcgaagcctccgctcgagtagcgaaagcattttacgaggcggcgcggaagaggctggacagcatgaaccagaggctcaggtggctggagcagcagatggagacgctggaggcggaggtcgggaaagccagctccgccgactga

SEQ ID NO: 101911 - DNA, 4744 bp, Oryza sativa
  Clone ID: PAT_MRT4530_99486C.1
atgcaacaacagccacaaggagcagctcagcaacgaccgtgggccgatgtgattgctgatgtaatgagagaacaatttgggcttaaactaaaagagaatggaaacttgtatcggcagccttatcctgagtggtttgaaagagtccctctccccaatcggtttaaagttccagatttctctaagttttcgggacaagagggcgtgtcgacttatgagcacatcagccgattccttgctcagtgcggtgaagcatcggctgtagacgctttgaaagttagttgggccgatttggataagcaatttcacagctatttctacagtggggttcatgagatgaagttgtccgacttgacagcgatcaagcagcggcatgatgaacccgtgcatgagtatattcagaggatcagggagatgaggaacaaatgctttagcttgagtttgactgatgctcaattagccgatttggccttccagggtatgattcctccaataagggagaaattctcgtccgaagactttgatagcttatcgcatctgatacagaaggtaaccttgcatgagcataggtcggcggaagtcaggaaaagctctaagaaagttaatcatgtttgtccatacatgtatgggtcggatgacgaggaagatgattctgaaatagctgcagccgaatgggaggagaagtatgattttgatatcaccaaggctgacaagatctttgatttactacaccgagaaaagcagattctgcttcctgctggtcatacaatcccatcggctgaggaattaggcaagaagagatattgcaaatggcataattctgggtctcattctactaacgattgcaaggtttttagacaacaaatccaggttgccattgaagggggaaagattaggtttgttgattccaaaaagccgatgaaggtcgatggtaatcattttcctgttaatatggtgcatacagctagtcaagcagccgatagggcccgtgcaaagggttttcaagtaaattcggctaagattatcaacaagtatcaaaggaagtatgataagcagcaggaggggcattatgaagaatacgacgatggttttgatccccattggggttgtgagttcttcagattctgctggaatgaagggatgaggttgccatctatcgaaaactaccctagatgcagtgatatcatcgagagctcgagccgattgtataataggggtaatcggctaagacaggcaagacttcctgtttatcaatggttgggtccggtgaatcaagatcgtggccaagaggatgaagtgatcaagaagaatcaatggtgtccttctggtattttcacgaagaatcagaaaagaagggtccagagattgaggaatagggagcgttttcaggaggttgaagaggaaatcaatcatcggctgaggaaaccaaagccaagacaggagtggcgtgtcaagaatcaggttcctatagccgatgatgctgcagccgatgaggcgaagaggttggcaaaagggaagagtgttgtagcggcaccaattaacatggtctttacattgccagccgaattcgggatcgatcaggccgatgtcgatgaagtggaagagggatcgactaagttggttctgtcaccagaacatgtagtattcgagaaacccgaggggacagagaatcggcatcttaaaccgttgtatataaacggctacgtcaatgggaagccgatgtctaagatgatggtcgatggaggggccgcggtgaatttaatgccttatgctacgttcaggaagctgggtaggaacgccgaggatctcatcaagacaaatatggtgctcaacgactttggtggtaatccatcggaaaccagaggtgttctcaatgtggagctgacagtcggtagcaagactattcctaccacgttttttgtcatcgatgggaagggttcgtacagcttgttgcttggaagggattggattcacgccaattgttgcatcccttcgactatgcatcaatgcttgattcaatggcaaggcgacaagatagagatcgtgctagccgacagccaatcgaagatggagaacccaagctattactttgagggcgtcgtggagggttcaaatgtctatgctaaggatacagtagatgatctcgatgacaagcaagccgatcgattgttgaacatcggctacctatcaagcaagggggttagaccacgccagcaacctccgaggagatgtaaagccgatatgctcgaacctgttaaagctgagatcaaacgattgtatgatgctggttttattcatccctgccgatatgctgaatgggtttctagcatagttccagttattaaaaagaatggcaaggtcagggtatgcattgattttcgagatttgaataaagctacaccaaaggacgaatatccaatgccagtagccgatcagctggttgatgctgcgtcagggaacaaaattttgagttttatggatgggaacgcaggatataatcagatctttatggccgaggaggatatccatatgacagtttttagatgccctggtgcaatcggcttatttgaatgggtcgtcatgactgtcggtttgaagagtgctggagcaacatatcaaagggccatgaattatatatatcatgatttaattggctggttggttgaagtttatattgacgatgtggttgtcaaatctaaagaagtggaggaccacatagccaatttaaggagagttttcgagagaaccagaaaatatggcttgaagatgaatccgacaagatgtgcttttggtgtgtcagccggccagtttttgggatttcttgttcatgaaagggggatcgaggtaacccaaagaagcgttaatgcaatcaaaaagattcagcccccggaaaataagacagagctacaagagatgatcggtaagataaattttgttagaaggtttatttctaatttgtccgaaaggttggaaccttttacacccttattgaggttaaaagctgatcagcaatttacttgggggacagagcagcaaaaggctttggataatattaaggagtatctcagctctcctcctgttttgattcctccacagaaaggaataccgtttaggttatatttatcggctgttataatttcccctaggagggcatgtttcgagtttgcttatactattaaaccatatgcgaccaataatcaagctgagtatgaagcagtgctcaaggggttgcaattactcaaggaagttgaagccgataccattgaaatcatgggcgattctttgctagtaatcagccaattggcaggagaatatgaatgcaagaacgatacattgatggtttataacgagaagtgcctggaactaatgaaagagtttcggctggttactttaaagcatgtatctcgagaacaaaatcttgaagctaatgatttagctcaaggggcatcggggtataagccaatgatcaaagatgttaaagttgaaattgcagcgatgtcagccgatgattggaggtacgatgtgcatcagtatttgagtaatccatctcaatcggcttctaggaaattaagatataaggcactaaagtatacactgttggatgatgagctttattatcggatgattgatggagtattacttaagtggttgagtgccgatcaggctaaggttgcaattggcgaagttcacgaagggatctgtggtactcatcaatcggctcacaagatgaagtggttgcttcggcgtgcagggtacttttggccgacaatgctggaagattgtttcagatattataaggggtgtcaggattgtcagaagttcgcagctattcagcaagcaccggcgtcggctatgaatcctattattaagccgtggccgttcagaggttggggaattgatatgatcggtatgataaacccatcatcgagtaaaggacataaatttatattggtggcaactgattatttcaccaagtgggtagaggcgattcctttgaagaaagttgattatggggatgctattcaatttgttcaggaacacataatctatcgatttggtcttcctcagactattactacggatcaaggttcaatcttcgtgtccgacgagtttgttcagtttgccgatagcgtgggtatcaagttgttgaattcttcaccttattatgcacaagctaatgggcaagccgaggcatctaataaaagtttgatcaaattggttaagcaaaaaatttctgattatcctcggcaatggcatactcggttggccgaagcattgtggtcttataggatggcctgtcatggatcgattcaagttccatataatcgaggctgttttgccatgggaagttagaatcggctctcgacgaacggagctgcaaaacgatttaacagccgatgagtattacaatcttatggctaatgagagggaggatttggttcagtcacgattgcgagcccttgcgaaggttactaaggataaggaacgtgttgctcggcattataataagaaagttatatctaaagattttttggaaggagaacttgtatggaagctgattttgccgattggtactcgtgatagtaaattcggcaagtggtcgccgaattgggagggaccgttccaaattcataaggttgtgtctaagggagcatatatgttgcaagggctcgacggttaagtttatgtgcgagcgctcaatggcaaatatttgaagaaatattaccacagtgtttgggttaacgca

SEQ ID NO: 101912 - DNA, 255 bp, Oryza sativa
  Clone ID: PAT_MRT4530_99487C.1
atgaaggaaataaggtcagcgcccgagccatcggcactgacccctagccacactagtagccagggctcgaacgctatgttgggtaagaggaggctcgacgccatggacttcagcaccatggttttggacctcggcgccaaacaaggatcaagggaggattcaaacctgaaaagaccaccaccaatcagctcctctggttctgtacacagtgaggggcgttttggtcaaagcatccgacatgtggggcccacataa

SEQ ID NO: 101913 - DNA, 4878 bp, Oryza sativa
  Clone ID: PAT_MRT4530_99488C.1
atggcaccagaccagccagtgaaccctcggttgttaatgagagagcagccacagcatggcgggcaggttgcgaatcggctgacccaagatcaggttgctgccacgtttctgccgcctcaacctattgttgatccaatacagcagcagccgattcagcagacacccccaattcagcaggttgtgcaactaatccagcaacaggtcatgcaaccagttcagcaaacaccaccaatgcagcagcctctccagccgattcagcagacgccgttaagacaacaaatcgttcagccgatccagcaccaaggttcattaggcgcatcggccgggtttgcaacgcctggtggtcagcctgtacaacaatttttaaatcaagttgtcccagaacacttggttcaccatgtacagtcagatggcacagtaatacctcaagttgttcctgagcatttgccttaccctgagtggtttgagagagttcctcttcccaatcggttcaaagttccggacttctccaaattttcgggacaagatggtgtgtcaacttatgagcacattagccgattcttagctcagtgtggtgaagcatcggttgtagacgctctgaaggttaggttattccggttatctttgtctggatcggcttttacttggttttcctctttgccgtatgggtcgatcaatagctgggccgatttggagaagcaattccacagctatttctatagtggggttcatgagatgaaattatctgacttgatagcaattaagcagcggcatgatgaacctgtgcacgagtatattcagagattcagggagatgaggaacaaatgctttagcttgagtttaactgatgcccagttagccgatctggcctttcagggtatgattgctccgattagggagaaattctcgtctgaagactttgatagcttgtcacatctgatacagaaagtaaccttgcatgaacataggtccgcggaagttaggaaaaactctaagaaggttaatcatgcttatccgtacatgtatgggtcggatgatgataaggacgattctgaaatagctgcagccgagtgggtgaggagtaaaaaggtcataccgtgccaatgggtaaaaagttctggaaaagaggagaagtatgactttgatattactaaagctgacaagatctttgatttgctactccgagagaagcaaattcaacttcctactggtcatacaatcccatcggctgaggaattaggcaaaaagaggtattgcaaatggcataattctgggttccattctactaacgattgcaaggtttttagacagcagattcaggtggccattgagggaggcaagattaggtttgatgattccaaaaagccgatgaaggtcgatggtaacctttttcctgttaatatggtgcatacagctagccagacagccgatagggcccgtgcaaggggttttcaggtgaattcggctaagattatcaacaaatatcagaagaagtatgacaagcagcaagagaagcatcatgagaaatacgatgatggttttaatccttattggggatgtgagttctttagattctactggaatgaaggtatgaggttgccatctattgaaaactgccctgggtgtagtgacatcgtcgagaactcaagccgatcatataataggggtaatcggctaaggcagacaagagtttctgttcatcaaagattgggtccagtaaatcaagatcatggccaagaggacaatgtaatcaggaagaatcaatggtgtccttctggtattttcaagaagaatcagaagagaagggttcaaagattgagtaacagggagcgccttcaggaggttgaacaagaaataaatcatcggctgaagaaagcaaagccaaggcaggagtggcgtgttaagaatcaggttcctgtagctgatgatgttgcagccgatgaggcaaagaggttggcaaaagggaagagtgttgtgacggcaccggttaacatggtctttaccctgccagcagaattcgggatcgatcacgccgatgtcgacgagatggttgatggtggggccgcggtaaatttgatgccctatgctacgttcaggaagttgggtagaaatgccgaggatctcatcaagacaaacatggtgctcaaagattttggtggcaatccatcagaaaccaaaggtgttctaaatgtggagttgacagtcggcagtaagactattcctaccacgttttttatcatcgatgggaaaggttcttacagcttgttgcttggaagggattggattcatgccaattcttgcattccttcaactatgcatcaatgtttgattcagtggcaaggcgacaacatagagatcgtgccagccgacagccaattgaagatggagaacccaagctattattttgagggcgtcgtggagggttcaaatgtctacactaaggacacggtagatgatctcgatgacaagcaaggggttaggccacatcaacaacctccgaggagatgcaaagccgacatgcttgaaccggtcaaggctgagattaaaagattatatgatgctggttttattcgtccttgccgatatgttgagtgggtttctagtatagttcctgttatcaagaaaaacggcaaggtcagggtatgcattgatttccgaaatttgaataaggccaccccgaaagatgaatacccaatgccagtagccgatcaactagttgatgctgcttcgggacataagattttgagttttatggacggaaacgcaggatacaatcaaatttttatggccgaagaagacattcataagatagcttttaggtgtcctggtgcaatcggcttatttgaatgggttttcatgactttcggcttgaaaagtgctggagctacatatcaaagagccatgaattacatatatcatgatctaatcggctggttggttgaagtctacattgatgatgtggttgttaagtctaaagaaatagaggaccatatagctgatttgaggaaggttttcgagagaaccagaaaatatggactgaagatgaatccaacaaaatgtgcttttggtgtatcggctggccagtttttgggatttcttgttcatgagagggggatcgaggtaactcaaaggagtgttaatgcgatcaagaagattcagtctccggagaataagacagaattacaagagatgatcggcaagataaattttgttagaaggtttatttctaatttgtctggaaggttgaggcattatctacagtccaacgagtgtactgttatatgcaaggccgacgttgtcaagtacatgctatcggctccaatattgaaaggaagggttggaaagtggatattttccttaaccaagtttgatcttcagtatgagtcgccgaaggcgattaagggacaggctatagctgattttattgtggaacatcgtgatgattcaatcggctcggttgaaataatgccatggactttattctttgatggatcggtgtgtactcatggttgtggtatcagcctagttataatttcccctaggggggcatgtttcgagtttgcttatactattaaaccgtatgcgactaataatcaagctgagtatgaggcagtgctcaaagggttgcaattactcaaggaagttgaagtcgataccattgaaatcatgggggattctttgctagtaatcagtcaattggtaggagagtatgaatgcaagaatgatacattgatggtttataatgagaagtgccaagaactaatgaaggagtttcggctggttactttaaagcatgtctctcgagaacaaaatattgaagctaatgatttggcccaaggggcatcggggtataagccgatgatcaaagatgttaaggttgaaattgcagcaatgacagccgatgattggagggagtgtcaagattgtcagaagtttggggcaattcaacgagctccggcatcggctatgaatcctattattaagccatggccattcagaggttggagaattgatatgatcggtatgataaacccaccatcgagtaaaggacataagtttatattggtggcgactgattatttcaccaagtgggtggaggtgattcctttgaagaaagttgattatggggatgcaattcaattcgttcaagaatatataatctaccgatttggtattcctcaaacgattacaactgatcaggggtcaatcttcgtgtctgacgaatttgttcagtttgccgatagcatgggtatcaaattattgaattcttcaccttattatgcacaagataatgggcaagcagaggcgtctaataaaagtttgatcaaattgattaatcggaaaatttctgattatcctcggcaatggcatactcggttggccgaagcgttgtggtcttataggatggcttgtcatggatcgatccaagtccctccttacaaacttgtttatgggcatgaggctgttttgccatgggaggttagaatcggctctcgaagaacagaattacaaaacgatttaatagctgatgagtattacaaccttatggccgatgagagggaggatctggttcagtcacgattgcgagcccttgcaaaggttaccaaggataaggaacgtattgctcggcattttaataagaaagtggtacctaaagatttttcggaaggagaacttatatggaaattgattttgccgattggtactcgtgatagtaaattcggcaagtggtcgccgaattgggaaggactgttccaaatttataaggttgtgtctaagggagcatatatgttgcatgggtttgatggtgaagtttatgggcgagcgctcaatggcaagtatttgaagaaatattacccaagtgtttgggttaacgca

SEQ ID NO: 101914 - DNA, 4137 bp, Oryza sativa
  Clone ID: PAT_MRT4530_99489C.1
atggctgagctcgatcccgggttcaccggcggtgaattggtggctcggttggagttgcggctgctgggtgctcaccgagatgctagacaaggctggggatgtctgcagattcacagcgacggcgaagctccatggcggcatggcacaactccagggatgacgtcggctgctcgatctattgatggcaacagcgacgatgtcgctgcggcggtgcgcagagcgcgctccaaagctccggtgtgcacagcagcgttcccgtcgattggctgcaccagagaggatgaaatcaaaagaagaaatattcggcatggtgaggagagtatggaacgcaagagaagaggaaacgaccgcggctcatcaacgattccggccatcgtcttattcgcagccggcgatggagaaacagtggagaagggcagcgaggatgctctccctcggatggatcggcactggaatgcttcaatacttaatgtgttgaccagattaactagtgttgattttactgagacccgaaaggggacacttgttcagaagtacaaaataaaagtggttgctgatgatccggggaccagttcttctaaggatggagatgggaaacaagctccagatggctcggctcagctgagtaacaaaagtgctaccgacagctctctaggaaatcaaggtgacaattctcaaggagtccatggagtgcaaggtgacggggtgcatggagttcaaggtgatggtgccgaggggttgcaaggaggaaatcttaatcagaatagtgatgcggcacaagattttttcagtaatttccaagatcgggttgactacactgtgcatcatgctttgatcaatcaatctggggtgttagttaataccttatcaaacatgatgaagtccatagccgatggttcaatagctgagcatcaggctgcaggcccggtttatttgcaaggaggtgtctttccaaattatcggtctttgattaacgatgttcagccatcaactcaggcggttccctccgttgcaccaacatctcagccgacggcactggcgtcaactcccctacctgttccatcagcaatggcgctaggccagccagtgaaccctcggttgttaataagagagcagccacagcatggcgggcaggttgtgaatcggctgacccaagatcaggttgctgccacgtttctgccacctcaatctattgttgatccaatacagcagcagccgattcagcagacgcccccaattcagcaggttgtgcaaccaatccagcaacagccggatggcacagtaatacctcaagttgttcctgagcgtttggtacgtaatacccagccgaaccttcataattaccaagggggtaacttgaattatcaatatcagtctccttccccgcaagcccaatatcagccagggggattggctcaacctcagtttgcgcctcaatacggtcagttcgagcccatgcagcaacagtcacaaggggtagctcagcaacaaccgtgggccgatgtgattgctgacataatgagggaacagtttgggcttaaaccaaaagagactggaagcttgtatcggcagccttactctgagtggtttgagagagttcctcttcccaatcggttcaaagttccggacttctccaaattttcgggacaagatgcgattaagcagtggcatgatgaacctgtgcacgagtatattcagagattcagggagacgaggaacaaatgctttagcttgtgtttaactgatgcccagttagccgatctggcctttcagggtatgattgctccgattaggaagaaattctcgtctgaagactttgatagcttgtcacatctgatacagaaagtaaccttgcatgagcataggtctgcggaagttagtaaaaactctaagaaggttaatcatgtttgtccgtacatgtatgggtcggatgatgatgagaacaattctgaaatagctgcagccgagtgggtgaggagtaaaaaggtcataccatgccaatgggtaaaaagttctggaaaagaggagaagtatgactttgatattactaaagctgacaagatctttgattgctactccgagagaagcaaattcaacttcctgctggtttttagaaagcagattcaggtggccattgagggaggcaagattaggattgatgactccaaaaagccgatgaaggtcgatggtaacccttttcctgttaatatgaagaagtatgacaagcagcaggagaagcatcatgagaaatacgatgatggttttgatcctcattggggttgtgagttctttagattctgctggaatgaagggatgaggttgccatctattgaaaacagccgtgggtgcagtgatatcgtcgagagctcaagtcgatcatataataggggcaatcggctaaggcagacgagagtttccattcatcaaaggttgggtccagtaaatcaagatcatggccaaaaggaaaatgtaatcaggaagactcaatggtgtccttctggtattttcacgaagaatcagaagcgaagggttcaaagattgaggaacaaggagcgccttcaggaggttgaacaagaagttaatcatcggctgaagaaagcaaagccaaggcaagagtggcgtgttaagaatcaagttcctatagccgatgatgttgcagccgatgaggcaaagaggttggcaaaagggaagagtgttgtgacagcaccggttaacatggtctttaccctgccagccgaattcgggatcgatgaagccgatgtcgacgaggtggaagaggaatcggctaagttggttccatcaccagaacaggcagtgttcgagaaacccgagggggcagagaatcggcatcttaaaccattgtatataaacggctacgtcaataggaagccgatgtctaaaatgatggttgatggtggagctgcggtaaatttgatgccctatgctacgttcaggaagttgggtagaaatgccgaggatgtcatcaagacaaacatggtgctcaaagattttggtggcaatccattagaaaccaaaggtgttctaaatgtggagctgacagtcagcagtaagactattcctaccacattttttgtcatcgatgggaaaggttcttacagcttgtttcttggaagggattggattcacgccaattgttgcattccttcaactatgcatcaatgtttgattcagtggcaaggcgacaaaatagagatcgtgccagccgacagccaattgaacatggagaacccaagctattattttgagggcgtcgtggagggttcaaatgtctacactaaggacacggtagatgatctcgatgacaaaaccaagctgatagagctcttaaaagagtttagagattgcttcgcttgggagtattacgagatgcctggactcagccgatcgattgttgaacatcggctacctatcaaaccaggggttaggccacgtcaacagcctccgaggagatgcaaggccgacatgcttgaaccagtcatggctgagattaaaagattatatgatgctggttttattcgtccttgccgatatgctgagtgggtttctagtataattcctgttatcaagaaaaacggcaagagtgctggagctacatatcaaagagccatgaattacatatatcatgatctaatcggctggttggttgaagtctacattgatgatgtggttatcaagtctaaagaactagaggaccatatagctgatttgaggaaggttttcgagagaaccagaaaatatggcctgaagatgaatccgacaaaatgtgcttttggtgtatcggctggccagtttttgggaattcttgttcatgagagggggatcgaggtaactcaaaggagtgttaatgcgatcaagaagattcagcctccggagaataagacagaattacaagagatgatcgacaagataaattttgttagaaggtttatttctaatttgtctggaaggttagaaccttttacaccattgttgagattgaaaaccgatcagcagtttatttggggggcagagcagcaaaagtctttggataatattaaggaatatcttagctctcctcctgttttgattcctccacagaaaggaataccgtttaggttatatttatcggccggttga

SEQ ID NO: 101915 - DNA, 1474 bp, Oryza sativa
  Clone ID: PAT_MRT4530_9948C.1
cggacttttggggcgacccaaccaatcaggcggcgctaatcctcgccgccgccgccgccggctgccatggccgcccgccgcggcccgcacgtaatcaagctgcacgactccgccccggcgctgctcggccgcgcgccgatgccgccgccgcctggcccccgagacgagctcccgccgccgtcggccgtgctggtccaccacccacgaggggggctcgcgccccaccccgccgtcgcggcgctcgaggaccggctcgccgtccgcgaccgcgacatccaggagctcctcgtcgacaaccagcggttcgcggccacccacgtcgcgctccagcagcagctcatcgcggcccagcacgagctccgggtggtgtccatcgccgccacgagggcgcgtgccgagcgcgaggatgaggtccgcgcccttgcggagcaggccgcgcgcatagaggccgaggctcgggccgccgtcgccgcgcgcgcggaggtcgaccaggtccacgcggacgttcaggtgctcgccggcgcgcgcactgaactcgtggaccggttgcaggacctccgcgggcagctcgcgcgcttccaggccgaggcgggtaagactgagtccgtccgtgcccaggttgaaaccatgcgccgggagatccagaagggcagggctgcggttgaatttgaaaagaaggcacatgctgataaccttgaacaaagtaaagcaatggagaaaaatatgattgctgtagccagtgagattgagaagctaagaggagatcttgcaaatgctgaaaagcgggccactgctgtcaccgcaacagcacctgtagctaatcctgggttccctacaacatatggcaattctgaggcaacatatccagcacctgcagcatatggtaactctgagacaacatatgcaccaacgtatggtaatactgaggcagcatatgcatcaacatatggaagttctgaggcagcatatgcagcagcatatggaaattctgatgcttatagcactaatcaggctcatacccgcaccgatggcaatcctcattacatggctccacctgttcattatgcgcagtatgacagccagcacaccaatgtgcaaagatgaatgatgagtcagggtagctttgaccttgggtgtaatcctggcatttgtcaatgtagttgctgggttcaccaaatttaaggttatctgcaggaattcattccatggaagtgatggatacactgtttttcccctatcttttcattaaccagttccggaatgctcgagccagttgcctgaagtcaaaatctttctgcaaattgtcgatgtatcaccctgatgaaccatggattagtgagaccgcagctcagtctttttagtcagggattgtgattattcgcaaatgtagtgctgcagcattttcctttgtaaatatatagtggataatggtccaatggtaacaagccgttctcatgaaaaaaaaaaaaaaaaa

SEQ ID NO: 101916 - DNA, 1064 bp, Oryza sativa
  Clone ID: PAT_MRT4530_99490C.1
ccggccgggacctttcccttctctaccttcaaccaaaatcaaattgaaacggaagaaattggaatccctcttctgtaccctactctctcgctcccttccgatttcctcgagcgctaatctggcagcgaatagcagcgaatgctgcggcccgtagcgagatctgtagcaaccagtgcgccttcgccgtcggcggcggctgcgggcatggcggtccagaacggcggcggcgatggcagcggcagcggcgcggcgtcggtggtcgtcaacgtgtacgacctgacgcccatgaacaattacctctactggttcggcctcggcatattccactccggaatcgaagtccatggcgtggagtatggatttggagcacatgagttcccaacgagtggggtgtttgaggtggaaccaaagaactgccctggcttcgtctatagaaggtctgttcggatgggcacaactgggatgtccagggcagagttccgctcgttcattgaaaaactcactgggagtcaatggtaatcaaagtacaatggttcctttttcaactaccttctgccaaaaagcatccaagtttctgcagttagacacgtcccaacacatcctgcattttctgatgatgatatggattcaagatcttgttctattagtggggacagtgatgtggatgagctggaccaacacctgctgtcagcaacaaccatcgagcttcattctatagaacaccaaagctagccaaaaatgatatctgacatcggcaaacttttgtgttccgtggcagcgacagttgaagacttcaattcctgtatctagcatcgaagcgcttctctcgtgctccactactgcaatgtgcaaagtcctggcaaatgttgccacctttcctggcagtgttgctagcagagacggaactgacactgagccgtcgatcctgaatccatatagcgcatgctaatatggaaatcatacctgcgatatagggcaatgctgaggcggccacagcatatgttgtaacacaaactagtgccgtatagccttaagacagtgatctaagttagtaacatcacacg

SEQ ID NO: 101917 - DNA, 4695 bp, Oryza sativa
  Clone ID: PAT_MRT4530_99491C.1
atgcctcagatggttcctgagcaccagccaggaggattggctcagccccagttcgcatctcagtatggtcagttcgagcccatgcaacaacagccacaaggagcagctcagcaacgaccgtgggccgatgtgattgctgatgtaatgagagaacaatttgggcttaaaccaaaagagactggaagcttgtatcggcagccttatcctgagtggtttgaaagagtccctctccctaatcggtttaaaattccagacttctccaagttttcaggacaagagggcgtgtcgacttatgtgcacatcagccgattccttgctcagtgtggtgaagcatcggctgtagacgctttgaaagttaggttattctggttatctctgtctggatcagcttttacttggttttcttttttgccatatgggtcgatcaatagttgggccgatttggagaagcaatttcacagctatttctacagtggggttcatgagatgaagttgtccgacttgacagcgatcaagcagcagcatgatgaacccgtgcacaagtatattcagaggttcagggagatgaggaacaaatgctttagcttgagtttgactgatgctcagttagccgatttggcctttcagggtatgattcctccaatcagggagaaattctcgtccgaagactttgatagcttatctcatttgatacagaaggtaaccttgcatgagcattggtcggcggaagttaggaaaagctctaagaaagttaatcacgtttgtccatacatgtatgggtcgaatgacaaggaagatgattccgaaatagctgcagccgaatgggtgaggagcaaaaaggtcataccatgccaatgggtgaaaagtcctggaaaagaggaaaagtatgactttgatattatgactttgatattaccaaagctgacaagatttttgatttactactctaagaaaagcaaattcagcttcctgctggtttttagacagcaaatccaggttgccattgaggggggcaagattaggtttgatgattccaaaaagccgatgaaggtcgatgctggtcaagcagccgatagggtccgtgcaaagggttttcaagtaaattcggctaagattatcgacaagtatcaagggaagtatgataagcagcaggagaggcattatgaagaatacgacgatgggatgaggttgccatccatcgaaaactgccctgggtgcagtgatatcgtcgagagctcgagccggtcatatagtagaggtaatcggctaagacaagcaagacttcctgttcatcaaagattgggtccgatgaatcaagatcgtggccaagagggtgagaaaccaaagccaagacaggagtggcgtgttaagaatcaggttcctatagccgatgatgctgcggccgatgaggcgaagaggttggcaaaagggaagagtgttatagcggcaccaattaacatggtctttacattgccagctgaattcaggatcgatcaggccgatgtcgatgaagtcgaagagggatcggctaagttggttctgtcaccagaacaggcagtgttcgagaaacctgaggggacagagaattggcatcttaaaccattgtatataaacggttacgtcaatgggaagccgatgtctaagatgatggtcgatggtggggccgcggtgcatttgatgccttatgctacgttcaggaagctgggtaggaacgccgaggatctcatcaagacaaatatggtgctcaaagactttggtggtaatccatcggaaaccagaggtgttctaaatgtggagctgacagtcggcaacaagactattcctaccacgttttttgtcatcgatgggaagggttcgtacagcttgttgcttggaagggattggattcacgccaattgttgcatcccttcgactatgcatcaatgcttgattcaatggcaaggcaacaagatagagatcgtgccagccgacagccaatcgaagatggagaacccaagctattactttgagggcgtcgtgaagggttcaaatgtctacaccgaggatacagtagatgatctcgatgacaaggaaggtcaaggtttcatgtcggtcgatgagttggaagaaatagatataggtccaggtgatcggccaaggccgacatttattagcaagaacttatctccagagtttagaactaagctgatagaactcttaaaagagtttagagattgcttcgcttgggagtattatgagatgcccggactcagccgatcgattgttgaacatcggctacctatcaagccaggggttagaccatgccagcaacctccgaggagatgtaaagccgatatgctcgaacctgttaaagctgagatcaaacgattgtatgatgctggttttattcatccctgccggtatgctgaatgggtttctagcatagttccggttattaaaaagaatggcaaggtcagggtgtgcattgattttcgagatctgaataaagctacaccaaaggacgaatatccgatgccagtggccgatcagctggttgatgctgcatcaggaaacaaaattttgagttttatggatgggaacgcaggatataatcagatctttatggctgaggaagatatccataagacagcttttagatatcccggtgcaatcggcttatttgaatgggtcgtcatgtctttcggttggaagctctctggagcaacatatcaaagggccatgaattatatatatcatgatttaatcggctggttggttgaagtttatattgacaatgtggttgtcaaatctaaagaagtggaggaccacatagctgatttaaggaaagttttcgagagaaccagaaaatatggcttgaagatgaatccgacaaaatgtgcttttggtgtgtcggccggccagtttttgggatttcttgttcatgaaagggggatcgaggtaacccaaaggagtgttaatgcgagcaagaagattcagcccccggaaaataagacagagctacaagagatgatcggcaagataaattttgttagaaggtttatttctaatttgtctggaaggttggaaccttttacacccttattgaggttgaaagccgatcagcaatttacttggggggcagagcagcaaaaggctttggataatattaaggagtatctcagctctcctcatgttttgattcctccacagaaaggaataccgttaaggttatatttatcggctgctgagtatgaagcagtgctcaaggggttgcaattactcaaggaagttgaagccgataccattgaaatcatggggaattctttgctagtaatcagtcaattggcaggagaatatgaatgcaagaacgatacattgatggtttataatgagaagtgcctggaactaatgaaagagtttcggctggttactttaaagcatgtatctcgagaacaaaatcttgaagctaatgatttagctcaagggacgtcggggtataagccaatgatcaaagatgttaaagttgaaattgcagcgatgtcagccgatgattggaggtacgatgtgcatcagtatttgagtaatccatctcaatcggcttctaggaaattaagatataaggcattaaaatatacactgttggatgatgagctttattatcggacgattgatggagtattacttaagtgcttgagtgccgatcaggctaaggttgcaatcggcgaagttcacgaagggatctgtgatattatacaggattgtcagaagttcgaagcaattcagcgagcaccaacgtcggctatgaatcctattattaagccatggccgttcagaggttggggaattgatatgatcggtatgataaacccaccatcgagtaaaggacataaatttatattggtggcaactgattatttcaccaagtgggtagaggcgattcctttgaagaaagttgattctggggatgctattcaatttgttcaggagcatataatctaccgatttagtcttcctcaaactattattatggatcaaggttcaatcttcgtgtccgatgagtttgttcagtttgccgatagcgtgggtatcaagttgttgaattcttcaccttattatgcacaagctaatgggcaagtcgaggcgtctaataaaagtttgatcaaattgattaagcgggaaatttctgattatcctcggcaatggcatactcagttggccgaagcattgtggtcttataggatggcttgtcatggattgattcaagttcctccttacaaacttgtttatgggcatgaggctgttttgccatgggaggttagaatcggctctcgacgaacggagttgcaaaacgatttaacagccgatgaatattacaaccttatggctgatgagagggaggatttggttcagtcacgattgcgagcccttgcgaaggttactagggataaggaacgtgttgctcggcattataataagaaagtggtacctaaagatttttcggaaggagaacttgtatggaagctgattttgccgattggtactcgtgatagtaaattcggcaagtggtcgccgaattgggaaggaccgttccaaattcataaggttgtgtctaagggagcatatatgttgcaagggcttgatggtgaagtttatgggcgagcgctcaatggcaaatatttgaagaaatattacccaagtgtttgggttaacgcatga

SEQ ID NO: 101918 - DNA, 3296 bp, Oryza sativa
  Clone ID: PAT_MRT4530_99492C.1
atggccgccgccgccgccacctccacccttctcctcctcctcctcctcctcctcctcgccaccgccacccatggcgccgcggccgacacagtctcgtcccccgcctcccctgaagcggccgcactcctcaacctctccgccgcgctcggtgatccctcgggctacctctccacgcactggacgcacgacaccgcgttctgctcgtggccgcgcctctcctgcgacgccgacggctcccgcgtcctctcgctcgacctctccggcctcaacctctccggcccgatccccgccgcggcgctctcctccctctcgcacctccagtcactcaacctctccaacaacatcctcaactccaccttcccggagggcctcatcgccagcctcaagaaccttcgcgttctcgatttctacaacaacaacctcaccggcgctctcccggccgcgctccccaacctcaccaaccttgttcacctccacctcggcggcaatttcttcttcggcagcatccccaggtcgtacgggcagtggagccggatcaagtacctggctctctccggcaatgagctcaccggggagataccgccggagctcggcaacctgacgacgctcagggaactgtacctcggctacttcaacagcttcaccggcgggataccgccggagctcgggaggctgaaggagctcgtgcggctcgacatggcgaactgcgggatctccggtgtggtcccgccggaggtggcgaacctgacgtcgctcgacactctgtttcttcagatcaacgctctctccgggcggctgccgccggagattggcgcaatgggggcgctgaaatcgctcgacctgtcgaacaacctgttcgtcggggagatccccgcgagcttcgcgtcgctcaagaacctgacgctgctgaacctcttccggaatcgcctcgccggcgagattcccgagtttgtcggcgacctgccgaacctcgaggtgctgcagctgtgggagaacaacttcaccggtggagtgccggctcagctcggcgtggcagccaccaggctgaggatcgtcgatgtgagcacgaacaggctaaccggcgttctaccaacagagctctgcgccggcaagcggctggagacgttcattgcgctggggaactcactgttcggcagcattcccgacgggctcgccgggtgcccgtcgttgacgaggcttcgtcttggagagaattatctgaacgggacgataccggcgaagatgtttacattgcagaacctgacgcagatcgagctgcacgataatttgctctccggcgagctccggctggacgccggcgtggtgtcaccatcaataggagagctgagcttgtataacaatcggttgtccggtccggtgccggtggggatcggtggtctcgtcgggctgcagaagttgctggtcgccgggaaccggttgtccggcgaactccctcgtgagattgggaagctgcaacagctttcaaaggcggacttatctgggaacctgatctccggggagatacctccggcgatcgccggatgccggctgctcaccttcctcgacctctctggcaacaggctctccggcagaatcccgccggcgctcgccgggctacgaatcctcaactatctcaatctgtcccacaacgcgctcgacggggagattccacctgctatcgccggaatgcagagcctaacagccgtcgacttctccgacaacaatctctccggcgaggtcccggcgaccggccagttcgcctacttcaacgccacgtcgttcgccggtaacccaggcctctgcggcgccttcctctccccgtgccgctcccacggcgtcgccacgacgtcgaccttcggctccctctcgtcggcgtcgaagctgctcctcgtgctcggcctcctcgcgctgtccatcgtgttcgccggcgcggcggtgctgaaggcgcggtcgctgaagcggtccgccgaggcgcgcgcgtggcggctcacggcgttccagcgcctcgacttcgccgtggacgacgtgctggactgcctcaaggaggagaacgtgatcggcaagggcgggtcagggatcgtgtacaagggcgcgatgcccggcggcgcggtggtggccgtgaagcggctcccggccatggggcgctccggcgcggcgcacgacgactacggcttctcggcggagatacagacgctggggcgcatccggcaccgacacatcgtgcgcctgctcgggttcgccgccaaccgggagacgaacctgctggtgtacgagtacatgccgaacggcagcctcggcgaggtgctccacggcaagaagggcggccacctgcagtgggcgacgcggtacaagatcgccgtggaggccgccaagggcctctgctacctgcaccacgactgctcgccgccgatcctgcaccgcgacgtcaagtccaacaacatcctcctcgacgccgagttcgaggcgcacgtcgccgacttcggcctcgccaagttcctccgcggcaatgccggtggctccgagtgcatgtccgcgatcgccggctcctacggctacattgctcccgagtacgcctacacgctcaaggtggacgagaagagcgacgtgtacagcttcggggtagtgctactggagctcatcgctgggcggaagccggtgggagagttcggcgacggcgtggacatcgtgcactgggtgcggatggtgaccgggtcgagcaaggagggcgtcacgaagatcgccgacccacggctctcgacggtgcccctccacgagctgacgcacgtcttctacgtcgccatgctgtgcgtcgccgagcagagcgtcgagcggccgacgatgcgggaggtcgtgcagatcttgaccgacctgcccggtacggcggcggcgacggccatggacgcgccgtcgcacgggtcggggaaagagcaagaccggagcgcggagatgcagcagcaggacgggtcacgcgagtccccgccacagcaggatctccttagcatctagaagcgtgcgtgcatgtccccgttgtaccggtactacgtagcatcatcccctgtacgtcttggcgtactcctggactgtgctggtgtcctggactgtgctggtgtccgggtccgagtccaagtagaggcaaatctccaatatttgcggtagtattgttagctagattaagattatattgttacataatggtggttgataaaatctactactagtagtatgtaatctgtctcctctcgtgtacaaagcaactactcctactccaaaaaaaaaaaaaaaaaaaaaaaaaaaaa

SEQ ID NO: 101919 - DNA, 567 bp, Oryza sativa
  Clone ID: PAT_MRT4530_99493C.1
ggaggtcgctcgtcgccagccagatccggaggggatgccgtgccagattcggtagagagggccgccgccacccactgtgctgcctccactgggtctgggaggagggaggggagacacctccgcccatgcaccctctgcctcccgctggtagccgccacctctgcaccgccgccgccttccgccgtcgcctccaccggatctgggaggattgaggggagacgtcgcccacccatgtaccctccgcctcccgctggtagccgccaccttcgcgccgtcagccaccaccgccaccacatatataattataattatatatatatatatatatacacatatatgcacgtatacatacatatacacacatacacatatatacatatatatatatatatatatataaactattctacaccctgttacacacacacacacacacacacacacacacacacacacacacatatatatatatatatatatatatatatacacacacacacacacacacacacacacacacacacacacacacacacacacacacacacacacacacacacacacttc

SEQ ID NO: 101920 - DNA, 717 bp, Oryza sativa
  Clone ID: PAT_MRT4530_99494C.1
gcgccgccttcgcgttcccgccctcctggtcctgccgcgcccggctgggccgccgtggggctgctgctggcgttcggggacgcggagtgtggacccgtccctcttcccgtcgctccgcagcgtcgggagcggcgtccccgcgcgcgccaacgccgtgttcctcgcctccttcggcgccctcctcgacggctcgccgctccagtccgaggtatctagagctgtggtagaagagaagcgtcttgtattcacaggccattcatcagggtggttcaatagctacccttgctgccatatggtttcttgagacctgcaccaggagaggcagtgttaatcaggcacacccattttgtgtaacctttggggctcctcttgttggagacaatacctttaacaatgctgttcgaagggagggctggtcacagtgtattttgaattttgtcgtgccagtagacatcatcccccgcataccacttactccgcttgcatctgccacagaaggaattcaagctgttctggattggttatcccctcaaactccgaacttctcgccttctgggatgccactcatcataagtcagttttatgaaaatttactgagaagcacactttctattgcgagctatgaggcctgttccttcatgggatgcactagctcgatcttaggaacattgacttccttcattgagctctccccttacagaccctgtgggacttatc

SEQ ID NO: 101921 - DNA, 579 bp, Oryza sativa
  Clone ID: PAT_MRT4530_99495C.1
atggcggtccagaacggcggcggcgatggcagcggcagcggcgcggcgtcggtggtcgtcaacgtgtacgacctgacgcccatgaacaattacctctactggttcggcctcggcatattccactccggaatcgaagtccatggcgtggagtatggatttggagcacatgagttcccaacgagtggggtgtttgaggtggaaccaaagaactgccctggcttcgtctatagaaggtctgttcggatgggcacaactgggatgtccagggcagagttccgctcgttcattgaaaaactcactgggaagtacaatgatgatgtgagtaagaacttaactggaaaaccaatccctggatgggtgaatcgactagcaagagtgggttcctttttcaactaccttctgccaaaaagcatccaagtttctgcagttagacacgtcccaacacatcctgcattttctgttgctcttaggggctcgagatcttgttctattagtggggacagtgatgtggatgagctggaccaacacctgctgtcagcaacaaccatcgagcttcattctatagaacaccaaagctag

SEQ ID NO: 101922 - DNA, 595 bp, Oryza sativa
  Clone ID: PAT_MRT4530_99496C.1
atggccgagaagccgccaccatcgccgtcctcggctagcccaggttctgttaaagagaagatccagcaattagaccaatctgacgttaatgagggtaacgttatgaccattactccggacaaattgacacctgatcagaaggagtttgaagcaatgatgcagcaagcacgaaaccagttcttgaactcattcatgcagacccgcaaggggacagtggtgcaaaagtatcaggtgcgagtagtggctgatgtccccgggaccagttcttccaaggatgcgggactgaaacaagccctagatggcttgggtcaaccgagcgacaaagaccgggttgactatgctgtgcacaatgctgtaatcaatcaatctggggtattagtcaataccttgtcaaacatgatgaaggcgatagccactggttcaatagctgaacatcaggctgcaggcccaatttatttgccaagaggtacctttccaaattatcgtcctttgatcaccgatattcatccacctgttcaagcggttcctcccattgcatcatcaacccagccgatggcgccggtatcgatttccccacctgcgccacctgctccat

SEQ ID NO: 101923 - DNA, 1131 bp, Oryza sativa
  Clone ID: PAT_MRT4530_99497C.1
ccggccgggaccttcaaccaaaatcaaattgaaacggaagaaattggaatccctcttctgtaccctactctctcgctcccttccgatttcctcgagcgctaatctggcagcgaatagcagcgaatgctgcggccgtagcgagatctgtagcaaccagtgcgccttcgccgtcggcggcggctgcgggcatggcggtccagaacggcggcggcgatggcagcggcagcggcgcggcgtcggtggtcgtcaacgtgtacgacctgacgcccatgaacaattacctctactggttcggcctcggcatattccactccggaatcgaagtccatggcgtggagtatggatttggagcacatgagttcccaacgagtggggtgtttgaggtggaaccaaagaactgccctggcttcgtctatagaaggtctgttcggatgggcacaactgggatgtccagggcagagttccgctcgttcattgaaaaactcactgggaagtacaatggtaattcatatcacttgatttcaaagaattgcaaccattttacagatgatgtgagtaagaacttaactggaaaaccaatccctggatgggtgaatcgactagcaagagtgggttcctttttcaactaccttctgccaaaaagcatccaagtttctgcagttagacacgtcccaacacatcctgcattttctgatgatgatatggattcaagatcttgttctattagtggggacagtgatgtggatgagctggaccaacacctgctgtcagcaacaaccatcgagcttcattctatagaacaccaaagctagccaaaaatgatatctgacatcggcaaacttttgtgttccgtggcagcgacagttgaagacttcaattcctgtatctagcatcgaagcgcttctctcgtgctccactactgcaatgtgcaaagtcctggcaaatgttgccacctttcctggcagtgttgctagcagagacggaactgacactgagccgtcgatcctgaatccatatagcgcatgctaatatggaaatcatacctgcgatatagggcaatgctgaggcggccacagcatatgttgtaacacagactagtgccgtatagccttaaaacagtgatctaagtta

SEQ ID NO: 101924 - DNA, 5186 bp, Oryza sativa
  Clone ID: PAT_MRT4530_99498C.1
tcataccggccccctggaggccgggatggtgctgctcgggatggccgatacagagccgacggagccgtattcggtcagaccgagccgaggccggtcggtgggactgattagaagtcaacaagcaattcttcctcatggccgagaagccaccgttgtcgccatcctcggctagcccaagcactgttaaataaaagattcaaaagttggggttgactgacgtcaatgaaggaaacgtcgtgcccatcgatccggagaaattcacacctgagcagaagaaggattttgaagcaatgttgcagcaagcccgggatcagttcttgaactcattcatgcagacccgcaagggaacattggttcagaagtataaagtaaaggtagttgccgatgatcctgggaccagttcttccaaaggtgaagacgggaaacaagctccagatggctcggctcaactgagtgacaaaggtgctaccaacggttctctaggaagtcaaggtgacaactctcaaggggtccatggagttcaaggcgatggagtgcatggagttcaaggccagctggtgaaccctcggttgttaatgagagaacagccacagcatagtgggcaggttgcaaatcggctgacgcaagatcaggttgctgccacgtttttgccgcctcaacctgctgttgatccaatacagcagcagctgattcaacagacactcccgattcagcaggttgtacaaccaatccagcaacaagttgtgcaatcagttcagcaaacgccaccaaggcaacaacctccgtggccgattcagcagacgtcgttaagacagcaaatcgttcagccgattcagcaccaatgctcaatgagtgcatcggccgggtttgtgacgcctggtggacagcctgtacaacaatttttaaatcaagtcgtcccagaacacttggttcgccactcacagggagcagctcagcaacgaccgtgggccgatgtgattgctgatgtaacgagggaacagtttgggcttaaaccaaaagagattgaaagcttgtatcggcagccttaccctgagtggtttgagagagttcctctccccaatcagttcaaagttccggatttctccaaatttttgagacaagatggtgtgtcaacttatgaacacattagccgatttttagctcagtgtggtgaagtatcggctgtggacgctctgagggttagcttgttccgattatctttgtctggatcggcttttacttggttttcttctctgtcgtatgggtcgatcaatagttgggccaatttggagaagcaattccacagctatttctacagtggggttcatgagatgaagttatctgacttgacggtgattaagcagcggcatgatgaacctgtgcacgagtatattcagagattcagggagatgaggaacaaatgcttcagtttgagtttaactgacgctcagttagtcgatttggcctttcagggtatgattgctccgattagggagaaattctcgtctgaagactttgatagcttgtcacatctgatacaaaagttaaccttgcacgagcataggtctgcggaggctaggaaaagctctaagaaggttaatcatgtttgtccttacatgtatgggtcggatgacgatgaggatgactctgaaatagctgcagccgaatgggtgaggagtaaaaaggtcataccgtgccaatgggtaaagagttctggaaaggaagagaagtatgattttgatattactaaagctgacaagatttttgatctgctactccgagagaagcaaattcaactccctgctggtcatacgattccatcggttgaggaattaggcaaaaagagatattgcaaatggcataattctgggtcccattctactaacgattgcaaggtgtttagacaacagattcaggtggctattgagggaggcaagattaagtttgatgattccaaaaagccgatgagggtcgatggtaacccatttcccgttaacatggtacacacagctgaccaaacagctgatacggggcgcatgaggggttatcaagtaagttcggctagaattataaacaaatatcaaaggaaatacgaaaagcaacaggaaaggcatcatgaagaagataatggtgactttgatcctcattggggctgtgagttcttcaggttctgttggaatgaaggtatgaggctaccatctatcgaggattgtcctggatgcagtgatgttgcagggggttcaagccgattgtacgatggaggtaatcggccaaaacagacaagagtacctgttcatcaaagattgggcctagtaaaccaacgtggtgattcggaagatgacgaaaataggaagactcaatggtgtccttctagtatttttacgaagaatcagaaaagaagggttcaaagattgaggagtagggaacgcttccaggaggtcgagcaagaaattaatcatcggctgaagaaagcaaaaccgaggcaagagtggcgtgttaagaatcaggctcctatagccgatgatattgcagccgatgaggcaaagaggttggcaaaaggaaagagtgttgtgacggcaccagttaacatggcggtgtttgagaagcctgaggggacagagaatcggcatcttaaactattgtatataaatggctatgtcaatgggaagccgatgtctaaaatgatggttgatggtggggctgcgtggcaaggcgacaaaattgagatcgtatcagccgacagccagttgaagatggagaacccaagctattattttgagggcgtcgtggagggttcaaatgtctacacaaaggatacggtagatgatatcgatgacaagcaaggtcaaggttttatgtcggccgatgatttggaagaaatagatataagtccaagcaatcggccaaggccgacatttattagtaagaatttgtctctagaatttagaaccaagctgatagagctcttaaaagagtttagagattgcttcgcttgggagtattatgagatgcctggacttagccgattaattgtggaacatcggctacctatcaaaccaggggttaggccgcaccagcagcctccgaggagatgcaaagccgatatgcttgaacctgtcaaggctgagaataagcgtttatatgatgctggttttattcgtccttgccgatatgctgagtgggtttctagcatagttcctgttatcaaaaagaacagtaaggtgagggtatgcattgattttagagatctgaataaagctacaccgaaagatgaatatccaatgccagtagccgatcagctggttgatgctgcgtcagggaacaaaattttgagttttatggatggaaacgcagggtataatcaaatttttatggctgaagaagatatccataagacagcttttagatgtcctggtgcaatcggcttatttgaatgggttgttatgactttcggcttgaagagtgctggagctacatatcaacgggccatgaattatatttatcatgatctaatcggctggctggttgaagtctatattgatgatgtggttgttaaatctaaggaaataaaagaccacatagccgatttaagaaaagttttcgagaggaccaggaaatatggcttgaagatgaatccgacaaagtatgcttttggtgtatcggctggccagttcttgggatttcttgtccatgagaggggaattgagattactcagagaagtatcaatgcaatcaaaaagattaagcccccggaaaacaagaccgaattgttaaggcattatttactgtctaatgaatgtactattatatgcaaggctgacgttgttagatacatgttatcggctccaatattgaaaggaagggttggaaagaggatattttccttaactgagtttgatcttcggtatgagtcaccgaaggtgattaagggacaagctatagccgattttattgtggaacatcatgatgattcaatcggctcggttgaaatggttccatggactttattctttgatggatcggtgtatactcatggttgtggtatcggcctagttataatttcccctagggggacatgtttcgaggttgcttatgctattaaaccttatgcgactaataatcaagctgagtatgaagcagtgcttaaagggttgcaattgctcaaggaagttgaagccgatgctattgaaatcatgggggattctttgctggtaatcagtcaattggcaggggagtatgaatgcaagaatgatacattaatggtttataatgagaagtgccaagaactgatgaaggaatttcggctggttactttaaagcatgtatctcgagaacaaaatattgaagctaatgatttggctcaaggggcatcggggtataagccgatgatcaaagatgttaaggttgaaattgcagcaataacagccgatgattcgaggaaattaagatataaggtgttgaagtacactctattggatgatgagctttattatcggacgattgatggttcaatcttcgtgtccgatgagtttgttcagtttgccgatagcgtgggtatcaaattgttgaattcttcaccatattatgcacaagctaatgggcaggtcgaggcatctaacaagagcttgatcaaattaattaagaggaagatttctgattatccttggcaatggcatacccggttggccgaagcattattgtcttatcggatggcttgtcatggatcaattcaagttcctccttataagcttgtttatggacatgaagctgttttgccatgggaagttagaatcagctctagaaggatagaattgcaagacggtttgacagccgatgagtattataaccttatggccgatgagagggaggacttggttcaatcgtgtttacgagtccttgctaaagttaccaaagataaggaacgagttgctaggcattataacaagaaagtagtgcctaaggattttttggaaggtgaacttgtatggaagttgattttgccgattggaactcgggataacaagttcggcaagtggtcaccaaattgggaaggaccgtttcaaatctacaaggttgtgtctaaagggacatatatgttgcaagggcttgatggtgaggtttatggacagacgctcaatggcaaatacttgaagaagtattacccaagtgtttgggttgactcatga

SEQ ID NO: 101925 - DNA, 468 bp, Oryza sativa
  Clone ID: PAT_MRT4530_99499C.1
agcacgcgaccataatcattttattcggttgataaataaataatctagaatttaacaatggggatttttttttattattaaacagcatcagattttttttaatcaccaagggggaacggggcgatcccccctcgttggggcccgtgttgaggtcccactttttgcgcccggggagccccttggggatggggggcatgggcccctttttgcacgccaggggggccttcttcttcttgacgagcaccttcaccatggggcgcaacgcgttgaaaagggagcgcccccccaccttccttagctggtgggaggaccgggcccgcacccccggggggttgccgccgccccacccccccaacaagtacccccgggaccccgggagggggttcttggggaccaagccctggcccgggttggacccattcgccgggcgttgaaaaaacccgggcggacccctgggtcgaccccgga

SEQ ID NO: 101926 - DNA, 519 bp, Oryza sativa
  unsure (1)..(519): unsure at all n locations
  Clone ID: PAT_MRT4530_9949C.1
aacccctcaccttaacccctctttaataaaattnantttccttcttacataacactactaaataanttaacatcaaccatttcattactttaaaaccccaattacaacttaaattttcntcataatcaatcaaattantaacaataatatttttaacaaaattnataaaaaatatttactattaccccaccctcttaacccaatcaatancttcccctaattttcatattctatttnttcaanctacctcanntttttataaactaaaaccttttttctttacacttacaccttcctcttntaatttcannnttncaacatccatnaattnttccttcttaacacttataacttcctcattannttncaccacttaaatatctctnaattnctcctnttctactctaacttcatcatcantttncaccaattcatcntcactctnttntttctccttatcaanttttaccatttcaatatctctatnttnctcattttctacttttttaacttcctcac

SEQ ID NO: 101927 - DNA, 499 bp, Oryza sativa
  Clone ID: PAT_MRT4530_994C.1
ctctcacttctttgcgcaggctggccggcggggcgaggcgggagaggagggcgtcggcggccggtgacgggcaacgcaacggcggtgactgtggcgacgcttgagagtgacgagggtataaatatgtacacccggggtcattgtaatttatctctcgatcaatactactctcggcgcatcgccaccctcttttttgaggttttacttaacaactggtggaatttggcacctgacgcggggctgcatcggttcagtttgatctccggcgaaggggtaagtcctacgttccattggtcctgaatctatcggctacattggtgttgttcaaggctgcatcgcttcgatctcttggatcgctctggtttgcttgatatatttgcctacctgatatctcaattctatctctaattgcattgtgtttagagatgcatcggtttagttgggactgtctagattaggtctgatcttctgtcttagccgatatatctctacaatcaca

SEQ ID NO: 101928 - DNA, 846 bp, Oryza sativa
  Clone ID: PAT_MRT4530_99500C.1
atgggatctgagcgtctctccagcacgagaggccagatccccagtcgcggccacattgtcggtggtggtgatggcagcgagggggacagccagatctggcacatcccagttggagtcgggcaaggccggacccccagtggcagtggcaacgacgaggtcgcttggtggagcttcagcgacctatgtggccattcggtggcatcgacggtaccttcggtgtacacgtggcatttggtgggttccgttgaggacactatggttgaaggggacttcgaggtgaaagccttcctcggcttgtcaatgctagcaagggcgacaccctcgggcaccgtttaccttcttgaagactttgctattggatccctcattcaactccacatcaagggagctccctgcccgttctctcgaaaagctactaaaagaagtgctcgtccgttgcatgggctttgcaatacccctgaagaggacatcatattgaaaaacatcttttcaccagaaagagccatggcttctggcaacttgaggggcctccagagagtaatgcttagggagaagagccttgttttgtactctgagatcaatgacacccaatcccccccccttgtcttttggtctacacacctttaccaaagagagaaatcaaccattctcgatcgtttttttcccagtggcagacctacatatgtgaaaggcaatgatccaatggaacagccaaaagtagcagccaacagctgtgatttttcttcagagatattcagagggatcatacaggactttgcaaaattcactcttaggccagaagagacagcaaaggagttcaacagagcctttaaagcaaataactga

SEQ ID NO: 101929 - DNA, 5355 bp, Oryza sativa
  Clone ID: PAT_MRT4530_99501C.1
atggggtccacgttggtcgcggcgtacgacgggatagaccggcccgcgggacacggcggcctcgccggcgccggtcgaagccaccatggtgatgacatggacgacagcgtcgacacatcaggacagaaactagctgatgctgtaacagccaggagcaacctcaatacgtatacgaatcagatggcaatgatcttggctttggtagaagccctcgggagagccagtaacttggagcagtccaacaagagcgatttcgtgttccagccccacgaaatcgttaatggtcaccgtcacgaggtgatgcaagtttttctcatggacgagaagccgccagcatcgccatcctcggctagtccaggttctgttaaagagaagatccagcggttgggcctatctgaggttaatgaaggcaacatcgtgaccatcactccagacaagttgacacctgatcaaaagaaggatttcgaagcaatgatgcagcaagcacggaaccagttcttaagctcgttcatgcagacccgcaaggggacagtggtgcagaagtataaggtgaaggtagttgctgatgttcctggaaccggttcttctatggatggagaggtgaaacaagctccagatggttcggctcaaccaagtaataaaggtgctgccgatggcgatcaaggaaatcaaggtgatggctctcaaggagtacagggtgtcggctctcaaggagttcaaggtgaaggccctaatcaagacggcaatgcggcacagccgcagttcaacaacttccaagatcaggttgactatgctgtacaccaagctttgatcaatcaatctggaatattagtcaatactttgtcaaacatggtgaaaacaatggttgatggttcaatggctgagtatcaagctaccggactggtttatctaccaggaggagtgttcctaaactatcagccattaatcactgataatcaaccaattggccagttaattcctcttaatgcaccatcggttcagccaacggcaccagtatcggctcctgcacctgctgcaccaccattggctccaggccaattagttaatccccggttgcaggtaagagaacaaccacaacatagtggacataatgtgaatcggctaacgcaagatcaggttgcatctatgttcttacttcctcaacacactactgatccaacccagcagcagccgattcagcaaacgccaccaaggcagcaggttgtgcagccgattcaacaaacacccccaatccaacaggttgtgcaaccagttcagcatacgccaccaagacggcaggttttgcaaccaattcagcagacgccgttaaggcaacagtatcaacctccatcaccccaagttcaatatcagcagggaggattggctcaaccccagtttgttcttcaatacaatcaatttgagcccatattacaacaacctcaaggagcacctcagcaacgaccatgggccgatatgattgcgaatgtgatgaaggagcagtttgggcttaggccgaaagattctggaaatttgtatcggcgaccttatcctgagtggtttgagagagtccctctacctaaccggttcaaagttccagatttttcaaaattctcagggcaggatagcgtgtcaacttatgaacacattagccgatttttagctcaatgtggtgaagcatcggctgaagatgccttaagggttaggttgttccggttgtccttgtctggatcggcttttacttggttttcttctctgctatacgggtcaatcaacagttgggccgatttggagaagcagtttcatagctatttctacagtggggtccatgagatgaaattgtccgatttaacggcaatcaagcaaagacatgatgagcctgtgcatgagtatatccagagatttagagagatgaggaataagtgctacagcttgagtttgactgatgcccagttagccgatttggcttttcagggtatgattgctccgatcagggagaaattctcgtctgaggacttcgatagcttgtcgcatcttacacagaaggtaaccttgcatgaacagaggtttgcagaggctaggaaaaactctagaaaggttaatcatgtctgtccttacatatatgggtcggatgatgaagatgaagatgactccgaaatagtagcaaccgaatgggttagaagcaagaaagttataccatgccaatgggtaaagagttctggaaaggaggagaggcagcagatccaggcagctattgagggaggcaaaatcaagtttgatgattctaagaggccaatgaaggttgatggcaatccttttcctgtcaatatggtgcatacagctggccggacagccgatggaggacgtgcaaggggttttcaggtgaattcggctaagattatcaataaatatcagaagaaatatgacaggcagcatgagaagcattatgaagaagatgatgatggcttcgatcctcattggggttgtgagttctttagattttgttggaatgagggtatgagactgccgtctatggaagactgtcctgggtgcggtaatgttgcagaaagttcaagccgatcgtataatagaggcaatcggctaaagcaaacaagagttcctgtttatcaaaggttgggtccagtgaaccaggattgtagccaggaggacaatgaaaacaggaagactcaatggtgtccttctggtatctttactaagaatcagaagagaagggttcaaagattgagaaaccgggaacgttttcaagaggtcgaactagaaatcagtcatcggctaaagaaaacaaagccgaagcaggagtggcgtattaagaatcaagttcctacagccgatgaagccatagccgatgaagcaaaaagattggccaaaggaaaacgcgttgtgactgcatcgattaacatggttttcacgttgcctactgagtttggggtgaatttgataccttatgctacattcagaaagttgggcagaaacactgaagatctcatcaagacaaatatggtgcttaaggattttggtggcaatccatcagagaccaatggagttttgaatgtggagctgacagtcggcaacaaaatcatccctacaacgttctttgtcatcgatgggaaaggttcttacagcttgttgcttggaagggattggattcatgctaattgttgtatttcttcaaccatgcatcaatgcttgattcagtggcaaggcaacaagattgaaattgtgccagccgacagaaccaagttgatagagctattgaaagagttcagagattgcttcgcttgggagtattatgaaatgtctggattcatccgatcgattgttgaacatcggctacctatcaaaccaggggttaggccacaccaacagcctccgagaagatgcaaagccgatatgcttgaacctatcaaggctgagattaaacgattgtatgatgctgattttattcgtccttgccgatatgctgagtgggtttctaatatagttcctgtgatcaaaaagaacggtaaggtcagggtgtgcattgatttccgaaatttgaataaagctacctcgaaagacgaatatccaatgccagtagccgatcagctggttgatgctgcctcgggacacaagattttgagttttatggatggtaatgcaggatacaatcaaatctttatgaccgaagaagatatccacaagacaacttttaggtgtcctggtgtaatcggcttgtttgagtgggttgtaatgactttcggcttaaagagtgctggagctacgtaccaaagagccatgaattatatttatcatgatttgatcggctggttggttgaagtctatattgatgatgtggttgttaagtctaaagaaatagaagaccacatagccgatttgagaaatgtttttgagagaaccaggaaatatggcctgaaggtgaacccgacaaagtgtgcttttggtgtatcggctggccagtttttgggatttcttcttcatgagagggggatcgaggtgactcaaaggagtgttaatgcgatcaagaagattcagcctccggagaacaagacagaattgcaagagatgatcggcaagataaattttgttagaaggtttatttctaatttgtctggcaggttgaggcattatctattgtccaatgagtgcactatcatatgcaaggccgatgtggtcaagtacatgttatcagctccaattttgaaaggaagggttggaaagtggatattttccttaactgagtttgatcttcggtatgagtcaccgaaggcagtcaaaggacaagctatagccgattttattgtagaacatcgtgatgattcgatcggctcagttgagatagtgccgtggactttgttctttaatggatcagtatgtactcatgattgtgatatcggcttggttataatttcccctcggggggcatgttttgagtttgcttatactattaaaccttatgcaaccaacaatcaagctgaatatgaggcagttctcaaagggttgcagttactcaaggaagttgaagccgatgctattgaaattatgggcgattctttgctagtaatcaatcaattggcaggagagtatgagtgcaagaatgatacattaatagtctataatgagaaatgccaagaactaatgaaggaattttggcgggttactttgaagcatgtctctcgagaacaaaacattgaagctaatgatttggcccaaggggcatcggggtataagccgatgatcaaagattttaaggttgaagttgctacaataacagtcgaggattggagatatgatgtgcatcagtatttacagaacccatctcaatcggcttctcggaaactaagatataaagcgttgaagtatactttattggatgatgaactctattatcggacgattgatggggtgttgcttaagtgtttgagtgccgatcaggctaaggttgcaatcggcgaagttcatgaagggatttatggttggggaattgatatgatcggtatgattaatccaccatcgagtaaaggacataggtttatcttggtggcgaccgattatttcaccaagtgggtagagacgattcctttgaagaaagttgattctggggatgctatacagtttgttcaagagcatataatctatcgatttggtattcctcaaaccattacaactgatcagggttcaatttttgtgttcgatgagttcgttcagtttgccgatatcatgggaatcaaattgttgaattcttcactgtattatgcacaagctaatgggcagaccgatgcatctaacaagagcttgatcaagttgattaagaggaagatttctgattatcctcggtaa

SEQ ID NO: 101930 - DNA, 492 bp, Oryza sativa
  Clone ID: PAT_MRT4530_99502C.1
atgccccaccaccaccaccgccgccacggccacgccgccgcggccgccgaggccgaggaggaggccccgtcgccgcgtccgtcctccgccggctgctacaccttcctccgctctgcgtcccgccgcggcggcgccggcggtggcggagggtaccggcgcctcgactcctcctccgcggcgggggatgtgattagggtggaggtggggacgacgaagggggagaggagcgtgttccacgtcgaccaggccgtgctcgaggccgggccggtgcggcgcctcctcgcggcggccgggcggcggacccgcggcggcgcggtggcggtcgccgtggacgtgctgctgttcgagcacctgctgtggctgcaggcggccggagacaaggggatgctgggctacgacgacgacgaatcagccgccgccgacctgtcggagatcgtcgacttctactcgcaggacgacgacgtcgacgactccggccaccgcgggttctag

SEQ ID NO: 101931 - DNA, 971 bp, Oryza sativa
  Clone ID: PAT_MRT4530_99503C.1
ctataattcaaatttgttaataatttttaatacaatagtttttaatggatcaaatagtgctaaaattaataatgtaaatggaaaaacaacttagaggagttaggcagggtgatcctctttctcctcttttgtttgcccttggtgctgatcttctgcaatctgtaattaacaaagcacatcaaaggggggtgttgtctttgccaatcctggtcagtaacgatgataactttcatgtgatacaatatgctgatgatacctttttttttttaagcttcctccactcagttatttgctttaaaggctctgttgaactcctttgctgtctcttctggcctaagagtgaattttgcaaagtcctgtatgatccctctgaatatctctgaagaaaaatcacagctgttggctgctacttttggctgttccattggatcattgcctttcacatatgtaggtctgccactgggaaaaaaacgatcgagaatggttgatttctctccttcaacagacagaattgaaagaaggttaacagccactcactttggtaaaggtgtgtagaccaaaagacaagggggggggattgggtgtcattgatctcagagtacaaaacaaggctcttctccctaagcatctacataagttttacaacaagttggacatcccttgggtcaattttgcttggtcttcttactactctctggaggcccctcaagttgccagaagccatggctctttctggtgaaaagatgtttttcaatatgatgtcctcttcaggggtattgcaaagcccatgcaacggacgagcacttcttttagtagctaaaaaaaataaaaacatttacatcgttcgtcttttcaattccacactcacctctacctcagtgatatttcctcaaagcaccgcttggcctttgtttgtcccctctcgcgtgagtgcaaaggcatttcaccttttcgagagaacgggcagggag

SEQ ID NO: 101932 - DNA, 4947 bp, Oryza sativa
  Clone ID: PAT_MRT4530_99504C.1
atggccgagaaaccaccaccacaaccatccccagctagcccaggctctgtcaaggaaaagatgcagaagttaggattgactgacgtcaatgaaggaaacgtcgtgccgatcgatccagaagaattcacacctgagcagaagaaagagtttgaagcaatgttgcagcaagcacgggatcagttcttgaactcattcatgcagacccgcaaggggacacttgttcagaagtacaaaataaaagtggttgctgatgatcctgggaccagttcttctaagaatggagacaggaaacaagcgccagacggctcggctcaaccgagtgacaaaggtgctaccgacggttctctaggaaatcagggtgacaattctcaaggagtccatgaagtgcaaggtaacggggtgcatggagttcaaggtgatggtgctcaggggttgcagggaggaaatcttaatcagaatagtgaggcggcacaagattttttcaataatttccaagaccgggttgactacgctgtgcatcatgctttgatcaatcaggaacagtttgggcttaaaccaaaagagactggaagcttgtatcggcaaccttaccctgactggtttgagaggattcctcttcccaatcggttcaaagttttagatttctccaagttttcggaacaagatggtgtgtcaacttatgagcacattagtcgattcttagctcagtgtggtgaagcatcggttgtagatgctctgaaggttagattgttccggttatctttgtctggatcggcttttacttggttttcttctttgctgtatgggtcgttcaatagttgggccgatttggagaagcaattccacagctatttctatagtggggttcatgagatgaaattatctgacttgaccgcaattaagcagcgtcatgatgaacctgtgcatgagtatattcagagattcagggagatgaggaacaaatgcttcagcttgagtttaactgatgcccagttagccgatctggcctttcagggtatgattgctccgatcagggagaaattctcgtctgaagactttgatagcttgtcacatctgatacataaggtaaccttggatgagcataggtctgcggaagttaggaaaaactataagaaggttaatcatgtttgtccgtacatgtatgggtcggatgatgatgaggatgattctgaaatagctgcagccgaatgggtgaggagtaaaaaggtcataccatgccaatgggtaaaaagttctggaaaagaggagaagtatgattttgtactaaagctgacaagatctttgatctgctactccgagagaagcaaattcaacttcctgctggtttttagacagcagattcaggtggtcattgagggaggcaagattaggtttgatgatttcaaaaagccgatgaaggtcgatgctggccaaacagccgatagggtccgtgcaaagggttttcaggtgaatttggctaagattattaacaaatatcagatgaagtatgacaagcagcaggagaagcatcatgaagaatacgattatggttttgatcctcattggggttgtgagttctttagattctgctggaatgagggtatgagactgccatctattgaaaactgccctgggtgcagtgacatcatcgagagctcaagccgatcatataataggggcaatcggctaaggcagacaagagtttctgttcaccaaagattgggtccagtgaatcaagatcatggccatcaggacaatgtaatcagaaagaatcaatggtgtccttctggtattttcacgaagaatcaaaagagaagggttcaaagattgaggaacaaggagcgccttcaggaggtcgaacaagaaattaatcatcggctgaagaaagaaaagccgagacaggagtggcgtgttaagaatcaggttcctgtagccgatgatgttgcagccgatgaggcaaagaggttggcaaaagggaagagtgttgtgacggcaccggttaacatggtctttaccctgccagctgaattcgggatcgatcaagccgatgtcgacgaggtggaagaggaatcagctaagttggttctatcaccagaacaggcagtgttcgagaaacctaaggggacggagaatcggcatcttaaaccattgtatataaacggctatgtcaatgggaagctgatgtctaaaatgatggttgatgttggggccgcggtgaatttgatgccttttgctatgttcaggaagttgggtagaaatgccgagggtctcatcaagacaaatatggtgctcaaagattttggtggcaatccatcggaaaccaaaggtattctaaatgtggagctgacagtcggcagtaagactattcctaccacgttttttgtcaccgatgggaagggttcttacagcttgttgcttagaagggattggattcacgccaattgttgcattccttcaactatgcatcaatgtttgattcaatggcaaggcgacaagatagagatcgtgccagccgacagggttcatgtctacactaaggacaccgtagatgatctcgatgacaagcaaggtcaaggtttcatgttggctgatgatttggaagaaatagatataggtccaggcgatcggccaaggccgacatttattagtaagaacttaactccagaatttagaactaagttgatagagctcttgaaggagtttagagatagcttcgcttgggagtattataagatgcctggactcagccaatcaattgtagaacatcggctacctatcaaaccaggggttaagccgcaccagcagcctccgagaagatgcaaagccgatatgcttcaacctgtcaaggctgagattaagcgtttatatgatgctggttttattcgtccttgccgatatgctgagtgggtttctagcatagttcctgttatcaagaagaacggcaagttgagggcatgcattgattttagagatctgaacaaagctacaccgaaggacgaatatccgatgctagtggccaatcagttggttgatgctgcgtcagggaacaaaattttaagttttatggctgaagaagatatccataaaacaacttttagatgtcctggtgcaatcggcttatttgagtgggttgttatgactttcggcttgaagagtgctagagctacatataaaagggccatgaattatatttatcatgatctgattggctggctggttgaggtctatattgatgatgtggttgttaaatctaaggaaataaaagaccacatagccgatttaagaaaagttttcgagaggaccaggaaatatggcttgaagatgaatctgacaaagggggcatgtttcgagtttgcttatactattaaaccttatgcgactaataatcaagttgagtgtgaggcagtgctcaaagggttgcaattactcaaggaagttgaatccgatgctattcaaatcatgggggattctttgctggtaatcaatcaattggcaggagaatatgaatgtaagaatgatacgttaatggtttataatgagaagtgccaagaattgatgaaggaatttcggctggttactttgaagcatgtgtctcgagaacaaaacattgaagctaatgatttggcccaaggggcatcggggtataagccgatgatcaaagatgttaaggttgaagttgcagcaatgacagccgatgattggaggtatgatgtgcatcaatatttgtatagtccgtctcaatcggcttctaggaaattaagatacaaggcattaaagtatacattgttggatgatgagctttattatcggacgattgatagagtgttacttaagtgtttgagtgtcgatcaggctaaagttgcaatcggcgaagttcatgaaggaatttgtggcactcatcaatcggctcataagatgaagtggttacttcggcgtgcagggtatttttggccgacaatgctggaggattgtttcagatattataagggaggtcaagattgtcagaagtttggggcaattcagcgagcgccggcgtcggctatgaatcctattattaagccatggccattcagaggttggggaattgatatgatcggtatgataaacccaccatcaagtaaaggacataagtttatattggtggcaactgattatttcaccaagtgggtagaggcgattcctttgaagaaagttgattctggggatgcgattcaattcgttcaagaacatataatctaccgatttggtattcctcttacaactgatcagggtttaatgttcgtgtctgacgagtttgttcagtttgccgatagcatgggtatcaaattattgaattcttcaccttattatgcacaagctaatgggcaagccgaggcatctaataaaagtttgatcaaattgattaagcggaaaatttctgattacccttggcaatggcatactcggttggctgaagcgttgtggtcttataggatggcttgtcatggatcgatccaagtccctccttacaaacttgtttatgggcatgaggctgttttgccgtgggaagttagaatcggctctcaaagaatggaattacaaaatgatttaacagccgatgagtattacaaccttatggctgatgagagggaggatctggttcagtcacgattgcgtgtccttgcaaaggttaccaaggacaaggaatgtgttactcggcactataataagaaagtggtgcctaaagatttttcagaaggagaacttgtatggaagttgattttgccgattggtacccgtgattgtaaattcggcaagtggtcgccgaattggaaaggaccgttccaaatttataaggttgtgtctaagggagcatatatgttgcaagggcttgatggtgaagtctatgggcgagcgctcaatggcaaatatttgaagaaatattacccaagtgtttgagttaatgca

SEQ ID NO: 101933 - DNA, 6034 bp, Oryza sativa
  Clone ID: PAT_MRT4530_99505C.1
ttgcaggatcgaatcaactggcacgctagcatacctgaaggcgagttttggacctgcactagagttaagcagatctcccaggcctcgtgttttccgtcaacacgcttttggcacgcccggtggaaccgattagaagtcagaagttttctctcatggacgacaagccgccagcgtcgccgtcctcgtctagccccgattttgttaaagagaagattcagcagttgggcctatccgaggttaatgaaagcaacatcgtgaccatcactccagacaagctgacatccgatcaaacgaaggattttgaagcgatgatgcagcaagcacggaaccagttcttgagctcatttatgcaaacccgcaagggaacagtggtgcagaagtataaggtaaaggtagttgctgatgttcctgggattagttcttccaaggatggagaggtgaaataagctccagatggctcgggtcaaccgagtgacaaaggtgcttcagatggttctcaaggaaatcaaggtgacaactcccaaggagtacagggagttcaaggtgatggtactcagggggttcaagatcaagttgactatgctgtacaccatgctttgatcaatcaatctggaatattaaccaatactttggcaaacatggtgaaatcaatggttgatggttcgatggctgggtatcaagctacaggaccggtcttcctaccggaaggagtgttcccaaattatcggccattaatcactcacaatcaaccagttgcctagtcaatccccctcaatgcaccatcggctcagccgatggcaccagtatcggctcccgcacttgctgcagcaccgtcagctccaggccagttagttaatccccggttgttggtgagagaacaaccacagcacagcggacagaacgtgaatcggctaatgcaagaccaggttgcatctatgttcttacctccttagcataccgttaatccaacccagcagcagccgattcaacaaacacccaaggcttaatgaatgcatcggctgggtttgcgacacctggtggtcagcctgtgcagcatgctgcaaatcaagttgtcccggagcacttggttcatcacgtacaaccagatggcatgatgtcatcaaggagcagtttgggcttaggccgaaagatgctagaaatttatactgacagccatatcctgaatggtttgagagagttcttcaacctaatcggttcaaagttctagatttttcaaaattctcagggcaagatagcacatcaacttatgagcatattagccgatttttagctcagtgtggtaaagcatcggctgtggatgccttgagggcttggttattccggttgtctttgtctggatcggctttcacttggctttcttctttgccatatgggtcgattaacagttgggctgatttggataagcattttcacagctatttctatagtggggtacatgagatgaaattgtccgatttgatagcaattaagcaaagacatgatgagcctgtgtatgagtatattcagaggttcagagaaatgaggaataagtgctacaacttaagtttgactgatgcccagttagccgatttggctttttagggtatgattgctctaatcagggagaaattctcatatgaagactttgaaagcttgtcgcatcttacacagaaggtaaccttgcatgaacagaggtttgcagaggctaggaagaattctagaaaggttaatcatgtctgtccttatatatatgggtcggatgatgaggatgatgactctgagatagctgcagccgaatgggtaaggagcaaaaaggttattccatcccaatgggtgaagaactcagggaaagaggagaggtatgactttgatatcaccaaggctgacaaaagttttgacttgctactccgagagaagcaaattcaacttgctgccggtcacacaattccatcggctgaagaattgggcaagaaaaggtattgcaagtggcataattctaggtctcatactactaatgattgcaaggtcttcaggcagcagatccaagcggctattgaaggaagcaaaatcaagtttgatgattctatgcggccgatgaaggttgatggcaatccttttcctgtcaatatggtgcatacagctggccgaacagccgatgggggtcgtgcaagaggttttcaggtaaattcagctaagattatcaacaaatatcagaggaagtatgataaacagcaggagaagcattatgaagaatatgatgatggtttgagactatcatctattgaggactgtcctgggtgcagtgatattgcggagagctcaagccgatcgtatagtaggggcaatcggctaaggcatacaagggttccctgttcatcaaagattgggtccagtaaacaaagatcgtggccaggaggactatgaaaacaggaaaactcaatggtgtccttctggtatctttacaaagaatcagaatagaagggttaatcaagttcctgtagccgatgaagccacagccgatgaagcaagaagattggataaggggaaaagtgttgtaactgcttcggtcaacatggttttcacgttgcctgccgagtttgggatcaagcaagccgatgtcgatgaagttgaagaggaatcggctaaattaattttatcaccagaacatgcagttttcgagaagccagagggtacagagaatcggcatctcaagccattatatataaatggttatgtcaatgggaagccgatgtccaagatgatggtcgatggtggggctgcagtaaacttgatgccttacactacgttcaggaagctgggcagaaacgccgaagatctcatcaagacaaacatggtgctcaaggactttggcagcaatccatcagaaaccaaagaagttttgaatgtggagttgacagtcggcaacaaaaccatccctacaacgttctctgtcattgatgggaagggttcttacagcttgttgcttggaagggattggattcatgccaattgttgtattccttcaactatgcatcaatgcttgattcaatggcaaggcgacaagattaaaattgtgccagacgacagccaattgaagatggagagcccaagctattattttgaaggcgtcatggagggttcaaatgtctacaccgaggacacaatagatgatctcgatgaaaaaaaaaggacagggtttcgtgttggccgatgatttggaagaaattgatataggtccaagtgatcgaccaaggccgacatttattagtaagaatttatcctcggaattcagagccaagttgatagagctgttgaaagaattcagaattgcttcgcttgggagtattatgaaattcctagacttagccgatcgattgtcgaacatcggctacctatcaaaccaggggttaggccacaccaacaacctccgagaagatgcaaagctgatatgctccaacctgtcaaggctgagattaaacgcttatatgatgctggttttattcgtccttgccgatatgctgagtgggtttctagtatagttcctgttatcaaaaggaacgatttgaataaagctaccccaaaggtcgaatatccaatgccagtagccgatcagctggttgatgctgcatcgggacacaagattttgagttttatggatggtaatgcaggatacattcagatctttatggccgaaaaagatatccataagacagcttttaggtctcctggtgcaatcggcttgtttgagtgggttgtgatgactttcggcttaaagagtgctggagctacatatcaaagagccatgaatatatatcatgatctaattggctggttggttgaggtctatattgatgatgtggttgttatgtctaaagagattgaagaccatatagccgatttgaggaaggtttttgagaggaccaggaaatatggcctgaagatggacccgacaatatgtgcttttggcgtatcggctggccagtttttggggtttcttgttcatgagagggggattgagataactcagaggagtgttaatgcaatcaagaatattcagcctccggagaacaagacagaactgcaagagatgatcggcaagatcaattttgttagaaggtttatttctaatttgtccggaaggttagagccttttacaccattgttgtgattgaaagctgatcaacagtttacatggggggcagagcaacagaaagctttggataacattaaggaatatcttagttctcctccagttttgattcctccacagaaggggataccttttcggttatatctgtcggccggtgacaagtcaatcggctcggttttgattcaggagcttgaagggaaagagagagttgtgttttatctaagtcgtctgctcttggattcataaactagatattcccctgtggagaagttatgcttgtgcttatatttttcatgtacaaggttaaggcattatctattgtccaatgaatgcactgtcatatgcaaggccaatgttgtcaagtacatgttattagctccaattttgaaaggaagggttggaaagtggatatttttcttaactgagtttgatcttcggtatgagtcaccgaaggcgattaaaggacaagctatagccaattttattgtagaacatcgtgatgatttagtcggctcggtcgagattatgccatggactttattttttgatggatcggtgtgtactcatggttgtggtattgggttagttataatttcccctaggggggcatgttttgagttttcttatactatcaaaccttatgcaaccaataatcaagctgagtatgaggcagtgctcaaagggttgcagttactcaaggaggttgaagctgatactattgaaatcatgggagattctttgctagtaatcagtcaattggcaagggaatatgagtgcaagaatgatacattaatggtttataataagaagtgccaagaactaatgaaggaatttcagctggttactttaaagcatgtatctcgagagcaaaatattgaagctaatgatttagcccaaggggcatcggggtataagccgatgatcaaagatattaaggtcgaaattgcagcaataacagccgatgattggagatatgatgtgcatcagtatttacaaaatccatctcaatcggcttctcggaaattaagatataaagcgttgaagtatactttattggatgatgaacttaggtgtgttgcttaggtgtttgagtgccaatcaggctaaagttgcaatcggtgatgttcatgaagggatttgtggtactcatcaattgactcataaaatgaagtggttgcttcggcgtgcagggtatttttggccgacaatgcttgaagattttttcaggtattacaaaggatgtcaagattgtcagaaatttggagcaattcagtgagcgccgacgtcggctatgaatcctatcgttaaaccaaggccattcaggggttggggaattgatatgatcggcatgattaatccaccatcgagtaaaggacataagcttatactggtggcgaccgattatttcaccaaatgggtagaggcgattcctttgaagaaggttgattctggggatgcgatacagtttgttcaagagcatataaaataccgatttggtattcctcgaactattataactgatcagggttcaattttcgtgtccgatggtttgttcaatttgccgaaagtatgggaatcaaactgttaaattcttcaccatattatgcacaagctaatgggcaagccaaggcatctaacaaaagcttgatcaagttgattaagaggaagatttctgattatcctcggcaatggcatgctcggttgcccgaagcattgtggtcttatcggatggcttatcatggatcaatccaggtccctccttataaacttgtttatggtcatgaggttgttctgccatgggaagtgaggatcggctccaggagaacgaaagcattgaatggcaaatacttttagaaatattacccaagtgtttcggttaatgca

SEQ ID NO: 101934 - DNA, 1758 bp, Oryza sativa
  Clone ID: PAT_MRT4530_99506C.1
atgtctaaaatgatggttgatggtgaggccgcggtaaatttgatgccttatgctacgttcagaaagttgggtagaaatgccgaggatttcatcaagacaaacatgatgctcaaagactttggtggtaatccatcggaaaccaaaggtgttctgaatgtggagctgacagtcgacagtaagactattcctaccacgttttttgtcatcgatgggaagggttcttacagcttgttgcttggaagggattggattcacgccaattgttgcattccttcaactatgcatcagtgtttgattcaatggcaaggcgacaagatagagatcatgccagccgacagccaatcgaagatggagaacccaagctattattttgagggcgtcgtggagggttcaaatgtctacactaaggatacagtagatgatctcgatgacaagcaaggtcaaggtttcatgtcggccgatgatctggtagaaatagacataggtccaggcgatcggccaaggccgacatttattagtaagaacttatctccagagtttagaaccaagctgatagagctcttaaaagggtttagagattgcttcgcttgggagtattatgagatgcctggagttagccaatcgattgttgaaaatcggctacctatcatactaggggttaggccgcatcaacaacctccgaggaggtacaaggccgatatgcttgaacctgtcaaagctgagattaaacgattgtatgatgctggttgtattcgtccttgccgatacactgaatgggtttctagtatagttcctgttatcaagaaaaacgacaaggtcagggtatgcattgttttccgaaatttgaataaggccactccgaaagatgaatacccaatgccagtagccgatcaattagttgatgctgcttcgggacataagattttgagttttatggatggaaacgcgggatacaatcaaatttttatggccgaagaagacattcataagacagcttttaggtgtcctggtgcaatcggcttatttgagtgggttgtcatgactttcggcttgaaaagtgctggagctacatatcaaagagccatgaattacatacatcgtaatttaatcggctggttggttgaagtctacatcgatgatgtgattgttaagtctaaagaaatagaggaccacatagccgatttgaggaaggtttttgagagaaccagaaaatatggcctaaagatgaatctgacgaaatgtgcttttggtgtatcggctggccagtttttgggatttcttgttcttgaaagggggattgagtttgcttatactattaaaccgtatgcgactaataatcaagctgagtatgaggcagtgctcaaggggttgcaactactcagggaagttgaagccgataccattgaaatcatgggggattctctgttagtaatcagtcaattggcaggagagtatgaatgcaagaatgatacattgatggtttataatgagaagtgccaagaactaatgaaagagtttcggctggttactttaaagcatgtttatcgagagcaaaatattgatgctaatgatttagcccaaggggcatcgggatataagccaatgatcaaagatgttaaagttgaaattgcagcaatgatagccgatgattggaggtatgatgtgcatcgatatttgagtaatccatcccaatcggcttctaggaaattaagggtatttttgaccgacaatgctggaggattgtttcaaatattataa

SEQ ID NO: 101935 - DNA, 225 bp, Oryza sativa
  Clone ID: PAT_MRT4530_99507C.1
gtccacatgtcagctgccggggaggccacgcccagtaaacgggtcccgaccagccgcgagcggggagccacgccacccaaccaatcccaccacttcacgccgtgggacgatctccgccgtcggatcgatcccacggacggccgcaactcccccagcacagagaccaccgcgattggttggggcatccacgtgtcgtgctcggactggtccaggtcagactcatga

SEQ ID NO: 101936 - DNA, 861 bp, Oryza sativa
  Clone ID: PAT_MRT4530_99508C.1
atgccattggatgagcttccaccacttcgtctgcgagatatgatgttctcagcaaccaccacacatggtacaatggctacctgcttagaacgtctattggactcggcacggtgttcttcaggtgtcattctcaataccttcgatgaccttgagaattctgacctccgaaagatcgccaatggcctaagtgttccggtttacgcgatcggtccacttcacaagatctccataggccaagagagcagcttgctaactcaagatcaaagctgtttggaatggttagacaagcaggaggcagagtctgttctttatgtgagctttgggagcttggcatctatggactctcaagagcttttggagacagcgtggggattggtcgatagcgaaattccgtttctttgggtgatcaggcctaactcggtccagggatcagagcaaacatgccttccagatggctttgaggaggcgacacgtggcaggggtatggtggtttcctgggccccacaacaagatgtgctgaagcaccgagcggttggtggtttctggacgcacaatgggtggaactcaaccctagaaagtatatgtgatggtgttccgatgatctgtaggcctcagtttgcggaccaaatgattaatgctaggtatgtccaagaggtatggaagatagggttcgagctagagggaaaactggagaggagaatgattgagagggctgtaagaaggttactgtgcagtgaagaaggcaaggagatgaggcacagggcaaaggatctgaagaacaaagcgacgacctgtattgagaaaggaggctcttcaaatactgcaattgatatgttggtgaatctcataatgtcattttga

SEQ ID NO: 101937 - DNA, 939 bp, Oryza sativa
  Clone ID: PAT_MRT4530_99509C.1
atgggtctgagagacccttctgcagcgacagattcaaagaaattaatggatgaagtacaacgcaacatcttgcagtcagggaaatacacaggggatgtgcggagcacaccaggcagcaaggaccgttgcatcaaaaatgtttcgccagggcatatactggccaaccgtattcaaaccaatcgagcatctggccattcgcaagatgagggcttagacatcatcggcatattcccagtagggcgaaatggctacaagttcaccatcgtagctatcgagtacttctctcgctggattgaggccgaaccccttggcacaataaccgctgcagcggttcagaagttcatttggaaaaacataatttgtcgattcggggtgccgaaggagttcatcactgacaacggcaagcagttcgactttgagaagttaaaagaaatgtgcgagggactaaatttgcaaatcaagttagcatcggtcacacatccgcagtcgaacggggcggccgaacgagcgaatggaaaaatcctcgaggcactaaagaaaagacttgagggagcggcgaaggatgaggcaatgacaccggcagaactaggggctaactcaccaagggtgatgttctccgggggcgaagacgggcgcgaagtgtcgctcgaactcctggaaggggtgagagtcgaagcactagaacacatgcgcaagtacgcgaaaagcacttcggcaacctataacagaaaggttcgaccaacagagctccggcccgaccatcttgtactaaggaagaaggcgaaccctgtggcagtcgggaaattggagtctaagtgggaaggaccatatttgatcaagcataagtctcggacgggttccttttggctggcaacactggagggcgaagagttcgagcactcctggaacgccgcttcccttaggtggttctatgtgtaa

SEQ ID NO: 101938 - DNA, 1601 bp, Oryza sativa
  Clone ID: PAT_MRT4530_9950C.1
ctcgcttcggatgccgctattgctgctgctgcgcctgtggctgccataagtatatcgcactccacggtgaccgaccgaccgacgcagtcgtcacgggcgcggcagatagctggctagtggctagcaccgcgcgtcgagacgggatgggcgagaggaggcgccgtgccagcgctgtcgccggcggccgggctgaggatgagaaggctgcttcggcgcctgcggccgcggccccggcaccgacggtgtggttcgcgctgaagaggtcgctgcactgccggtccgagccgtcggaggtgcacgtgccgaggcccaaggccgtcgccgccgccgctgcgggcggtggcgggcacctctcggcgattgtgaccaagcgcgcggcgccgcggtcgggttgctcccggtcgatagccaacctgcgggacgtcatccacgggagcaagcgccacccggagcggccgccgagctgcagcccgaggtccatcggcagcagcgagttcttgaaccccatcgcccacgaggtggtgctcagcaccaactcccgctgcgagctcaagatcaccggcttcggtggctgcggcggcctcgcggcggcggcggcggcggggggcggcgtactcgcgtcgccgcacgaggcggacggcgacggcgccgtggtgtcgtcgttcgttggcacgctccggccgggcaccccggggcccggctggagccacggcctgcagtacagcggctcgtgccggggcagcatgcggtgcacgcctccgaggtcgccgaatgtgctgctggacagcagggacgccgccgcggccggggtgaccgctcaccgcgcgtcctgcgaggacgccgtcaagagctttggcaagggcggcggcctaagctgccaccgttgcggtgagcagttcagcaagtgggaggcactggaggcgcaccacctttccaagcatgcagtgacggagctggtggaaggggactcgtcgaggaagatcgtggagatcatctgccggacgagcctgctcaagtcggagagcagctgcgtgcggatcgagcgtgtgttcaaggtgcacaacacgcagcggacgctggcgcgcttcgaggagtaccgtgaggcggtgaagctgaaggcgagcaagctgcccaagaagcacccgcgctgcctcgccgacggcaacgagctgctccgattccacggcgccacgctctcctgcgcgctcggcggcgcggcgggctcctccagcctctgcgcctccgacaagtgcgccgtctgccgcatcatccgccacggattctccgccaagaaggaaggcaaggccggcgtcggcgtcttcaccacgtccaccagcggccgcgcctacgagtccatcgaggcctccgccggcgccgtcgtcggtggcgacgacccggcggcgacgcgcaaggcgctgctggtgtgcagggtcatcgccggcagggtgcacaagccgctcgagaacctcaaggagttcgccggacagaccggcttcgactcgctcgccggcaaggtcgggccctactccaacatcgaggagctctacctgctgaacccgagggcgctgctcccgtgcttcgtggtcatctgcaaggcttaa

SEQ ID NO: 101939 - DNA, 590 bp, Oryza sativa
  Clone ID: PAT_MRT4530_99510C.1
aacataatagtcactagaagtattttctgcttcattgctcattgacggaaacaggatgcacacacatgcatatggcccatacttattttcagttaggacttaggacatccacaacctagctaacaagtaacaacgaagaagacaagtataaattacaagctaccgatatcctgtaaaccaggccatgtgaatcctcttattcagctgctttgatataagtactcaaggaatcaactgatgtcacaaaatacagagcgattttgagatgacccagacatcggagctccatgagactcagttgcatgataaactcttcgttaagccttgctgatcatccatgtgggcatgcagagtgcattatttccttcgccagtaaactccttcaattaatttgcagctgataaatactacacgtcccccaactaatttgggggataatctacagtctacaaactagtaaagactaaagattactcagccaggtggtacaaagagatcaccagctaactacagacacagggtacatttcccaggaacacaagagcaacatgagacatgatgacaacaaacgcaaagcgacagcagaggat

SEQ ID NO: 101940 - DNA, 525 bp, Oryza sativa
  Clone ID: PAT_MRT4530_99511C.1
aaaagcaaaacggggggggttttatttcagcattagggaggaagaacatatatgccccgcctttggagaccccatttcttgggaaaaaggaagcaataaaccccctttacctcggcccggcccaaaatagatttgccccccccagagtaccctccggcccagggggggggggcataagccccccctgaaacaaaaaggaagggggaaaggggaatggaaaaaggtctttataaactttaccaaaactaccgggagcctattgggccttgggtaaaactggggggggggggggggtatcttgaaaaaatcacctggtaccggggccctaaaggaagctttttagggggggcccgaaaaaaaacaagctacgggtatatcaggaaaaaaaccccatggggggcgcccagggggatccccaggcccataaagtctaaatccgggagcccggcgtcgttttttatattcaaccagccgccgaaatcaacatccattcctgggagccccaggtttgaaaaggccggcatt

SEQ ID NO: 101941 - DNA, 2777 bp, Oryza sativa
  Clone ID: PAT_MRT4530_99512C.1
ccacgcgtccgcgccacaactcatcaactccactcctcccctcccctcgcaaaccaaacccaagcaaagcaagcatccaatgcttccccccttcctccctaatcacccccgctaatcgctcccgacgccaccactaatcgaagccggaggagggaggcggcggcgggatggacaccgcgtcgttcgtgacgtcgctgctgacgtcgttcgtgatcttcgtcgtgctggtgctggtgttcacgtggctgtcgagcaggccgggcaatgcgccggtgtactacccgagcgtcctgctgcgggggctcgacccgtgggaggggcgggggcgggggacgaggagccccgtcgggtggctgcgccaggcgatctccgcctcggagggtgacgtcgtcgccgccggcggggtcgacgccgccgtctacctcgtcttcctctcctccgtgttgtccatcttggtgttctctgggattgtgctgcttccagttctgctacctgttgctgctactgacgataacctgaacctggaaagggctattggcctgaagaatggcaaaacaccccagaacttcacagagctcgagaaattagcactgggcaatgttcaagaacatagccgaaggctgtgggcatttctattatcagtctattgggtctcttttgtcacgtacttcgtactatggaagtcctacaagcatgtttctaatatgagagcggctgcaagatcaacaccagatgttaaaccggaggagtttgctgtgttggtgagagatgttcctaagccacctcctgatcaaactataaaggattctgtagactcatatttccgagcacttcatcctgataccttctacagatcaatggttgtgactgaccacacaaaggctgacaaaatttatcaagagattgaaggtcacaaacagaaaattgctcgtgctgaagttgtctatgcggagtctaaaacaacaggcaagcctgagggcaccaagcctacgcatcggattggatttcttggtcttatcggtaaaaaggttgatacaattgagtattgtaatgaccaaatcaaggagttgctgcccaaactggaggccgaacagaagactacccttcgtgagaaacagcaacaggctgcaattgtgtttttcaacagaagatctgctgcagcttctgcatctcagactctccatgctcagatgtttgataaatggactgttgagcaggctcctgaaccacgccagataatatggtctaatctttccaagaaaatatatgagaggcaaatcagacaggttgtggtctataccattgtctttctcacagtggttttctatatgattcctattactgctatctctgctcttacaactttggagaagttgagggagaagcttccctttctgaaggtggtggtggaccaaccgaaaatcaagactgtcctacaggcttacctcccgcagcttgcacttattgttttccttgctttgctgcctagtcttctaatgttcctctcaaagctggaggggattccttcacagggtcatacagttagggcagcagcagggaagtacttctacttcattgtgttcaatgtcttccttggggttactattagttccacattgttcagtgctttgacaaccataatcaataaccctcctgggattgtgaacatgcttgccagcagccttccaggaagtgcaactttcttccttacatttgttgcactgaaattctttgttggttatgggcttgagctctctcgcttggtccctcttatcattttccacctgaagaggaagtacctatgcaagaccgaggatgaagtgagagcagcttgggctccaggcgacctaggatataacaccagggttccgaatgacatgctcatagttacaatagtgctgtgctactctgtcattgcacctctgattattccatttggtgttgcttactttgctcttggatggattatagtgaaaaatcaggttctccgagtttatgttcccagctacgagagcaacgggcgaatgtggccacatatgcacacaaggatcattgcagctctactgatttaccagatcaccatggttggtgtcatcctgctgaagaagttcttgtactcccctgttcttgtgcccctcatcccaataagcttcatcttcgcctacatttgccatatgcggttctacccggcgttcgccaagacccctctcgaggtggttcagcacaacgtgaaagacacgccgaacatggatgccgtctacacctcctacatcccggcttgcctgaagcctgagaagctagaggatgtggatatcttcgaagacgcccagttgcacaccacctccagagccccatccatctaatgcaagtgctggttgcttgtgtcgagaccggagagtattactcatcatcactgcaaacgaatttctgatgaatttccacgttgaaatgaacccctgtgaagtgtgaatctgctattgccaggataggaaaacttatgtcatgtccgtgtacataatatgcactcgggattgcttgccttcttaatgtgtgtgttgaggtttattctttacttcatagttctaggtagctgctgtggatatcgcgcctttttaagtttaagtttctatcatatgttcatgctcgtggtgactgctaaatctagtcctcttatgtgtaacaaaactcagaaatctgttgcctagtgcaccgtaacctgattgataatttactgatttactcattgttactgttcaaaaaaaaaaaaagaaaaaaca

SEQ ID NO: 101942 - DNA, 2300 bp, Oryza sativa
  Clone ID: PAT_MRT4530_99513C.1
ttagctcagttttacagttgtaagtttgcttgaaatttttttttttttttttgtttcttgttacccaattaccaatccggattcatacttacatatggttttggtttgcacataataatgaataatccaaagctctggtctcaactaatgttcatcaacacaaataccaatgtaccagcaaccccaataccactactttgtaaacaaaaccatatttattattcactacataattctctaatttcacatccaaacatccaggcacgcttaaatcagcagtagataaccagtggaagaacaagtctcttttaggccttcctgcaaacgcctccctcgcatgctgggtcagcctcagcctcagcctcgtcatcgcccttcttctcctcctccttccccagcgcgcacttggggtgcaggtcgaagtcacactccctgcacctgtacgaccacgagctgcccatctcgtcgcatccatcacagccatacgtggtgcagcgagtcagcacgagcatcatgctcatcgcacacattacccacgcgggggcagcctcagcattctcctctcccatctccacatcgcccttctcctccagcgcgcacttgggatgcagatcgaagtcacattccttgcacctgtaggaccatgagtcgcccatctcgtcgcatccatcgcagccatacgtggtgcagcgagtcagcacaagctcatgatcgtgcagatcatgctttagcttctcaggccacccctttgccatgtcattgatcttcttctccttctccttctccagctcctgaagcttctcctcggtgaatggaaaagcgtcggcgccatgggccaccagtggggtcttcgcatctttggtcactgtcttcccatcaggaccaatggcgacaagcgaagggatcccagtgattttgaagatcttactcaattgttgcttcctttcgtctcccaaaggaagagcaagccatggcatgccagagaagaactcatcgtaggaactctgctctcgatcgctagaaataaatacgatctcaaaatcattgtgcttctccttgatcttgttgtattcgtttacaagtttaggcaggaaggctcggcatggagggcaccatttagctgaaaagtagaggaggacagtcttcccaacaagttctgatacaggaacctttgccccatctttcccaaggacaaagtccaaatcaccagtgaccagaagggactccagggtctgtgattctgctttagcttttgccttctcagcaagaatttcgagcttctctgcactgaaaggaaaaccttcccatgcatctggaccatgctcatcaattatgtcagcaatatcgtcattcagtgtcttcccatcaggaccaatcaggacaagcataggaaggccactgagctcaaaataacgagccagcttctcacacatcttatctccctgaggaatggcaagccaaggcatgtctgcaaaactctcattgaatgattcctcatcaccgtccaatgataccattacaacttcaaacttctccccaactgctttaagtttctcatatattttagcaagcactgaggtgaattgaacaactggaccatagccattcaccacaaagcacaaaccaacatacttgccctcgaggtcagagatgggcaccttgtctcccttgttcgtgattaagtagtcgcgggtgggtgtaccaaacagactatgaatagtttgattatctttagctgccttttcctgttccttcaattcattgatcctctctgttgtaaaagggtaagcttctgtaccatactcatgcacaagctccactccatcttcagtgtaaatttcaccagattttgcatcaaggattacaaggtgtggaatacccatcaccttatagcgttcattaagcttggcgagagcctcggagtccgagaaggggactgccaaccaaggcatctttgcaaagtaggcattgaatgcgtcttgatcactatcccctgaaacaaagacaacctcaaagctctttccctgggagaccagctcattgtatgcttcaataagcttaggcgtgaagcgcctgcatggtgggcaccatgaggccgagaagtagagggccactgtgcttgccttgatgctactgatcttgaccttgtcggcggagttgcggaggaggaagtccctgccgtcggcggaggcgaggatggtggcgacgccgccatcggcggcggcgtgcgtggcgtccgccatggacgagtgctagtggtagcgagggagtgggcaagtggtggccgggctgcggggtcg

SEQ ID NO: 101943 - DNA, 534 bp, Oryza sativa
  Clone ID: PAT_MRT4530_99514C.1
atgctatccatccatggccgccgccaccgccaccggagggagaagagaggcggcggaggagggaaccgcccaccgccgtcggatccgcccgcggctaccaccaacgccaccaccgccaacggaggaaggcgagagggggcggagggagccgccgccgctagatcgaccggcgcattaggtggcggcggggaggatggcgaggcggcgcagctccggagcccttcctcccgccggatctggcagtgggagggcacctctgggcggtcgtcgctcctcccgccgctgccgcggaggggagggcgcggccattgctgccgatgccacctcctgccgccgctgggccgcaccatctccacctgccgccgccacccgttgcctgccgcctcccctcttgcggcgccgactgccgcctcagctacgagagagaggagagcgagggagaagaccgagaggaggagggcgctgaggggagggcgccgtcagccgagcggagggcgccgtgcgagggggaggggaagcggcgcactggattag

SEQ ID NO: 101944 - DNA, 602 bp, Oryza sativa
  Clone ID: PAT_MRT4530_99515C.1
cagccgccgccactctgcctctcccccagccactgccgctccacctctcccccagccgccgccgccgctccgcctctcccccagccgccaccgcctccgccgccgctaggagatcgagtgcccgccgccgctcgtctctgcctctcccccgcaagcgcccgccgccgccggtctcctcctctccctcgccagcgcccgccgccgacgggaaatcgagcgcccaccgccgccggtctttgcctatcccccaacacccgccgccgccaggagatcgagcgcccaccgccgctgatctccgcctctcccccagcaatccagcgcccgctgccaccggcgctcgcccccagcacccgacgctgccggcgaggggtaccgagctcgtctcctccaagtgccggcggagctgcgtcgagttcatcccctccaccgtcgagctcctccctgtggtcgccggcgagctcgagctattttcctccgccgtcaagatcctcccctcctccccgtgcttgccggctacgtctcttgcccctagcttgcgagcgctaaacgcgctgtctaacgcttgtgacaagacccgccccactatgggtttaggttggtag

SEQ ID NO: 101945 - DNA, 3430 bp, Oryza sativa
  Clone ID: PAT_MRT4530_99516C.1
ggaggacgcctgtgcaacaaggtttccgttttgaggctgcctggctcagagctggggattacagggaggtggtggaatcagcatgggcacggggcagtgatggctcacagtctctgcagggcacctggagaaatatgcaacagatggctgcatctcttcgtgactggagcaaagtgtcttttggctcgatccgcaaagaaatacagagattggagaggaagctaaaaacactccggtcttcaggtttggaggagagtgtgatacaagaagaaaggatggtagaaaggcagttgtgtgagctctttgagagagaagaaatcatggctcgacaaaggtcacgagtggactggctccgagaaggagaccgtaacactgctttctttcatgctagggccacggcacggcggcgcaccaacaagatcactgtgctggtaaaggatgacggcactagatgcactgatcaggagggtataaaaaaattggccggaaagttctatgaggatctcttcacatctgaaccttgtgtgtcaactgatgtggtgttagaggcaatcccaatcaaagttgatgtgctggtcaatgaggaactgggcaaaccatactctgatgatgagatcaaagatgcgctgttccaaatgggcccaaccaaagcaccggggccggatggccggaaagttctatgaggatctcttcacatctgaacccactggggactgatcaaaggggagatttgcaatgcagtgcgtggtttccttttgggagaggagatcccggaaggtttttgtgattctgtcattgtcctaattcccaaggtacacaaccctgaacatctctccaaattccgcccaattagtttgtgcaatgtgctctacaaaattgcttcgaaggtcttagcaaaccgtctcaaactcttccttcctgatattgtctccgagttccaaagcgcctttgtgccggggagacttatcactgacagttctcttgtggcctatgaatgtttaaacaccattaagaaacaaagcaacaagaagcctttctttgctctaaagatcgacatgatgaaggcttatgataggattgagtggtcttatctccatggctgcctgatgagacttggttttgaacaggactggatcaatacggtgatgcgctgcgtgacctcgacaagatatgcaatccggattaatggtgagctcaccgacactgttgttccctcgaggggaataaggcagggcgatcccataagcccctacctcttcctactctgtactgaggggctctcttgcatgctgcagaagaaggaacaacaaggatttctacatgggattaggaatggcaggcaaggacctccaatctcccacttgctcttcgcagatgacagcattttctttcctagaagtgatcacagaagtgtccaggctatcaaatccacactgcaagcctattgtgatgcctcgggacagaaaattaacatgcaaaaatcctccattttctttggaaaaagatgtccaagcaacatccggaatgaagtaaaggcaaagttgcaagtgtcaacggaaatcctacaagattcctaccttggaatgcctactgaaatcagcagggcagtttcaaactccttccaatttctccctggcagaatttggaaaagagtcaatggttggacagacatgcctctctcaagggcgggtaaagaaaccatgctgaaatcagtggcacaggcgatacccgactttgtcatgagttgtttccgtatcccgatcatgacttgtgaaaagatgaagtcctatattgctgaccactggtggggttttgaagaggggaagaagaagatgcactggagattttgggagtggctgacctctccaaagtcattgggagggatgggtttcagggatttcgtcatcttcaaccaagcgatgttgagcaaacaaggatggcgcctcctcactgatccaaactccctttgcacaagggtacttaaaggcaggtattttcctaattgttctttttgggatgccccccaaccaagatctgcttctttcacttggcgaagcattctgtttggtaaggaattactcaagaaaggagtggcatggagggtgggagatggaaaatcaatcaagatcctgtcagacaattggattcctaatgtgcaggctggactggtaagtcctcttatgcatattccggaggatgcaacagtgcaatttctcatggaggaaggggggaaagaatggaaccacgacttggtgaaatatgcttttgatgaagaaactgccaatgagattctgcaagtgccaataagccgacatgggggggatgatttcgcttcttggccacatgacaagagaggtctgtttacagtgaggtcggcttacaacttggctcggtcagaagcctttcttatcgaccacaacagcagtggagaagaggcctcccctctatcatgcatgacaatgaaacaaactggaagaatctttggaagatctgtgcacctggaaagatgaaaattaatctatggcgtgctgcccatgactgcctcccgacaggttttcagctccgaaggaggcatattgaggcgagggatggttgtgctttttgcagcagagatgatcgcattgagcacgtgtttcttatgtgccctttctctgattctgtatggaaagagatcaagcaggtgtacaacatcaagctgggcagaggagatcttgctaatgtgagatagtggatttttgacttccttcgccgaggttcagctatccagaacacagtgcttgctgtcaccttttggcatatttgggaggcaagaaacaatgccaaaaataatgtggagactttgcatccgagaagggtggtccagaagatagtggcgtatgtggaaatgatcatgcaacactgcgggcctgggaatgtttctaggccggcggaacgcatttcattgcctagctgggtgccaccaccggcgggcgttttcctaatcaatactgatgcagcggtgttccaggctgagcgccaaatgggagtcggggtggtgatcagagaccaacacggcaactgtcttttggcggccaacactcgtttcatggggatcaccgatccggagacagcggaggcttgtgctatccggcatgcgctgtggctggccaaagaagaaggcttccataatgtgattgttgcttccgactgtctttcggttattcaaaagctaaactcacctgggcgggatcgctccaagattggttgcctggttgaggacatcaagaagcttggtgttgagtttatcagtgtttcctttatccatgttagtcgttgttctaatgtagcggcacacacattagctcgttgttctgagccctctgtctgtaatgtttaccgtaatgagactccggactgtatccgtgagatgctcctgtctgatgctcagtaa

SEQ ID NO: 101946 - DNA, 1541 bp, Oryza sativa
  Clone ID: PAT_MRT4530_99517C.1
atgccggagctgccggaggtggaggtggcgcgacgggcgctggaggagcactgcgtcgggaagaggatcgtgcggtgctcggctgcagatgacaccaaggtcatcgacggcgtcgccccgccgcggctggaggcagcgcttgtcgggaggaccatctccgctgctcgccgcaagggcaagaatctgtggcttgcgcttgattctccgcccttcccttccttccagttcggttttcttttgtacagaatgcctataaggaatggctggagctatttacatcaagggtgtggaactgagcaaatacaaaagatggatgatggtttggagttttccttcactgataagaggcgttttgcaaaaattcgctttcttgacaatccagaagctgtcccaccaatttctgagcttggaccagatgccttatttgaacctcttcatcttgatgattttgtagagtcactaagtaggaaaaaagctccaataaaagcccttttgcttgatcagagctttatatcaggaattggcaattggattgcagatgaagtgctttatcaggcaaggattcatccaatgcaaacagcatcgatgatttctaaggagaaatgcaaggcactccatcagtgcattatagaggtgattgaaaagtccttagaagttggttgcaacagcagtcagtatccagaaaactggatatttcactccagggagaagaaacccggcaaggcctttgtggaggggaagaaaattgacttcattacagttggtggcaggacttcagcatatgtgccagagttgcagaagctggacgggattgatgcaacagcaagcagagcgaaaataagcaaagaacagagcaaatcaaataaagctgctcgtgaagtggacgatgatgaggaagaggctaaacctgccaagaggggaaggaagcaattagtgaaggcaacccatgagatccaagaggatgaggaagatacaaaagaatcaaagagaggaaggaagcaaccagcaaagacatcgaagggctcgtggaagaaagctcatcattcttctgagggtagtggtgacgacgacagtgatgatgaagcagttgataaggtggtcgcggaacaagggaagaggagggatccaaagcaaccagcagaggcgaaaagctcgtcagacaaaggaggaagtgctgccccagcaaagaggccacagaggaagaagcggcaattatagacccttacggcgggtggtgaactgtctgaagtaccttagggtggtgtttggttcggaagtggtaacgtaaactctcatggtattgccaccggccgtaacagctaccattgtatccgattacacggttagtttggttgcagacggtaacatcatttgtttacattacggcgttagaaaaagggttgcagccaaggaacgggaggccgatccacaggacacgattcgaaatttggaacagaaacttttgggaagatcatttgcttggagaactgcttgcttccagacaactattgatcaaataactgattaaatgaagctggtat

SEQ ID NO: 101947 - DNA, 700 bp, Oryza sativa
  unsure (1)..(700): unsure at all n locations
  Clone ID: PAT_MRT4530_99518C.1
cgcacggaccgggcggcgcggcaaaagganggccggngcgcgcccccagacgccgggggacnccaccggggacggcgcgggccccccccgagccnnccacgngcngacaccacggcgagagcggcaaccccgggaggcgcacgggaaacgccaaaccggccccgccaacccggaaggggagggcnccgcaacgcgcccgcgcggccgagcgaccgcaccaaagcgccccgggccaaggaaaccggggccagncccccccggcgacgcccggcccgcgcggccccgccaaaagggcccgcggcgccccccgcaccgggcaggggacggcgcgcgcggcgcangggcccgcgcgccccgcgggggggcccgccaagggcnccagcnacgccgcccaccagacccaggagcgaagggggcccgggccgccccgcgcccgaagcccgcaaaaagggcacagggcgcgaccccggcccgaggcagcacacccggccccccngggcccggccccgaagggaaggggggggcggcccccccgggcgagagaccgggcaccgggcgccccccggcgcggccnngcnncgggggggggggcgccagccactngggcgcgctccccctagccacctcagcatcgccccgccacgtcggcagggggacggcgccagagaggctggcgccgtccaaaaaggaccatttctag

SEQ ID NO: 101948 - DNA, 587 bp, Oryza sativa
  Clone ID: PAT_MRT4530_99519C.1
cccacgcgtccgcccacgcgtccgggaggatatacccaacgagggagaggttgaggagagatgccggagctgccggaggtggaggtggcgcgacgggcgctggaggagcactgcgtcgggaagaggatcgtgcggtgctcggctgcagatgacaccaaggtcatcgacggcgtcgccccgccgcggctggaggcagcgcttgtcgggaggaccatctccgctgctcgccgcaagggcaagaatctgtggcttgcgccggattctccgcccttcccttccttccagttcggaatggctggagctatttacatcaagggtgtggaactgagcaaatacaaaaggtctgcagtgagcccgactgaggaatggcctttgaagtattccaagctgcttgttgtaatggatgatggtttggagttttccttcactgataagaggcgttttgcaaaaattcgctttcttgacaatagctttatatcacgaattggcagttggattgcacgagcaacgctttatcaggtgattgaaaagtccttagaaggtgcgtgcaacagcacgcacatcccagaagactggatatttcgctc

SEQ ID NO: 101949 - DNA, 1757 bp, Oryza sativa
  Clone ID: PAT_MRT4530_9951C.1
tcgccggcaccagctactgcttgctgcggtgatccacacgttgcgcagaagcaggagaaggggaacctgggcagcttgggcggcgtcgtgacggaggagtaggagaggtggaggaccgaggagatggagtagagggaggcgcagatcgggggcctcatcaggatgatcacggagaagaaggacgccatcttcgacgcgctccacgccgaccacggcaagcaccgcgaggactccttccgatactagctaggggttcttgccaagtccgtcaagaacacgatgaaaaacctcaaaaaatgggaataaaccgagaaggttgaagtgccgcttatttcatttccatgcaacgctcgggtcgtgccggaaccaatcggggttgtgctcattttctcatgctggaatctcccaataggcttagctctagagccactctccggggccatagcggccggcaacgccgttgttctgaagccctccgagtttgcaccgtcaaccgccgcgttcctcgccgccaacataccgaagtatctggacgccaaggccgtgaaggtcgtacagggcggggcggagttaggagaggagctcatgagcacagatggacaagtccttttcaccgggaatgctcgtgtagggcgcatcattatgacgaaagcagcgaaacacctgacgccggtcgcgcttgagcttggctcgaaatgcccgtgcatcgttgactgccttgacagtaagagggagtgtcaggtcgccgtgaatcggataatcggagcgaaatggtctacttgtgcaggacaagcttgcgttgccatcgattacatacttgtcgaggaacagtttgcaccattcctgattgaactgcttaaatctacactcaagaggttctttaccgaaccagagtacatggcgcgcatcctgaacgagaagcatttccataggttgacaaaccttatagaggatgatcaagtgaaatcctccattgtgcacggcggcaacgctgaccccaagacactgtggatcgagcccaccatcgtgctgaatccaccgctcgactccgacatcatgatggaggagatattcgggcctctgctcccaatcataacggtaaagaagacagaggattgcatcgcgttcttgaaatcgaagcccaaaccgcttgccatctacgccttcaccaacaacgagaagttaaaacagcggatcgtcgcagaaacgtcctccgggagcgtcttgttcaacgacgcgattgtgcagtacgggctggacagcgtcccgttcggcgggatcggggagagcgggttcgggcagtaccacggcaagtacacgttcgagctgttcagccacaggaaggcggtggtcaggaggagcctcctggtcgagttcatgttcagatacccgccttgggacgagtacaagatggggatgttgcgccgcgtcttcaggttcgactacgtctcgctcgtgcttgcgctgctcgccttttggctgctcggcataaggcgatgaaggatcgatcaatcgtctgcagtgttggttcataaaatgtgcgatcgtcgtgccatgcggccaatgcacatgccggggacactattttatgtgatatttatgtatttatttccaagaaacgtgcttgcagttactaaataaactcaaaaaatataactacctgttagtgcattgcaaattgtatcaaacagtttgatcatccaatacattccgattcatgtctgtcaaaaaaaaaaaaaaaaaaaaaaaaaaaaaaa

SEQ ID NO: 101950 - DNA, 334 bp, Oryza sativa
  Clone ID: PAT_MRT4530_99520C.1
aggggatagcgatgctataagcgacagaggtttcataaaactaacaatatatacggactcgatggtgcattaaaccagacacaagttgacatacgctccacaaaccctggacgaacaaaaggtcgggacgaccaggcacatcggccgctccaccaaactgggtgattaccgcccacccccgaggcggagcaccagggggagggtggactgattctggatggtgtgaccggagaaggtgcatctatccctcagctggaggtcggcggagatcataagctgccgggcaccgggagaaagctgactccatgcgaaaggccacctgatgatttaaatg

SEQ ID NO: 101951 - DNA, 228 bp, Oryza sativa
  Clone ID: PAT_MRT4530_99521C.1
atgggcgaccacaccacagacccccgcgccgccgagggaggaagaagggtgacctcagcgttgtcgagcccacgctgccgctggagaaaggctgaccttccaccgtcatcgggaggaggagccaccctccaccacgcgaggatgcagccgggactaattgacgagacgacgatggacgctccaccgagcaagcgcgcccgtgtcacgggggcggcgcggcagaggtga

SEQ ID NO: 101952 - DNA, 5322 bp, Oryza sativa
  Clone ID: PAT_MRT4530_99522C.1
atggacatctctaggacaaatgaaggctacacgagctgcggcccggtagtcgagatgtcatggcacagggccggtgtcctgctgctaggggctcagtcgtgcctacctgtcccgggggttccggtcgtaggtggggttgggtcggtactcttgtctatgactaggatgggttggaaactatgtcacgtcttccgtccgtataccgtggtgcagcagccgattcagcagacacccccaattcagcaggttgtgcagccaatccagcaacaggtcatgcaaccagttcagcaaacaccaccaaggcagcagcctctgcagccgattcagcagacgccgttaagacagcaaatcgttcagccggtccagcaccaaggttcaataggtgcatcggccgggtttgcaacgcctggtggtcagcctgtacaacaatttttaaatcaagttgtcccagaacacttggttcaccacgtacagccggatggcacagtaatacctcaagttgttcctgagcatttggtacgtaatatccagccgaaccttcataattaccaagggggtaacttgaattaccaatatcagcctccttccccgcaagcccaatatcagctagggggattggctcaacctcagtttgcgcctcaatatggtcagttcgagcccatgcagcaacagtcacaaggggtagctcagcagcgaccatgggccgatgtgattgctgacgtaatgagggaacagtttgggcttaaaccaaaagagactggaagcttgtatcggcagccttaccctgagtggtttgaaagagttcctcttcccaatcggttcaaagttccggacttctccaaattttcgagacaagatggtgtgtcaacttatgagtacattagccgattcttagctcagtgtggtgaagcatcggctgtggacgctctgaaggttaggttatttcggttatctttgtctggatcggcttttacttggttttcctctttgccgtattggtcgatcaatagctgggccgatttggagaatcaattccacagctatttctacagtggggttcatgagatgaaattatccgacttgacagcgattaagcagcggcatgatgaacctgtgcacgagtatattcagagattcagggagatgaggaacaaatgctttagtttgagtttaactgatgcccagttagccgatctggctttttaggatatgattgctccgattagggagaaattctcgtatgaagactttgatagcttgtcacatctgatacagaaagtaaccttgcatgagcataggtctgcggaagttaggaaaaactctaagaaggttaatcatgtttgtccgtacatgtatgggtcggatgatgacgaggacgattctgaaatagctgcagccaagtgggtgaggagtaaaaaggtcataccatgccaatgggtaaaaagttctggaaaagaggagaagtatgattttgatattactaaagttgacaagatctttgatctgctactccgagaaaagcaaattcaacttcctgctggtcatacaatcccatcggctgaggaattaggcaaaaagaggtattgcaaatggcataattctgggtcccattctactaacaattgcaaggtttttagacagcagattcaggtggccattgagggaggcaagattaggtttgatgattccagaaagccgatgaaggtcgatggtaatccttttcctgttaatatggtgcatacaactggccaaacagccgatagggcccgtgcaaggggttttcgggtgaattaggctaagattatcaacaaatatcagaagaagtatgacaagcagcaggagaagtatcatgagaaatacgatgatagtatgaggttgccatctattgaaaactgccatgggtgtagtgatatcgtcgagaactcaagccgatcatataataggggcaatcggctaaggcagataagagtttatgttcatcaaagattgggtccagtaaatcaagatcatggccaaaaggacaatgtaatcaggaagaatcaatggtgtccttctggtattttcacaaagaatcagaagagaaggaaagcaaagccaaggcaggagtggcgtgttaagaatcaggttcctgcagctgatgatgttgcagctgatgaggcaaaatggttggcaaaagggaaaagtgttgtgacggcaccggttaacatggtatttaccctgccagccgaattcgggatcgaccaagccgatgttgacgaggtggaagaggaatcggctaagttggttctgtcaccagaacaggcagtgttcgagaaacccgaggggacagagaatcggcattttaaaccattgtatataaacggctacgtcaatgggaagccgatgtctaaaatgatggttgatcgtggggctgcggtaaatttgacgccctatgctacgttcaggaagttgggtagaaatgccgaggatctcatcaagacaaacatggtgctcaaagattttggtggcaatccatcagaaaccaaatgtgttctaaatgtggagctgacagtcggcagtaagactattcctaccacgttttttgtcatcgatgggaaaggttcttacagcttgttgcttggaagggattggattcacgccaattgttgcattccttcaactatgcatcaatgtttgattcagtggcaaggcgacaaaatagagatcgtgccagccgacagccaattgaagatggagaacccaagctattattttgagggcgtcgtggagggttcaagtgtttacactacggacacggtagatgatctcgatgacaagcaaggtcaaggtttcatgtcggccaatgatttggaagaagtggacataggtccaaagtttagaaccaagctaatagagctcttaaaagagtttagagattgcttcgcttgggagtattacgagatgcctggactcagctgatcgattgttgaacatcggctacctatcaaaccaggggttaggccatatcaacaacctccgaggagatgcaaggccgacatgcttgaaccggtcaaggctgagattaaaagattatatgatgctggttttattcgtccttgctgatatgctgagtgggtttctagtatagttcctgttatcaagaaaaacagcaaggtcagggtatgcattgatttccgaaatttgaataaggccagaaaatatggtctgaggatgaatccgacaaaatgtgcttttggtgtatcggctggccagtttttgggatttcttgttcatgagagggggatcgaggtaactcaaaggagtgttaatgcgatcaagaagattcagcctccagagaataagacagaattacaagagatgatccgcaagataaattttgttagaaagtttatttctaatttgtctggaaggatagaaccttttacaccattgttgagattgaaagccggtcagcagtttacttggggggcagagcagcaaaaggctttggacaatattaagaaatatcttagctctcctcctgttttgattcctccacagaaaggaataccgtctaggttatatttatcggccggtgagaagtcaatcggctcggtcttgattcaggagttggaagggaaggaacgagttgtattctatctcagtcgtcggctcttggatgctgaaactagatattcccctgtggagaagttatgcttgtgtttgtatttttcgagtacaaggttgaggcattatctactgtccaacgagtgtactgttgtatgcaaggccgatgttgtcaagtacatgctatcggctccaatattgaaaggaagggttggaaattggatattttccttaaccgagtttgatcttcggtatgagtcgccgaaggcgattaagggacaagctatagctgattttattgtggaacatcatgatgattcaatcggctcggttgaaatagtgccatggactttattctttgatggatcggtgtgtactcacggttgtggtatcggcctagttataattttccctaggggggcatgtttcgagtttgcttatactattaaaccgtatgcgactaataatcaagctgagtatgaggcagtgctcaaagggttgcaattactcaaggaagttgaaaccaatgccattgaaatcatgggggattctttgctagtaatcagtcaattggcaggagagtatgaatgcaagaatgatacgttgatggtttataatgagaagtgtcaagacctaatgaaggagtttcgactggttactttaaagcatgtctctcgagaacaaaatattgaagctaatgatttggcccaaggggcatcgggatataagccgatgatcaaagatgttaaggttgaaattgcagcaatgacagccgatgattggaggtatgatgtgcatcagtatttgcataatccgtctcaatcggcttctaagaaattgcgatataaggcattgaagtatactctgttggatgatgagctttattaccggacgattgatggagtgttacttaagtgtttgggtgccgatcaggctaaagttgcaaccggcgaagttcatgaaggaatttgtggtactcatcaatcggctcataagatgaagtggttacttcggcgtgcagggtatttttggctgacaatgctggaggattgtttcagatattatagggggtgtcaagattgtcagaaatttggggcaattcagcgagatccggcatcggctatgaatcctattattaagccatggccattccgaggttggggaattgatatgatcggtatgataaacccaccatcgagtaaatgacataagtttatattggtggcaactgattatttcaccaagtgggtggaggcgattcctttgaagaaagttgattctggggatgcaattcaattcgttcaagaacatataatctaccgatttggtattcctcaaactattataactgatcaggggtcaatcttcgtgtctgacgagtttgttcagtttgccgatagcatgggtatcaaattattgaattcttcaccttattatgcacaagctaatgggcaagccgaggcgtctaataaaagtttgatcaaattgattaagcggaaaatttctgattatcctcgacaatggcatactaggttggccgaagcattgtggtcttataggatggcttgtcatggatcgatccaagtccctccttacaaacttgtttatgggcatgaggctgttttgccatgggaggttagaattggctctcgaagaatggaattactcaatggcaagtatttgaagaaatattacccaagtgtttgggttaacgca

SEQ ID NO: 101953 - DNA, 206 bp, Oryza sativa
  Clone ID: PAT_MRT4530_99523C.1
atgatcttttcacgggataaaataaatatgatacccttggaatactctcgggtgaaatgctacaatggtatatccgtgcgcttgcggatgaactctctaaccataatataccagaagtatttctgcggcattgctggaaattatatttctagtaatgtcgttaagaaataccaacatacggcgagcctatctggaaaatgggggat

SEQ ID NO: 101954 - DNA, 4266 bp, Oryza sativa
  Clone ID: PAT_MRT4530_99524C.1
atggccgagaaacaaccaccaccactatctccagctagcccaggctctgttaaggaaaagatgctgaaattaggatcgactgacgtcaatgaaggaaacgtcgtgccgatcgatccagaaaaattcacacctgagcagaagaaagagtttgaagcaatgttgcagcaagcatgggatcagttcttgaactcattcatgcagacccgcaaggggacacttgttcagaagtacaaaataaaagtggttgctgatgatcctgggaccagttcttctaaggatggagatgggaaacaagctctagacgactcggctcagccgagtaacaaaggtgctaccgacgtctctctaggaaatcaaggcgacaattctcaaggagtccatggaatgcaagctgagcatcaggctgcaggcccagtttatttgcaaggtgtcttcccaaattatcggtctttgatcaccgatgtccagccatctattcaggcggttccctccgttgcaccaacaactcagccaacgacgccgacatcaactcccctacctgctccatcagcgatggcgccaggccagccgcagcagccgattcagcagacacccccaactcagcaggttgtacaaccaatccagcaacaggtcatgcaaccagttcagcaaacaccaccaaggcagcagcctctacagccgattcagcagacgctgttaagacagcaaatcgttcagttgatccagcaccaaggttcaataagcgcatcggccgggtttgcaacgcctggtggtcagcccgtacaacaatttttaaatcaagttgtccaagaacacttggttcaccacgtacagccggatggcacagtaatgcctcaagttgttcctgagcacttggtacgtaatatccagccgaaccttcataattaccaagggggtaacttgaattatcaatatcagcctccttccccgcaagcccaatatcagccagggggattggctcaacctcagtttgcgtctcaatacggtcagttcgagcccatgcagcaacaaggggcagctcagcaacggtcgtgggccgatgtgattgctgacgtaatgagggaacagtttgggcttaaaccaaaagagactagaagcttgtatcggcagccttaccctgagtggtttgagagagttcctcttcccaatcggttcaaagttccggacttctccaaatttttgggacaagatggtgtgtcaacttatgagcacattagccgattcttagctcagtgtggtgaagcatcggctgtagacactctgaaggttaggttattccgattatctttgtctgaatcgacttttacttggttttcctctttgccgtatggatcgatcaatagttgggccgatttggagaagcaattccacagctatttttacagtggggttcatgagatgaaattatctgacttgacagcgtttaagcagcggcatgatgaacctgtgcacgagtatattcagagattcaaggagatgaggaacaaatacttcagcttgagtttaactgatgcccagttagccgatctggcctttcaaggtatgattgctccgattagggagaaattctcgtctgaagactttgatagcttgtcacatctgatacagaaagtaaccttgcatgagcataggtctgcggaagttaggaaaagctctaagaaggttaatcatgtttgtccgtacatgtatgggtcggatgatgatgaggccgattctgaaatagctgcagccaaatgggtgaggagtaaaaatgtcataccatgccaatgggtaaaaagttctggaaaagaagagaagtatgactttgatattactaaagctgacaagatctttgatctgctactccgagagaagcaaattcaacttcctactagtcatacaatcccatcggctgaggaattaggcaaaaagaggtattgcaaatggcataattctggatctcattctactaacgattgcaaggtttttagacagcagattcaggtggccattgagggaggcaagattaggtttgatgattccaaaaagccgatgaagctagccaaacagccgatagggtccgtgcaaggggttttcaagcgaattcggctaagattatcgacaaatatcagaggaagtatgacaagcagtaggagaggcatcatgaagaatacgaagatggttttgatcctcattggggttgtgagttctttagattctgctggaatgaagaatcagaagataagggttcaaagattgaggaacagggagcgccttcaggaggttgaacaagaaattaatcatcggctgaggaaagcaaagccaaggcaggagtggcgtgttaagaatcaggttcctgtagccgatgatgttgcagccgatgaggtgaagaggttggcaaaagggaagagtgttgtgacagcaccggtcaacatggtctttaccttgctagccgaattcgggatcgatcaagccgatgtcaacgaggtggaagaggaatcggctaagttggttctatcaccagaacaggcagtgttcgagaaacccgaggggacagagaatcggcatcttaaaccattgtatataaacggctacgtcaatgggaagccgatgtctaaaatgatggttgatggtggggccgcggtaaatttgatgccttatgctacattcaggaagttgggtagaaatgccgaggatctcatcaagacaaacatggtgctcaaagactttggtggtaatccatcggaaaccaaaggtgttctgaatgtggagctgacagtcggcagtaagactattcctactacgttttttgtcatcgatgggaagggttcttacagcttgttgcttggaagggattggattcatgctaattgttgcattccttcaactatgcatcaatgtttgattcaatggcaaggcgacaagatagagatcgtgccagccgacagccaattgaagatggagaacccaagctattattttgagggcgtcgtggagggttcaaatgtctacaataaggatacagtagatgatctcaatgacaagcaagttccagttattaagaagaatggcaaggtcagggtgtgcattgatttccgagatctgaataaagctacaccgaaggacgaatacccaatgccagtagccgatcagctggttgatgctgcatcagggaacaaaattttgagttttatagatggaaacgcaggatataatcaaatctttatgactgaagaagatatgcataagacagcttttagatgccctggtgcaatcggcttatttgaatgggttgtcatgactttcggcttgaagagtgctggagctacatatcaaagagccatgaattacatatatcatgatttaatcggctggttggttgaagtctacatcgatgatgtggttgttaagtctaaagaaatagaggaccatatagccgatttgaggaaggttttcgagagaaccagaaaatatggcctgaagatgaacccgacaaaatgtgcttttggtgtatcggctggccagttttgggatttcttgttcatgaaagagggatcgaggttgaggcattatctactatccaacgagtgtactgttatatgcaaagccgacgttgtcaagtacatgctatcggctccaatattgaaaggaagggttggaaagtggatattttccttaaccgagtttgatcatcggtatgagtcgctgaaggcgattaagggacaagctatagccgattttattgtggaacatcgtgatgattcaatcggctcggttgaaatagtgccatggactttattctttgatggatcggtgtgtactcatggttgtggtatcggtctggttataatttcccctaggggggcttatttcgagtttgcttatactattaaaccgtatgcgactaataatcaagctgagtatgaagcagtgctcaaagggttgcaattactcaagaaagttgaagccgaaaccattgaaatcatgggggattctctgctagtaatcagtcaattggcaggagagtatgaatgcaagaatgatacattgatggtttataatgagaagtgccaagaactaaagaaggagtttcggctggttactttaaagcatgtctctcgagaacaaaatattgaagctaatgatttggcccatggggcatcggggtataagccgatgatcaaagatgttaaagttgaaattgcagcaatgacagccgatgattggaggtatgatgtgcatcagtgttcgttcaagaacatataa

SEQ ID NO: 101955 - DNA, 568 bp, Oryza sativa
  Clone ID: PAT_MRT4530_99525C.1
gcgagaagaagctccgcctcgtcatgggcctccccgacggatcggccaagggagaaaagacgaggaaagcgacggatgggagtgaagagccgtcagattccgggcccacgacacctttgccggacaaaaagttgttagtcttcgtccttgataggctgcagaagaaggacacatatggtgtattctctgaccctgttgaccccgaagagctgcctgattaccatgatattatcaagcatccaatggatttttcaacaattcggaagaagctcaataaaggggcttatggcaacttggagcaatttgaggatgatgtattcttgttaacctcaaatgcgatgtgctacaattcaccagatacaatatactatcgacaggcacgggcgatccaagagcttgccaagaaggactttgagaaccttaggcaggatagtgatgcaagtgagccagaaccagaaccggaaattaaaccagatcctgaaccaaagccacaaccacggaggggcaggcctccaaataagaacactatcaaacagaaagttgggaagccaccggtagaacgcgctac

SEQ ID NO: 101956 - DNA, 2196 bp, Oryza sativa
  Clone ID: PAT_MRT4530_99526C.1
atgaatcaagatcgtggccaagaggatgaggaggttgaagagggaatcaaccatcggctgaggaaaccaaaaccaagacaggagtggtgtgtcgagaatcaggttcccatagccgatgatgctgcagctgatgaggcagtattcgagaaacccgaggggacagagaatcggcatcttaaaccattgtatataaacggctacgtcaatgggaagccgatgtctaagatgatggtcgatggtggggccgcggtgaatttgatgccttatgctacgttcaggaagctgggtaggaacgccgaggatctcatcaagacgaatatggtgttcaaagacttcggtggtaatccatcggagaccaaagatgttctaaatgtggagctgacagtcggcagcaagactattcctaccacgttttttgtcatcgatgggaaggccagcagccaatcgaagatggagaacccaagctattactttgagggcgtcgtggagggctcgattgtctatgctaaggatacagtagatgatctcgatgacaagcaaggtcaaggttttatgtcgaccgatgatttggaagaaatagacataggatataatcagatctttatggctgaggaagatatctataagacagcttttagatgtcccggtgcaatcggcttatttgaatgggtcgtcatgactttcggcttgaagagtgctggagcaacatatcaaagggccatgaattatatatatcatgatttaatcggctggttggttgaagtctatattgacgatgtggttgttaaatctaaagaagtggaggaccacatagccgatttaaggaaagtttttgagagaaccagaaagtatggcttgaagatgaacctgacaaaatgtgcctttggtgtgtcggctggccaatttttgggatttcttgttcatgaaagggggatcgaggctgagtatgaagcagtgctcaaggggttgcaattacttaaggaggttgaagccgataccattgaaatcatgggggattctttgctgcatgtatctcgagaacaaaatcttgaagctaatgatttggcccaaggggcatcgaggtataagccgatgatcaaagatgttaaagttgagattgcagcaatgtcagccgatgattggaggtatgatgtgcatcagtatttgagtaatccatctcaatcggcttctaggaaattacgatataaggcattgaactatacactgttggatgatgagctttattatcggacgattgatggggtattacttaagtgcttgagtgccgatcaggccaaggttgcaatcggtgaagttcatgaagggatctgtggtactcatcaatcggctcacaagatgaagtggttgcttcggcgtgcagggtacttttggccgacaatgctggaagatttattcagatattataaggggtgtcaggattgtcagaagtttggagcaattcagcgagcaccggcgtcggctatgaatcctattattaaaccatggcaatttagaggttcaatcttcgtgtccgatgagtttattcagtttgccgatagcgtgggtatcaagttgttgaattcttcaccttattatgcacaagctaatgggcaagccgaggcatctaataagagtttgattaagttgatcaagcggaagatttctgattatcctcggcaatggcatactcgattggccgaagcattatggtcttataggatggcttgtcatggatcgatccaagttcctccttacaaacctgtttatggacatgaggctgttttaccatgggaagttagaatcggctctcgacgaacggagttgcaaaacgatttcacagcagatgagtattacaatcttatggctgatgagagggaggatttggttcagtcacgattgcgagcccttgcgaaggttactaaggataaggaacgtgttgctcggcattataataagaaagttgtacctaaagatttttcggaaggtgaacttgtatggaagctgattttgccgattggtactcatgatagtaaatttagcaagtggttgccgaattgggagggaccgttccaaattcataagtttgtgtctaagggggcatatatgttgcaagggcttgatggtgaagtttacgggcgagcgctcaatggcaaatacttgaagaaatattacccaagtgtgtgggttaacgcatga

SEQ ID NO: 101957 - DNA, 402 bp, Oryza sativa
  Clone ID: PAT_MRT4530_99527C.1
atggcctcgtcgtcggcggcgcctccgcgcaaggatagggctgccgccgccgccgtgctccccgccatggatggagagatcaatcgagaggagcgccttagatgccaccgcggggttcgtttcgctcctcgccgtgcaccgcttcgcagccgccaagtcgctactcgcctcccgcatcacgccccgcctactcgccgtccccttcaccgacctggccgccgcggcacgccggcgcggactcgggcgccaccgctcgcgccgctgctccggcgagctggccacctcgacaccgctgacgacgaatcccgccgctcggcctcgtcggcggcggcggctccgagtaggcacagctccccgatgctaggcacggctcccctcgccgccggtggaagggagagataa

SEQ ID NO: 101958 - DNA, 456 bp, Oryza sativa
  Clone ID: PAT_MRT4530_99528C.1
atggtgagggccgggactatattcagggaggaacaaaggtctagtgcggtcgggataccatgtgagaaggtgactagagtccggattcttagaggtcaacttcggtcaacggtggggatcgggactaaactcatagaggagttgaggttcagacggttaaggataccgggtgacgaagttggatacgagatggcacatggcggcagcaaggtggttcaactggcagcgtgtgagcaatccgaccggcagcaacaggactacgtcgagatttccatcgatttgaggcaccaccgccgcctttacctccctttagaaatggcagagggaggacgtcgccaccgggtcgctaggctgccgccaccgcccttcccgtcgtcagatctggtggaggggagggcgtgccaccgggccgtcactgccaccactgggccgccaccacctccgtcgggccgctga

SEQ ID NO: 101959 - DNA, 1851 bp, Oryza sativa
  Clone ID: PAT_MRT4530_99529C.1
atgtcggcgccaccgcggaagcggaagaagaaggggcggccctccctcctcgacctccagaagcggaccctccgcctcgagaagctgcaggagccgccgccgccgccaccgcccccgcagccgcggcggtccacgcggaggaaccccgccggcgtcgactccggcgacgaggggacggcacccggcggccgccgcgagaagaagctccgcctcgtcatgggcctccccgacggatcggccaagggagaaaagacgaggaaagcgacggatgggagtgaagagccgtcagattccgggcccacgacacctttgccggacaaaaagttgttagtcttcgtccttgataggctgcagaagaaggacacatatggtgtattctctgaccctgttgaccccgaagagctgcctgattaccatgatattatcaagcatccaatggatttttcaacaattcggaagaagctcaataaaggggcttatggcaacttggagcaatttgaggtcagtgtcagagcgtatggtgatttttgttggcctttcctgtgctgtttcgattttccttcgttaacagtcagtacatattcaagtcacactcaaaagaaatcacaagtacttaatatgaaaatgctgctaagtgctaacacatcaactgttataaagtgtgttgagcctcaggatgatgtattcttgttaacctcaaatgcgatgtgctacaattcaccagatacaatatactatcgacaggcacgggcgatccaagagcttgccaagaaggactttgagaaccttaggcaggatagtgatgcaagtgagccagaaccagaaccggaaattaaaccagatcctgaaccaaagccacaaccacggaggggcaggcctccaaataagaacactatcaaacagaaagttgggaagccaccggtagaacgcgctactgcagacttttctggagcaacactcgctagtgttggaaataatggacatcgtacgcagccaccatttgatctgcaacggcaagtaatgaatggatcctttatcgcagatgtactgagagcttcttttgccagtcgaaataatggatacaattggtctaacgagcgcaaattggaaagaattgaagattactcagggtctatcggtaaatggtcagcaaaaagtgggagaaaaccaattctgacagaagaaagtagccgaagcacttattgtcagcctcaaccttcgagttcaatatatgagctgccggttggggttcagttgcagcagtcctatccccgcagcttggcacgttttgctgcgcagctaggtcctgtcgcttgggagattgcgtccaaacgaattgaacgtgcccttcccccaggaacaaagtttggccgtgggtgggtaggagacggtgaagcaccgaacgcaactcagccaccagtgcttactacatcttcaacagccttgatacacccaagtagtacagaaacatcaagtgaacagccaactcataacggtacggccagcacaagccattcagcaggacctcagccatcttccgcaccatatgcctcttctacaatcacaactcatagggtcaattgtcagtcattaccaagccagcaacacggatcagtgccacaggtttcagcagaaagaggtgaacatggtgctgaggtgaagggcaaccataataatcttcatgaacggccagccattcagcacactgttaatggcttcagtgctgtttcagagaagggtattttttacccggtctctatatccaaccggatatatacggccattgaaataggaaacttagccccacaaacaacccaatctgaaattcgctccatagaagatttgaactaa

SEQ ID NO: 101960 - DNA, 1158 bp, Oryza sativa
  Clone ID: PAT_MRT4530_9952C.1
atgtccatgaccataattcacataaccaaacactcttgtcaattgcgtggtagtttgcatggcttagctctagagccactctccggggccatagcggccggcaacgccgttgttctgaagccctccgagtttgcaccgtcaaccgccgcgttcctcgccgccaacataccgaagtatctggacgccaatgccgtgaaggtcgtacagggcggggcggaggtaggagaggagctcatggagcacagatgggacaaggtccttttcaccgggaatgctcgtgtagggcgcatcattatgacgaaagcagcgaaacacctgacgccggtcgcgcttgagcttggctcgaaatgcccgtgcatcgttgactgccttgacagtaagagggagtgtcagattgaactgcttaaatctacactcaagaggttctttaccgaaccagagtacatggcgcgcatcctgaacgagaagcatttccataggttgacaaaccttctagaggatgatcaagtgaaatcctccattgtgcacggcggcaacgctgaccccaagacactgtggatcgagcccaccatcgtgctgaatccaccgttcgactccgacatcatgatggaggagatattcgggccactgctcccaatcataacggtaaagaaaacagaggattgcatcgcgttcttgaaatcgaagcccaaaccgcttgccatctacgccttcaccaacaacgagaagttgaaacagcggatcgtcgcagaaacgtcctccgggagcgtcttgttcaacgacgcgattgtgcagcggcgtgcgcacgacgcgccctctggaaggaaggaggcggttggctcagctgggccacggcctggctgggccgtgttagggagaaaagaccggaaggacccaaacaggaagtacgggctggacagcgtcccgttcggcgggatcggggagagcgggttcgggcagtaccacggcaagtacacgttcgagctgttcagccacaggaaggcggtggtcaggaggagcctcctggtcgagttcatgttcagatacccgccttgggacgagtacaagatggggatgttgcgccgcgtcttcaggttcgactacgtctcgctcgtgcttgcgctgctcgccttttggctgctcggcataaggcgatga

SEQ ID NO: 101961 - DNA, 5446 bp, Oryza sativa
  Clone ID: PAT_MRT4530_99530C.1
atgatgcagcaagcacggaaccagtttttaagctcatttatgcaaactcgcaagggaatagtggtgcagaagtataaggtaaaggttgtcgctgatgttcctgggactggttcttctaaggatggagaggtgaaacaagctctagatggctcggctcaaccgagtgataaaggtgctacaaatggttctcaaggaaatcaaggtgacaactctcaaggagtacagggagttcaaggtgatggtgctcagggagttcaaggtggaggtgttaatcaagacagcaatacaacacagttgcagttcaacaacttccaagatcaggttgactatgctgtacaccatgctttgatcaatcaatctggaatattaaccaatactttggcaaacatggtgaaatcaatggttgatggttcaatggctgagtataaagctacaggaccagtttatatactaggaggagtgttcccaaattataggccattaatcactgacaatcaaccagttgtccagtcaatccctctcaatgcaccatcggctcagccgacggcaccaataccggctcatgcacctgctgcaccgtcatcggcgccaggccaattagttaatcctcggttggttcttatctccccaacacactgctgatccaacccagcagtagctgattcagcaaacgccaccaaggcagcaggttgtgcagccgacccaaaaaacacccccaatccaacaggtcgtacaaccagttcagcagacgcaggggggcaatttgagttatcagtatcagccgccatccccgcaagttcaataccagtaggcaggatcggctcaaccccagtttgttcctcaatacaatcaattcgagcccatgacacagcaacctcaaggaacacctcagcaacgaccatggaccgatatgattgcggatgtcatgaaggagcagtttgggcttaggccgaaagatgctggaaatttgtatcgacaaccttaccctgaatggtttgagagtgttcctctacctaatcggttcaaagttccagatttttcaaaattctcaagacaagatagtacttcaacatacaaacttgttagccgattcttagctcagtgtggtgaagcatcggctgtggatgccttgagggttaggttgttccggttgtctttgtctggatcagctttcacttggttttcttctttgccatatgggtcgattaacagttgggccggttgggagaaacattttcacagatatttctatagtggggtacatgagatgaaattatccgatttaacagcaatcaagcagagacatgatgagcctgtgcatgcgtatattcagaggttcagagaaatgaggaataagtgctacagcttaagtttgactgatgcccagttagccgatttggcatttcagggtatgattgctccaatcagggagaaattctcatctgaagacttcgaaagcttgtcgcatcttacacagaaggtaaccttgcatgaacaaaggtttgcagaggctaggaagaattatagaaaggttaatcatgtctgtctttatatatatggatcggatgatgaagatgatgattctgagatagctgcagccgaatgggtaaggagcaaaaagattataccatgccaatgggtgaagaattctagaaaaaaagaaaggtatgactttgatatcaccaaggctaacaagatttttgacttgctactccgagagaagcagattcaacttcctgctggtcacacaattccatcggccgaagaattgggcaagaaaaggtattgcaagtggcataattctgggtctcatactactaatgattgcaaggtcttcaggcagcagatccaggcagctattgaaggaggcaaaatcaagtttgacgattctaagaggccgatgaaggttgatggtaatccttttcttgtcaatatggtgcatacagttggccaaacagccgatgggggtcgtgcaagaggttttcaggtgaattcggctaagattattaacaaatatcagaagaagtatgacaaacagcaggaaaagcattatgaagaggatggtgatggctttgatcctcattggggttgtgagttctttagattttgttggaatgagggtatgaggctgccgtctattgaagactgtcctaggtgcggtgatattgtggagagctcaagccgatcttgtagtaggggcaatcggctaaggcaaacaagagttcctgttcatcaaagattaggtccagtgaatcaagattgtagccaggaggaaaatgaaaataggaaaactcaatggtctccttctggtatctttacaaagaatcagaaaagaagggttcaaagattgaggaacagggagtgctttcaggaagtcgagcaggaaatcaatcatcggctgaagaaaacaaagccgaagcaggagtggcatgttaagaatcaagctcctgtagccgatgaggccacggccgatgaagcaaaaagattggctaagggaaaaagtgttgtgactgcatcggttaacatggttttcacgttgcctgccgaatttggggtcaagcaagccgatgtcgatgaagttgaagaggaatcggctaaattaattttgtcaccagagcaggcagttttcgagacgacagaggggacggagaatcgattatatataaatggttatgtcaatgggaagccgatgtccaagatgatggtcgatggtggggctgcagtaaatttgatgccttatgctacatataggaaattgggcagaaacgctgaggatctcatcaagacaaacatggtgctcaagcactttggtggcaatccatcagaaaccaaaggagttttgaatgtggaactaatagtcggcaacaaaaccatccctacaatattctttgtcatcgatgggaagggttcttactgcttgttgcttggaagggattggattcatgccaattgttgtattccttcaaccatgcatcaatgcttgattcagtggcaaggcgacaagattgaaatcgtgccagccgacagctattattttgagggcgtcgtggagggttcaaatgtctacaacaaggacacagtagatgatctcgatgacaagcaaggacagggttttatgtcggccgatgatttggaagaaattgatataggtccaggtgatcgaccaaggccgacatttattactaagaatttatctgcagaatttagaatcaagttgatagaactgttgaaagaattcagagattgcttcgcttgggagtattatgagatgcctggactcagtcgatcgattgttgaacatcggctacctatcaaaccaggggttaggccacaccaacaacctccgagaagatgtaaagccgatatgcttgaacctgtcaaggatgagattaagcgattatatgatgctggttttattcgtccttgccgatatgctgaatgggtttctagtatagttcctgttatcaagaagaacgacaaggtcaaggtgtgcattgatttccgaaacttgaataagggtaccccaaaagacgaatacccaatgccagtggccgatcagctggttgatgctgcctcggggcataagattttgagttttatgggtggtaatgcaggatacaatcaaatctttatggccgaagaagatatccataagacagcttttaggtgtcctggtgcaatcggcttgtttgaatgggttgtaatgactttcggcttaaagagtgctgaggctacatatcagagagccatgaattatatatatcatgatctaatcgtctggttggttgaggtctacattgatgatgtggttgttaagtctaaagagatagaggaccacatagccgatttgaggatggtttttgagagaaccaggaaatatggcttgaagatgaacccgacaaagtgtgcttttggcgtatcggctggccagtttttgggatttcttgttcatgagaggggaattgaggtaacccaaaggagtgttaatgcgatcaagaagattcagcctccggagaacaaagacggaattgcaagagatgatcgccaagataattttgttagaaagttcatttctaatttgtctggtaggttaaggcattatctattgtccaatgaatgcactgtcatatgcaaggccgatgttgtcaaatacatgttatcggccccgattttgaaaggaagggttggaaagtggatattttccttaactgagtttgattatcggtatgagtcgccgaaggcgattaaaggacaagctatagccgattttattgtagagcatcgagatgattcaatcggcttggttgaggttgtgccatggactttattgtttggtgggtcaggggcaagttttgaatttgcttatactatcaaaccttatgtgaccaataatcaagctgagtataaggcagtgctcaaaggattgcagttactcaaggaagttgaagccgatgctattgaaatcatagggaattctttgctgggtatttttggccaacaatgctggaagattgtttcagatactacaaagggtgtcaagattgccagaaatttggggcaattcagttgggggattgatatgatcggcatgattaatccaccatcgagtaaaggacataagtttatattggtggcgatcgactatttcaccaagtgggtagaggcgattcctttgaagaaagttgattctggggacgctgtacaatttgttcaagaacatataatttatcgatttggtatccctcaaacccttacaactgatcaaggttcaattttcgtgtccgatgagtttgttcagtttgccgatagcatgggtatcaaattgttgaattcttcaccatattatgcacaagctaatgggcaggtcgaggcatctaacaagagcttaatcaaattgatcaagagaaagatttccgatcatcctcggcagtggcatactcggttggccgaagcattgcggtcttatcggatggcttgtcatggatcgatccatgtccctccttataagcttgtttacggacatgaagctgttttgccatgggaggttagaatcggctcaaggagaactgagttgcaagataatttaacagccgatgagtattataaccttatggctgatgaaagggaagacttggttcaatctagattaagagcccttgcgaaggttaccaaggataaagaacgggttgctcggcattacaacaagaaagtggtacccaaagatttttcagaaggggaacttgtatggaagttgattttgccgattggaactcgagatagcaaattcggcaagtggtcgccgaattgggaaggaccgtttcaaatttataaagttgtatctaaaggagcttacctgttgcaaggactcgatggagaagtttatggcagagcactaaatggcaaatacttgaagaaatattacccaagtgtttgggttaatgcatga

SEQ ID NO: 101962 - DNA, 6345 bp, Oryza sativa
  Clone ID: PAT_MRT4530_99531C.1
ttgcaggatcaaatcaactggcatgctagcatacctaaaggcaagttttggacctgcactggagttaagcagatcccccaggcctcgtgtttttcatcaacatgcttttggcacgcctggtgggacctattaggagtcagaagtcttttctcatggacgacaagccgccagcatcgctgtcctcggctagccctggttctgttaaagagaagattcagcagttgggcctatccgaggttaatgaaagcaacatcgtgaccatcactccagacaagctgacacccgatcaaaagaaggattttgaagcgatgatgcagcaagcagggaaccagttcttaagttcatttatgcaatcccgtaaaggaacagtggtgcaaaagtacaaggtgaaagtagtggcagatgtccctgggaccggttcttctaaggatggagaggtgaaacaagctccagatggctcagctcaaccgagtgacaaaggtgctgcagatggttctcaaggaaatcagggtgataactctcaaggagtaaagggagttcaaggtgatggtgctcagggagttcaagatcaggttgactatgttgtacaccatgctttgatcaatcaatctggaatattaaccaatactttggcaaacatggtgaagtcaatggttgatggttcaatggccgagtatcaagctacaggaccagtctacttaccaggaggggtgttcccgaattatcggccattaatcaccaataatcaaccagttgtccagtcgatccctcttaccatcggctcagtcgacggcaccattaccagctcctgcacctgctgcaccaccttcggctccaggccaattggttaacccccgattgttggtgaaagaacaaccacaacacagtggacagaatatgaatcggctaacgcaagaccaggttgcatctatgttcttacctcctcaacatgccattgatctaacccagcaacagccaattcagcaaacaccgccaaggcagcaggttgtgcagccaagtttgcgatacctggtggtcagcctgtgcagcatgctgcaaagcaagttgtcccggagcacttggttcatcacgtacaaccagatgtcacgatgtcatgaaggagcaatttgggcttaggccgaaagattctggaaatttatatcgacagccatatcctgaatggtttaagagagttcctctccctaaccggttcaaagttctagatttttcaaagttctcacggcaagatagcacatcagcttatgagcatgttagccgatttttagctcagtgtggtgaagcatcggctgtggatgccttgagggttaggttgttccggttgtctttgtctggatcggctttcacttggttttcttctttaccgtatgggtcgattaacagttgggccaatttggagaagcattttcacagctatttctacagtggggtacatgagatgaaattatccgatttgacagcaatcaagcaaagacatgatgagcctgtgcatgagtatattcagaggttcagagaaatgagtaataagtgctacaacttaagcttgactgatgcccagttagccgatttggctttttcagggtatgattgctccaatcagggagaaattctcatctgaagattttgaaagcttgtcgcatcttacacagaaggtaaccttgcatgaacagaggtttgcagaggctaggaagaattctagaaaggttaatcatgtctgtccttatatatatggatcggatgatgaggatgatgactctgagatagctgccgccgaatgggtacggagcaaaaaggttataccatgccaatgggtgaagaactcagggaaagaggagaggtatgactttaatatcaccaaggctgacaaaatttttgacttgctactccgagaaaagcagattcaacttcctaccggtcatacaattccatcggctgaagaaattgggcaagaaaaggtattgcaagtggcataattctgtgtctcatactactaatgattgcaaggtcttcaggtagcagatccaagcagctattgaaggaggcaaaatcatgtttgatgattctaagaggccgatgaaagttgatggcaatccttttcctatcaatatggtgcatacaactagccgaatagccgatgggggtcgtgcaagaggttttcaggcaaattcggctaagattatcaacaaatatcagaggaagtatgataaacagcaggtgaagtattatgaagaagatgatgatggtatgaggctgccatctattaaggactgtcctgggtacagtgatactgcggagagctcaagccgatcatatagtaggggcaatcggctaaggcagacaagggttcctgttcatcaaagattgggtccagtaaaccaagatcgtagccgggaggacaacgaaacaagaaaactcaatggtgtccttctagtatctttacaaagaatcagaagagaaggaagacaaagccgaagcaggagtgacgtgttaagaatcaagttcttgtagacgatgaagccacagccgatgaagcaagaagattggctaaaggaaaaagtgttgtaactgcttcagtcaatatggttttcacgttgcctgccgagtttgggatcaatcaagccgatgacgatgaagttgaagaagaatcagccaaattaattttatcgccagagcaggcagttttcgagaagccagaggatacggagaatcggcatcttaagccattctatataaatggttatgttaatgggaagccgatgtccaaaatgatggtcgatggtgcagtaaacttgatgccttacactatgttcaggaagctgggtaggaacgccgaagatctcatcaagacaaacatggtgctcaaggactttggcggcaatccatcggaaaccgaaggagttttgaatgtggagctgacagtcggcaacaaaaccatccctacaacgttctttatcatcgatgggaagggttcctacagcttgttgcttggaagggattggattcatgccaattgttgtattccttcaaccatgcattaatgcttgattcagtggcaaggcgacaagattgaaattgtgccagccgacaaccaattgaagatggagaacccaagctattattttgagggcatcgtggagggttcaaatgtctacaccaaggacacagtagatgatcttgatgacaaacaaggacagggtttcatgtcgggtgatgatttggaagaaattgatataggtccagaatttagaaccaagttgatagagctgttgaaagaattcagagattgcttcgcttgggagtattatgaaatgcctggactcagctgatcgattgttgaacatcgtctacccatcaaaccaggggttaggccacaccaacaaccaccgagaagatgtaaagccgatacgcttgaacctgtcaaggctgagatcaaacgattgtatgatgctagttttattcgtccttgccgatatgatgaatgggtttctagtatagttcctgttatcaagaaaaacgacttgaataaagctaccccgaaggacgagtacccaatgccggtagccgatcagctggttgatgctgcgtcagggcacaaggttttttagttttatggatggaaatgcaggatacaatcagatctttatggctgaagaagatatccataagatagcttttaggtgtcctggtgcaatcggcttgtttgaatgggttgtgatgactttcggcttaaagagtgctggggctacatatcaaagagacatgaattatatatatcatgatctaatcgactggttggttgaagtctacattggtgatgtggttgttaaatctaaagagatagaggaccacatagccgatttgagaaagatttttgagagaaccaggaaatatggcctaaagatgaacccgacaaagtgtgctttcggtgtatcggctggccagtttttgggatttcttgttcacgagaggggaatcgaggtaactcaaaggagtgttaatgcaatcaagaagattcagcctccggagagcaagacagaattgcaagagattatcggcaagataaattttgttagaaggtttatttctaatttgtctggaagattagagccttttacaccattgttgagattgaaagccgatcaacagtttacttggggggcagagcaacagaaagcgttggacgatattaaggaatatcgtagctctcctccagttttgattcctccatagaaggggataccttttcagctatatctgtcagccggtaagaagtcaatcggttcgatcttgattcaggagcttgaagggaaagagagagttgtgttttatctaagtcattggctcttggatgcagaaactagatattcccccgtggagaagttatgcttgtgcttatatttttcatgtacaaggttaaggcattatctattgtccaatgaatgcactgtcatatgcaaggccgatgttgttaaatacatgttatcggctccaattttgaaaggaagggttggaaagtggatattttccttaactgagtttgatcttcagtatggatcgccgaaggcgattaaaggacaagctatagccgattttactgtagaacatcgtgatgattcaatcggctcggttgagattatgccatggactttattatttgatggatcagtatacactcatggttgtggcatcggcttggttataatttcccctcggggggcatgttttgagtttgcttatactattaaaccttatgcaaccaacaatcaagctgagtatgaggcagttcttaaagggttgcagttattcaaggaagttgaagccgatgctattgaaattatgggggattctttgctagtgatcagtcaattgacacgagaatatgagtgcaagaatgatacattaatggtttataatgagaagtactgagagttgatgaaggagtttcggctagtaactctgaggcatgtatctcgagaacaaaatattgaagctaatgatttggcccaaggggcatcggggtataagccgatgatcaaagatatcagggttaaggttgctgcattaacagccgatgattggaggtatgatgtacatcaatatttacaaaatacatctcagtcggcttctcggaaattgagatataaagcgttgaagtatactttattggatgatgagctctattatcggacgattgatggaatgttgcttaagtgtttgagtgccgatcaggctaaagttgcgatcggcgaagttcatgaagggatttgtggtactcatcaatcggctcataaaatgaagtggttgcttcggcgtgcagggtatttttggccgacaatgctggaagattgtttcaggtattacaaaggatgtcaagattctcagaaatttggagcaattcagcgagcaccagcgtcggctatgaatcctttcattaaaccatggccattcagaggttggggaattgatatgatcgacatgattaatccaccatcgagtaaaggacataagtttatattggtggcgactgattatttcaccaaatgggtagaggcgattcatttgaataaggttgattctggggatgcgatacggtttgttcaagagcatataatctaccgatttggtattcctcaaaccattacaactgatcagggttcaattttcgtgcccgatgagtttgttcaatttgctgatagtatgggaatcaaactgttaaattcttcaccgtattatgcacaagctaatgggcaagcgaggcatctaacaaaagcttgatcaagttgattaagaggaagatttctgattatcctcggcaatggcatactcggttggtcgaggcattgtggtcttatcggatggcttgttatggatcgatccaagtccctccttataagcttgtttacggacatgaagctgttttgccatgggaggttagaatcggctcaaggagaactgagtgcaagataatttaacaaccgataagtattataaccttatggctaatgaaagggaagacttggttcaatccagattaagagcccttgcaaaggttaccaaggataaagagcgaattgctcgacactataacaagaaagtggtgcccaaggatttttcggaaggtgaacttgtatggaagttgattttgccgattggaactcgggtagcaaatttggcaagtggtcgccaaattgggaaggaccgttccaaattcataaagtggtgtctaaaggagcttacatgttgcaaggacttgatggggaagtctatggcagagcattgaatggcaaatacttgaagaaatattacccaagtgtttgggttaatgca

SEQ ID NO: 101963 - DNA, 2367 bp, Oryza sativa
  Clone ID: PAT_MRT4530_99532C.1
atgcaccaatgcttgattcaatggcaaggcgacaaggttgagattgtaccagccgacagccgattgaagatgaagaacccaagctattattttgagggcgtcgtggagggttcaagcgtctacgccaaggacacggtagatgatctcgatgacaagcaagaatttagaaccaagctgatggagcttttgaaagagtttagagattgctttgcttgggagtattatgagatgccaggactcagccgatcgatcgtcgagcatcgattacctttaaagccagggattagaccacaccagcagcctccgagaagatgcaaagccgatatgcttgaacctgtcaaggctgaaatcaaacgtttgtatgatgctggttttattcgtccttaccgatatgctgaatgggtttctggtatagttcctgttatcaagaaaaatggtaaggtgagggtttgcattgatttcagggatttgaataaagctaccccaaaggatgaatatccgatgccagtggccgatcagttggttgatgctgcttcaggacataagatactaagttttatggatgggaacgcaggatataatcaaatctttatggccgaagaagatatccataagacagccttcagaaaactggaaccttttacaccattgttaagattgagagctgatcagcaattcacttggggggcaaaacaacagaaagctttggataatattaaagaatatttaagttctcctccagtattgatccctccacaaaaagggattcctttccggttatatttgtcggccggtgataagtcaatcggcttggtcttgattcaggaacttgaaggaaaagagagggttgtgttttatttaagccgtcggctcttagatgcagaaacaagtcatggttatggtatcggcttggttataattgcgccttggggggcaagttttgaatttgcctatgctatcaaacaccgtgtgactaatcatcaggctgagtatgaggcggtcttaaaagggttacagttgcttcaggaagttgcagccgatgctattgaaatcatgggtgattcgttgttggtgattagtcaattggcaggggagtatgaatgcaaggatgatacattgatggtttattatgaaaagtgccgaacgttgataagtgaatttaggatggtgactttgaagcacatatatcgagaacagaatatagaggctaatgatttggctcaaagagcgtcgggatataagccaatgacaaaagatatcgagatagagattgctacaattacagccgatgattggagatatgatgtgtttcagtatttacagaatccatctcaatcggcttcgcagaaattgcgttataaggccttgaaatatactttattggatgatgacctctattatcggatgattgatggagtgttgcttaaatgtttgagtgccgatcaggcaaaagttgcaatcggcgaagttcatgaagggatatgtggttggggaattgatatgatcggtatgattaatccaccctcgagtaaaggacataagtttatattggtagcaaccgattattttaccaagtgggtagaggctattcctttaaagaaagttgattctggggatgctatacagttcgttcaagagcatataatctatcgatttggtatccctcaaactattacgactgatcaaggttcaatttttgtatccaatgaatttgttcagtttgtcgatagtatgggaattaaaatgttgaattcttcaccgtattatgcacaagttaatgggcaggccgaggcatctaataagagtttgatcaagttgattaagaggaagatttctgattatcctcggcaatggcatactcgactggctgaagcattgtggtcttatcggatgtcttgtcatggatcgatacaggttcctccttatgaacttgtttatggtcatgaggctgttttaccatgggaagttcggatcggctcgaggagaacagagttgcaaaatactttaacagccaatgagtattataaccttatggccgatgaaagggaagatctggttcaatcacggctacgagcccttgcaaaggttactagggataaggagcgagttgcccggcattataataagaaagtagtacctaaggacttttcggaaggtgaacttgtatggaagttgattctgccgattgggactcgggatagcaaattcggcaagtggtcgccgaattgggaaggaccgttccaaattcataaggtggtgtttaagggagcatacatgttgcaaggactagatggagaagtttatggccgagctctaaatggcaaatacttgaagaagtattatcccagtgtttgggttaatgcatga

SEQ ID NO: 101964 - DNA, 156 bp, Oryza sativa
  Clone ID: PAT_MRT4530_99533C.1
atggcgccccgcccgaggcttgctcctgcacacgaccgcactctaggatcgcagccgcaaccacctaccgcgcacacgcgccgcaccaaggtgaccaaccgttcgacggcggtgaaagctaatcacgagccacacacacaagcatccgaagagtaa

SEQ ID NO: 101965 - DNA, 540 bp, Oryza sativa
  Clone ID: PAT_MRT4530_99534C.1
atgggaagctcaaggagtgaggggtcgtcgtcgtcttcggccaggcaaccgtatggctcgcctattccctatcgcgttggtccgttcgagtacgaaccagcggtgctgtgtcggtgcgaactgaaggcggcgaggtggatatcttggagcgtcgacaaccctggtcgtcggtatttcaagtgccgcaatgctcggaaagggggctgcgatttttatgcttggcatgatggcccgacaagcagctttccgagggaggtgttgaatgatttgcgaggtgctgtgcattctctgaggagggagaaggcagatgcagtgaaggaggttgaggaacttcgtgtgaagtctgaagagcaatgcagggagtttgcttcagttgggagggagttggcttcagtgagggagttggttagtgagttggatgtgaaaaatgctgttttaattgatagcaaatgtaggttagagaaggagcgaactgtgctcatttggtgcatcctgtcatgtatgtgtgttgttattctattagtgctgggcaagaactga

SEQ ID NO: 101966 - DNA, 363 bp, Oryza sativa
  Clone ID: PAT_MRT4530_99535C.1
atggcggggcatactgcctcacagctggctatggagcacgcccaacttcccggcaagtttggcaatcctcggatgagtttctcgaagatgtcgttgataaatgggtaccctggtttccatttcaccgacagcaggtacgacgtttgcacggacaggtgggcgatcaggtttttggggagtgcaaggcgcgactactcactattcatcaatgtctacttcatcttcatcaacatgttgactgggggaggcgtcaacggtggacatgtcggcagcggtactggaggaggcgagaacaacaacaccaactatgtttgttcaaacataggagacatcattgttggctatgtttctaccacaccatag

SEQ ID NO: 101967 - DNA, 419 bp, Oryza sativa
  Clone ID: PAT_MRT4530_99536C.1
ccaaattgctttttttttttttcaatatatttttttttaatcattttgcttgctactttttacattattaaaatttcaaactttttttggattcaaagcaggcgctgcagctgtatactggaagaagggcaggctactcagtttctcccatcaagatcagacaacaaaaaagccatacccaacacaaggcaataggggccagcagtgcattttaggaaccacaacccaaccactactatcacctgccaagaggcactgaaaaacctcttcctagggctttttgtttttgaaggggccccttgttacttaactcaggaccttaccattaagcacagcatacgggggcttaatctcaacccaccccttctcaccatatgagtcaagggggaccttcatacttctcatacaaaattggaact

SEQ ID NO: 101968 - DNA, 471 bp, Oryza sativa
  Clone ID: PAT_MRT4530_99537C.1
atggctcagaacactctccgcgagttcgttgctcactctgttgacaatgagcccattgggccgcaagtcaagttaggagacggtgactttgacttgaaaaccagcgatcacctggatgctgcagctggaggagccttcttctacgagacggttagaggcgccgtagatttaatcgagaagatggtctcgaacatgggttggagcgaggaacaactccaaacccgtcaacgcgacatgcacaatgttaaggagacggaaatgcttgctgccaagttggatctcctgatgaaacgactggacgatcaagagaagaacatgcctcaaggcaccgtcaaggccttggactcacacatcacatgtggagtctgcagcaacgcggatcattccgggactagtgttgtggataacggttggtacggccgtatattcagatgtcaagacggtggcactgacctctccgccacattttag

SEQ ID NO: 101969 - DNA, 375 bp, Oryza sativa
  Clone ID: PAT_MRT4530_99538C.1
atggcggggcatactgcctcacagctggctatggagcacgcccaacttcccggcaagtttggcaatcctcggatgagtttctcgaagatgtcgttgatttctacgccccttttgccgaggaccgtagaacctacaaggactaagataaatgggtaccctggtttccatttcaccgacagcaggtacgacgtttgcacggacaggtgggcgatcaggtttttggggagtgcaaggcgcgactactcactattcatcaatgtctacttcatcttcatcaacatgttgactgggggaggcgtcaacggtggacatgtcggcagcggtactggaggaggcgagaacaacaacaccaacacggttatagactatgggtga

SEQ ID NO: 101970 - DNA, 756 bp, Oryza sativa
  Clone ID: PAT_MRT4530_99539C.1
atggcgaccgtcgggccgtacggcgaggccgagaagaacgagccggcgaggccgctcgcgctcccgtcgccgtccgtccacccggcggccaacgacgacgaggaggccgcccgcgcggcggcggcggcggcgggggacaccgccgccaacaagcgcccgcgctccccgcagtacctccgcaggcggcgctgcgtgatctggtgcggcggctgctgcgtcacctcggcggtcgtcgtcggcatcgtcatcctggtgctggcgctcacggtgttcaaggtgaaggacccggagctgaccatgaaccgcgtcacgctggagggcctcgacggcgacctcggcacgtcgaggcacccggtgtccgtgaacgccacgctcaacgccgacgtctccctccggaaccccaacgtggcgtcgttccggttcgaccgcagcgagacggacttctactacgccggggagaccgtcggcgtggcgtacgcgcccgaaggcgaggtcggcgccgacagcaccgtgcggatgaacgtcacgctcgacgtgctcgccgaccgcatctcccccaacgtcaacgccaccgacctcatcttcggccagggctacaacctcaccagctacacggagatcagcgggagggtgaacgtgctggggatctacaagaggaacctcgacatcaagatgaactgctccatcacgctggaggtcagcgccctgtccaccgtgcagagcaagagcacgaactgtgtcgccagcgtcagctga

SEQ ID NO: 101971 - DNA, 690 bp, Oryza sativa
  Clone ID: PAT_MRT4530_9953C.1
atgagagaaaaggggaaggatgaggggaaggtaaggggcaaagggccgacggcagaggagggacgggccaaaggtgctacgggcggagcggatgtgagcgcgggagcagacacgaggggagaagtcgcgggcgacagcaccgcgcgggtgatagggcagagaaggtgcggacgtgcggtcgaggcagcacgacagacggtgggggcgaggaagcaactgtcagcggggcgaggaagcagtcgttgccggcggctgggcaacggggcaaggaagcggtggtcggagccaatgccggggcgacgtgggtggagaagcggcgggggtgaggaagctgtggtcggcaccaacagcggggcgatgaagttgtgggcggcactagtggtgggctcaggcctcgctctatcatctacatctcgttctttggatgctctactctccatgtctctccctcccttctctccattctcccaactcggctccgcaggatgtcgcggcttacgcgccagccgattccgtgtcctcgtgtctcccggcgtggtgacgaaaatgcgaacaaaggggaggacactcaaaggctcaaagctccccacctggacccgctggctgaggctgtgcccgatccgagatgcggcaggggcgtcccgggggccagtgcgggccgtgcgaccgaacagggcccccaaattttaa

SEQ ID NO: 101972 - DNA, 123 bp, Oryza sativa
  Clone ID: PAT_MRT4530_99540C.1
atgggtattattccatcccagaatttgaacagggctgaatgcgcaaagctcaaggttacgtgcaaagcaattaagggtttcctgcagaatcaaggcctcaagggtatcgagtatgcaatttaa

SEQ ID NO: 101973 - DNA, 540 bp, Oryza sativa
  Clone ID: PAT_MRT4530_99541C.1
taaaaaaaaaaaaaaaaaaaaaagaaaatgaaaggggaaaaaaaaaaaaaaaaaaaaaaaaaaaaaaaaaaaaaaaaaaaaaaaaaaatataaaaaaaaaaaaattgacgttccacatttcaatgggcccggggcttccttacttttggtttccacgtttcttcactcttttgtcgggggcctttcttttttggggcggggcgtgcctttcccttgccccgcctttatctcctccgggttgggccccttttaaccctttgccgtcccatcctttttgcccgggccgctctctttccctttgggttttgcctttttggtgtcccgggcgattcccccctctctttgggcttttgcccccccccttgtgggggttcctccccccctcacctttccttttccccccgttgggcccggtgccttcccctgcctttcctttttttttccccacggtctccggcttttctttttgggtttcttttctttttttccccctcgggttcgcgttctgggccttttttttccggcccccctccctccttt

SEQ ID NO: 101974 - DNA, 481 bp, Oryza sativa
  Clone ID: PAT_MRT4530_99542C.1
ctttgtccccgttctgggtggtttctgtcatactccaggaactggcttgatctagctctttgcttggtctgaaagtcgatttctgcacaggtactgcgaaagctttgggaatagtattgcagaaagcgcagcaatctgaagcttactgtccaaggtagacagctgacataagcagtttagcacttgagctatgttggattcacttactcgtcttcctgacatattccagtttttcctctcttctttcaagaatcggaattacttcagttgtactaggaattctgaacttcgtttgtagttgctgtctgaatttgtggctactgtttactactggactcatcgtcacgtctctgacaaaactcagtacaccatgttgatgcacgagatgattttgctcctattaaatcttctgtggatttttctctgaaacgtctgactcaagtatgaatgttactaagaagcaacaaccttaaatcagatt

SEQ ID NO: 101975 - DNA, 494 bp, Oryza sativa
  unsure (1)..(494): unsure at all n locations
  Clone ID: PAT_MRT4530_99543C.1
tgtatgtcgcgatctccggagagaggagagaaaaattcggaacggcccccccgacacacgcgaaaccgccgcaccccgcgcgagtcaatcctccgtgtggccgagtcctcttccacccctcccctcgcgttaacaccaccgcgcgcacgcgctgctcctgctccccccacaacgcgacgcgcctaagcaaacctcatcttcttcttcttcctcgcttccttcctccacctccacgcggcgaatccaccaggtgtgccatgggtggctcgttctccaccagccggcgccgccgcgacgagtactacgcggtccggccctcgtcgccgccgcaccactactacacctacccaccgccccctcctccgacgncgtaccaccaccaccacccgtcgtcaccgcctatcccgtcgcaccaccaccaccagcacccttaccggtcttcgccgtcgtcgcaccacgccacctcgtcctccttgtactactaccacccaccc

SEQ ID NO: 101976 - DNA, 393 bp, Oryza sativa
  Clone ID: PAT_MRT4530_99544C.1
tttcccgcgtccgcttggcggtgtctgtggggtggagtggtgacagtatagtggttcggaagttaaaaataagctcagatatcatcatatgtgacatgtgaaactttgggtgatataaatagaaaaaagttgtctttcatatttaaaataaaatttattaaaaaaaaaaaaaaaaaaataaatggggggggggggggggaaaaaaaaaaaaaaaaaaaaattaaaaaaaaaaaaaaaaaaaaaaaaaaaaaaaaaaaaaaaaaaaaaaaaaaagggggggccctttttaagggacccaagtttacttccccgggcttgcaacgtaatagtttttttatggggcccccaaaataaaatcaacgggccggggtttaacaacgccggacctggaaa

SEQ ID NO: 101977 - DNA, 237 bp, Oryza sativa
  Clone ID: PAT_MRT4530_99545C.1
aaaaaatgaaagaaaattttatttctatttatatcaccttaagtttcacatggcacatacggtggtcccggggctttttttttcacttccgaactacaattttgggaaaattcaggccaagacaccgccaaggggggtaattctccccggggcactttagtccctaggggagatcccatttgttgatggcaggttaaaagccaacagggcttgggcttgagccagattccggtcaat

SEQ ID NO: 101978 - DNA, 942 bp, Oryza sativa
  Clone ID: PAT_MRT4530_99546C.1
atggaggccggcgagggggcggggagtccgacgagcggggtggagaggccagcgagagagaagcaagacggcggctccgaggtcgggggcaacctcattcagatgtcaacggcgactccacgaaggacgacgacgggaacggaggaggcccgcagtggcgaggccgggccgacgagtagggattgtacggccgagcggcggcgctgcgacggcggccgcgcacaccacgcccacctcgccgctgccgccacgaggcccgaggcccccagcgcgtcgtcccccaacgaccgaggcacgaggtccgccgcctgcatcgcccacgacgacctcgccgaggccgcgcgcctcgtcgaccgctcacgcggggaggcacccgacgccgccgtcgccaccgccgtgaagaccaacgccggcgaagtccgtgagtcgaagcaccaggcgcacacagccgctccagtcgtccgcgcgttcatcggctcccgcgaggccggagcgtgggcgtccggcgtggccgtcctctgcggcgcgctagccacggcggaggcgctggccggcgccgccgcgcttgccgcggcgttcatcggctccggcgaggccggagcgtcggcgtccggcgtggccgtcctctgctgcgcgctggccaccgcgaggcgctggccgccgcgctccctcgcttgctgcgcttgccagggcgggagggaaggaggaccgggcggagcccgggtcggcgccgccgccgtggtggtggtcgcagtactccatgacgcgggcgagggcggcgcccttgacgacttcggggaggttgacgacgacgtcgtcctcgccgccgccgccgctgccgcggccctcctcgagcatcctcctaatcgtgcccgatgccgcggccgccgtcgcagcgccgccgcccagccgtctgctccctaccccgtcggcctggcctga

SEQ ID NO: 101979 - DNA, 658 bp, Oryza sativa
  unsure (1)..(658): unsure at all n locations
  Clone ID: PAT_MRT4530_99547C.1
ctcgtttccttgtcgcctcttcttcttcctcctccggctccgctccgccgtaaatcctcctcctcctcctatataatcatcaaaagcttagcttagcagtaggccagtagcagtagcgatgccgtgacggatcctccaccaccaccacctcgatcgtcaaatcctctagcttgtcttttgtttttgattgacgagacgagcatgtccggctccgaccatctcttggacgccctcctcgccgccgcccgcgccgccctttcccacctccaccttccctttcccggatccaatcccaagccccactactctgatgacctccatcttcttggagttggagtagctcatttcatccacagatccccccccttcacaactagggcatgcttccgccgaaccaaacacccaccaccaccaccaccaggtccaccaccgcaccagctccttctctgcattggcattgccttccatagcctgctggacaaccatcttctcctccacttccacactctactcatccctgctgacaagccccattttgatgccttcctctncaacctgccttttgcccngctttaggtcgccccaccgcctcaaccgcctgcgtctgtctcccctgctcctccaactccagcttatactggggtacagggccgacact

SEQ ID NO: 101980 - DNA, 949 bp, Oryza sativa
  Clone ID: PAT_MRT4530_99548C.1
tcatcggctccggcgaggccggagcgtgggcgtccggcgtggccgtcctctgcggcgcgctggccacggcgaggcgctggccggcgccgccgcgctcgctgcggcgttcatcggctccggcgaggctggagcgtgggcgtccggcattgccgtcctctgcggcgcgctggcagcggcggtgaacaccgtggagcacggcgggcaggtgggcatggtgttcaagctcaaggaggccgacgtcgagcggagggagaacggcgaggtgttcgagacgaaggtggcgctgcagctcggccggagcacgtcggagctcaagcagttcagggcaatagcctcgccggcggtcaaggacgaggacatcaaggaatttgccggggcgttagggaaggaggaccgggcggagcccgagtcggtgccgccgccgtggtggtggtcacagtactccacgacgcgggcgagggcggcgcccttgacgacttcggggaggttgacgacgacgtcgtcctcgccgccgccgccgcggccctcctcgagcatccttctaatcgtgcccgatgccgcggtgatcaccttcgatgaggacggagcgggagcggcagggtccagggagtgggagaagaagaagagggcgccgccgccgccgtccgccggccgccgtcgcagcgccgccgctcagccgtctgctccctacccgtcggcctgccaacgttggatcatcgcttccgaagttagccccagcccaggattggatttattaggccgtgcaggatatactgagcccagattggatatactgcaaaaaatgtttgaatttattctgagcccagattggattggatatactgcgaaaaggcaaaattcattaaaccctaccgctggaaacccctaccgtacccccacgtcacactgccatatatacacacgagccctcgctcaatttacattctag

SEQ ID NO: 101981 - DNA, 1998 bp, Oryza sativa
  Clone ID: PAT_MRT4530_99549C.1
ccactaatattactcatgcatagggtatcacaggtaccgagtaacaggtatcacagcgtcgatggaggccgtgaccctgacgcgccggcaaggaggaggcgatgagcagcggaggcatttggatgcgctcctacgcccgccaaggcgctggagaagaagctccttgacctggagttgccgccgttcccggcgccggcgaagaaggccgccgccaaggtggtcgctgctgctcccaagaagaagctcgccggcggcgccggcgggtacgtcctcgaggacgtgccccacctcaccgactacctccccaacctcccctccttccccaaccccctccagaaccaccccgcctactccgtcgtcaagtaagcgagcctcccctcttcttcttctccgactccggcgatcttttttcccttttcggattattccaggtttgtaactgttcgatcgttttgcaggcagtacttcgtgaacgccgacgacacggtggcgaagaagatcgtggtgcacaaggggagcgcgcgggggacgcacttccggcgagccgggccgcggcagcgggtgttcttccagcccgacgaggtgtcggcggctatcgtcacctgcggcgggctgtgcccgggcttgaacaccgtcatccgcgagctcgtctgcggcctccacgacatgtacggcgtgacgagcgtggtgggcatcgagggcgggtaccgcgggttctacgcgcgcaacacggtggagctcaccccgcgctccgtcaacggcatccacaagcgcggcggcacggtgctcggcacgtcgcgcggcggccaggacacgggcaagatcgtcgacagcatccaggaccgtggcatcaaccaggtgtacatcatcggcggcgacggcacgcagaagggcgcggcgacgatccacgccgaggtgcagaggcgcgggctcaagtgcgcggtggtcggcgtccccaagacgatcgacaacgacatcgccgtgatcgaccgctcgttcgggttcgacaccgccgtggaggaggcccagcgcgccatcaacgccgcccacgtcgaggccgagagcgccgagaacggcgtcggcgtcgtcaagctcatggggcggaacagcggcttcatcgccatgtacgccacgctcgccagccgcgacgtcgacctgtgcctcatcccggagtcccccttctacctcgaaggcaagggcggcctcctcgagttcgccgagaagcggctgcgcgagaacggccacatggtgatcgtcgtcgccgagggcgccggccaggacgtgatcgccaggagcatgcgcctcgccgacgcgcacgacgcgtcgggcaacaaggtgctcctcgacgtcggcctctggctgtgcgccaagatcaaggatcacttcaagaagaaggcgaatttccccatcacgctcaagtacatcgaccccacgtacatgatccgcgccgtgccgtccaacgcctccgacaacgtctactgctcgctgctcgcccacagcgccatccatggcgccatggccgggtacaccggcttcaccgtcgcacccgtcaatggccgccacgcctacatccccttctacaggatcacggagaagcagaacaaggtggtcatcacggacaggatgtgggcgagggtgctctgctcgacgaaccagccgtgcttcctcagcacggaggacgtcgagaaggcagggcaggacgacgaggagccgatcgtgccgctcgtcgagggcgagaactcgctcgtcaaggcgccgccgctgctggccaacgccggcgatcgcgccgccctctgcaacggcgccgcctgagcttgaagaagtagctacacgaagaagacgatcacacggccatgtttggtagtgcgaaattcacagaaatgtttatgtaattgtaggatattttttttctttagattctttttgctcattcatttttcggcttgccggtacagaggaagtattgacaaactgagaataattgaaagtttatgtgac

SEQ ID NO: 101982 - DNA, 366 bp, Oryza sativa
  Clone ID: PAT_MRT4530_9954C.1
ctctctctctctctctctctctctccagtgttcctagctacaacgagtggtttactttctcatcctatgtagcttgtctgcattgtttgcccaagaggagaggttctagaagcttctacataatggcagtcgatcccgtgtctcttttgtgttcgtgctagagagtgagtgatgatgtgtgggattctatgggtatatatattggacttttcttgagtgtgtcctctaggaaattcggctttatgtgcaagataaaaggcaaagagactagattggtggctggggatgaggaagcttatctcttgagaaaagggatcgttgacatgaacatgacgcttaatcttattgcgtacgaagcacggcaca

SEQ ID NO: 101983 - DNA, 1754 bp, Oryza sativa
  Clone ID: PAT_MRT4530_99550C.1
atggggccgccgcggcaggccaggggcggctgcatcgtaaccgaaacgtgcgcgcccccgatcggagtcccccaccgcatcaagctcccctactactaccgcatcgccgggaagctactccgccaggcgaagatatatatggttcaggacaagcgcgcccatttccacgtcatcgtcttggattcctcacagagcccaatacaggccggcctccggtcttccattgctctccataatcatttattctggtaagtcaatgttcataacagagatagacaaagagcattacaatctcgtagaccagaaggaaacattgctgtttttatcgttctgatcctggcgatatgagttcgatacacggattacccgtttctaggaagccaaaactgataagttccctcaagattgctcagcaatatataaccaatgctcccatgatgtatatgaacccctgagtaaatgtttgatgtgcatcgaccttcgataatggtgagaactccatccgcgaaagactggcagctgaacaagttggctgcctttatttttttaactgtgctgaagaatctcgaataccgaagtaagtgatattaaatagctatttgtatatatagaattcagttgaaatgaatatctccagtatctatggggaattattgaatgtatcgtctcactagagactcacctgatagaccgaacagcaaacaacttgcaaatctccctttccctaacagaagaaacattcgctagacactctatattgggacctaatgggcttcatgggcaatggactgggcctgttactgcaatcaaggttcagtatccaagcaatcttgatataataaaaagcgatgtgtctagtttatttccatctgtcttgaaccaagatggtcagaatggtcccagtacaatatccacagatagcactcaaattgagaatgatgatatgaaatctgttctgtcccttgatgatggtcgatggtctaagctggcagaggaatgcgcctctgtaccttctgttagtctggaagaagaattatcccaattgagtatcaaacagccttcacctcctccagtcttggcagagttagagcgcaggccaatcgacaaatgaagatgaattatttgatgttcaggacaagggctcgcttttcactcttggttggattcacacacatccaacacagtcctgcttcctgtcttccattgatctccataatcattattcttatcagaatattattgcatacccagacatggtgatgttacctgaagcaattgcaatagttatggcacctactgacacaagaagaaaacatggtatatttcatctctctgatcctggcggtatgggtgtgatccatgattgcccggagagaggattccatcctcataaggcccctctagatggttcaccaatttatgagcattgctcccatgtgtatatgaaccccgatgtaaagtttgatgtgattgaccttcgataatggtgagaactccatccgcgaaagactggcagctgaacaagttggctgcctttatttttttaactgtgctgaagaatctcgaataccgatgtaagtgattgtacatagctatttgcatgtatagagttccgttgaaatgaatatcttcggtatctatggggaatttatgaatttattgtatttcattatactcacttagctctcaagatatacgcttgtaagacgaggtggaaatgttcaatctcatttttatgccaagtcaattgttgt

SEQ ID NO: 101984 - DNA, 410 bp, Oryza sativa
  Clone ID: PAT_MRT4530_99551C.1
gtgtttttttttttttttttttttttttttttttttttttttttttttttttttttttttttttttttttttttttggcccccaaaatttacaattggacattaagggaactttcaacccaggggaggttaaccccccgggggggtttcatcagggggggggggcggggacgggggcccattggctaaatttggaccttttagttcacggggggccggaaaaggccagttccggaccaggggaaataccgggggggggggggggttttccttcgggggccccttttttcccctattaacccgggggcccggggggttccatttccgggggggggggggggccctccccccggttcaccgggcggggggggccaaccctcggggtcgggggggagatgggggggtcggccc

SEQ ID NO: 101985 - DNA, 438 bp, Oryza sativa
  Clone ID: PAT_MRT4530_99552C.1
atggttcatcggacccacgtgttactgacaaaagcaacaaagagaagcctgatccgtggtagtcctttgccctttcacaaccaatgtggtactattcaacaatctcctccttcacacattagtgtccctcagcccttcaccgccccttttcaacgtatccgggcccccaccggcccacggtcatcaggtatacgggccccgcagtatcagtttttgtcggctacgtcctcgacgagtcgacgaccggtgaccggtgaccggcgaccggcgaccggccggcgagcgcttgggctcgatctgtgtaacaggacgttcctccacgttagacgatcggtgctcgttgaacgacttggcaaattaaagacagtcacacacactcgtcggaattggcgagtgaaaccgatgagagagcaattttatggtccttcagaggtacca

SEQ ID NO: 101986 - DNA, 199 bp, Oryza sativa
  Clone ID: PAT_MRT4530_99553C.1
ttctttgtttaccaccccaaccgccgccgggtggaattctttagacataaggtccggttggctgactgccgtattacatatgtggtactcattatcttaggccggtaggggtgggaatgtcgagaacgggactactgttgttaagagaccatggacggcagttacaagaacgtgctgcagaccatttggtaaggacctg

SEQ ID NO: 101987 - DNA, 345 bp, Oryza sativa
  Clone ID: PAT_MRT4530_99554C.1
atggaaactagacaccttaggaggagggctgaagagcctgaaatccttgatcttcaaacacttgttcctcagctcctcctcctcgtccatcctcaggtaggcgacattgataacatcaagagatcgcagcttggggcaacagttcagtacactcaggatgatgggcttggtgaaggtgtcaccaaacaaggtcttgagatggatgcaggatttcatggccgactgaaggagatgcgcgaaatcgtagcttggacgcgcaacgtagtagaagctgcatttgagcacaagctcaagctccttgagcatggggaacttttgtatcacattggtgagcacttgacatga

SEQ ID NO: 101988 - DNA, 1022 bp, Oryza sativa
  Clone ID: PAT_MRT4530_99555C.1
ggaacgaagcaatactcattcattaagacaaaaatccctgctgggtttctttttgtaaagaaataaccaagacaatgtacaattctcattcccatatgctgtcaacagattctatcaagtaagttatcaactcttggtagtatactgttgttcaaacctactattccaggagagcaaaaccaaaagcaacttgggcagatctgaattttttttggtggggggtctccttgtgtgatgctcactcctgatcaccatcctcagactgtttcttctctagtatggaaaaaatgattctaatattctacaaggatttacagcatagaagtgatacaacaggtgcaaagctgcaacagcattcagatcaatcagatttcttgcgggaaaatgactgccgttctgacaaagggacaaacacctcgcacatgtttctaatcatgcctctgtcatatatgttatttttcacaattgtttcatcggcctcagtatgtgatctagagaaaaacgccttccatttgcttggtggcgatttgcgcacttcaccatttgcagcagccttttcctcgttcacctttttcctccacataatatagtcttgccatttgaatgtctcattcgttgttgtatttgttaagcaaagatgtgtgtggtaagcacaaaacccaccaaggagcaatgcaattatagccaaaaagaccgctaagagtatctgtgtgttatgcacagcaagcagccactgtgcaacatgggggaatagccctgcgggtggtctgtcgaggccactgtaacctgtcaatatgtagacaactttcctttcttttaattcaccagcaagaatgaaaccaagaataaccgctccgtacagacatataaggaaatgccaaactaaaaaggccaccctcgtgccggtttcggccccccccctcctgctattcatccatccacagtggtgatcaaaccgcgcaacacatttatcacatattctacagtgctttgtcctggctggcctggtaatcttgcacctc

SEQ ID NO: 101989 - DNA, 461 bp, Oryza sativa
  Clone ID: PAT_MRT4530_99556C.1
cacctccgccacctcgacctctctaggaacagcctcaacagcatcttgccggcgaagctgctcaacgcgaccgagctccgggtgctctcacttgccgacaatgacatctctagcgtgctccccaatggcggctccgtctcgtacttgctcagcctccaggagctcaacctgtcgaacaacgcgctcgccgggcgcctcccgcccgctctctacaggctgccgagcctcgccgtgcttggtctcaccaacaactacctcatcggcgatctcgctgccttggagggcgtcgacttgagcgccaactaattcaatggatttctctcgtccgacttcggtgggagccggctacgattcttgaacatctcgtcgaacaagctcaatggcgctatacctaccgagttgtccgccgtcgtgccggcgaactcgacttgcacacactccttctccaaattctctaccca

SEQ ID NO: 101990 - DNA, 366 bp, Oryza sativa
  Clone ID: PAT_MRT4530_99557C.1
atgcggtctgatattgaagagagggagcccgacactaggagcggtggctcggccttgagacggagtggcggcggagcgaagctaggacgaggagcggtctccgccaatgccttctactcacaatacagagcagggacgaggaacataggtgatgaggagcggcggcatggagcgcactccccatctcacctggtggccgacgctttccaccgcgccatcgccatctccgtcgtcggaatcatgttgcgaacgaggaggtgctcagggtggctgttctacactacgaccacatccggctgctgccgctgcccataccgctcctcgtcggtgctcagggtgaccatgggtgccgagtataggtactga

SEQ ID NO: 101991 - DNA, 564 bp, Oryza sativa
  Clone ID: PAT_MRT4530_99558C.1
tagtggatccccgggctgcaggatcggcacgaggcaaccacaagtctaatgggttgcactgttatgcttcgcaacagaggtccgaagaccggtccttacagtggccgaggtgcttctaacaaaaccatgcacctcaggcaccgccagaaataggtttagagagttttgaatgagattccatcatgtccaggctcaaccagccacctaatcatcattctcacatattttagttgttacccacaggttaatgtataaaaagagattctatgtttgatctaagcgtatataagcccaagctaaagcaactaataagtccatcatatagggagccatactagtcattttatcattttactaaggttgtcaagagcatgggtagcaattcaataacatggctatataacaaggatcatatgaatattaactattaaataaataatagtgagcgtcatataatttataaaagcgattcatatagaagtgaaacaacgtagtatttgcaataatgggattcagtatgttcaaggaatatggcatgacttgccttgctcaaagagaaggtct

SEQ ID NO: 101992 - DNA, 686 bp, Oryza sativa
  Clone ID: PAT_MRT4530_99559C.1
tttttttttttttttttttttttttacttcatcttcttggaacagaagaaattaataacattcttcgattaaaagtgtagtaagagaaaataaaaaatatatctagagtaaaatacactatataggtctctaaacttcacaaattagtttgcttaggcccataaactctcgatctacacatttagagatccgtaagcttgtctaccagtcgcctacatgacagataacttgctagtaccacttatttcaaatctccatccatgaggggtaaaaagaattgctgaaaaacacctactacaaaatcttctcaaaattcaaatgcctcgtagctctcgacccatcgccaagatgtgctgacccgaagctggaatggacaccaggctcagagccaattgttctgagccggtgctggcttaatcttttgggttcgtttccgttggcgatgaatcgttatcatcggaagaggaggagtccgtctggttcccagaagggccacgaggtggcagctctgacccgagttcttgcgaagtagctgcacctttaggaactttggatttaatcttctttgtgtgccgtcgtataagcttctttgtttttgttatagtcaattgtcgagcaaatggagagaactcaatttcattctcactcctttcaccctggaaatcatgatcagcgtcacctttcat

SEQ ID NO: 101993 - DNA, 402 bp, Oryza sativa
  Clone ID: PAT_MRT4530_9955C.1
gttcttctgacaatactactgagggtataatctgtgctacaaccaccaggaaagattaatttgctttgatatttctggggaaagaggatgtggtcctcgattgtgctggctgaaatatgtcaaatgaggatgacactaaagatcttcgggaagaaatgggtgactccgaaagtaagggctcataaacagaattcttgttcttcactggtggtgttgaaatggaaatgttcgtgttctccatatctgatctcagttgagactccaggtttaccagtgtgtacattggcccacgtgatcgctcagccttctgaagaatgttaatagcactaggtctgtatgtatatctgaaatatttcagagctaatacagggcccatgccaactccactgattagcagcagtg

SEQ ID NO: 101994 - DNA, 945 bp, Oryza sativa
  Clone ID: PAT_MRT4530_99560C.1
ttggctttcctttctttttttttttacgagaaacccttttaattacttgatagcaataacgaaaaacagtttgcaattcaaaaggcagagcgcgtgacagatccgacaataaggcccagtacaaacaacaaaaaacaagaaccaacattttttctcactgctcatcagaaccgatttacagtctctctctctctctcactaccaaatcatctctcatcttgctgttccaaagctttatgcgttccagttatgatgctcttcaggttgaagcagcggcagcgacgacatgatctgctgcatctcgagggtgaagtcgtcgtcggtggtgacgacggacgacggccccggagacggagccgacgacccgccggcggcggcggcggcgctgccgacgccgccggggttgaaccattcccccgggatggagcccggggcgatgccgaacatgccggagatctcctccaccgcgctcgccgccttcctcttgggtttcacgtcctcgaagatgaagtcccatctcccgccataatgcgggtcctcttctcccggaggatactgcgaggtgacgtcactgtcgctggcgcctccgccgccgccgccgccatggagcacgtggcttgagctaggctcgcggtacatcagctcgggcatggagcccaccctgagcatggcggggttgggccgcggcaggaggtggtcgtcgccgagcagcagcgactcgagcagcgcgtcgcagccgccgccgccgccgctcgtcgccgtctcgaattggttcgaagggagctcgcgcggtctgttcggcagcggcgggagccccgacgagacgaacccgccgccgccgccgccgtcgtggtggtggtggaacgccggctgctgctgctgctgctgctgcggcggcggcgcctgctggtggttggcgaggtggagaagctgcagcccctgcat

SEQ ID NO: 101995 - DNA, 2085 bp, Oryza sativa
  Clone ID: PAT_MRT4530_99561C.1
atggggagcgcgcccctgctcggcaccaccgtcgacgaggaggatttctcgccgccgagcaccagcggccgcggccgcggcggcaggaagcagggacgcgggaggggtgggaattcgtgccaccaatgcaagagggtgaagccgcggccggaggagatggtcaggtgccagctctgcggcgacaaggtcttctgcgccgcatgcatcaagaacaagtacccggagatgcagcaggccgaggttagagataagtgccctttctgtcgaaatatctgcaactgcactcgctgcaatcccagtgacaagtcggatggacccaggaacccatttgtcaggagatgtaacagcagtagttcagtaaaacggagagtgaagactgctgcctcaggtttaagatgcagggttgatactgcggcactacaggcaaaagcaattgataaattagaagctaacagtaggataaacaatgaatctgccatgttagataaggcagatacactagatgtcaggactgatgaggttgacactgaaactaaaagcaaatatgccaactacatgctacactacttggcgccacatttgacaaagctgaacaaggaccagatgagtgagatagaaaaggaggctaaaattcaaagattggaattgtctcagttgagtgtggagcaggctgcctgccggcatgatgagagagtattctgtgaccattgcaaaacttcaatctttgatctgcatagaagctgtccaggctgctcctatgaattatgcatcgtctgttgtaaggagctccgcgaagccaaacttatgggctcttgtaaggaagaactgttctcttatcctaatagaggacctgactacatgcatggtggtgatggtgattcagtaccagagttgataaactacaaacaaggagacctgtctagcaaccaatctaaggacatacagtggcgtgttgattctgacaagatttattgtcctccaactgaacttggtgggtgtggtaatcatattcttcagttgagacgaatattttcaaaagactggttgagtaaactcgaagtggatgctttccaaatgcgtaaacaattagaaccatctgatattatcggtagagacacttgtgagtgctcatgttctactgatcatgcaagttcaaggaaagctgccagcagagaggattcgactgataactacatatactgccctacattggataatggaaagccagaagatctcacacacttccagaagcattgggtgaaaggcgaacccgtaattgttcaacaggttctcaagaaaatgtcatgtttgagttgggagccaccagatatgtggtctaaagtacatggcaccggcactagtcctgagatgaaaaacgtgaaggctattgattgtttatcttgctgtgaggtcgagatatgcactcaagacttcttcaatgggtattatgaaggtcggatgtatcaaaatctatggcctgaaatgcttaaattgaaggactggcctacatcaaatcattttgaagagcttttgccttcccatggagttaaatacatgaattctttaccttttcaaccatacacaaacttgaagtctggtttgctgaatgtctcaaccttgcttcctgatgacatcttaaagcttgacatgggcccaaaatcatatatagcttatggctatgcacaggaacttggtagaggagattctgttacaaagcttcactgcgatttgtctgatgcagatgcaaatgacttggcctgtcctataaaaagtgagtccgccgaggaaggtgctttatgggatatttttaggagggaagatgttccaaaactgaaattgtaccttgacaagcattctaagaaatttcgccatatatactgttctgcagttcaaaaggtatgtaaccctgtacatgatgaaacattttgtctaacaaaagaacaaaagagaaagctcaaagaggagcatggttatttcactactagaaaaagcattttcgccggcgggggaaactcgtcttcgcaggcggacggccggtccacctgcagcccaaagttcactggcgggctggaggtccgcatttga

SEQ ID NO: 101996 - DNA, 243 bp, Oryza sativa
  Clone ID: PAT_MRT4530_99562C.1
tcggtttaccataggctaatgtatggcaaagtgaggtgttacacacgtcacgttggtgggtacaaatgagcgagtgtgcaaactgtgactgtaggtgatacacaacgaataatatgacgtggaccatgtaatatggttgttcgtgcaaatatgccggctgttgaatattgtgcaaaaaacaggaagatctttaggtatcatcaagtactgaaagagaacgttggaatctttggctcaatcggg

SEQ ID NO: 101997 - DNA, 1602 bp, Oryza sativa
  Clone ID: PAT_MRT4530_99563C.1
atggctgccacggcggcggagaccgccgccgccgccaccgccaccgccggcggctgcagggtcgtgcggtggcggcgctggacgttcgccagcctgggcgcgctgctgtccaacctcggcccggtgtggttcctcatcgcgccgctgctcgccgcgtacgcgccgcggcggctgctcctgacctacttcaacctcgtcctccgccgccgggcgcgccgcctgctcgccgccgtcgacccctacgtcaccgtcgacatccccgaccccggcgccgccgacgcgcaccagcagtactaccaccaccgctccaggctcggcggccgccgcgccggcgacaacgcgtacgaggaggtgaaggcgtacctgagcgccgcgtgctcgtcggaggcccgcgagctccgcgccgaggccgcggcggagggccgcggcctcgtcgtcagcatgcgcgacgggcaggacgtcgccgacgagttccgcggcgccaccatgtggtggtcgtcggtggacgaggagcagcagggcggcggcgcgcggcggcgcagccagcggctcacgttccaccagctccaccggcggctcgtcgtcgacgagtacctcccccacgtccgccgccgcggccgcgagctcctcttccacaaccgccgccgccgcctctacaccaacaacaagagcctcagctacagcagcgtctaccacaaggcgtggagctacgtcaacttcgaccacccgaccacgttcgagacgctggccatggagccggccaagaaggcggcgatcatggacgacctcgacgcgttccggcgaagcggggagttctaccgccgcgccggcaagccgtggaagagggggtacctcctgcacggcccgcccggcaccggcaagtccaccatgatcgcctccatggccaactacctcgactacgacatctacgacgtcgagctcaccatggtgagcgacaacaacgacctccgcaagctgctgatcgagacgacgagcaagtccatcgtcgtcatcgaggacatcgactgctccctcgacctcaccggagaccgcgccacgcggcgtcccggcgagatccgcggcggcggcagcatggtcaccctctccggcctgctcaacttcatcgacgggctctggtcggcgagcggcggcgagcgcgtcgtcgtgttcaccaccaaccacgtcgagaagctggacccggcgctcatccgccgcggccgcatggacatgcacatcgagatgtcctactgccgcgccgccgcgttcaggacgctggccaagaactacctcgacgtcgacgcccaccacctgttcgacgccgtggacgacatactggacaaggaggacatcacgccggccgacgtcgccgagtgcctcatggcggccaagcgctcctccgactccgacgtgacctcctccctcgagttcttggtcgacgagctcaacaagagagcaatggagaacgccaaggcggtggccgaagcgaaggcgagggcggaggcggaggcggaagccaaggcaatggctgacgacgactcggaggaagacgacgaccattattcggatgattacactgacgacgacgactacgacgacgattga

SEQ ID NO: 101998 - DNA, 435 bp, Oryza sativa
  Clone ID: PAT_MRT4530_99564C.1
atgtgtctggcgatggactttactctattatacagtacatatggaacaagaatgtgcatggtaggcgcacaggcgacgagagaacacttttgattctacgatggaccactgttagttaaattccaaggatttctgtacatcagttccctactgtaatccttccctcatttcctccaacctgctcagctcagacttggggatttgccagccaggtttcaaatcctgaaacctgaacttctgttcacaagatgggaccagtgaattgtgtatctgggttaccggtgatgctcctctgagttccgggctcccggctaaacatgaaccgactggtatgcacttgttcatcgcaataattcaggatgtgaatgagcaatagagcaagtgagacctcagttagtagtgatgctgtcaaaacattatccacagaccataatt

SEQ ID NO: 101999 - DNA, 183 bp, Oryza sativa
  Clone ID: PAT_MRT4530_99565C.1
atggagatatggaatgttatctcaatcgagtctaaactacggcccgacacagataggagcatgttagaggacatcacggatggaaggttctgtattagtgaccctacccctatgagcaccttcggaagactgggccggcatatcttgggattgacgaagtcatcacgggcgtcttgctattga

SEQ ID NO: 102000 - DNA, 1005 bp, Oryza sativa
  Clone ID: PAT_MRT4530_99566C.1
gagggccaccatttgctctcctcaacctgttgatggcttgccaactggttccttccttatttctcttgattgtggattgttccatacaactgtagtttcttctgatggagaggtttggtgctggggaatggagagaggtcttgggttgtgccctgatgccagcttttcaggagttgattcaggggatgctctacgcccgataagagttcagtctcctgagacaaatgggttcaaatttcttggtgcagtgcaggtcacttgtggagctgctcacactgttcttgttgctggtgatgggtataggatgtgggcttggggcagaggccgcagtggggtgcttgggagaaaccagactgctgacagttacataccatgtgttgtgatgtggcctcctcttgatgagaacttccaagaaattcatgaggatagagcacaggcatcaacatcgggagtgaatgaccggaatagcgctgagttggaacaaaagctatctgctgcctcagaagagctggagtttcttcggtcaaaactgacacttatggagagatatgccaacatacttcacatttcaatatttcgtaaacctctagatgaacgaacacttccacgttcccttcaagaatctcctgtctttgatattagaaaggaatttgagaacatcttggatacagcaggtactgatgaactcaatcgcctggagatcttctaccgcagcatgctttctggtgtgaaggataagcttttgaagagaagagtccaggaaatggtccaagagtgcattgtttcgctctcttcagggagacaaaccccatgaggtcagtaaattagatgattaatcaccaaattgtaattcctgttgtgcagcatctatcaaattttgtgcattaaaattgtaataagctctgatgctgccagcttgttgttttatcaaagttaaattataatacaaaataatctaaccattttggtaaacttaaaaaaaaaaaaaaaaaaaaaaaaaaaaaa

SEQ ID NO: 102001 - DNA, 156 bp, Oryza sativa
  Clone ID: PAT_MRT4530_99567C.1
atgctagtggagctagagctgccacatcctgctactccattggcacaagcggtggagctcgaggtggagatcaagaatagtcgatgccaaggaacgaactccaagctgttgcggagcctccgcattgctcgaaggccgaggatatcggcgttctag

SEQ ID NO: 102002 - DNA, 222 bp, Oryza sativa
  Clone ID: PAT_MRT4530_99568C.1
tggctctcttcttcgaagccatggagtctcttctcgtgatcaaattgaaggatcatgtccttccaaatgattagttgaagctatcgtaattgacgcgtgtttcacgagctggtgtgaattgtatctgtgtcttgtattaattactgtatttaaactgctagtttcctggtttcaaaaaaaaaaaaaaaaaaaaaaaaaaaaaaaaaaaaaaaaaaactcgag

SEQ ID NO: 102003 - DNA, 1785 bp, Oryza sativa
  Clone ID: PAT_MRT4530_99569C.1
atggcgagcggcctgtggggcgcgctcgggcaggcgtcgagcgtggcgcagctggtcggcgtggacgcgctggggctggtctccatggtggtgcaggcggcgctggcggcgcgccgccaccgggacgcgtgccggcggctggggcagcacgtggacctcgtcggcggcctgctgcgggagctagagctcgccgagctgatgcggcgggaggccaccaggcggcccctcgagcggctccaaggcgcgctgcggcggtgctacgcactcgtcagggcgtgccaggatgactgcggctacctccaccgcctgctcctcggcgctcggatggccgacgagctccgcgccgcgcagcacgagattgacatgtttccaagaagaatattggcgttcactgaaatacatgttcaaggagccaccaaacctagggaaatcagggggaaatcattagaagcaaactcaacaacaaaattcacagcaaaaaggaggaagagagaggccgtcgctgccgcggccgtcaacaatattcacagcagaaaggaggaagagagaggccgccgttgccgccgcctccgccgccgcgcatcgagctcgccgctgccgccgagcatcgaggccgctgccgcctcgagcccacagctgctgccatcgcgcatcaaggccgccgcgctgctgccgtcgcgcatcgaggccgccgccgggaatcttgtggatgctacagatggtttttcagagaacagaaatgtcggaattggtggattcggtactgtttacaagggccagctacttgatggacatacagttgctatcaaaagatttgttgtggatgcagcaatatttgatttcaaaaacccagcattgtgtgatgaatatgaaagccctgtgataatgcgatgcactcaggtggcgcttctttgtgctcaagaagatccaacagaacggcccacaatgacagatgttactagagttctgaactctcaaagcatactattatcagatccaaagaagccaactgagctaactgatggaggccacaagcccgcgatacaggctgctattttaatcaagcgttcgatggtagaggttgaaaatccttcatcccttaatgcaaaactgagtgggtcatcaaccattgttgtacaacatcaatacaactctatcgtcatcgggtatctccaccgcctagtcgccaatgcctcgaaagccatgacgttcatcggcatcaggttgaacctgctctggactctggtgtcatccttgctcctcgacaagaaggcccgggagtggagccacagagctagtccctcctcatgctccctcacaacctctgtggacacgacagtggactggtggagcaacacggtctccgtggacactaaggcctacacccgagacagagacgcgacaatgtcgagcatctcagtggcgacgagccggcgaggcatggcggcaggagagaactagggtgctagtactgacaggccatcgacatatattggccagtcgagcaagacgatagacataaccatcacaagttcagctccggtgtccaccagagttcgcatcattgttgacccagaaatttgatttgaggtggaaaaacacctgctgtagatagagatcgtggtacaaaagagttgttttgttgagtcgtccatattggcgtgccttggtgatgcaatactgcaagtaatgtagattgtgctcctgagagtgatcagagctatccactatgtatggtgtgtgacgctgccattcaacacaaagctgattattttactcagctct

SEQ ID NO: 102004 - DNA, 234 bp, Oryza sativa
  Clone ID: PAT_MRT4530_9956C.1
tctatatctaggtgctgcattgccgcccacaacatgggggttctataaacgagcatgggaatttcaacacatgtttcgatcaaaaaaaaaacaaaaaaaacaaaaaaaaaaaaccccaaacacaacaggagcaaactccaaacggctgctgaccaaccacagatgcaaaacccggctctgagaaaaagaaaaacccgcctcaaataaaaaaaactagggctggaggctacaaca

SEQ ID NO: 102005 - DNA, 268 bp, Oryza sativa
  unsure (1)..(268): unsure at all n locations
  Clone ID: PAT_MRT4530_99570C.1
aagcgtacgaaataacgctcacatattcatggcatgaggttcagaaaagctagtcctctaggccatagagctagccgtcctcgccgccgtggtgngagcggggtgggcctntgcggngcgcnngtgggcggggcgggggtgtggttcngggcctggcggtgccngcgggcggtgctggacaatccgttgggaagaagggggcttgtgctcttccggcttctctcccccccttataggttcctgccggtgttccgccggccgggcgcgc

SEQ ID NO: 102006 - DNA, 1491 bp, Oryza sativa
  Clone ID: PAT_MRT4530_99571C.1
atggggttcctcagccttgtgggcaactcatttgggtgctcggcttccggcgagcggctcgtctcggcggcccgcgacggcgacctgcaggaggcgcgcgcgctgctcgagtacaacccgcggctcgcccggtactccactttcggcggccgcaactcgccgctgcactacgccgccgcgcagggtcaccatgagattgtttctctgttgctcgaatccggcgtcgagatcaacctcaggaattacaggggccagactgctttaatgcaagcctgtcaatatggccactgggaggttgttcagacactgatgcttttcaatgcaaatgttcataggacagattatttgaatggcggtagtgctctccattttgctgcactacatggtcatgcccggtgccttcgtcttgtgcttgcggattatgttcccagcatgccaaacttctggaactcgatgaaggacagcctatctgaagaaggtccatctgctgatcttgatgaagatggtttgttcaagatggtaaatcagaaggcggatggaggactgactccgcttcatatggcagcgttaaatgggcatgtagagtgtgtgcaattgttactggacttgggagcatctgttattgaggccactattgaagatggaacaactattgacttaataggagctggtagcaccccgcttcattatgctgcatgtggtgggaatgctgtctgttgtcaacttcttattgctcgaggagctagcctttctgcacagaatgctagcggctggaccccgttgatggtagctcgctcatggcataggaactctcttgaggaaattcttagcaaagaaccagagagtcgaatacgcactgttccttctccatatttgtgcctcccgcttatgagtatcatgagcattgccagggaatttggctggaggtacctaaaccaatcacctgtatgtattgacccatgtgctgtctgcttagaaggaagctgctctgttgctgcagaaggatgcaaacatgaattctgcacgagatgtgctttatacctttgctcaaccagttacacatcagtgagcccagcaggtgccataccatgccctctctgtcgacacccaatcatcgctttcactgcgcttcctgggacaagcccaataagagagctcccaagaaacagtctttcattgtcattttgcaccacatgcccagctgtgaactccgattctactccctcaatcgccagccatctgtaccggactgaattccagtgtgcacgcatgccacctatgggttcatcctccttccgttccttgagctgccagaggttgccggcgatgaagcttaacccgtcgttttgtatgggtgctatggatacaaatccctgcctaataagatgctcaaggttcggacctagctttcgtcggtcggcttcccaaggagaaagtagcaggagagcatggcctctaacctttgatccaattgctgccactggtagctga

SEQ ID NO: 102007 - DNA, 146 bp, Oryza sativa
  Clone ID: PAT_MRT4530_99572C.1
ggaaacccggcgcgacccagcggccgggctattgttgcggggatgctttcaaaaagagcatgtacgcccatttgtttgactgggatgttgagcacattaaccacatcacgtatcaactgcagggagaacacacatgcagatccata

SEQ ID NO: 102008 - DNA, 379 bp, Oryza sativa
  Clone ID: PAT_MRT4530_99573C.1
gggggggacaaaattttaaaccgggtttttttgggaattttttttttgggaccaaaaaaatttttatgaaaaggtaattttaattcgccaccatttttttaaaggaaaaggcaattttaaattttgttgcagggggcagggacaaaggaaaagttttttttggccaaaatttaaaaaacgggctttttctgggggtgaaagttgcctaaaaaactaagggccccccctgggtttatagcgaggccggggaatttttttcccccggccctcttaatttaaaaaatgtggttttcccgagggagggccaggggggggcccttaaaaggaaaaaccaggcccggtcccttgggtttggttcccggggggccccaaaagaaaa

SEQ ID NO: 102009 - DNA, 315 bp, Oryza sativa
  Clone ID: PAT_MRT4530_99574C.1
atgacggccgtggagtggcgcgggcctctttgccaccagagaggtaggccgatggctggagttaggtacctcttgggtagatccgatgctttcctagccagatccggtcagaggctgccacgacgactcattgggaccacgatgaggacgacgcggtggcttggtggagctacgaagaggcttgtcggcggtgacgatgactgcagcaagactatcatggtggtgacggtggtggctgctgcaccgaggcaatgctctcgtggtcaacaggatgcatcaactatgccgtacgtaagggacctccacacccaatga

SEQ ID NO: 102010 - DNA, 267 bp, Oryza sativa
  Clone ID: PAT_MRT4530_99575C.1
ctacgtgtgttgcctccaacccaagaccgctagccccgggggctgtttgaaaatttgggggggtcaccacaacagctgccagacagtcagggcgctaccgcccgggacgatctggctgctccccatgctgaacaccctagctaactcgctgctcctctttaagcgctatggcctctggctactcacgatggacagatttgtccacgaaatgccgcaaaaatacatgatgtactacaatggctctgaaaacgagactgatgattgaca

SEQ ID NO: 102011 - DNA, 2202 bp, Oryza sativa
  Clone ID: PAT_MRT4530_99576C.1
atggcgatcattattcctggttcgttccatcgctcaaccgccctgcgagtcatctctgtattgtttgtgcttgcagttgtcgtcccagatgcaggtgggcggcatcagcatcatcggcatgactgccttccgttcacctgcggccgtcttagcaacgtgtcgtctcctttccgccggcgaggtgacccatctggatgcggttttacatcctacgagctgacttgcaccgatgacaaggctacgattcagatctacgagggaacgtactctgtgacgggcatcaactacagtgattctaccttctgggttgtcgatgccaacatctcggattcacctaacacacttcctcagaggattgttccaccttatccaactacaaccctgaatactggttgccacaccatccatatcgagctggagcctgcttcaagtaggtggtcagcctttgtgaattgttcgcaggaaataaacaacaatgagaagtacaggcctgtcgcttgcctgaataataccagccgttccttcgtttacgtgctaattggcagcatatactcttgttatattgataatcttgagccttcgtgtgggcacctggccattactcctttgcacggcaacgacacaagagtgctagaagagaatccaagctgcgaggatgtcgtcaaaataatgagaggtggattcgctgttcggtttccttacacgattgatgctgcgtactctttcaaggagtgcagggcagagacatttcgacatttccgagaagaaccagcgtctagtgcaggcatcaagtacactatggcagacactgcgacgttcgacattcgttacatggcatgcgtaatccgtgtagctagattacctgcagctgtcaaattgttcgttctactaacaataatcgccatgtggcttctcaagtggattgctgatgatccttattgctacattctagttttagattgcctagctttttatcctcaagtttcctgcactctagcggcattcacaaatgagatttgctccggtccaacaaaaagtaactcgaggtaccggtacttcacgctgggcatgacgggcattgttagatctaacgatcggaaacaatttggtgccgtgaagtaccgctatctcgaggttggggggggggggggggcgccgctggtagtaatgacattcctggcacacaagtgctggaagaagaggataacaattgacgcagtcgacaagtttcttcgtatgcaactgatgcttggaccaacgaggtcacttcagggatcggagaagctcggccaaggaggctatggttctgtgtacaagggtgttctactcccaggcaatatccatgttgctgtcaagatactggccaactatagttgtgacggagaagaattcatcaacgaggtctccaccattggtagtatccatcatgttaatgttgtgtcgttggtgggcttttgtgccgaggaaacaaggagagcacttgtgtacgagtacatgcccaatggatctctggagaagtacatcttctcgcctgagaagagtttctcttgggaaaagctcaatgagattgcactgggaattgctagaggaataaactatttgcaccgagggtgtgagatgcaaattctacattttgatatcaagccgcacaacatccttcttgacagcaagttcattccaaaagttgctgattttggccttgccaaactgtacccacaggataatagttttgtgcctgttagtgctgcacgaggaacaataggttatattgctcctgagatgatatcttggagctttggtgtcatatctagcaaatctgacgtgtatagctttggaatgcttctgttggagatggttggagggcgaaggaactctaagcaggatatgtcgagctcaagccaagcgtattatccatcatgggtgtataatcagctggctcaacaagagttgggtgaggtggttactagtgcctttaatatgcatgagctggaaaagaagttgtgtattgttgggctgcattgcattcagatgaattcctatgatcggccgacgatgagtgaggtcatagagatgcttgaaggtgatgttgatggtctgcgattgccttctaggccattcttctgcgatgatgaacctatgccacatctggtggatgttggatttgatagaatcgatttggcacaaagtggaactataaattaa

SEQ ID NO: 102012 - DNA, 1389 bp, Oryza sativa
  Clone ID: PAT_MRT4530_99577C.1
atggatacatcaggcatgttcgccgctgcgcaggttccgaggcggcagaggtcgcggcgtgaggagtcgatggaacgcacggagggccaagtggtggtcttgacgccatccgggagtactggcaatggagatggagatggagctctggtggtgtcgaccacgtcgtcggacagaaatagaacgccgcgagttcgcccgagggagacgacgacggtagcggcggccgctgaccgtagcgtgctcggcggcaacggtggcggcagtgttgacgtggccgacggcgactccaacaatgccgaaaaggagcagcggcgcaaggaggaattcgatagagagcggcggcgcaaggggaagatggtcgccgaggaagagagcccatcaaccgccagtggcggcggcatgccaatcggcctgcccgccgccgacaagctcatgggtgacgccatccgaggtggccgacgacagcacgtgacgacagcgatcggaacctgcaagaacaccaagcggcgcggccacggcaagttctgggccagcctaggcagagacggcgcgtcgacgtcttcggcagggtccgacatggtcgtgccgcttgacgacattgccgtcgtccacgaccggctgcgcagcctcctcaacggcctcggcgccgtctcgccgccggtgcgcgtctacggcaagatgatgtggcgttccgaccgtttgaaaagccaaaaccgtttacaaatatcacgcaagaaggatggcgagttatccccgtttgatagcatcctaacgctggcggagaagtcagccgccacaagtaagcgcaaaaagaaatccagcaagcctaaaaataagaagaacggtgagtctaaagagaagaaggatgagcataaagagtacaatgacaatggcacgaacaagcctaacaatgagcctaacaatggtgatgatgggctgttcgtgcaggcctacgaccgcaccggcgaggagtacatcctcacgctgaagtacattaaagctaataactcgtatcgtctcatgggtcgtccatggaagacatttctgaagaattgcagtcttaccctccaagaagacgccaagaaaaagggtaagaaggccatcaaaaaggtgaaaaaggttgccattgctaacgaggccatgatcgatctatgggtgtttcgttctcagaagttgagccatggcaaagacgaccacaatgacggccgcctcgggctggttatggtgcactacttcaaaggtgatgctccacatgctgacgccgccttcaaggccaacgaggagctactactgcttgcgcccaagaagaggaagaaaaaacatgagggtgagtcctcatcgcatgatgcggttacggaggctttgccacaggaggagccacgtggttag

SEQ ID NO: 102013 - DNA, 696 bp, Oryza sativa
  Clone ID: PAT_MRT4530_99578C.1
atggcggaggcggacggcgaccgtggcgtcgctgccgccgccgccgccgccgccgtcgtccacgacgacgtcctagagtctgacgaggaggacttcaccttcgcggcggcggcggctgtcacgtgtgtggttggaggcggccgcatcggcgctgtcgtgtacccggtcttcggccgcccgcggtcgccgccgccggtgcaggaggtggaggagcctgacacggccaccgtgcgggtgccgctggggcagcttctgctggaggagagggcgtcggcgccgccgtcgggggagcaggccgacgaggatggcgttcttgacggcgtgccggcggagacgtactgcctgtggtcgcccggatcacccgcgccggcggtttctaactctccggcgaggtgccagaagagcggctcgaccgggtcggtcctccggtggcggcagcggctcatcgggcggagccacagcgacgggaaggagaagttcgtgttcttgagctcgggctccgacgtccgtagtaaggggaggacgaccacgacgtcgcgcggcgatgccggtggccgtggcggcggctggagatattacgcgagtggaggcggcaatggcggtggccggaggccgtcgttcctcccgtacaagcaggatctcgtcggcttgttcgccaacgccggcgcgttccgccggagctaccacccgttctaa

SEQ ID NO: 102014 - DNA, 1602 bp, Oryza sativa
  Clone ID: PAT_MRT4530_99579C.1
accatcttcacattgtgccatcatatatacaaaagtacagcatagtaacatgagggacaatatcctacattttcagtgggtagtttgacttgacttcctgctactgttgaagtttacagcaatgaatgaatgattgacaactggaccacagggactcgtgatttttacattataaaacaaaagagagcaacaatttcaaacatagcttggagatgttgaaatggtacaaggggcagtgagaagttgaaaggagcacgattgcaattatgacaaaaatgaacatgtttttccaataagaacttttagaatcctgcgactttatttgcagtgtaacaatgtcaaggaaagaggatcaactatattgcagtcgtagcttttgctctgtcagcttcaatcatggcttttatgtagaactcaccagctttgtaggaagatcgaaccattgggcccgaagccacataacggaagcccatgtcaacaccaagggatcgatacctctcaaaggcttcgggagtaacatactcggaaacaggcatatgacgtttagatggtctcatgtactgaccaaatgtcattacatcaacaccagcagccctaaccttttccgtcgtgctgataacctgatcaggcgtttctccacaacccagcatgattgatgtctttgtgagggtaccagctggagcatactcttttgccaatttcaggacatctattgattgcttgaagttcgcacgatgatctctcacatttctttgcagctcttcaactgtttcaatgttgtgggcgaaaacatgcaacccagaagtagcaaccttctctacacatgctgggtctccacggaaatcaggaacaagtgcttcaataagcatttctggcttcaacacctttagcttttgaactgtttcagcaaagtgaccactcccttgatcaggtaaatcatcgcggtcaacacttgtgatgacaatatactccaggccccacgaggcaatagcttgagcaacattagaaggttcatcaggatctggtggcggaggagttcgcgaggtcttgacattacaaaacctgcagccgcgcgtgcaggtgtccccgaggatcatgatggtggcggtggcggtgccggtctcgccgccggaccagcactcgccgaggttggggcagcgcgcctcctcgcagacggtgtgcagcttcagctcccgcagcttggccttgatccccgcgtacttggcgccgcctggtatcgtctccttcatccacttgggcttgggcagcggcttcttccgcgtccccacctccaccgagtacgtgaagtcccccagcgacggcgcgtccgcctgcagccgctgccggagctccgcgagccgccccgcggtgggcggggcggccgcgggggagggcgtggacgggtcgagggtttggaggagcgacggggtggaggagatggagcgggagggggcgtaggtcagggcgcgggccagggaggcggcgaggtggcggcggccgtgcatggctgcggcccggagcgcacgaccgccggcggcggcggcggcgggagttggtggagtagggtggggaccggagcgacgatgagatggagcctcgtgc

SEQ ID NO: 102015 - DNA, 2683 bp, Oryza sativa
  Clone ID: PAT_MRT4530_9957C.1
atgttggagcagagagaggagaggcgtcgttcctcgaatcttggcggagccctgagttggggtgatctcagagcactcccggcttctcagagcgtcttggaccaagcatgcctccaaatatccaggtgattgagtcggcatttcagcaagaccgtggtcagcctggccctgtggagaacttctcaaacagtcattcttggaggcaaaggacaggtcactgcaatggctgctctgacggagcttcgcaagatcagcaatctgctgagcgagatgtaacagtgtaagatgtatcgcccattctttcccagctttctagctcagctaaggcctggtagtaataagtcaggtacctaggtctttttcattcagcagtgcttggcactgcttgaatatgtatatatagattcgattcgattccattccattgagtaaatcatgtaagcattgtacaaggatcacccgtggatttacctggcgcgtgatgagggagtagttctctccggcattaggaagctatctaatgatggatgaaattttgtaagataaactttttaaggaagaataagcagaatatgttgcaataaaaacaacaaaaatagcaactgaacttgatgtcttctgtcttccagagattattaaattttccaacgaatattgatgtgcagaagctaattgagaaagccaactccctacagtctattgcaattgatgcgaacacttcatcctcatctttccttttaaagagggttggctatgagtttgacagagttcacagcaatctctcttcttcaactcctccggatctagctcaaatctaccacctgttattgaagcctcatcagcattatttcatttgctctcaattgttgagccaaccctccataatcatttcattgagttgaaagtggaaccacagtggttcgcacttcgttggttgcgagtcttgtttggacgagaattctgcctcaatgatcttttggtagtatgggacaaagtttttgcttgttcaaacaatatgctgctaagtagtgatgaggaatataactttcgtatcttgtgttcagatagaggagcatttattgcagccatggcagtttctatgcttcttcatattaggtcgtctttgttggctactgaacttgatgtcttctgtcttcagagattattaaattttccaacgaatattgatgtgcagaagctaattgagaaagccaactccctacagtctattgcaattgatgcgaacacttcatcctcatctttccttttaaagagggatagctatgagtttgacagagttcacagcaatctctcttcttcaactcctccgagaactccattgcatcctgtttctgagagttactgggaagagaagtggaggaatgtgcacaaggacggaacaacccccaaggaggttgagaggggcaattcttttagtaaacaattaaagaaatctttgacccagaagcttggtttatctaggacagagtcagatccttctccagtgaaggtcctcagtgtgagtagtaatgatactcggaattcagtaagacgttgccttctgaatactttatcagatgatttggattgttctaatgaacttgccgggaaaactcaggaagacgaattccctatcatctcagttcacagggagcatcctctgagctctgcagagccttccaagttaaaggcagctggtgaaaatgtaactgtgagcgcatcatgtgtggcaaaactcagccctctaaaaaaatctgtggttgagccagctaatgagaacgcaacacaggggacaaagtgtgtaccagaagcttgttccagcggtgagaactctccagtgttctatgcagccagagccagtgctggtaatgaacctttgaatggccaggacacggattctgagagtagcagtgttacctcaaattcctttgctggtgaccatgatagggatgaaattctgaaagatgagccatccagctctaatgatgataacaaaaccatccaagattcagaagcagcatcttctgataaaagtccagaccgaaatggaacctctgagagggctgtcgtttctaatgaaagaaagccattcattagtaaattccagtggctcttgaagttgggaagaccttcggttgaaggcaacatggagaagagtagtggagagacatcagctgataaacaagacggggacacatcctgttctccttctgatgggaattcaaataactcccgtggtagcgtaaagttggcttctggtgataaaaaggtcatgggcagcctaaagaatcttggacaaaacatgcttgaaaatatccaggtgattgagtcggcatttcagcaagaccgtggtcagcctggccctgtggagaacttctcaaacaacattcttggaggcaaaggacagattcgattcgattccattccattgagtaaatcatttcatgtgcagtaccattcagaagcattgtatttggcaacaataagaaaaatcactgctgctctttctggcttccagtgcgatatccagggcattgcaccaaattgttcagagattttgttggcagctgtattatttattagctgggctcatgctgtccatgcatcctggcacaacccagagacagaaatgcagcaaatgctgatgtttctttcacgcatactttccatatggctatggtag

SEQ ID NO: 102016 - DNA, 341 bp, Oryza sativa
  Clone ID: PAT_MRT4530_99580C.1
tattttttttggggttttttttttttttttttttttttattttttttttttttttttttttttttgcacaaaagacaggccattaagtttattggacccttccaaatttccaggggttaagtaaaactttttttacccaagaagtcctttagctttgtgaatttacaagggtcaagcaaagtttctatttctttgggaattcataaaatccattaggcaaaattactccctcagccattagggtttttcatttttaaggattacaggcttgaaagctttatttcaccattccttcacatgcccattctttttggcttaatttgcagggggttttaaaaagg

SEQ ID NO: 102017 - DNA, 896 bp, Oryza sativa
  Clone ID: PAT_MRT4530_99581C.1
gacgagcgccaccaccggacaccggaggagcatcgaggaatgaggaaagatatgcgaggcggttcggctctgcctctgctgctgctgctgctgctgtgctgctcgctcgccgccgtgcagccggcgcgcgcgctcttccacctgcgcggcgcgggcgcgtacgtcgaacagcttcgcggcggcggtggctacggcgaggagaaggtaccgatgacggtcgtggtgccggactactcgccgcggccggctccgttcggggcgcccgcgcccgcgccggcgataccgccgttgcctggctcggacgacggccggcggcggcgacatgccgacgctgccgtctgagcggcggagcccgcgcggcgcgcttcccggaggcaatgcgggtgctgaagccaacgccgggcgcgccgtcgcctgccgccgcggcggcaagcacgagcacggccttcatcagcagcagcccggcggtgccgctccccgccggcgtcaccgactccgccaccgtcctgcccatgcccacccccggccaggaacagcagcaggccgtggggatgggcaccctgcctcgagccaggacggtgcaggtgcagctcgccgttcctctcgtcatgatgctgttcttttcggctctctggcgccagttcgcctcctcacgatcggcgccagttgttgttttactgacaactgcgtacgtcgaaggacctttttactcaacagttgttggaaacgggcttgggttttacaggggaatttacatggttgcccttatgaaagggacacttacatgggtatacagtgtaattgaggtatatgggcctctaaagggccgactggcgaacgttggcccaatggccaccgggcttgagcggctgggatggcctcttgggtcttcttga

SEQ ID NO: 102018 - DNA, 1563 bp, Oryza sativa
  unsure (1)..(1563): unsure at all n locations
  Clone ID: PAT_MRT4530_99582C.1
cccacgcgtccgcccacgcgtccggcgggtgatcagcctcctcctccttcttctccatcgccggcgagagagagagagagttagctagctaggatgggttctacagccgccgacatggccgcggcggccgacgaggaggcgtgcatgtacgcgctgcagctggcgtcgtcgtcgatcctgccgatgacgctcaagaacgccatcgagctgggcctgctcgagacgctgcagtccgccgccgtcgccggaggaggggggaaggcggcgctgctgacgccggcggaggtggccgacaagctgccgtccaaggcgaacccggcggcggccgacatggtggaccgcatgctccgcctgctcgcctcctacaacgtcgtcaggtgcgagatggaggagggcgccgacggcaagctctcccgccgctacgccgccgcgccggtgtgcaagtggctgacgcccaacgaggacggcgtctccatggccgccctcgccctcatgaaccaggacaaggtcctcatggagagctggtactaccttaaggacgcagtcctggacggcggcatcccgttcaacaaggcgtacgggatgacggcgttcgagtaccacggcacggacgcccgcttcaaccgcgtcttcaacgagggcatgaagaaccactccgtcatcatcaccaagaagctgctcgacctctacaccggcttcgacgccgcctccaccgtcgtcgacgtcggcggcggcgtgggcgccactgtggccgccgtcgtctcccgccacccgcacatccgggggatcaactacgacctcccccacgtcatctccgaggcgccgccgttccccggggtggagcacgtcggcggcgacatgttcgcctccgtgccccgcggcggcgacgccatcctgatgaagtggatcctccacgactggagcgacgagcactgcgcgcggctgctcaagaactgctacgacgcgctgccggagcacgggaaggtggtggtggtggagtgcgtgctgccggagagctccgacgcgacggcgagggagcagggggtgttccacgtcgacatgatcatgctcgcccacaaccccggcggcaaggagaggtacgagagggagttcagggagctcgcccgcgccgccggattcaccggcttcaaggccacctacatctacgccaacgcctgggccatcgagttcaccaagtaggtgattggtgatcgatcgccattgttgagctcgatcaaggtgttcgaccatcgtcttcttcttctcgtacttcttgttcttcatccaaaagcgtgggtaatcatgtcgtttgctgctggctgatgctgctgctgcttgtgttgtacttttgatgttcaattccggtgattctgagttctaatggatgtaacctgtctgctatttatatatatatataatcgaatatatgatatatttacttaaaaaaaaaaaaaaaaaaaaaaaataaaaaaaaaaaaaaaaaaaaaaattacttaaaaaaaaaaaaaaaananaaanaannnnnccccnnnanaaaaaaaaaaaaaaaaannnnttctaaag

SEQ ID NO: 102019 - DNA, 327 bp, Oryza sativa
  Clone ID: PAT_MRT4530_99583C.1
atggtgggtggcgacgtgggcgcggggcgcggagtggggcgcggaaggcgggggaggcgggcggcgtcggtggcggtttcggcggcggtggtgccgtcggctggaggaggaagaaggggccgacaggcaccacccataaatgcgcctggagacgcccctatcttcgcccactcggccgccacgtggtggccgagcgagggcctcggggtaactcagaccctcgggcccgaggagtgcgacaagataccgcgagccccttatacggaattgggcgcctcctggctatttattacccgcgcgtctgttcctccgatggaggagcactag

SEQ ID NO: 102020 - DNA, 2181 bp, Oryza sativa
  Clone ID: PAT_MRT4530_99584C.1
aaaccggtacaatctgactctcttgatggttttggagggcggtttcgctaacatggcgcctacatgatgatgttgactcagttttcggtccatgtggagttgacgtggtgtttgtgttctagaattaaagaaatatgtgctgggcccatttgtcattcgcactaaaataatgtgggacccactgacatgtatggcccacatgtcattcctgtttccttcttcctcttcctttttctccattctctctctttctctttctcccatttctcttcgtcttgtgcgaaatcttctcatttcacggcgtgccgaaaatggcaaggcgcagcacgagccatagcgccgtaactcgagcttggcctcagactggagcgtcgtgagcgcgcatgggaagctactggactcgaggaatgcggcgaccgcggccaccacagtgggcctcgtcgtcgcgtcggggacggcggcagcggcgagcccttggaggacgaattggtcatgctcttctccttcctcgagtccttcatggctccctcttccgtctacgccgctgctgccgccgagccgccgccgggttgctgcctcccctcccgctcgccgccgcggccgcttggaccctcgagcgcccgccgctgctgggctggtcaggggcttggcccaaatctgggtccccgcggcaatcactgcaacctcaaggatttgacaactacttggaagttggaacttggaagaccagtcgcgcgtgggtacggttgggctcttgccacgtcctgccacacactgccgccccggtcctatcgatcgaagcgcgcgcgcgttccaaactgcgacatagggtagtacgcatgccgcgagcgatcgagcggttgcagcatgaattgggcaaaccaacccatgcacgcacgtagccacgtactccaacgtgcgcctccgtcgatcgccacctgcggcgctctctctctctctctctctctctctctctcgataccaatgatggcgacgacgacggtaacgcaccctgccgccgccgccgcgctcaaccacgagcgccacctcctccgccggctcgccgtctcttctcccacgatcctccacgccgcgtgggtcacggccctcgtcgccgtctgcctcgcgctctgcatcacccactcccgcaagccgctgccctcctcctcgtcgtcgtccaaggctgccaggcgcgagcgcggcgcctcgtcctcgacacggcgccgttccgcgccaggggatgagggcagcagtggcggcgtgggaggctcctccgccaaggccgccgccaccgccgccgccgccgccgccgccactgccacgacggcagccgaggtgtccccgacgccgagcgacgtcgctgccaaggccaacggccgtgtcggcgagactcaggcggcggcggcggcggcggagggagcggctgtccccgtcacggtcatcgacgtcgggacgcacggcccgatcgcgccggcgttcccggcgcccgacccgctcccgccgcggcggagcctgtcggcgaagcacatgcgcctcgcggagcggctcgggtcgcggatatggtcgacgcggtgggggcgggacgaccacgatgacgatgacgacgaggacgcaggcggtgacccggccgccgccgccgacgagggaggcaccacgctgtggacgaagacgatcatcctcggcgagcgttgccgcgtcggggacgacgaggacgaggacggcggcggcggcgcggtggtccggtggaggagctaccggccgaggcagccgcggtcgctgccgatgacgcggagcaactcgttcgccggcgtgggtagccgtagcctgcagctgcaaggcggcggcggcgcatccaggccaccacctgccgccgacgtgcccttccatctagcggttgaaccacttgttgggttgtcaccaggtcccaaggtatacgggatcagcgccaatgcagtggatccacgtggtgctgacccgttagagctcagtgccaacgagactggcgctgagcccacagcctatttttggttgaagtttttggcgaggatgacgaatgcctggggtcagaatagtcgagcatctgtgagctcctacgtggaggagcacttctttggaatgtcccaggacttgcatctggtcgccttaaggatccgcttgaccgacccaacattgtcgaactag

SEQ ID NO: 102021 - DNA, 381 bp, Oryza sativa
  Clone ID: PAT_MRT4530_99585C.1
atgacgtcagcgacgacgtcacctccggcggcgcttcggcacgaacggaggataccaacgggtagagcgcggcgcggcgaactcaccggtaaccaaaacggcggcggaaaagcaacggacggcgccggcgacgaggaagaagcggcagcggagatcgggtcgacggcggcgacggtgcttcggcggtcttcggcggcggcgaaacggtggacggggaaggcggcgacttggcgatcccgacggtggccttcccgagcgacggcgacgactggagcgacggcggcgcacggctggagcggcggcggcgacggcggcgctagggcacacggcgctagggcgctacggacgacgagaggcgaaggcgagggtggcgacgggtag

SEQ ID NO: 102022 - DNA, 245 bp, Oryza sativa
  Clone ID: PAT_MRT4530_99586C.1
aatatatttgactagagaatacttaatttcactaatctgaaatccttatgcattttcagaacatgtaaactcaaaagtgttgctagctcatactaatgtgtttttttttttttactggaaagctcatactaatgttgttgccactttctacctatgataaatagaaattcatgagctgaagagaagaacataaggctgcaagaagaaccgaccagctatactaatttaatgtttcatttactagc

SEQ ID NO: 102023 - DNA, 1187 bp, Oryza sativa
  Clone ID: PAT_MRT4530_99587C.1
atggccatggacagagctcgtcgtcgtcgtcatcgtcatccaatgtcggcagctgcgaggtcgagcgcgttcttgacattatggagcgcggtggtggtggtggcagcagtggcaccgacggtggcggcggcggggttcagctgccggggcggggcgcggccggtggtgttcaacttcggggactccaactcggacacgggcgggatggcggcggcgatggggtggcgcatcaggcggccggagggccgcgccttcttccaccaccccaccggccggttctgcgacggccgcctcaccatcgacttcctctgtctacctggtcgagtcgttgctgaagggttccgaaatgctctatacatgatagatatcggacaaaatgatgttaatgctcttctgtcctacttgtcttatgatcaagtagttgcaaggttccctccaatacttgatgagatcaaggatgctatccagactttgtatgacaatgggagccggaacttctgggttcatggaacaggggctcttggctgccttcctcagaagctctccattcctcggaagaatgacagcgatcttgattcaaatggttgccttaagacctacaacagagctgcagtcacattcaacgcagcgctgggcagcctctgcgatcagttgagcacgcagatgaaagatgcgactatcgtttacaccgatctgttccctctcaagtacgacctcattgcgaaccgcacaaaatacggtttcgataagccgctgatgacatgctgcgggtatggtgggccgccttacaactataacatcaccataggctgccaggacaagaatgcctcctgcgacgacggctcaaagtttgttagctgggacggtgtgcacctcacggaggctgccaatgccattgtggctaagggcatactgagctctgactactccagacccaagatcaagtttgatcagttctgcaaagtctgatgatagatactctaccttaaaatcctaatagctttcaagttgaggaaaataggagagtaagagagaaagtggcatttcatttcatccaggtccaaaatggaccttcatatgtgacaataatatttctctgttcattttcaagggaatgcgatttataatttgttccccctttccatggttatatggaaacatgatatctcgcggggaaaaaaaaaaaa

SEQ ID NO: 102024 - DNA, 515 bp, Oryza sativa
  unsure (1)..(515): unsure at all n locations
  Clone ID: PAT_MRT4530_99588C.1
cgccgctgctcgctttctcccactttgccagcatggaggtgtctaacattgttgggcaccccggctgggcccctgcaggagctcagtttgccctgttatttttctgagatggggaatacattgtttgagatttggaaaagctgcgaccgcactctgaccgatatctgtgaaccaatggatggaccctgcccatcacgcacatccccaccaacaccttgtgctgactatgatcaggttgttcgtacacggctgccatgcttggtgctgtcccataccgctactcatgggctggacggagagattgaccttgagagcctacttatacgctggctagaggaactctcgccactgtaccctgccatggttaatgaccaagtggtttgacacctactaccactttatcgggcctggaacttggaaccatcaccaacctttactactcttccctcaagggtgtgtttgaatgcaagnaggctaaagacgctctgagctgtacaccgtgccaatacttgttg

SEQ ID NO: 102025 - DNA, 1516 bp, Oryza sativa
  Clone ID: PAT_MRT4530_99589C.1
cgcttcctttccggttctcaaaaccttcggctccccgtcgtcctcctcatcctcctcactctgcccgttgcaaattcaaatttggattccccttcctccccacacgctcccctcctcctgccgagccgaaaccctaacgatccaattcctcctccctttgggcctcccaccatgagcgccgccgccgccccagcagccgccgtcggcagcggcaaggagctcgccaacccgccgacggacgggatctccaacctccggttctccaaccacagtgaccacctcctcgtctcctcctgggacaagacggtgcgcctctacgacgccgacgcgaacgtgctcaagggtgagttcgtacacgccggggccgtgctcgactgctgcttccacgacgactcctccgggtttagcgccggcgccgaccacaccgtgcgtaggttagtatttggttcagcaaaagaggatcttttaggacggcatgatgctcctgttcgctgcgtggagtactcttatgctgcaggtcaagtcatcactggcagctgggataagactatcaagtgttgggatccaagaggtgtaagtggaccagagcgtacgcttgttgggacatatgctcaacctgagcgtgtatattctctgtcgttagtgggggaaagggcggttgttgcaacagcaggaagacatgtcaatatttatgatctgcgtaatatgtctcaacctgagcaaaaaagggactcttctttgaaatataaacacgttgtgttcgatgtttccccaatggaacaggatatgccctaagttctgttgaaggacgagtttctatggaattctttgatctatctgagtctgctcaatctaaaaagtatgctttcaaggtgtcatcggaaatcagaagctcgccgggacaccgtttatcctgtcaatgcaattgcattccatccaatatatggtacatttgccactggtgggtgtgacggatttgtgaatgtatgggatggcattaacaagaaaagactatatcagtattcaaagtatgcgtcaagcatagctgctttgtcatttagtaaggatgggcacctgctcgctgtggcatccagctacacttatgaagagggagaaaaatcccatgaacctgatgcaatatttatccggtcagtgaatgaagtggaagtaaagccgaagcctaaggcactggcagcaccttagaagtgttttagttgtctcacgacaggggtaatcgtgtggtttgatgtgtatggtaaaagtaaagcgtcattcaaattagtatttttgtatcctcgcaagaaaaaaagtatttatgtcggacactccatttccctagttctcttaagttcatgtcaaccacatctgttgacgaaattccttgtttatgttgaagggatggtcagcatctaactctgttgcctctgcctgttcatttcgcttggaacctctaaaaatatttgcttaaatgttgatgtattccatattattgtatattatggaaccatgttcattt

SEQ ID NO: 102026 - DNA, 481 bp, Oryza sativa
  Clone ID: PAT_MRT4530_9958C.1
gttcattgctactttggtagaggatggttttgtaacccccccccccccccccccaaaaaaaaaacatgttaatgatgaagtatactttagaatgttgaagttgaagtacaaccgtatatcagacacagatgcatacatgacaatcacgaggttaggttacctgtaatcatacccggggttaccagctgcctgaaaatcattagctgaagagcattactgatctcaccatatccacgtataatccatgcgcatgttttataggatatgtgcataattcatatcacttttcttgaaatggcgtcagcacaagctgccacatccagaccaaccttttcttccgattaattctgaccagaggtgcaccttctccatctgatctttgcaagaactcagagctcccagtttcccatgaagcacatcgatcatggtatatataagagatcatggagtgcttcaagaaggttatgggaaagaacttaac

SEQ ID NO: 102027 - DNA, 418 bp, Oryza sativa
  Clone ID: PAT_MRT4530_99590C.1
aatacacaatctttcaaccgatgccgcctcctgtcattctgacaaaataacgtatagacattatctatggatcattttctctgatggggccaaaggatagaataaaggatgcgggcagaggtaatccaaacacgatttaaatacaaacaccacatcgccttgttttgttccaatctcccacaccatacaatcatagcgctgtggcccaacttatttgtgtgcctgccattcaaacctaacctaacaaaaatctagatccctacccggaggagtgaattggctcaccgcgcaaggagatatcccctccaattggccacagattctcccctttagggcgctgtgtgccggaaggaggggtttctgctcttttcagcatattaacaatcctaacaactggttaaccagtgacgcccccata

SEQ ID NO: 102028 - DNA, 501 bp, Oryza sativa
  unsure (1)..(501): unsure at all n locations
  Clone ID: PAT_MRT4530_99591C.1
ttttttgtgacggagggagtagcttatatgagatgggccgtcggcccatctctctccccgcgctcggcacccctttcctgggcctggccgctcctccttgcccgcttcccgaagtcctgccactgccatgcaactttgtgcttgtcgggcgccgacagctccgccgccgccgccatctccggcgcgtncgtcgccactagggccggccgcgctagctccgcgcgtgtggccatctcggcaccgctcgcgtcgcggaaccccatcggaaccccatctccctcgcgagccggtgtcgccgccgctcgtccgccccttctctcgtcgggtcgtcgtcgccgccttcgtcttccgctccggccgccgtgtcgccgcgccggccacgctgctgctccggccatgcgccgccgcctttcggccgtcgccgccgcttcccgcaccgccggtcaccgccgtcggtggccgtgcctcgccgccgccccgccttggtcggccggtcgtcct

SEQ ID NO: 102029 - DNA, 1137 bp, Oryza sativa
  Clone ID: PAT_MRT4530_99592C.1
atgacaggatggtgtggaagtaccaaccacaaggaccgcaagcagcaatatgccaagaaagcacgtaagccgactgatgaagatcaaagcacgtcgaagaagaaggatgatgaagacgatgcaccgactggttttcaagattctcgcaaggaactcaatcacatttttggtgggcccctggcttacgagtccaagcgaaagcaaaagctgactgaacgggagatcaacgccatccagcccgatacacctcaatatcttcggtggtcagagacagcaatcaagtttgaccgcttggaccaccctgaccgagtggtccacccggggcggtaccccctgcgggtgatccgcctcgtcgtcgggctctggctttcggcgctgcatgatgtggaggagacgaagcactcgtccttgtggatgcggctgccgggctccaggatgcagaccttgtggaggtgcgagcggaggagatccatggctgcagactacgccgggcggtggcggaggacgaggagcggcgcggcggcggctagggttttgagggtggagacggcgaggcgacgagatggcggggacacggtggtcagaccagcagcggtgataggagccaagggcgattttttggcgaacaacaccggtcagatcaaaggcatatgcgcggaggaggtggcgacagtagggggagggcagtcgttgacggaggcggcggcgggatggcgcacggtggcgatggggaagggcggccagcggcggaggcagccccacgcgccgggggggacatccatatgggatactatggtgttcgggcatcaaggtgggccccaccaggcggtggctcaaaggggaggcgagggaggcgccggccaagctcagctcggcctcaaggacgaccggccgaccaaggcggggcggcggcgaggcacggccaccgacggcggtgaccggcggtgcgggaagcggcggcgacggccgaaaggcggcggcgcatggccggagcagcagcgtggccggcgctcgcgggaaggtgaggaaaggagggggagggaggactcaccggcgacacggcggccggagcggaagacgaaggcggcgacgacgacccgacgagagaaggggcggacgagcggcggcgacacctag

SEQ ID NO: 102030 - DNA, 1527 bp, Oryza sativa
  Clone ID: PAT_MRT4530_99593C.1
atggccaagctggccgtgcctccgttgctcgttatccttgtcttgctccaatctgccacccgactccccgttgccgagacgagcacggcagacgaagagtacatgcaccgtctcccggcggcgacgggcgcggagcgcctgctcggctggaaggcggactccgatccatgcaacggcagctgggtcggtgtcacgtgcgcccccttcgacggcaacaggatcattcagatcgacgtgcgaggcctactccgtggcggcggcactctgccggagcttgaccggcaggccggctccctctcccacctccggatgctcgacctcggcgacaacaacctcaccggcccggtacccacgctcttcctcgaccggctgctaactctgcgcctcgacggcaacgccttcagcggtttgccgcattccttcttccgcggcatgcctgagttgcactacttctccatcagcgacaacccaagactcgaggagtggggtctgtggtcggatctcctctctctcacggagctaagggtgttcaatgccagcaatgccaacatcaacggcacgttgcaggtttttctcggcaacctcggcgcgttccctgccttggctgaggtgtcgctcgccaggaaccgtctcaccggtgttgtgccggagaagttggtgagccagagcatcgccaagcttgacctgagcagcaacgggctctctggatcgatcaacttcatcaacaacctcgcgtcgtccatcaccgacctccgcctcgaccacaaccacttctccggccctttccccgccgacctgagcggcctctacttgctgagcgtcttctccgtcgctcacaaccggctcaccggcgtcgtgcctccgtcattggcccgggtctggcgcctttcgtgggtgtctgtctccgacaacctgttgcaggggccagtgccggagctccctgactcggtgaaaacggacttcgccgaggcagctgtcaaggggagcttctgccgcctggacgtgcacggcccttgcgatcaggagaccagctctctcctgtcggtagccgccgcgttccactacccggagattctcgacgttagctggaggcgagacgatccgtgcaacggttggctcggtatacactgcggcgatggcgatggcggcggcggcgggcggaacaaggtgaccggggtgaacctgtcacgcctcggcctcaacgggaccatcgacccggccttcgcctcgctgctgtatctggaggcgatcatcctcgcgggcaacaacctcaccgggacggtcccggcgtccatcctgcagatgccgtctctccgcgtgctcgacgtctccaacaacgcgctagagggaaccgtgctgagcgtccggcacgatgtgctgatcttggctgatggtaacagaggagggctcaacgtgaccgccattgctgcctctggcagcttctcgtcttctcggttccagctctcagaggcaacaacgccattccttacctttgctaccgtctttgttgcactgtttggttattag

SEQ ID NO: 102031 - DNA, 621 bp, Oryza sativa
  unsure (1)..(621): unsure at all n locations
  Clone ID: PAT_MRT4530_99594C.1
ccagttccgacgcacttctgggagttcttataatggtcaactccatgtggaaggttcttgatcccccatgatgtgcacagccagatattgctgtctcaagacccatgatgtcccctgtggtaaccccattgaaggaaagcctagaatttggaggaagctcctgggaacaagggtgacatggaaaatggtagcaagagatgacacgtctgtcgatgtccatgtttagtccatcggcaagatgaagaaacccttgatacactggatttgggacatatagttgatgctgctgtcaagtctgaaataaaactagntttcatagatgattttttgtgtgttaagacacnatagtttatatagcttgtgttcataaaaaacgagccgacagatccttaattggtgcctgtattgtgatgcatagtttgcttcatgtccacngtaagctatttgtgagattcctaactctggtgtcgttgctcaaataatangtaccaagatattaaattttacacatttccttactatttcgatttttttgatttttacattcattaggaattgtttacttcaaattctaaatcaaataaagaaaactacataacttcagtaaaaaaaaaaaaaaaa

SEQ ID NO: 102032 - DNA, 359 bp, Oryza sativa
  Clone ID: PAT_MRT4530_99595C.1
ctagtggatccccgggctgcaggtttgcctaaggggtgtgttatcagcagtgaaaagctttggcgtgtcacatcggatatatggacataaattgaagagtattaaaatgtagtttgatagcaaaacttccgtctataaattacgagacgaatttattatttaattaatccatcattagcaaatatttactgtaccaccacattgtcaaatcataaagcaattaggcttaaaagcattcgtctcgtagtttacacacaatctgtgtaattagttatttacatttaatgtgactgagtgaaaaatttttgcaaaaaaaaaaaaaaaaaaaaaaaaacaaaaaaaaaaaacaaaaacaacac

SEQ ID NO: 102033 - DNA, 430 bp, Oryza sativa
  Clone ID: PAT_MRT4530_99596C.1
ctatatgttctttcgcattaattatgattttgggtgtcgttatatgacaaatgcacacaccatgcaggtcggcagtaaccaccaacccagcttatctaatctaagtagaaatcaacaaaaggatagacctatgctgtgttcataccatgttatctaagctcgtcatcacaaaactaaacaaggcgcgcgaacgcacaccaacacatggatccctgttgaatagcgcgcgagagagcttaaattaataggatgacgagaaggtgtcccagatggtggcgtggaccggctccgtgacgtgggtggccacattggtgaggggccctttgacggtggcaggagcctgcacggggaatgctaggaaggcgaccatggcagaggcgtgcgtgctagatctacagcagctgcatgcgctcctttttctgcaggtcca

SEQ ID NO: 102034 - DNA, 417 bp, Oryza sativa
  Clone ID: PAT_MRT4530_99597C.1
actgtagttatccacaatgggcaaagatatatctctcggtaattggtgtttacgattggtcagggaacaatccaattattccagaactatggttgcttccacattttcttcccattcatccaggaagattttggtgcttttgccggatggtttatatgccaatgtcttatatatatgcaaaaagatttattgggccaataactccaactatactggcactaagagaagagctctatgatgtaccatacaacaagatcaattggaacaatgctcgcatttcttgttgcaaggtattaaatatgatttgctgctggatagaaaatccgaactccaatgcattcagacgacacgttccaaggattcatgatttcctatggcttgcagacgatggaatgaagtcaaaggcggcgttgctgt

SEQ ID NO: 102035 - DNA, 189 bp, Oryza sativa
  Clone ID: PAT_MRT4530_99598C.1
atggcacgccaccatcacctcgccctctcgctgcccatgcacaaccattgcccgtccctgccgctcgccctttcaacacgtcttaaggtgccacctgtggagatgtccgcctgggataatgcactatttccccaaacggacgtcttaagcctccgcctgcaaagatatatcttcgtaggggaatcttaa

SEQ ID NO: 102036 - DNA, 186 bp, Oryza sativa
  Clone ID: PAT_MRT4530_99599C.1
gatatggtggtgacgtctggttcccccagccagcaccaaaggatcacccatggcgatacatgcccaatcatgctatgacccctcactgctctgggactacaattgatggacaggtgcatacacacaacaccacgctcacatcctcgcgaatgcgtcccctaacccatgctctaagagacggaaagg

SEQ ID NO: 102037 - DNA, 622 bp, Oryza sativa
  Clone ID: PAT_MRT4530_9959C.1
ccaagtaccaggggccccccagttcaaggtcatcgactttagagggtggcccccacgatggattcactggagcctgggatgggaagagatataatgtggaccaactctgctgttgtgcaccggatgggacgagcacgttcttatggccacagatgcttgtgcaagaagggctgcgccacatggtgtgcagatgtggacgtcggacactggagagaagggagggactgtatgcgatgcaaccctgatactttcttgtgtagattgttgggtggctgagcccgagggtgccctgccctgtgggcccatggagatggaggatgatgcctggtggggagatttgggcacctgctggatgattatgggatataaagattcttggaagggatttgcatacactgcaggtggttggattgcatgcctggtgtgattgcacctgtgaactgaagactgctgatggcttgctgtgggtgttataacccctcgttgcggatgggtgaaccaagtgcccctatgaatgacctagaacattcactccatggctcatttgggtgaacatgtgagcttaataaagagatgtatcccatgggtggcactttctggctaaaaaaaaaaaaaaaaaaaa

SEQ ID NO: 102038 - DNA, 894 bp, Oryza sativa
  Clone ID: PAT_MRT4530_995C.1
atggatgccactaagctcgcaattcttggcttcactatgctcttattgatcattggagcgtctagcgccacgagagtaaataggtattccagcactggtgtcgaagttggaagcggaggtggtggtggaggaggaggtggtggtagctcagaaaatggtggcgggtggggatctggttctggggcaggacatggagaggctagagcttatgggccttctagtggagcatatgctagtgcaactggtggaggaggcggtggtgggtcaagcaatggtaatggttggggatcaggttcaggttttgggtctggctatggggagtctgtggcatctgggccttctagcgggcaatatgctagtggaggtggaaagggtgggggcggtggcggagggcggaatggaggatttggttattgtttggggtctggttctggaaatagtgaagggaagaaatacaaaccttatgatggagggtattctatgggaagcggtggtggcaaaggtgggggtggtgggacaaacagagaatcagggtatggtgcagggtctggctcgggttatggtgaaactattggctttggtggtgcatcatttgcacacggtggtggtggtggcaaaggcggaggtggtggacaacatgatgggtttggttctagttctggtttgggctctaggtatgggagtggaggtggtggtgggtacggtggacctaatagatttggacatggatttggttccggcgttggtataggtgaggctggtaatcaatacggtgatgagtatgcgaagagtaaaggtgacggtggaggtgccggtgatagcgctagaggtggatatggtgaaggtttaggtcatggatcgggatatggagacaccggtcctcaacagccatga

SEQ ID NO: 102039 - DNA, 316 bp, Oryza sativa
  unsure (1)..(316): unsure at all n locations
  Clone ID: PAT_MRT4530_99600C.1
gggcgcngggaacacggaggtgaggttggaggatctcgcaggantgtgtcgctccatcggccaggctcgtcgctcgtggctggtactgacgatgagcacgtcgagctccggccgattttgtgacnttgccagaccgatctgttggtccttcaccgcccccagcgccttccggatcgtgctcgacgacatctccctcgcccgcgcctcctcctcctcctccnccncctcctcctcctcaccaacaaaccaccaacaacccgccgctntagagatcctcgagggccaagctacgcgaccagcttctgtacaaagtgtc

SEQ ID NO: 102040 - DNA, 291 bp, Oryza sativa
  unsure (1)..(291): unsure at all n locations
  Clone ID: PAT_MRT4530_99601C.1
ngagcgnacgngtcntngcgtntctccggccggatcaacccaccnncgccnccggcngactgaacccgtcctcnncngctcacttacacttnccgccgccgccgtgancaacgcggccaggcgncttgatgtcgtcgtccccgcccccagncgccctgatggtgtcactgtgagcggcgaagatttcatcggtagccttnctggccatgtccgctccgncatcgtgtcgcgactcccggtcgggacgctgccgntcgcaccgggtgcttgtngtcgtcgcagtgggacgag

SEQ ID NO: 102041 - DNA, 1173 bp, Oryza sativa
  Clone ID: PAT_MRT4530_99602C.1
atggcagcactcgccgccgtcgccgttctcgtcgtcgccatggttatcagtggcggtggcggcgtcgccgcggcggtgacatccaagaagccagtgatctacatcttcggcgactcgatgtccgacgtcgggaacaacaactacctcatcctctcgctcgcgaagtccgattacccctggtacggcgtcgactacgagaccggattccccaccgggcggttcaccaatggcaggaccatcggggacatcatggccgccaagtttggcgtcccgccgccgccgccgttcctgtcgttgtacatgaccgacgacgaggtgctcggcggcgtcaacttcgcgtccggcggcgccggcctcctcaacgagaccggcatttacttcgttcagtacctgtcgttcgacaaccagatatcgtcgttcgaggagatcaagaacgccatgatcgccaagattggcaagaaggccgcagaggaggtagtcaatggcgccatcttccaagtcggccttgggagcaacgactacatcaacaacttcttgcggccgttcatggcggacggcatcgtgtacacccacgaagagttcatcggcctcctcatggacaccatggacaggcagctcacaaggctgtacgatctcggggcgcgcaacgtgtggttcagcgggctcgccccgctcggctgcatcccgtcgcagcgcgtcctctccgacgacggcgggtgcctggacgacgtgaacgcgtacgcggtgcagttcaacgccgccgccaggaacctcctcgagcggctcaacgcgaagctccccggcgcgagcatgtccctcgccgactgctactccgtcgtcatggagctcatcgagcacccgcagaagtacgggttcaagacgtcgcacacgtcgtgctgcgacgtggacacgacggtgggcgggctgtgcctgccgacggcgcagctctgcgacgaccgcacggcgttcgtgttctgggacgcctaccacacctccgacgctgccaaccaggtcatcgccgaccgcctctacgccgacatggtgagcgccggcgccgtacaggggaacgggaacgccaccaccgccgccgccgcctccacccccgcgcctcgcgtcgtcgtgggcggcggcgcgtcgccgtcgacccacgccgcgccgcctccaaagccttag

SEQ ID NO: 102042 - DNA, 2691 bp, Oryza sativa
  Clone ID: PAT_MRT4530_99603C.1
atgagaggaggcgctacaagggagctagtctagccagcgtttagacaccatcaccagccatggcgatcgctggcgttctcttcctcctcttcttggcacggcaagcctccgccgccgggtacggcggttggcagagcgcccacgccacgttctacggcggcggcgatgcttccggaaccatgggcggggcttgcggttacggcaacctgtacagccaagggtatggcacgaacacggcggcgctgagcacggcgctgttcaacgaccgattcgatcctagcttaagccgagtgaagtagctagcaggacattgttggtagtgtgatcttctccctgttttgcaacaatggcctcacgcagtagtgccctgctcctcctcttctcggccttctgcttcctcgcccggcgagccgcccccgactacggctcctggcagagcgcccacgccacgttctacggacggcggcgatgcgtccggcacgatgggcggggcgtgtgggtatggcgacctgtacagtgccgggagcttcaccaacacgggggcgtcttgagcacagtgcttgttcaacgacggcggcggcgtgcgcggcgtgctacgagctgcgtctgcgacagcgatgggcacggggtgcctgcccagctgccgcaccgtcgccccgacctgcctgagcacggcgctctacgcgtgccttagctacgtctgcgggagggacgacgctgctggccccctcttctccaggtctaaaggaagaactcccctgattgctgttggtccagttatctgacactgttcagcaggctgctgcaattgctttagtgcaagagactgtgttactagaaagtggacagaaacctcttaataaattgacatataaaggggttggcacttaggtggatacatctgttcctatctctgagccatcgaccattaaacctgaaagagctgaattatgtaaagctaaacagttgacggaatatggaaaagcgattggaccttgtcgtacatgtggggttatacaatcacgtcatcatcggtgggtgctcactgtggttgcagaaggagatgctggccgtgtggaggtttggcaagatcttcgaaggcggccagttctgatcgagtactcggctaattccgtttttcagttcacttttctgcagaaatgtcagtgtgagattgagattgaggtggaggaggagggaggcctctttgctatagtaaaagagaagaggctttggctattctgaggctgcttattaattagcacccgcttaggcctttgctttctcccataggtccagtagacataaataagttatcatggagttgggcatttttttttctgcattgttgtagccttggtttaaaatttggcaaggcaatttaaggattatattgtagaacagcagggaggtggtgtcttgtaacttttgttgttacattgtaaccccccgaatcaggccacatgggccggaggagtttgtgggggagcaccggagcactcttgtgcttttgggaccatgaactatgctagtttatgggtctatgtatatgatatgtttgtgatttgattatactttcttttgtcgcctaataaagaaaaaaaaatcaccttgtaccctgatgctgctcctgtcaacagtaaaccttacaggtattctcctttacaaaaggatgagattgaacgccaagtcaaggacatgattgattctggtcttattactcccagcatgagcccttttgcctccccagtcttgttggtcaaaaagaaagatgggacatggcgtttttgtgtggattatcgcaaactcaactctgtcactgttaagagtaagtttccaatgccagtggttgatgagttattggatgagttagcgggcacacaatacttctctaaactggacttgagagccggttatcatcaaatccgtatggtggaacaggatgagtttaaaaccgctttcaaaactcatcatgggcagtttcaattcagcgttatgccctttggtttaataaatgctccatctacatttcaatgcctgatgaattcagtatttgcatctcttatttgcaaatgtgtattggttttcatggatgacattttagtgtacaaccctaacttggattctcacctacatcatctgagacaagtgtttatgttgttgcgacagaatcagttatatgccaaaatgtctaagtgctcttttgcttgtgctcaattagagtatttgggccacataatttctgctaaaggtgtcagtactgatcctgccaaaactgcagcgatgttagcttggcctgttccacaaactgcaactgagttgagaggttttctgggcctcacaggttactatcgcaaatttgttccgaattacagcattatagccaaacctttgacagtgttattaaaaaagaaagcattcctctggtcagatgctgctcaacaagcttttcaacagctcaaactagccatgagttctaccccggtgctagcattacctaatttcagtcttccctttgttttggagacagatgcctgtgcttatggagttagtgctgtgctcagccagttgaatcaccctattgcttactatagcaaagctttgggaccagctaatcagaaattttctatctatgaaaaagagtttttggctataatgatggctgttgacaaatggagatgttatttgtag

SEQ ID NO: 102043 - DNA, 242 bp, Oryza sativa
  unsure (1)..(242): unsure at all n locations
  Clone ID: PAT_MRT4530_99604C.1
tgtttttttttgaaaagaaaaattctaacacttaacttacaatacaacaccatggaaaacaaataagagnaagacagaaaaattacatacagcaacaacctaactagggcatgacagatanagaagcagacacaaaacaaggaaccacatgaaaagaatacatgaaaaaaaaaaacacaggaactcacaactagaacaaccagggaatcacgtactttatagcaaataacgccataggccct

SEQ ID NO: 102044 - DNA, 1327 bp, Oryza sativa
  Clone ID: PAT_MRT4530_99605C.1
atcgattcgatcctagcttaagccgagtgaagtagctagcaggacattgttggtagtgtgatcttctccctgttttgcaacaatggcctcacgcagtagtgccctgctcctcctcttctcggccttctgcttcctcgcccggcgagccgccgccgactacggctcctggcagagcgcccacgccacgttctacggcggcggcgatgcgtccggcacgatgggcggggcgtgtgggtatgggaacctgtacagcaccgggtacggcaccaacacggcggcgctgagcacggtgctgttcaacgacggcgcggcgtgcgggtcgtgctacgagctgcggtgcgacaacgatgggcagtggtgcctgccgggcagcgtcaccgtcaccgccaccaacctgtgcccgccgaactacgcgctccccaacgacgacggcggctggtgcaacccgccgcgcccccacttcgacatggccgagccggccttcctccagatcggcgtgtaccgcgccggcatcgtgcccgtctcctacagaagggtgccgtgcgtgaagaagggcgggatcaggttcaccatcaacgggcactcctacttcaacctggttcttgtgaccaacgtggccggcccaggcgacgtgcagtccgtgtcgatcaaggggtccagcaccgggtggcagcccatgtcccgcaactggggccagaactggcagagcaactcctacctcgacggccagagcctctccttccaggtcgccgtcagcgacggccgcaccgtcaccagcaacaacgtcgtgccggccggctggcagttcggccagaccttcgagggcggccagttctgatcgagtactcggctaattccgtttttcagttcacttttctgcagaaatgtcagtgtgagattgagattgaggtggaggaggagggaggcctctttgctatagtaaaagagaagaggctttggctattctgaggctgcttattaattagcacccgcttaggcctttgctttctcccataggtccagtagacataaataagttatcatggagttgggcattttttttttctgcaattgttgtagccttggtttaaaatttggcaaggcaatttaaggattatattgtagaacagcagggaggtggtgtcttgtaacttttgttgttacattgtaaccccccgaatcaggccacatgggccggaggagattgtgggggagcaccggagcactcttgtgcttttgggaccatgaactatgctagtttatgggtctatgtatatgatatgtttgtgatttgattatactttcttttgtcgccttatcaagtacc

SEQ ID NO: 102045 - DNA, 730 bp, Oryza sativa
  unsure (1)..(730): unsure at all n locations
  Clone ID: PAT_MRT4530_99606C.1
ccacgcgtccgagaatatcgagaggagctgaaatttacacgccgtttgcattcgtctctgttgaagacaccagtaagccatctaatgagaaattgcgcgggcagttgcgaatttatgacttaaccaaagggcgtcaagtgggtagtcttctggctgagacccgtaaaccggaaatgattgttgcaagtagctctggtgaatttttgggtattacaaataagagaaagctccatgtatggaggataccaacaaaaaatttcaagcccgacaagataaggaagataaagcttagccacacaaaaaacttgaacacactggccttccatccaagtgagagaattgttgctagtggtgatgcaacggggcgaatactgatctggagaggttttggaaatgcaaagttttctggatcagatggcacaaaatctgaactagatgaagacaggggtgatgtgaggggtaatggtgatgcagatacttgcactacatggcattggcattcaagcggagtgaggtttctcaaattttctactgatggagcttacttgttctcaggtggtatggagggagttattgttgtatggcanctagatactgggaagagaagatataaaccacgtctagggtctcctcttttgtcctttgtagattctccggattcttccattgcctgtgtgtcatgtatgaataaccagtccatcttctaaaatgcccacatggaggcatgaaa

SEQ ID NO: 102046 - DNA, 753 bp, Oryza sativa
  Clone ID: PAT_MRT4530_99607C.1
atggcgttccacgaccacgtgacgttccaagacgacgagatcgacctcgaggccggacacacgccgccgccgccgccgccgccggcggatcacgaaaccaaattaccgaagcggcagcagcagcagaggaagaagaagaagaagcgcggctgctgctgccggctcgcctgcgccgcgctcgtcctggtggccgccgtcgccgccgccgccggggcgctgtacctggcgctggacccgaggctgccccggtacgcgatcgagtcgctcacggtgcaggccttcgacatggactacgacggccacggcggcgagtatggctacggcgacccgcagctgacggcgcgggccagcttcgacgccgcggtgcggttcgagaaccccaaccgcgccatcgacatctcgtacgaggaagggtccagcctcgccgtgttctacggcggccaccggctgtcggagggcgcgctgccggcgttctaccagggccacggcgacgccggggtggtgcacgtcgcgatgggcgacgcgacgctggagggcgcgggcgccgtggctgaggccatgcagcaggttgtcggcggcggcggcgagctgccgctcgtgttccgcggcgaggtgccggtgcgggtgaaggttgggccgatcacgacggggaagctgacgccgaccatccggtgcgacctggtgctcgacaggctcagcaccgagggggagatcagggtcaagaacatgagctgcaagattaagctctggtga

SEQ ID NO: 102047 - DNA, 957 bp, Oryza sativa
  Clone ID: PAT_MRT4530_99608C.1
gcacgaggcgctatctcgcctcgcgacgacgccatggccaccgcctcctcactcttcctcgcctcccccgtcgccaccgcgccgacagcccgcgcccggtccacaccctcggcttcccctgcccggccgtccctgcgcctccggcggccgtcgacgttggccgcggccgcggtccaggccgagcaccagcccgcggtcgccgcggcgccgaagccgccggcactcccgttccgcgtcggccacggcttcgacctccaccgcctcgagccgggcctccccctcatcatcgggggcatcgacatcccccacgaccgcggctgcgacgcccactccgacggggacgtgctgctgcactgcgtggtggacgcgattctcggcgcgctcgggctgcctgacatcgggcagatcttcccggactccgacccccgttggaagggcgccgattcgtcggtgttcatgagggaagctgtgaaactgatgcatgaagctggctatgagctggggaacctagacgctacattgatcttgcagaaacccaaaattagcccattcaaggagacaatacggtctaacttgtgtgacttgctgggggcggatccatccgtcgtcaatctgaaggccaagacgcacgagaaagtcgacagtcttggtgaaaacaggagcatagctgctcacactgtagttcttctgatgcggaaataggaaaatggaagtgtactacatattacaggaattgaattgtaacatagtgaacaaattgtccttatgtaagtggtttatcactgaaattttagggcaaaaacaataaaaccgagtgcaatgtaaaattttatgtatccagattgtgtcttgactgtttcacaatgaacattagaattttatggcagcatgctgaggttggagcgtccgctgctaacatcagaatgcctcgtgccgattaagcctggggccaaagtg

SEQ ID NO: 102048 - DNA, 493 bp, Oryza sativa
  unsure (1)..(493): unsure at all n locations
  Clone ID: PAT_MRT4530_99609C.1
ctggggggggggttttttttttttttttttttttttggggctttttcttggggacctgaatttcttaaatcgatgagcaatatttttacatttgatctttgaaatcgaaaccttgcacatgtgaacatatgtcccaaatcaacaggactgaggaaaatgaagatgggcanaaaattatttgtnttattattcattcccctttcatctgaagaacaattaaatcctacattacatattcatttcaatcancatttaataataataataataataattaaacaaaaaaaaaaaaaatttccaccggatgatcgatcgatgagattgcaaattaatagggagtggtagaaataaatttaggcaaaggcaggcaggcaatagatggaggtagggaaaaattgggggaatattaggcgggcggcgtgggtgaacccgatggcgatgggggccatcctgccgtactccctgtcggggccggctatggggatgttcccct

SEQ ID NO: 102049 - DNA, 639 bp, Oryza sativa
  Clone ID: PAT_MRT4530_9960C.1
atgacggcagccagtagtgaagacatggtcgccatcaacaacggcggcggaatacaccaaccatggaagcggagaaaacggtcggcggtgatgatgacggccggtggtgaaggtaaacaccagtcgacggcggcgaagtctagccggtcggtgaagacgtggacgcccatgaacggtggtgtgactaaccaaccgtataggcgaggacaccagtcggtggcgacagaggccagccggtcggtgaagacgtggacgcccatgaactgtggtgtgaccaagcaaccgcggaaacaccagtcgatggcggcgaaggctagccggtcggtgaagacgtggacgcccataaacggtggtgtgaccaaccaaccgcggaaacaccagttggcggcggggaagtccagccggtcggtgaagacgtggacgcccatgaacggtggtgcggaaacaccagtcggcagcggcgaagtccaaccggtcggtgaagtcgtgtacgcccatgaacggtggcgtaaacaccagttggcggcggcgaaggccagccggtcggtgaagacgtggacgcccatgaacggtggtgtgaccaaccaaccgtataggcgagggcaccagttggcggcggacgaggtggccggtctgtga

SEQ ID NO: 102050 - DNA, 266 bp, Oryza sativa
  Clone ID: PAT_MRT4530_99610C.1
ctctttccgagtaccatcaacgcagtggcaaggtgacaggtgtctgctgttggtgcatgtgccctctcacttgtgcaattgcaatgtctctgttcacacttaactctaggattggtacttgtaactttcataatcttaattaggcagctgaaacttatgtgatgatcaaatacaaaaaagataaaagaaaaaaaaaataaaaaaaacaataatatgaactacagaaatatggctaaaataaaacaaaataagctcaaacactgggc

SEQ ID NO: 102051 - DNA, 212 bp, Oryza sativa
  Clone ID: PAT_MRT4530_99611C.1
aacataggagattgagagattgaattgttttgtgttagtagatgttacgttctgtagttaaaccaaaagagttaaggaaaggaaaagaaaggtaacatttgtaactgcactcccagtaaaaaaaaaaccttctgcggattgccattgttatcattgacaaagtgaattactgtttccttactgaactgttttaaaaaaaaaaaaaaaaaaaa

SEQ ID NO: 102052 - DNA, 421 bp, Oryza sativa
  Clone ID: PAT_MRT4530_99612C.1
ccttgctctatataaatatatataacccaaatgggttgcctcctcacatgctaaagctcaaacttaattatcccatcatattgctcaggaatatcgacctagctaatggactttgcaatggcacaagattggtggtgcgaggatttcagagaataccattgatacagtgattgtgctaggacaacattctggtacacgggttttcttgcctcgaatcccactaagcccctctgatgatgaaatgttcccattccaattcaaaaggaaataatttcctgtaaggcttaactttgccatgacgataaataaggcacaagggcaaacagtaccaaacatcggcatatacctacccgaaccagtattctctcatagtcaactatgcgtcgcgctttctagagccactgcaagaaaaacacataaa

SEQ ID NO: 102053 - DNA, 241 bp, Oryza sativa
  Clone ID: PAT_MRT4530_99613C.1
atcttattctagcagccgctcgatgggggaagcgcgggggttcttctactcttcctggcggaaaattacaaatccctccttcacttatccaacaccttcgacaactggaaaccccgaattccccgtcgccttcccacccatgccgcatacccctaaaccctagacagcacctacaccgcggccgacggcgcatccaagcatttgtacatccacgactgcgacccggacatccactaggacc

SEQ ID NO: 102054 - DNA, 1860 bp, Oryza sativa
  Clone ID: PAT_MRT4530_99614C.1
atgaagatgatcatagtgaccaccgctcaagaagaaggcacagaagcagatccctatgggatcgtttgggtggccgccgatccagcagaagcagggaaccagttcaaggaggacgaggaactttcactgaagaaaacagaggccgacagagggcacgtgaagaaggagacagtaggggcttcaacaggcacctctctcgcacgatcgagccgggagaaacaagaattagaagacaatcagtggcaagaaacacaggcttcgccggttcgaggagagcagcaggttgatgccttcattgcagacctctccactccactccagcagcccttgctcccggcgcctggcgaaaaacagcgacgcctctgccgcaacaaggtgacaatttcagtgcagcaccaaagtgcacggcttgcaacaaaagctagacaaaactcaaagtttgaatcctttgcgcaggaaattcttgcaaacaaatttggtgtcctagatgataacaagagacttgatgctcgtataaaatctctctacttgcagcagtacaagaagccgctctccccggctgctgtgaagaccatcgcagccctggaaactaaactagatgatgtctcagactctgtgatgttgagaactctaggaggtcgttttgtccgaagctatgcttacctcccagcggatggctcaagagggggaattttgcttgcctgtgatgacaactatttttccatctctgatattacccttaggcaatatagcctatcagccacaattacgatgaaggaggaaatcctagcttggtcaatcacagttgtctatggccctcaactagaagagcagaagttgccggatttcatggaggtaactgcacaatcctggaatagaccaattggtgctaccaatccactagcaaaatttcatctaaagctttgtcgcctaggaagggatctcaagaggtggagcagaactcatgttggagacattaaacttcggttagcaattgcaaatgaagttatttttcaactcgaggtagcccaagaatccagaattttgtcagatgaggaatatcagttgcgaaaagatctaaagttgaaggatcaaaaaatgattgagctaaacagatttttcaatctcagattgggagtgccgggtacaaggttgaacagactaaattgggcaaggataaaccttccatcagttgatctgtcagagttggaagcagattttgatgaagaggagattaaggatgcaatcttaaacctagcgccggaaaaggcccctgggccggatggctttaccggtgctttcttcaattgctcttctagaatcttgttgaatggcatcccaggagatcatattttccatgcaagaggactaagacaaggagatcctttatccccgatgctattcatactggtgatggagccgcttcatcagataataaaggcagcagaggatgcaaacataatttccaatctatgtcagcgacaaggacgcttccgttgttctttgtatgctgacgatgtagccctgtttgcgctcccaacggaagatgaactaatagccttgaagaggattctactttttttcgctcaaattagttgcctacacaccaatatgagtaaaactgagatttatccaatctcatgctctgatatagatttggataacattctgaccttcttccctggaaacaaaaagaacttcccctgcaaataccttgggttgcctctgcacaccagaaaattgaagaagattgatttgcaacctttagtggacaagattggatcaaggatcaaggatcaaggatccctttatggttttgctgtggtagattttgaaagaggactaagtgatatgttttaa

SEQ ID NO: 102055 - DNA, 1379 bp, Oryza sativa
  unsure (1)..(1379): unsure at all n locations
  Clone ID: PAT_MRT4530_99615C.1
gctaacttcggtcaaaaggaagctataaatgtcaaagtttctgatatttgtgaccttaatccccatgaggccttgggcaatagctatgttgtcaatataatcatcagggacttggttcctgctgagccttggtggtatatagcatgcagcacctataagagaggcacagctagagaaggaaacgcatataaatgcccgagatgcagcactgatgcaatagaaacaaggtacagagtagttatcatgggtatcgatccatcggatttggcaaacgatcaagccaaagctgctgagtttaccttctttggagaaatcggtgaacaattgattggcaggcctgttcttaacctggttgcatctgttcatggagcacgagatatagtaccaccagagatcaaagcaatttttggcagacaatatgtcattagaactagtgtgtcacgtggctcattgcaaagaaatcgggtatcctaccaggtggattcccttatgctaccccacccagatccaagccatgcaatttgtctacccagccatgatacttgcatgggctcttctggacatggctcaacatcagctaatgcagttgaaccacatgccatcgttttgtcttctactcaatctatgccaccttctacgccgtttgtgcttccagatacaaaggacacaagggacagccatggtgatcagcatgaggcaacaccacctactccacaggctagcaatatattttatactcacatcaattatatgcatatgtctttgtcagaccttcctaaccattaatactttatcaggtcatagctatagcacatctagataaaaaacgtaaatcttctatggctgatgagnatcttngccatggcgggttagtgccaatggnaaatttcatgttttnctttgatttcttctctttttcctcatgactcaaacaacttccatttgtagctcatctcctgatgaacatgatcgtcgcaagccttctgttgtgcacacactgttcgtagacaagctgccaccagagctgccaaaatgacttgagcctcccatgtgatatccccagagcgaagtgaccttttgcacctggcatggcaacgcgcatacttctctccctgattgaagcaaagctaaaatactttggtcaatctattttgcagtgccaacatagaaaagagaaatgttcttttgcgcaagccattagaccaatcgatattagttttacctgttacgggctcactacccctaatagctagccaaatgataaatgaattagtatcagcaatgtttggtgtctgtaatatatgcacgttctaacaaatatcactgcaagtgataagacatagtcttattaatagtactatatctattccgcttatact

SEQ ID NO: 102056 - DNA, 207 bp, Oryza sativa
  Clone ID: PAT_MRT4530_99616C.1
atggcgcccacgcgccgccgcccctgtggactgtggcgcccaggtgcccgcgcagccacgcttgtgctccggcctcctctgtcgtctccaccactccaccgcgccaaacgcccagacggcaggacccagacgaaggatggttcattttatttaggatttgaatccagccatacagggatggttcatggtttatggatgaacaattga

SEQ ID NO: 102057 - DNA, 348 bp, Oryza sativa
  unsure (1)..(348): unsure at all n locations
  Clone ID: PAT_MRT4530_99617C.1
tggtgccctgacccctcactagggtttttggctgtgcttcctttgacgacgatcgcgcgaagatcggagtgggggagaacaccccaccgtctaatcatgcatgtgggttacctcgnngcatgcggttggggtcttgttttctcaattctatcttagtagatacagtacggtattgtattttattattttttgttatatatttttgatggtttttccttctctcttctctataattcataatttttgcttttattgtcctttttcttatcatttctctatttttattttctcttttttcttttttttttttttctattttcttatttttattttttttctatttttatt

SEQ ID NO: 102058 - DNA, 1687 bp, Oryza sativa
  Clone ID: PAT_MRT4530_99618C.1
atcccatccatcccgcgagcgaagaaggcgcaatcgttcgtcctgctgcttccgcgcatcatcctggtgaatcaagcatcctaattttgtcaagatgtcagatggtcaagaaactgacaagaatattgagatttggaagattaagaagttgatcaaggcactggagtctgctagaggcaatggcacaagcatgatctctctgattatgcccccacgtgatcaagtctcccgtgtgaccaagatgctgggtgatgaatatggtactgcttcaaacatcaagagtagagtcaatcgacaatctgttttggcagccatcacatcagctcaacagaggctgaagctgtacaacaaggttccgccaaatggactcgtcctctacacaggaacaattgttactgaagatggcaaggaaaagaaagtcactattgattttgaaccattcaagcccatcaatgcatcgttgtatctctgtgacaacaaattccacaccgaagctttgaatgagctcttggaatccgatgacaagtttggctttattgttatggatggtaatggaactcttttcggcacactgagtggcaatactcgtgagatccttcacaaattcactgtagatctcccaaagaaacatggaagaggagggcaatctgctctgcgttttgctcggcttcggatggaaaagcgtcataactatgtccgaaagacggctgaacttgctactcagttcttcatcaatccagctaccagtcagcctaatgtttctggactaattttggctggttctgctgattttaagacagaactgagtcaatctgacatgtttgatcagcgtcttcaagccaagatacttaatgttgttgatgtttcctatggtggtgaaaatggtttcaaccaagccattgagttatcagctgaaattctagcgaatgtgaagttcatacaggagaaaaagttgattgggaagtactttgaagagattagtcaagataccgggaagtacgtttttggcgttgatgacacccttaagactcttgaaatgggtgctgttgagacattgatagtgtgggaaaaccttgatgtcaacagatatgtgcttaagaacagtgctactggagaaactgcaataaaacatctgaacaaagagcaagaagctgatcagagcaatttccgcgacacatcaaccaatgctgagttagaagttcaggacaaaacatcccttctggagtggtttgctaacgagtacaaaaagttcggatgcacacttgagttcgttaccaacaaatcccaggaggggtcacagttttgcagaggttttggtggcatcggtggcatcttgcgctatcagctggacattcgttcttttgatgagctttctgatgatgagggcgtctatgaagactctgattaaagatcctattattcccttgcctatgctgatgtactgaggaacgcaactgccacaagttctgaacttctcgacagactatttactggtttggagtagcttcaaacgaacgccctactgtctttcgttcgtcgagttcttaaagaaaagagaacgctagtattaccgaattgtcatgtgaccaagattgcattggattgagactcaattcaggtgtcctttttacctatccattaatgtatgattagattacatctacatgatacaaaaaaaaaaaaaaaa

SEQ ID NO: 102059 - DNA, 174 bp, Oryza sativa
  Clone ID: PAT_MRT4530_99619C.1
atgacggtggtggggacgagggcagtgtctgccaccagcctgctcccatcgtggtggtgctggggaggcactgcacgctatgcgatatcatccaacaccagcgaggtggccgctgtggaggccgaggccaaagatgcggatcggaggaagggtgagcttgcgtggaggaagtaa

SEQ ID NO: 102060 - DNA, 1278 bp, Oryza sativa
  Clone ID: PAT_MRT4530_9961C.1
atggagcccgcaaatccgccgattccgccgccgccgccgccgccaccgcctaccaggaagcctaccaggaagaggggaaggggggcgacgaagggcgacgacccggtcccggatgaagcagcaccaccatgcaagccgtcgctgcctctggccacggggagcagaagggggcgcagccatgtacctccgccactcggagttggaggagacggcggcgaggagggcgtcgacttcgtcagccacctccctgacgccgttcttggcatcatcatctcgctcctcccgagcaaggacggcgccagcgatctcgcccccggcgccaacggggcggcgctagccgtcctcctcacccatatactcctcgctcatgcggggcccgtacgccgcttttgcatccccgcgcagcagatccacgagcgccccgccatggtcgaaggctggctgacatcgccaaggttcaacaacctcgaggagctcgagttcacggaagacctctgctatatgagacaactccttccgctgccgccatccattttccgcttctccaacaccctccgcgtcgctgccttcagccaatgccgcgtccctgattgcaccgacctgatgctccagttcccccatctcaagctgctctcattacggcagttgctccatattgaacgctcgatgggacttggagttcgtgtatccgtgattatggcacccaaactggagacattgggcatcctagacaacgttaacgatgtctattcccgactcaatttcggcacagtggttttcaagggattcgaggttgttaacttcacaaggccagtgtcgagtgtaaaggttttagctctcatcatggataatctcagcttggacagggttatcaagttaatgatatgctttccatgcttggagaaactgtacatcagggggatcaaatatggggaaactaattactggcgccgcaaatatgggaaaactatcaaaagccttaacatatgtctcaagactattgtgctggatgattatcgtggctcgaagccgcaagttcagttcgccagattcttcatatggaatgcggctaagcttgagaatatgatatttatgagtggacctaacaacgacaacacatatgttattgcagaacagcctaagctgctggagtttgagaaaagggcttcaaaaactgctcactttcattttagatccaagaaatgttattatgattgggtgcatatcaaggatgtccatgatttgtctctttcagatccttttgaatgtacctgttga

SEQ ID NO: 102061 - DNA, 717 bp, Oryza sativa
  Clone ID: PAT_MRT4530_99620C.1
atgagccggcggcaggcgagggctcgagcggcggtgcggtcggagagctccgcgaggagcgcgttgacggagagcagcgcggcggtggagctcgcgatgacgccgagcacgacgcctgtggtgcccaccaccttcccaggcaccggccactcgatcttcgacatctcctacgcgacgccggcccaccacccgccggcggcggccgcggcctccgcctccttcagctccgctgccaccgcctcggggctcttatcccctccttctcctcccgcctcctccttcccggcctcctccgcaccgtccaccaccgtcgcgaacgcctcctgctactcctgctcctgccccttcttgttctccgctgctcctgcgcccttggactttgaggccgcgccggcgaggtggccgcggcagccggcggcggcggtgcgggagagggatagggagatcgcgggagggcgagggtggagaaggaagcgtgcgatgcggcggcgggcggcggagggggtggtggtggtggtggtcggcgtggtcgccatggctcggcgaggtggccgcggcaaccggcggcggtggagcgggagagggatagggagatcgcgggagggcgagggtggagaaggaagcgcgcgatgcggcgacggtggggatgaggaggcgggcggcggagagggtggtggtggtggtggtcggcgtggtcgccatggcttcccggtttga

SEQ ID NO: 102062 - DNA, 340 bp, Oryza sativa
  unsure (1)..(340): unsure at all n locations
  Clone ID: PAT_MRT4530_99621C.1
gcagtgaattgaattaggtgacactatagaagagctatgacgttngcatgcacgcgtacgtaagcttggattctctagagcggcgtgcgcgatctccacacctcccctgcggaggcaaggaaggagaggctgcccctccacacgcggagcagaagagagccatggtgcctccaggtcgcggcctgtcgcgccatcccctgtgctgcgcgctcctccgcctcgtcttcgcctgccctcgacatcctcctcggctgttcctgccctcggctggtgctggggctcgctgangatccctgctgccccggtataactttggtgtgctgcctgggtgttattgtgg

SEQ ID NO: 102063 - DNA, 558 bp, Oryza sativa
  Clone ID: PAT_MRT4530_99622C.1
atggcacagctccacgcgaccaccggcaaaagagagctcggccgggctaaccgaggacacctacgcgaagagcacgacgacgcgaactcaccggtgcaagaaactacgacggacgacgacgaacggcgaccggcgacgaggaccaacggcggcgcggctcggctcgacgacggcggcgtggctccgacggcttgcgacggtggcgacggggcggccgaggtgctcctccacctcgcgaacccggtggcgacgacggacggcgacggcgacgacgctggcggcggcgcggcacggctggaacggcgacggctgggctacgcggcggcggcgctacgggcaacggcgacggcttggactagaggcaaacggaagaggacgacgaggggatgcttatataagcttggattggagagatcggactccaaccgagaggaatcgagccgggaaaaactaggatggggtggattcgaagggggacggcggcggctctacgggctcggctgccggccggaggtaggggatgaccccgacatgtgggccccacatgtcggcggctag

SEQ ID NO: 102064 - DNA, 727 bp, Oryza sativa
  unsure (1)..(727): unsure at all n locations
  Clone ID: PAT_MRT4530_99623C.1
atggccgccacccaccccctcctcctcctcctcctcgccgccgccgccgtcgtcgtcctcgtcgtagcggcgacaccggcggcggcgagcggcaacgggacgtcgacgccgacggcgtacgagatgctggagaggtacgacttcccgcgggggatcctgccggtgggggtggaggggtacgagctccgggaggacgggagcttcgaggtgtacttcccgcgggactgcgagttcatgctggcgaggacgtggctggtccggtacggcgcccgcatcgccggcgccgccgcctccggccggctcacgtcgctccagggcgtctacgtcaaggtgctcttcgtctggctccccgtcggcgaggtcgaccgctccggcgacactctcagcttctacatcggccccgtctccacctccttccccctctccgacttcgcccacagcccgcactgccgcggttacgaccacctccccgccgccgccgccgccgccgctgccgccttgtgattgggtagagatgggtagttcattaattaatctgggtgatttggctggggtcattacgtgtaattaatcacacggtgctcctggttgattggctattgatgcgaatggaatttacccccctatgggatttattttgagtatatcatttggtggcttctttnaaaaaaaaaaaaaaaaaaaaaaaaaaaaaaaaaaaaaccancaaaaaaaaaaaaaaaaaaaa

SEQ ID NO: 102065 - DNA, 1604 bp, Oryza sativa
  Clone ID: PAT_MRT4530_99624C.1
ctcctctcttacctcacctggttctctccgccaccggcgccgccgcctccattcctccaccgccgccaccccaagacttccccccacctttatatagcggaccaccaacccatcgcctgcgcgtcctcccgagaaagagagagagagagagagatcccgacctcaacaatggcggccgcttcctccctccacgccgccccgcgggtgggatcctcctcctccttctcctcctcctcctccgctggccgcagatcagcctccgcggcgaggagcgtgcgcgtggcggcggcggccggatcgtgcgcggcgcggcgggcggggggaaggatggtggcgggccgccgttgcatccaaggcggaatcgccggcgagcgcggcctcctccaagtctgacggtcatgaggtcttactgtttgaggctcttcgcgaggccttgatagaagagatgaaagaagatccaacggtatgtgtctttggtgaagatgtcggtcactatggaggttcttacaaggtgaccaaaggtctggctgagatgtttggagacctacgagtccttgatacccctattgctgagaactcattcaccggcatgggagttggagcagcgatgaaggggttgaggcctgttgttgaaggaatgaacatgggtttccttctccttgcttacaaccaaatctcaaacaactgcggaatgcttcactacacctctggtggccagttcaaaatcccaatcgtgatccgaggtcctggtggagttggtcgccagcttggtgctgagcactcccagcgtctggagtcttactttcagtcgatccccggccttcagatggttgcttgctctaccccttacaacgccaagggtctgatgaaagccgccataaggagcgagaaccccgtggtgctattcgagcacgtccttctgtacaacctgaaggagaaaattcccgacgaggaatatgttctatgcctggaggaggctgagatggtgcgtcccggagaacatgttaccatcctcacatactcgcggatgaggtaccatgtgatgcaggctgcgaagaccctggtgaacaaagggtatgatcccgaggtcatcgacatcaggtcgttgaagccatttgacctgcacaccataggcaactctatcaagaagacccaccgcgtgctgattgtggaggagtgcatgcgcacgggcgggatcggcgccagcttgagatcggccatcatcgacaacttctgggactaccttgacgcacccatcatgtgcttgtcgtcgcaggatgtgccgacgccgtatgctgcgcctctggaggatgccaccgtcgtgcagcctgcccagattgtggctgccgttgagcaaatatgccagtaatctagacaaccgtttatacattgttctttgcgtggaaagtttttgttcatcgttttgcccatgtagcgaggtatccattgtggtataggcttatttatagccatttttattcgtattttgagttgtactttagctgcgaggacatgctccccaggaaaaattcgtgcactgtatcatgctgaattttaggatttaaacatgttttttctgcaagaagattttataatgttcgatt

SEQ ID NO: 102066 - DNA, 318 bp, Oryza sativa
  Clone ID: PAT_MRT4530_99625C.1
ccaaattcaagtatcaagtgtggcaagtcattatcatgcgagtgcaaaactacacagagtacctacattctatcatgcgtaagcagtgcacataatgacaaaacaccataagtatgggtaacaacaatctctattaaataaggaggcacccatcttggcgtaacaaacataggctggaatcgagcaaaagttaccatactaggccgctgaagcctgacacaaggtgggcacggtcttcccggagatctgcacgaagcacggcccagatcacacatcctgtagtttaaccaacagggcggcaacgaaccctgactatac

SEQ ID NO: 102067 - DNA, 490 bp, Oryza sativa
  Clone ID: PAT_MRT4530_99626C.1
tcgctttctcccctcgccgccgccgcgacgcgacgcgtccccatcaccgacatggcgaagccggcgccggcgccggcggccggggcgcgggaggacgaggacgcgccggcgctgcggaggcgcctgcgcaggctcgtggcggcggccaccgccggcgccgcctcggagtccgtgctcgacgaggccgccgcggcgctcgcggcgctgcgggatgcggaggtcggcgtcgggaggaagggcgccggaggaggagaggaggcggccgccgccgccgtcccggcgctgttcctgtgcccgatctcgtccgggatcatgagggaccccgtcgtcatcgagtccggacagacctatgatcgtcgttccattcaggagtggtttagtgcaggaaaccagatatgcccgcagactcaacaagtgctctcacacacaattgtcattcctaaccaccttgttcgtaccatgatctcacagtggtgcacagaaaatgggc

SEQ ID NO: 102068 - DNA, 1258 bp, Oryza sativa
  Clone ID: PAT_MRT4530_99627C.1
atgcgttcgccgcgtgatcttgtggtggcggtcgccctcttgcagctgtccgtcctcctcctcctcctctccggcgagccggcggcggcggccggcaagagcaaggtcgcggcgatcatcgtgttcggcgactccacggtcgacacgggcaacaacaactacctctccacgctcgtcaggagcgacttcgctccctacggccgcgacctccagctcgccggcgccggcgtcagcggaggcggaaatggccggcccaccggcaggttctccaatggccgcctcgccgtcgacttcatctccgaggcgttcgggctgccgccgctcgtcccggcctacctcgacccggccgtcaacatgagcagcctcggcgccggcgcctgcttcgcctccgccggcgccggctacgacaatgccacctccgatcttttctcggtgctgccgctgtggaaggagctggactacttcaaggagtacgcggcgaggctccggagcttccggggagacgacgacgcggcggcggcggcggcggcggcgacgctgtcggaggcgctgtacatcgtcagcatgggcaccaacgacttcctcgagaactactacgccgtggcgcgcggccacgcggcggagtactcgacggcggcggcgtacggcgactacctcctcggcgtcgccgaggcgttcgtccgcgagctgcacgcgctcggcgcacgcaaggtcgacctcaacggcctcccgcccatgggctgcctcccgctggagcgcgccaccggcggcgcgtgcaccgaggagtacaacgccgtcgccgggcgcttcaacgccggcctccaggacatgatcgcgcggctcaacggcgagctcggcggcggcgcgaggatcgtgtacggcgacgtgtacggggcggtggccgcggtgctcgccgacccggcggcgtacggggtggagaacgtgaaggccgggtgctgcggcgtgacgggggtgttcgagatggggtacatgtgcggcgccggcgcgcggagcccgctgacgtgcaccgacgcgagcaagttcgcgttctgggacgccatccaccccacggaacgcctccaccgcgccatcgccgacgccaagatgaacaccaccctccacgtcttcctatgaacgcaaccatgtgtttataggagatgtacttgatagctcagtgataaagggtgtgatgtcaacccttaagtatcacgtacaattgttaatatgctcatgatttctttttaaaaaaatatttata

SEQ ID NO: 102069 - DNA, 1868 bp, Oryza sativa
  Clone ID: PAT_MRT4530_99628C.1
gaaaagcctaatattgcggtctctgcaatgatattatctccagactgagtcttagtaagcaaaactcatagtgttcagcatatgctgaaggattgctaatctgaagaaaaattcattcggctgcctgtttcaaatgaccaagattccaaaaacaggcaggaccaacgagtaaaaactctttactattatctatgcatatgcggatctcctatatactgaaaaaggaaaatagctatatatgtatctcaacatatacatcaaatgagcatcctcatgcattgttcatcgttcctccagcttcatcttcgttgctggagctaacatgaacaatgcctattgtgcatcgtcctcttcatcttctcaaggatcccagaagctttcctccttgccctttgagtgccagtttgtgcgagaaaagtgagggagccgtttatgctctcatctgcctcgacctccttcagctttgtcctgttgtatgtacatatagcgaagagaactaccatcgcgttctctttgctgcgcttgcactcactctcccttatcgaacggagcatggaagcggtaccgttgaactcggtgatgatctccaccatctcttgatttcttgatagcaaagcaagtatagctaaggactcctcaacaagggactgatcatcgatggctctcatcgccacatcgacaattccgctccttgcggctattgacctgttctcatggagcagacaaagattgaaaatcgcagatgccgcatctttcttcgctatgatgctgccatgttcaaggagatcaatcaaaggatccattgcccctaacttgccaatcttctccttgtttgagtcgagagctgacagagtaaagatggcagctgcagagttgctacggctccccatatctcccgatttcagtgcccatatgagaaattggatggcttctgaatcatctccaatgatcttcttattgctatcatggattgaaaagttgagaattatagtcaccatgtcctccaatacctgtggatcattctgtaatcctggggtggaccgtgccaagatcatctgtgcgatggaatctggtctctgtcctaaaacagctctgaattcgctgttacgttttgtaagaagccgaagatccttgattgcttgcttccgtccaccactgtttgctgaggaagttattttgacaaatatttcatcaaatgttttctcctcactgttggtaacatgatcttgttcttggttctcaatttctggcagagtgagcccattttctgtgcaccactgtgagatcatggtacgaacaaggtggttaggaatgacaattgtgtgtgagagcacttgttgagtctgcgggcatatctggtttcctgcactaaaccactcctgaatggaacgacgatcataggtcatatttgttgacttactattttgctccatattcctagagaacctcatcatatcagcatatttaaacagtaaaaattcacctcggtactcataaaggcaagtagtgacagaaaacacaccaatagcatggaactgactagccaaaataatatacaagatccagacttcacactgtccggactcgatgacgacggggtccctcatgatcccggacgagatcgggcacaggaacagcgccgggacggcggcggcggccgcctcctctcctcctccgacgcccttcctcccgacgccgacctccgcatcccgcagcgccgcgagcgccgcggcggcctcgtcgagcacggactccgaggcggcgccggcggtggccgccgccacgagcctgcgcaggcgcctccgcagcgccggcgcgtcctcgtcctcccgcgccccggccgccggcgccggcgccggcttcgccat

SEQ ID NO: 102070 - DNA, 417 bp, Oryza sativa
  Clone ID: PAT_MRT4530_99629C.1
atgtcgtggtcttcacgattcctccttgaacttggtttgttcgggataggaagcagtggcgacaacggccggaaccacaccaacatcctagtcacagtgtcgggctgcaccttgaacatgttcttccgtacgcgctcctgcttcggcacaacatgcctccacccgccggcaagcaggtggctgtcatcagggaggctgatcgcatcccacaccatcgacgtcctctccctcagcgactccatcatgggatccatgtacgaccgcgtgtttaggtatatgtgtgtcggctcgtcgatgcctctcttggtgtactggtacttggcgatctaccgcgtcaccatcacctccctttcgtcggcatggggtagtaatgcgcaatcagtgtcgctggtagcgggccgtgtgctgcatggctga

SEQ ID NO: 102071 - DNA, 1044 bp, Oryza sativa
  Clone ID: PAT_MRT4530_9962C.1
atggactcgaggcgtcccagctattcggtcaatcggccgcgagtccactccaccggcttgccttcgccaccgccgctgatagcaacaacgtcctcacagaccggccacctcgtccgccgccaactggtgccctcgcctatacggttggttggtcacaccaccgttcatgggcgtccacgtcttcaccgaccggctggccttcgccgccgccaactggtgtttacgcctgcacggccggtctattatgccgctgttgttgggcgtctacgacttcactgtcggcctgcttccatcaccgctgactggtgtcctcgcctatacggttggttggtcacaccaccgttcatgggcgtacacgacttcaccgaccggttggacttcgccgctgccgactggtgtttccgcctgcacggctggcctattatgccaccattgttgggcgtctacgacttcaccaccggcctgcctccgtcgccgccgactggtgtcctcgcctatacggttagttggtcacaccaccgttcatgggcgtccacgtcttcaccgaccggctggacttccccgccgccaactggtgtttccgcctgcacggctagcctattatgccaccattgttgggtgtctacgacttcatcgctggcctgcctccgtcaccgccgactggtgtcctcgcctatacggttggttggtcacaccaccgtttatgggcgtccacgtcttcaccgaccggctagccttcgccgccatcgactggtgtttccgcctgcacggctggcctattatgccaccgttgttgggcgtctatgtcttcaccaccggcctgcctccgtcgccgccgactggtgtcctcgcctatacggttgcttggtcacaccacagttcatgggcgtccacgtcttcaccgaccggctggcctctgtcgccaccgactggtgtcctcgcctatacggttggttagtcacaccaccgttcatgggcgtccacgtcttcaccgaccggctagacttcgccgccgtcgactggtgtttctaccagcacggctga

SEQ ID NO: 102072 - DNA, 489 bp, Oryza sativa
  Clone ID: PAT_MRT4530_99630C.1
aagtaggaacaagtagtcttacttttcattcagtttggaagttatctcctgtctctcaggaagcgtaacagatatcgacatttctcatacattactcttaatcttttgatcaactaagctacttaaacaatcatttcttcgtacttacagttcaaagataaatatttggctcctgctactacttcacaataatataaattgactatatttgacaaatatagtaatattgcttgaaagacgctaatataactgggtccaattgcaacaggaaggcttctagttggaaagatgacacccatctgcaagaactgttttcccacatgtacaagtttgattatgtacatgcactatcacaaccatcaaatttgtctcaagattgatacaaagcttcaaagttcaaagtattgaagcaacccgcccaccttctattcatcaggatgcatgtgaaccttgaagcatttggaatgggcatagaagccgttagttgac

SEQ ID NO: 102073 - DNA, 1038 bp, Oryza sativa
  Clone ID: PAT_MRT4530_99631C.1
atggccggcgttgaccgcagccgccggtcgtcgtcgtcgccgccgccgcttccgtggacggtgcgcgtgcagcttgctgcgctctcggccgcgcaccggtccgacggcagcgtgcggcgcctcctcttctacctcggcgacctccacgccgcggccagcccccgtcccgacgcggccggcgtccgctccgtcgacgtcaccatcgacgcctcccgcggcctctgggcgcgcgtgttctgcccgcccacgaacacggcggcggtgaagctcccggtcgtcgtctacttccacggcggcggcttcgtgctcttctccgcggcgtcgcgcccctacgacgcgctctgccgccgcatctcccgcggggtcggagccgtggtggtgtccgtgaactaccgcctcgcccccgagcaccgcttccccgccgcctacgacgacggcctcgccgcgctccgctacctcgacgccaacggcctcgcggaggccgccgccgagctcggcgccgccgtcgacctctcccgctgcttcctcgccggcgacagcgcgggcgggaacatcgtgcaccacgtggcccagcgctgggcggcgtccaccacctcgccgtcgtcgtcgctccggctcgccggcgccgtgctgatatcgcccttcttcggcggcgaggagcggacggaggaggaggtggggctcgacaaggcgagcctctcgctgtcgctggcgaggacggactacttctggcgggagttcctgccggagggcgccacccgggaccacgcggcggcgcgcgtgtgcggcggcgagcgcgtcgagctggcggaggcgttcccgccggcgatggtggtgatcggcgggttcgacctgctcaagggatggcaggcgaggtacgtggcggcgctgcgcgagaaggggaaggcggtgcgggtggtggagtacccggacgccatccatggcttccacgcgttcccggagctcgccgactccggcaagctcgtggaggagatgaagcagttcgtccaggagcatagctccaaccgtatggcttaa

SEQ ID NO: 102074 - DNA, 1796 bp, Oryza sativa
  Clone ID: PAT_MRT4530_99632C.1
agcatgcttgcctggaagccacttatttggtggtggcggcggccggcgggcggtggggaggaggcgtgacggtggctgatctgacgaggacaacggcgacgacgaggacgacggctgcggcggctttgaggttagggaggaggcgtggcgatggcggatctgacgaggacgatggggcagcggctgccctaccccgcgcggcggcagtggggaggcacagtggcggtggatctggctctggctccggcgacgggagcgggggccacgcgcaccaccaccaccaccgcggcatcggcagccgctgcggcagcaacagcaaaaggagggggaggggtgggggggtggggtgttggtggtggtagtggacttgacgactgccccgaacatcgagatgatcgcctcgtcgctgcgcaactgctccctcaacggcgggggaggaggaggaggagggtgggaggacggcacccggacgaccatcgatccgcgctcgtcgtcggcgtactcgccgtcgccggcgtcgcggtccgcgtcgtcctcctcccgccgctgctcgcgcgcgcggggccgcggcggcggaggcggcgccgccgccgcggcgtcgaccaccacgtcgtcggggtacacctccgtgtcgtccgtgggcgcggtcaccgcggcggcggcggcgtggcgctcgcacgacagcagcgggcacggctacggctacggctacggctacggcagctatggctacggctacggctacgacggccgcgacggcgacgacgaggagagcagcagcagcagtagcagcagcagcagcagcagcagcagcgccagcagcagccggggctccgccgtgtcgtccacgctctcgtcgttctcccccaccgacgagtcggcctccggcgccggcagcggctacgccgtcggcgacaacggcgcccacgtcctcgtcaccgccggctgccgggcttgcttcatgtacttcatggtgaggaagaccgccgacgtgtgccccaagtgcggcagctccggcctcctccacctcagccgcaacggctacgtgtgagcctccgccgccgccgccgtcgcccgcgccgccgctcgccgccgccgagttccgcaattcactaattgtagggggaccttctcgcaattgtgcatgctctgttagagagaacttccaaagggaaaaaaaatattgcagcgggcacggctacgggctacgggtacggctacggcatgctatggctacggcctacgggctacgacgtgccgcgacggcgacgacgaggagagcagcagcagcagtagcagcagcagcagcagcagcagcagcgccagcagcagctggggctccgccgtgtcgtccacgctctcgtcgttctcccccaccgacgagtcggcctccggcgccggcagccgctacgccgccgccgtccccgcgccgccgctcgccgccgccgagttccgcaattcactaattgtaggggggccttctcgcaattgtgcatgctctgttagagagaacttccaaagggaaaaaaaatattgagagagagagagagaagagtttttggcgagaaggtccccaagtttcgccattattacctacattgcactccaatgtatgggaggagacccatctctagaattcttgttttccttccattgtttcttggttgtctcctctcttttttttttctttttcttttttctttttctgttccagtttgtgagactaaccccctttttcccccttcacatttccctttaccttttcaaggatgaacatttgtaaaaaaaaaaaaaaa

SEQ ID NO: 102075 - DNA, 1434 bp, Oryza sativa
  Clone ID: PAT_MRT4530_99633C.1
ggtggttgagacttctgaggaacagcagagcatgcttgcctggaagccacttatttggtggtggcggcggccggcgggcggtggggaggaggcgtgacggtggctgatctgacgaggacaacggcgacgacgaggacgacggctgcggcggctttgaggttagggaggaggcgtggcgatggcggatctgacgaggacgatggtgatggcgacaaggttagggttcggtttttttttatttttttttggttttttatttttgcgtgcgggcgggcgcggcggcggcggatacaacggtggggaggggcagcggctgccctaccccgcgcggcggcagtggggaggcacagtggcggtggatctggctctggctccggcgacgggagcgggcggacccagccgccgctaggcccctatgcccccacaacgacgacgaggagggcaggttaggtttcgccatttttgggttttaatttttttggatttttatttttgcgagcgggcggaggaggagggagggacaaggggggaacctttcctcggtttggcagaagaggaatctgcgcaggagatggtggcccaagagccgggccgggccagtggtttggtttgagctccgggagagggggaggggtgggggggtggggtggtggtggtggtggtggaggcgggggaggaggaggaggagggcggcgcagggggaggcgcgcggcggcggcggaggggagcgacgacagcgagggggtcaccgtcgagctcaactccgaggtcgccctgccctaccactgggagcagtgcctcgacatccggacggggcaagtttactacatcaactgggaggacggcacccggacgaccatcgatccgcgctcgtcgtcggcgtactcgccgtcgccggcgtcgcggtccgcgtcgtcctcctcccgccgctgctcgcgcgcgcggggccgcggcggcggaggcggcgccgccgccgcggcgtcgaccaccacgtcgtcggggtacacctccgtgtcgtccgtgggcgcggtcaccgcggcggcggcggcgtggcgctcgcacgacagcagcgggcacggctacggctacggctacggctacggcagctatggctacggctacggctacgacggccgcgacggcgacgacgaggagagcagcagcagcagtagcagcagcagcagcagcagcagcagcgccagcagcagccggggctccgccgtgtcgtccacgctctcgtcgttctcccccaccgacgagtcggcctccggcgccggcagcggctacgccgtcggcgacaacggcgcccacgtcctcgtcgccgccggctgccgggcttgcttcatgtacttcatggtgccgaagaccgccgacgtgtgccccaagtgcggcagctccggcctcctccacctcagccgcaacggctacgtctga

SEQ ID NO: 102076 - DNA, 355 bp, Oryza sativa
  Clone ID: PAT_MRT4530_99634C.1
accacgcgtccggccacgcgtgcgtattgttgatccagtgcagttgagtgctactagagtgaatctataccagagtgctgtaacctctccgcttaggaacgttaacgcccatagcctggtgtctattgagcaagggcatgctcgaactctggtcgttagtcaccttggaatgacggtgtgcaatggcgcactacgttcagctcaatcgctgatcattccgcagcacttcgttgtattgaagaaagccgagcatgaaggatgccaatacattacattcaagaccgatgcaaactccatggtgagccacctcggcaggaagaactcaactatgcgtgccatgccagcggatgtgatc

SEQ ID NO: 102077 - DNA, 263 bp, Oryza sativa
  Clone ID: PAT_MRT4530_99635C.1
ttctccccacctaccgacgagatgggcaccctccgcctcacctccgtcaccctccgccccggcgcctgcgcctggtccgccgccgcgccgcggtccgccaactgagcccgcagccgcggcgcgcgggttgccctcgtgtccgtctagcgccggcgggccgtgggggagagctagcgaggagcggggccatcggcgacgccgtggcccaagctaacgctacagcgccggacgaggaggaggaggaggagggggcgctatgggaa

SEQ ID NO: 102078 - DNA, 378 bp, Oryza sativa
  Clone ID: PAT_MRT4530_99636C.1
atgggcgacagcttgtcttgtcagaggaacaccgacgacgacgccgctccgccgccgccgctggtgcccgtcggcggccagcagcagccggagtacatgagtagtgagcaggtgaggacgaggagaggccagccaagcagcagaaaccggggcgtgggcgtggcagatgaatatcaaacacgacgaggtgttgatgataatgttggcgttcccatcagttcacagccccctacgctgcgtcctcaaaattttatgaggttttgcgctacctgcaaccgcacacttagtccacagatgaacgtctacatcttcagaaaaagaattaaattattgttgaacaattgtaatatactattgtacaatgatgaggtggattga

SEQ ID NO: 102079 - DNA, 1278 bp, Oryza sativa
  Clone ID: PAT_MRT4530_99637C.1
atgtccggcgaagcagagtcccgcgaggcgtcgcggcagcggcggcggcgggagcgggctgcggcggtcgagcgattcgtcggggtgccgctcgccgacgtggtcagggagaactcgctcgtgcacctcccgccggcggcggcggcgcgcctccgcgtcgtgcacccgtcgtgggcgagccacatgtcgtccccgctcttcgccgtcgcgcacgcggccgccccgaggcgggtctccggggtgttcgtcccatcagcggggttcctccccttcgacggcgacgacgacgccgtgccgtccccgtcgctctcgttcgtgccggcctcgtcggagctcgtcgtgctgtcgtcgtcgcgcggggtcgcctgctgcttctcccccgccgacgacgcgtacgccgtgtgcaacccggctacggcgtcgtggacggccgtcccgtccccgccgtggcggtcctggccgcgcccggcgatcgtcgtcctcttcgacacgagcgcctacaacttccgcggcgacttcacgctcgtctgccccttcgagtcggagccgggttcttccggcgcctactgcttccaggtgttcacgtccgggaccggcgcgtggtgggtcaccgacgcgatgtcgccagccgaagggctcgtcgccgcgtcgggcgtggcggccggcgccacggcgtggtggcggacgagcatcggcaccgcggtggggtacacccctgtcacggggcgcgtcgacctcgtgacctgccccggcgacagtgaccagtgggagatcggattggccgcgggcatgctccactgcgccgtgatcgacggcggcgacgtggtggtgttccggctgcacgagcacggaatctgggaggtgaccaccagggtcgccgtcgcagagatactgcaaccatctcagccgccgccgccggcaagggcgacgacgtccacggagatcgtggcgtcccagcagcacgacgagtccggcgcggaggaggaggagggctcgcgcgctgttgtcgccgcggcgaatgcaccactccggctggacgacggggtgcggctgctgggtttccagggcgcggaggtggaggtggtggtgctggcagggaggcgcctggtggcgttcgacgcgcggacgcggcggcggcgcgaggtcgccgtgccggacgaggtcgacgcggcatgggacggcgcggagcacgctgcgcacatcaacaccctcgcgctgatcgcgcccgccgctctcgcggccgagccgccgctcgcgaagccgccggctgatccatga

SEQ ID NO: 102080 - DNA, 378 bp, Oryza sativa
  Clone ID: PAT_MRT4530_99638C.1
gggttgggtttttttttttttttttttttttttttttttttttttttttttttttttttggggaaaaaaacccgagcttttttttaaaaaatccccacccaacaaaaattggaggacttttacaaaaaaacccccccgagagggggggaaaaaatttttccattttttttaaaagcaaaggcccttgaaatgggccataaccaaaccggaaaaaaaaaatatttagcctattttttattggtatatcaacaacatagcccaaaacaaagctggattcttttttttttggccgcaatccaccaccccgatgcttgatcttaacttaattgccaccaaacttcttgaaacctgggggcttttaggcgaaaaaactaataa

SEQ ID NO: 102081 - DNA, 1280 bp, Oryza sativa
  unsure (1)..(1280): unsure at all n locations
  Clone ID: PAT_MRT4530_99639C.1
tcaggcaatattcaagtctttatatctaactggaaagtcttccattaggtagcgattatcagctttgggaagtgactatggcaaagactcgtcgttcacagaatctcggtatttctaagaaacaacgtcaatcgaaaactaattatagttgcaggacttagaacgacatctgggtaaagatggtcttttactatcagtcttgtcctttataatgtaaaagggaagtctgatatccctatttttcatcttcctacacagatcagggaagctctaattggagcactattgattgccatcctaaaaatattttttatagaaaaaaaaaaaaaagaaagtataaagcacgtcacctatttgcaagacaacttcaggattcttgtcgacaaatgctattctggaacagctttctttgatgcctcaacaggtgtcaaggatttggaaaacaatccctgtttgcctccatattagagcaatcattcatccgagagaaagagttatcaaaatatagttccgtcgtatgcataagacttttgtaaaacgctccagctccagttcttcatcatcaagttatgtcattgtctgaacatgtggagggacaacaaaatatataagcaccagtgctgcggcaactactatagcagcgtagcaaagaaaacctggttcagttgcaagatcccaaacttcccttacagaatcgatgttgcgctcctgtggagcatggagtacaattgtgatagatccaactacacaaagaacacaaccaagtatgccaaaggtgtgtagtttctcctgcagaatggcgtgtgcaagtgcagcactgatgattatactgagtgccccaagaagtctaacaagaatagcaggagcaaatgcataagcagcaaaatttgcaatttctcccacaatcccagcgcggacgccggagtcggcggccctcctgagccccatcttcttgacgttgaagctcgccccgatgaaggcgctcgacgacaccgcgaggataagccccttggcgttgtcggtggacatccccgcgagccccgccgccgcagccgccgacgcgggcgccgccatgtccaaataaggccaaaagcccagttttaagaataaaatacttggttccttcttaaaaatgttacttccaatccaatcccaaaagtttttcccttcttcccaattaaaagattccttagaaagaagaacaagactcccgantgtacacccatgatgtttgtttgtccatgttgagggacaacaaaatatataagcaccagtgctgc

SEQ ID NO: 102082 - DNA, 336 bp, Oryza sativa
  Clone ID: PAT_MRT4530_9963C.1
atgtcggtttggggggggagaaccgaccttggcggtcaagcgctcggctggcggcagcggcggtttcgtgggcgatgcgaaagcggcgacggcgtggatgctttgggcggcgaaggcggtggatcggacggccgaatccgaaccacgggagcgcaggctggcgcggtcaaggtgggggcggcgagctggcgtgcggcgtcagcggtgctctgcctcagcgcgcagagggacaagggggggggaaggatgacgcggcaacagggcacgggcggcgaccgagcggcatggcgcgcgcgcacggagcggctgggcggcagcgcacgacgcaggcgctga

SEQ ID NO: 102083 - DNA, 297 bp, Oryza sativa
  Clone ID: PAT_MRT4530_99640C.1
atgtcgaacacgtaccgaggtggcagaaagaccggttgctcagcaggaactactcgtggttgcgggcgtcgacggagatttgcacagcacgcgagcggagaggaaggcgagccgtcgcggacgaacagggagcagtcgcgcgaagcgcttctcaaaagtcttattgccgccttctcccggtgcaggacgtcgaaggcagaggttccggagacctgctctccatctcgcaggtgcacgccggcgagcgggatggacaaaacaaaactgcaaaaggaggctgcatttgcgcaagggtga

SEQ ID NO: 102084 - DNA, 193 bp, Oryza sativa
  Clone ID: PAT_MRT4530_99641C.1
tgttagtcccgagtgatcaacagttcgtcggactgtcagatctagtgaccgtcaactcctgcctggcgcgagacgccactggttcaatcaccagcctgaggaaagaagaggacaccctcttcttcagagacccttgtttttctgcgtatgtccaccccaatagagcgccagcatctcgaggtgacacgaccat

SEQ ID NO: 102085 - DNA, 2308 bp, Oryza sativa
  Clone ID: PAT_MRT4530_99642C.1
ttttttttttttttttatactaaaacaaccatttcattcattttactgtttatgttacaacctacgaattcttacaacatttcaatactagcaactatacaactctccaatgcaaaggaatctcgtccaactctccaatccgaagttccaagcgtgtcaaagcttcaccgtctcagcagagcatcctacaagggtttccagaacggaaaaggaggacatgaaagtatgaaacaacacacacgctattcttgtgagttgtgcctatttaaaaaaggaaaaaaaaacacctatacggttggagggtccacggatgttgaactctttgaagaaacccaagtacgtggctttcttgtgtgtccggctgatggaacccaaaaagttagtttgtatcttcacagagtgttgataaaggagtaacaccaacgtttgtctttgatcttctgctttcttgaattcagtcttcgtcctttactaaatagcactccattctacattcaggggtagttattcctgcaaaaataaagagagagagagagagagagagtaaatgataaccatattaatatagcactccattctacattcaggggtagttattccattaaccaagcttcaatgcttcccttagaccaaaacttagctggccttgcccctttttccctagtggattattccctttctgcatcattgttacaaattcattgtagtcgatccggccatcattgtcctgatcaatatctttgatgatatcctccagatgtgcatctcctatgccaaattcctcacaggctttttgtagctcatcttgagtaatgtaaccactgctgtctttatcaaagtatgaaaacgctgcaaaaagattatcttctctctcaactttgttcagatgcatagttgcagcaatgaactccccataatctattgaaccactattatcaatatcagccgcttccattagggttgtaatttccgaatccttcaaattagcaccaactctccgcaagccagtttttagttcctccaatgtgatctgaccactattatcagtgtccaacattttgaacatttctctcaatcccgcaatttcatcttccgataaattttcagcaatgaccctaagggccatcttctttagcttgttcattgctgaaaattgcttcaatctagttaagacagcagaatcaagaggtttatcaggagcaactccatcaacacaaacccaaggatgacatagagcttcatgtgcagtcaatctctttctgggatcacggtttaacattttcctcaccaaatcctttgcactgtctgagatagcaggccagggatcagatgaaaaatcaagatctcctttcaaaactttttcaaatatcccttgttcagattcatcccaaaatggaggaactccactaagcaagatataaatgattacaccagcactccatacatccacctcgcggccataatgcttcatcagaacctcaggtgcaacatagtaaggacttccaacaacatccgaataattttcgcctggcttgaagaaaatggaaagcccaaaatcgatcgtcttgagtggcgagtcctccttatggttgacaaacaagaagttctccggcttgaggtctctgtgcatcaccccgagcgaatggcacgcctcgacgacaccgatgatcacccgcgccagctgcgcggccgccttctcggagtagtgcccgcgctgcacgatcctatcaaacagctccccgccagcgcagagctccatgacgaggtgcacggcgacggcgtcctcgtacgcgccgacgatggagaccacgctcgggtggccggcgaggtggtgcatgatctggatctcccggcgcacgtcctccacgtcctcctcgctgaccagcttccgcttggcgatggacttgcaggcgagcaccttccccgtggccttctccacgcactggtacgtggtcccgaactgcccctgcccgagcttcttccccagggtgtagaggtccttgagccgctcggagtcgcgcttgaggacggagtcggcgaggagccccgcgctctggacgcgcctcaccttgggcttattcccgcccttgttgggggtggaggaggagaggtcggagtcggcgatggtgacgcgctcgggcgccgtggacgaggtgacggaggagtggctcgactcccgaggcgggtaacccggcggctgcgacggctcggcgcggccaccggggcgccagagcacggcgagggagacggagtggaagaagccgtggcggtccgccgcggagctggggccgacgcaggtgttccccat

SEQ ID NO: 102086 - DNA, 486 bp, Oryza sativa
  Clone ID: PAT_MRT4530_99643C.1
gttctaagattctaataagatatagttgtagaatctagaaaatgaactaaaagacaaaagttgggaaacctgtctactaacaagctacttctcagaaccaaaagctcccctaaacagacccttcaaacattttgactttgaaacatatcgtagcctaaaacggagggagtagtaactattgactagttaactgtgatcgattgtgcagagttgtcaaagttactggcgctagcagtctagcttagcttgctccccgttggaggcggtgtcgacgaacctcctccagaaccagtgctgcgcccacagcctccggacctgctcgatgggtaggcccttggtctccggcagcaggaggtagacgaaggcggtcatggccaccagccacgccgcgaagaagaagaagatgccggccctcatgcggcacagcgtggccaggaacaactgcgccaccgccgtcgtcatcaggaagttcaccgccaccgtgat

SEQ ID NO: 102087 - DNA, 1555 bp, Oryza sativa
  unsure (1)..(1555): unsure at all n locations
  Clone ID: PAT_MRT4530_99644C.1
gcgaaatcgcgcacgcaccgtctcgcgatgccgtccccgtcgctccgcctcgccgtcgtcggcgcgggcgccgccggcctggtggcggcgcgggagctccgccgggagggccactcccccgtggtgttcgagcgcgccgcctccgtgggcggcacgtggctctacgacgccgcccccgccacctccgacccgctcgccgccggcgccgcccactccagcctctacgcctcgctccgcaccaacctgccgcgggaggtgatgggcttcctcgactttcccttcgcctcctccgccgcggaggccggcggcggcggcgacacgcgcaggttccccggccacgacgaggtgctccggtatctggaggagttcgcgcggcggttcgacctgtacggcctcgtccgcttcgggacggaggtggttagggttcggagggatggcggcggcggcggcgggaggtgggcggtgacgtcgaggaagatcggggagaaggggaggcgtgaggaggaggaggaggtgtatgatgccatcgtggtttgcaatggccattacacggagcctcgcgtcgcccacatacctggggtggaggcttggcctggaaagcagatgcatagccacaattaccgcgttccagagcctttccacgatcaagtagtgatcataatcggggcatcagcaagtgcagtagacatctcaagggaccttgcaggtgttgcagaagaggttcatgttgctgatagatcagcacctgcctgcacttgcaaaaggcagcctggatatgataatatgtggctccattccatggtaaacgcccttttctcgtgctacttgtatgattttccattccttgaggatgatagcgccatcaccgttgatgacaactgtgtcgatccactatacaagcacgttttcccaccagaagtagcacctcacctgtccttcatcggattgccatggaaggtcattccttttccattgtttgaactccaaagcaaatgggttgccggcgtgctatcaggacgagtcaagcttccttcgagcgaagaaatgatggaagatgtgaaagccttccactcgaaaatggaagcgcgtggatggcctaagagatacgcccacaacttttcagactgtcagtttgaatatgatgattggcttgcggagcaatgtggccatccaccaattgaacaatggaggaagctgatgtatgctgctaattcagagaacaaggctgctcgtccggagagttaccgcgatgagtgggacgatgatcatcttgtggcagaagcagcagaagatttcaagaaatacttgtaaaatctcaagaagatttcattcaatgtacatgattgcaaatttgcaatgcagaaaacatcagagaataattctgtacacccaaaatctcaattcatgtctggaatgggcacaaatgctcgtcatcagatagttggtttacttgtgtattatttgatcatttgatgcctgtagattgtaataataacctgaagcaaaaacaagagaataattctgtgcatgagaaaggngaaaaaaaaaaaaaaaa

SEQ ID NO: 102088 - DNA, 153 bp, Oryza sativa
  Clone ID: PAT_MRT4530_99645C.1
tttgtgaaaagatcccaccaccggcagaaatcatgggagtcttgctaccgcaaagccagctgaccaaaacccaaggcggacctaaagcctaagccttccaagcctgggccgaagccgaagcctcccaagccagggccgaagccgaagcccaag

SEQ ID NO: 102089 - DNA, 193 bp, Oryza sativa
  Clone ID: PAT_MRT4530_99646C.1
tttgttgttttttttttttttgttttttttttttttttttttttttttttttttttttggagcactgaacattactacttgattcaacaggggatacagattcaaacattatcataaagtcctcacaactaggcagctcatcgacaattttattcgcacaagtattttgcagacaaatttaaacaaagattga

SEQ ID NO: 102090 - DNA, 240 bp, Oryza sativa
  Clone ID: PAT_MRT4530_99647C.1
atgccgacgagcccagtgaccaccacggcggacggcgacgggctagctcagcttgacatcgccatttggcgccggcccagcctgcttcaccccgagctcctccgcgacgaccgcgcgctcctcgctctcgcttgcccgcgtgtgccgccaccgctcgcgagggttaggaatcggggacggaggagtcagcagtggcttaggttgaaaggggcaaacagaccattcaacgtcaaaaagtga

SEQ ID NO: 102091 - DNA, 225 bp, Oryza sativa
  unsure (1)..(225): unsure at all n locations
  Clone ID: PAT_MRT4530_99648C.1
agcgaaaaaaatcgtacttaattaggagcaagcaatggcttctcgccgcctcccgttcgcggcggtcaccgcgtgatcctcctcctccacggtgccgccgaacgccaagtcgtcgtcgtcgtcggggaagacgaagagcctnccgtcggggttcctggacgngcacaacgnggcgcggcgccaggtcggggtgccgccgctgcgntttggacgagaggctggngt

SEQ ID NO: 102092 - DNA, 2238 bp, Oryza sativa
  unsure (1)..(2238): unsure at all n locations
  Clone ID: PAT_MRT4530_99649C.1
atggtgggcgcgcttgcgagcgcttccacgggggtgatgaactccgtcatcgcgaagctctccaagctgctggaagacgagtacgccaagctcaagggcgtgcagcagcagatcgccttcctgcgtgacgagctccgcgccatgaacgccacgctccgcgtgctggccgatgtagaggaagacctcgacccccccgtgaagaggtggagggacaaggtccgtgagctcacattcgacatcgacgactgcatcgactcgtttgaggtccgtgtaataagccatcagcaggagagaggcgagggcctcatcaaggggatcattcgcaagctgaagaagctgagagctcgccatgagattgccaaccagatcgaggcactcaaggcccatgtcgtcgaggagagcaagcgacacaagaggtatgatcttctcaagccatggtccagcagctctgccacttttactatcgaccctcgactgccggcgctctacgaggaagtagataagcttgttggcatcaaagggcctagggagcacatcattgaatggttgaccaacaagaggagtgatagatcaagagaagatcttaaagtcgtgtccattgtgggttgtggcggtcttggcaagactactctggctaaccaggtgttcaaggaaatcagacaccaatttgattgttcagcctttgtgtctgtgtcccggaaccctgacataaagaagatattaagagacatgctgaaagaagtgaacagtcttgacaacacacaaccatggtctcctaatgatgatgagaggcaactagtcaataaacttagagatacactccaagataaaaggagcggcgcgggcgtgctcgggcgccggccgacgggaggagaggagcggcgcgcgtgcgcggccagcggccggcgagaaaggagcggcgcgcgggtgtcggctggcgggaggagagaagccgcagcagcggggcagcagggcgagctcgtgctcagcggcgtaagctcgacggcgacaacggccatccgctcccggggggaggggtcgccgaccgcgnccgcgcgtgcggggggaggcgtcggcgggcccgagctcgacgacggcagcggggcggtggggcgagctcgagctgggcagcgcgagctcgacggcgacaacggccatgtgggggccaccgccggagtggtggggcgaagaggagggcggcacgtcattcatgcggaagcggctgaggtgcgcgaggggggaggtgtcgccggggcagccaaagcctcattgacgggagggagggaggacgacgtcgctagctcctctctcctgcaccgccgccaggtcgccgaccccggccacagcctcctcgcaccggtcggcaaccgcctctccccgcctctctcctgcgccgccggcaggtcgccgaccccgcccacggcctcctcgcaccgcacaaaacaggaagatattgatatccttggggagatacctgccctgcttgttctcaggctcactacttctcatggcaccaatggaaggatcttcatcagcagctacaatgctttccgatgcttgaaatacttctttcttcacataaatatgtgtggaacattattggaatttgaagaaggatctatgccaaagctccaacaccttatgatcaagttcaatgcacatagatggaagtgtctgaatggtgcttctgatttaggcatccgacatctctccaacctcaccatggctgagcgtgaagcatgcatacagtttgaagagaggagtgtgaattatgaaatagaggtcaatctaggcgaagtaagagatgttggcaaggtggatcaagcggatgtggatgacgtgcggatgcggatgcggagcggattatttcggacgtcggattcggtgcggagtcggccgacgggccgacaactgtctatactggggctggcggcggcggcgccagctggagctgaagagaagcggctggcgcgccatcacctcgtatcctcgtcggtacaggctgacgggccgacgatggggatggtggcggcgccgagaagccgacgacgagcagcggcggcgccaactggagctgaggaggagcgacgctggctggagctaaagaggagcggccggcgcgaatggaggatcggcggcaccaccagccgacagtggcgctccggcggcgcgtgtgggaaacgagtaattggtgctggtgcaaagataaacaagatgaagcttcactggagctcatag

SEQ ID NO: 102093 - DNA, 3702 bp, Oryza sativa
  Clone ID: PAT_MRT4530_9964C.1
atggcgtcgtcgacggggggttggaccacaggctcatgttcacgccgccgccattcaattgagctgctgtcgggaggcggcggggacatgctcgccgccggcgccagcggtgaggcgcggtcgccgtgggggttctccagaggcggagcaagggtgggcggcgggttgcccaatttcaagtccgcgcagccaccgagcctaccactctcgccgccaccggtatcgccgtcgtccgactttgccatcccgccgaggctcggccccaccgagctgctcgactccgccggggatagagagaagagagatggaagatatgacatatgggtccaagggcattttagaactttcacgcgatttctctctcctcttattttaatcggcgtggtgtccattggcaaattaccacgtttatggagtgttttcctccaaaatctcagtgccaaccgccttggcgctgaggtggccaagctcagcgccagccccgttggcgctgagatggatagattggtacgactccattttgatggcagtgtggtagatgaaagtactggtggtagccaatttgaggggatgtctgtcaggcagttagtgttttgcgccaaacccacatttgaggagttaatttcacgcacgaaggatgaattggattggagtgatgagtctgttggtatacaagggagatacgatgtagaccgatgtgcttgtggtggatcgaaagaagaattaattgaggacgatgtgcaggtaggggtggaaaaacaggttgaggaggatgtggatataggtgaggagaggcaccgggatgtggaagatggggaggtagagaagaaaatttcagatggtggtatggatgtgaatcaagcagataatgagaatattgatgaacttgagaagaggcggttgattttattcattagagaattccttgctgatgaaatttacactcgcgaggagtgtgaggaatctatgatatttaatggattaaacccgaatttgttgtatgctgatttggacaatgaagttgatgagtttgcatctgactctgatgacgatcgtccagtgggcaagatgtcagacgaggagagcactatgtttgagaaaatcattggtcgaaatccggaaataactcaattcgaggaccttagcaatggaagccttgctgttgcagatgattcgtgcaagaaagagcgctctagtgtggaagcaactggcaagcacttgcagctaacctcgaggtttataggtaacagattgcaggcatttgttagagcggaaccaacattgtctcctgcagctattgtagaggcagttgagcacatatggcactatcggcctacgtatggcaaagcttggcatgctaagcaagttgctatgaaggtcatatggggagattgggacgaggcataccatcgcttgcctatactactgaatgccatcaaaagtaagaacccaagcatgtatttccttgttgagtctcaaggggagaaatcaagaacggttgatggagtccataggcgtgtttttggtcgtgcttcatggatatttgggctgtcagtggaggcattcaagcattcgaggccagtgttagcaattgatgggaccttcttgatcggtaaatttagaggtgcattgctcacagcaattgggattgacgcagggttacaccttgttcctttggtgtttgccctggtagagagggagaacacgtccaattgggagtggttcattgacatagtgagacgacgtctgattggaccgaatagaaaagtgtgtataatatctgatagtcacgttggcatattgaactccatcaagaatgagattccaagccaccgacttattcaccacagatggtgcatgaggcatttttgtgctaacttttataccgcaagagctactcaggatcaaatgaaggacctcgagcgcatatgtcaaatcaacgagaaagttctattcattagcgagatcaagcgtctcatgggttttcttggggaaggtcctaagaagtggctaacggataatatggcattcaaggctaaatgggccagatcatttgataccaatggacgtcggtacagctttatgactagtaatatggccgagagtttcaacaatgtcttgagaggaattcgaaaactgcccgtgacagctattgtggcgtacacattctcaaagtgcaatagttggttcgtcgatagacataaagatgcttgtgcacaaatcaagagtagacacaagtggctagaaaaaattaatgatatccttgaggagcagaaaaagcgaactttgggacaacggaccacacaattcgattttccatccacgaagctccgaggtttgaatatagaggtgcccccacggatgtgttatgaagcttccaatgaggctatacaacacacctactccccgaggtttgagccctaccaagatccgtctcagtggccaagttatgacggtgaattattcgttcccgacttgtcgttgaagaacgacactcgaggaagacgaaggacaaagagattcaaaaatgacatgggtaaagggatggcgcagtttccgggtctggaggattactacgaggagaggcaccgggctcccaagatagcgagcagagagacccttcgagtcagaggcaacacagcgcacatgtcgttcgacgaccgatacattccgtacctacgtcgggcgaagctgttggcgttcatcaccatggcgcagtggcccatgcctctgtacaacgccgcggcactgacggctcttgtggaccgatggcgcccagagactcacaccttccacctgccaagcggagagctgacggtgacactcgaggatgttgccatgatcctggctcttccaatgcggggccaggcaatagccggtgacaccgcttccggtaactggagggcacgggtggttcagtaccttggtgttgagcctcctgaggctcctgacgggcagaggttgacgaagacctccggagttcctcgtagttggctgcgtgccaacttctcacagtgccctcctaacgctgaccaggcgacggttcagcggtactgcagggcatatgtgttgtacatattcggcagtgtccttttccctgactctggaggagacatggcttcttggatgtggctgccattgctagctgattgggatgaggcgggtacctacagttggggttctggagctcttgagtggttgtataggcagttgtgtgatgcttgccgaaggtctagtgcagatgccaacttggcaggatgtgtttggctgctacaggtttggatgtggatttgcttaccggttggtcgtcctacatggaggcaacatccggcatggccattcgaggatgaggatcgacgccccacagttgctttcctttgggaagtgacaccgtcgcctgtagtaggccctagaaacttggcctattacaactacaccaatgagatggattacctccagcccgagcatgtggaatggatgccctacgagtcacaggagatagctgaacttggaattaatgccatgtgcaacatagagtggaagatgaatacactacgggtggacaaaaggaaaaacaagaagaccaccggttggattgcttatcatcatacacacattgatcgatgggaccagtttgaagccaaccgcgtggcggatagcgcaatgcacaacaggcaagagttcgacgcatacttagcctag

SEQ ID NO: 102094 - DNA, 1005 bp, Oryza sativa
  Clone ID: PAT_MRT4530_99650C.1
atgcctccatacacgacgtccgtgcccctgcacgcacagcagtcgcagccctcatgttcaccgtccacgaccccgtcgtcatcggccctgcacgtccgccgcgccgcgccacgctcgccagctttgcccttccgtcaatggcctccctgccgccgcggatccgcgttcgccgcgtgcgtcggacgcgccgtccatggtgctacccctctaatctctctgaacgccttcggccacgcccggcctcgtcttccggtcacgctccaccatcgtcgcagcagcagcaatggcgactcccgcctccttccaacggtcattgccgcaattgtgcacgcctcaacggcggtcttccgtcgcggctataacatgggtatctgcgtatctgtgtgtgcgttctcctgtgcattcgagatgagcgatatccgcggcttccaccgtgcggtcccgagcgacgcggctgacggaactgccggaggagctccgatcagcgccggcgccatcgccggcaccgtctgcgccgttgtcgtggttgtcgggctgctggccccgctcgtgtactggctgtatcggaggaagctgaaggcggcggcgagtcctcctctgcgtccgccggccgccgcggcgacgcccctcgtccgcgctcaggaagcaggcgcggcggtcggaggccaaggcgactacacgcggcgtcgtgcgcaagtcgccgtccccgccagggatggcggcgacctctgctgcggcatgtgcggctccgcctacgacatcgtgcgaggaggtggggagctgccggagacgctggagtgcggccaccacttccaccggcggtgcgtccggcggtggctgcgcgtcaacctcgcctgcccgacgtgcaacgccacgcacatccaactgtgcggagacgacgacgacggtcaagcgaccacgcccaggcatcggctgacggcgagcgattacagcggctgggatgaactctccaccggcgttggcagttccagctgccgtttctga

SEQ ID NO: 102095 - DNA, 1223 bp, Oryza sativa
  Clone ID: PAT_MRT4530_99651C.1
atggccattgtcgccgtcgagctcgcgttgcccagctcgagctcgccccaccgccccgctgccgtcgtcgagctcgggcccgccgacgcctccccccgcacgcgcggccgcggtcggcgacccctcccccgggagcggctggcgacaccaccccccgtgcgcgcctcggcctcttcgccccaccactccggcagtagccctcacatggccgttgtcgccgtcgagcttacaccgttgagcacgagctcgccctgccgccccgctgcagcggcttctctcctcccgccagccgacacccgcgcgccgctcctttctcgccggccgctggccgcgcacgcgcgccgctcctctcctcccgtcggccggcgcccgagcacgcccgcgccgctccttttatcttggagtgtatctctaagtttattgactagttgcctctcatcatcattaggagaccatggttgtgtgttgtcaagactgttcacttctttcagcatgtctcttaatatcttctttatgtcagggttccgggacacagacacaaaggctgaacaatcaaattggtgtctgatttccttgaacacctggttagccagagtagtcttgccaagaccgccacaacccacaatggacacgactttaagatcttctcttgatctatcactcctcttgttggtcaaccattcaatgatgtgctccctaggccctttgatgccaacaagcttatctacttcctcgtagagcgccggcagtcgagggtcgatagtaaaagtggcagagctgctggaccatggcttgagaagatcatacctcttgtgtcgcttgctctcctcgacgacatgggccttgagtgcctcgatctggttggcaatctcatggcgagctctcagcttcttcagcttgcgaatgatccccttgatgaggccctcgcctctctcctgctgatggcttattacacggacctcaaacgagtcgatgcagtcgtcgatgtcgaatgtgagctcacggaccttgtccctccacctcttcacgggggggtcgaggtcttcctctacatcggccagcacgcggagcgtggcgttcatggcgcggagctcgtcacgcaggaaggcgatctgctgctgcacgcccttgagcttggcgtactcgtcttccagcagcttggagagcttcgcgatgacggagttcatcacccccgtggaagcgctcgcaagcgcgcccaccat

SEQ ID NO: 102096 - DNA, 307 bp, Oryza sativa
  Clone ID: PAT_MRT4530_99652C.1
gttcttcttctggatgtatctgtcttggttacttgatctggagcttattagcggccatgtgcggcggaccaatcatctccgggttcatcccggcgtcagccgctgcggcagcggcggatgcggcggccaaaaagcatcagggcaagagggtcacgggcgacgtgctgtggccggagatgctgcggaaggggaaggcggtggcggctgacgaggactatgaggatcgcttccgcgagttcgagcgtggcatgagctacaaccaggccgtggggggcggcagccatgaagaggaggaccacaacgacat

SEQ ID NO: 102097 - DNA, 251 bp, Oryza sativa
  Clone ID: PAT_MRT4530_99653C.1
atgccggagacgaaacccatcgcactagtcggcgaagaacttgatgctacccctacctggcgcggcaactgtcgaaacaagatttcggcaatactaaaagggggtggctatcaagctggaaaagtggatgggttgaaagacaaggaatttatacaggtatggggtatccataatctccacagacggcttctagagcgtggagctgcggtggagttggcgggatatggacccgagcaaaaggacgtcaacgg

SEQ ID NO: 102098 - DNA, 395 bp, Oryza sativa
  Clone ID: PAT_MRT4530_99654C.1
tttgttttttttttttttttttgttttttttttttttggttttttttttttttttttttttttttttttttttttttttttttttccaaaaaaaaaaaaaaaaacccaaacttaaaataataaaaaaacaacagggtggataccccttaaaaagaaaggacccccaggccccaaaagttggtttttgcaaccaaaagcccttttctttggggaaaaacaaaatgccgaaaaaaaagcctttgggttatcccttttcccgggggcctatcacccaagggaaccccaaatcccgaaggagcctctaccccaccccaagttgctaaaagcctaaaactgaaagaaactttattcaatttcaaggccttgtccgtggggaaaaaaaaaaccaacacttg

SEQ ID NO: 102099 - DNA, 336 bp, Oryza sativa
  Clone ID: PAT_MRT4530_99655C.1
atggcggggctgcagcggtcgagcgagacgttccggcggtcgggctcgtcggggctcgtgtgggacgacaggcacctgtccggggagatcaagccggcggacggcggcggcggcggcgcggcggcgagggtggagcgcagccggtcggccgggcacggcgggtacagggcggcggggcgcgtccagccggcgctcgacccgccgtcgccgcgcgtcgccgtgtgcggcttctgcaggttcttcggcggcagcggcaagggcgggaggagcggcggcggcgccgccgccgccgtcgccggcggcaaggccaaggctaggcgccactcgtcgtcgtga

SEQ ID NO: 102100 - DNA, 309 bp, Oryza sativa
  unsure (1)..(309): unsure at all n locations
  Clone ID: PAT_MRT4530_99656C.1
tggagcatatgctgnaggaggtggacaaggtggaggtggnngcggtggacatatacggcgggtctggttctggctcatggatgctggttttggccaagctggtgganaacggncttttacggtggaggatatgntcaggcaggcggtcataggcggcggtggcgggggngggcatccatagnacttctatatagtgnacaactgcattttatgcagttaaataatatcaaagaggcccttgttatgtggcnaccgaccatagaatnnaagtagtggtaatgtaaactactatgtaatgttgactggtgc

SEQ ID NO: 102101 - DNA, 376 bp, Oryza sativa
  unsure (1)..(376): unsure at all n locations
  Clone ID: PAT_MRT4530_99657C.1
cccattcttccgtacaaattcagactgatgattgtgtgcaaacaaaaagccatggcttccaacaaggtagtgttctcggcgttgctcctcatcatcgtctccgtgctcgccgcgacggcgaccatggcggaccaccacaaagaccaggtggtgtacagcctcttctancnttgtgactgtttatnnnctaccctatgtactcgctaacacactnccnnncnttggtgaagcgccactgcgtgtgccacggcgcacccggcggcgccgtggacgagcaactccggcaggactgctgcccgcagctcgccgnggncgacgacagctggngcangncctcggggctcaaccacatggnnggaggcattttcttgnagct

SEQ ID NO: 102102 - DNA, 2860 bp, Oryza sativa
  Clone ID: PAT_MRT4530_99658C.1
tcatttctctgtctttaataccatctcgatctcccatccgaggggcatacttagctgccccccgggtctgaaccacaccctcccgaccgatccccgattccacgtgccacaattaaccaaagtcataccatagcattgattcagatctctcattcctgatgtccaaacagccagccacatgtgcatcaattttcagtatctgaaaaccctctgaaaaaacagattcagtattacaacaatccacatacattgtaacagatggatcatgcttgattctccaagtaagattttcgaagatgatctagtcggaatccgaagtaagatccatttcagggtgaaacgggcggagcaacttcgctaggtgctcccccatgtcctccacctcctccctcccgaagccccagtcatggaggaccagagacccgatggcgcctctcgcgacaccgtgcttctggaggctccccgatcgcctctctatgaaaggcaggacggcgctgcttgatcgtaaccgtgccgccattggtatcgattcgatgtcaagtgagccctttggctgggattcttctgtatggtcactaaggatctccccgtgccggccaatgttgcctctgaagattgacgggaacggaagggggacagggagggggcaaagagatgctgagagatgggaaaattttggctttgtctctctggcttcgtagactgaacataccgagtccttcacttgtgatatggaagtcctttgcccgcctctatcaagagctccatgaaccactagcgattcaactgaataaggatcttcgtcctcatcgctgatttcaggggtcaaagagtgcagcttcatctctatgttccccatagcatctctatctgtcaaagaaggggcaggcatcgctacatccagagcagtaaccatgttcatcaggttgcaaaaggacgaaagttttgaaaatgaaacagcatcatgaagagctctcataatggactccctttgattcctcctggatggtccaagggtcattggatccctcacacagtaaagcaatacaagtgtatttgtgtaatcatcagcaatgttctccaaaaactgtgcagctacactggaaaaacctcctgaatcatccacaataaactggatgccctgaatatggtcacattcttcaacaaagaaccttagcctctcattcatttcctctatttgcgaccagtctgaaacaacctcttgtgcgctgccatagttatcgaacttgtcaaagtcgagattaccggatgaactcaaagagccaagagaccctcgagaatcaacagacaccagacgagggcagtaggtagcaacaccctggtgcgtctcgccggagcggtagaggacgtccatgtccagcgcggcgttcttgaagaccggatcggcgtcggggtcgtcggcgagcccgagcaactcatcctggaagttccagaagtgggagccgacgtagttggcgaagccgccgacctgcaccgtcaccgcctccctcatcgccgccgccgccgctcggcgagctcctgaaccgcaaccgcaccggcggagtcgacgaagaagcttccctcgcagcagaaatctccacagacacgccggcgaggtttccccggtggggaatagcgccggcggcgaggtgctcagccaaacggcggcggcggcggcggcggcgcgagaaatcgtggaggttttcccctcactaccactgtggattgggttcccgtcctcctcttcctcctcaccgccgtcgcagctatcgccggcggtcactgacacggcgtggctcgacgacacggtgagctggagggggccctgcggcgagccagactgcgatgtgctgtgctgcgaggtggtgtattgctccggtggcagcggccatagacggccgccaaccgtctgatggtcaccgccaccatcaccgccgtcggatgcccgccgcgtgtgcagccggtacttctgcaggtggcttttgacttcatcattagtgaggccatcaaccttcatcagctccctaatctgcttgggagttgcagcttgtgggccaccgaggcgctggagcgcggcgacgaaccggcggtggagctccggagaccagcaccgtctggccttccgttgcaccgcctgctgccgctgcgctacagcgacatccgtgacggcgctgctggtggcgctcggcgccgccggacatgccggggcgtcggccatcgccacccgggaggagagggacaggtctggcacggcggcgtcggctttctccagtgattttgcaaacgccggcaaggtggccagtggcatgaacgcattggacaccttgtgctgctgcttcttgacgctgccgccattgctggtgctggtgcttgtgtggctcccgcagctccacagctgcgccgagctcatccagctccgcttgtcgttcgcgtccgcctccgccttcaccccctccgccgccgccgacgccgccgacttcctcttcgccgtcgccggcggcgcgaacatctccggtggcggcgccgccgccggagcctccacctgccgccgccgtagcagccgctgcttctccacctcgtccttgagccactcgatcacgtcggcgatgaggtggacgctgatggggagctcgcggcggaacacctccatcttggccttctcggcctcgaggctccggatgcaatcctcgaacctcgccgccgccgccgccgccgccgccgcctcgccgccgcccgccctcgccagcgcgcccgtcgccgtcctcgccgccagcatccgcatgtcgacgccgccgaggacgaaggccgccgccgccgccgcctcctcgtgctgcgccgccgacgccgacgacgaccccat

SEQ ID NO: 102103 - DNA, 1934 bp, Oryza sativa
  Clone ID: PAT_MRT4530_99659C.1
tttttttttttttttcacataagttttctttttttgtttttttcaatgcaaaatatagaaattacattgcacttacattataattacattatacttacatatgtaatttagagacttacatatgtaattttatgacttatattgtaaatacactaaaattacatatgtaatttaaaaatttacaatgtaaatatataccgactattttttgatgaaaaatatggcgccataaatatagttactccaaaaaaaaaaaaactctgaggaaaaagacaatagtctggactctggagatgtccgaatgtccgatcaccatcttcttgatgcgtcaagccgtcaatcaccttgttagggagtgctgtcacacattgacggagccccggcgagccatcaactcgtccatcagaattccaacatcatcgtacgacgacccacccttctccagcgcgcccctcgccttcacgcccagctccgtcgcctttttccgtatcgcctcgccctcctcgccgtcgcccatcactctccctatggctcccgcgaccacctcgccgccgatgatcacccggcggttctccagcttcgacgcgaagtccatggagccgacgccgacacccacctcgagcacctccgtgatgagcttctcgttgtagaactggtcggcgtaccgtggccacgtcaccatcggcacgccggcggtcacggcctccagcgtcgagttccacccgcagtgcgtcacgaacccgccgacggccgggtggttcaggatgagcatctgcggcgcccagccccggatggtgaggccgcgttcgccgcgcggcgcgatcagctcggcgaagccctcgggcatccactccgacgcgtcggcgtccgcgccgttgataacccacacgaagttcttgccggagaggtcgagtcctcgggcgagctcccgcatctccgccggcgagaagctggatagcgtgccgaaggagacgtacaccaccgagccgcgtggcttcgcgtcgagccaccgcaggtagccgtcggcgtccggcgagagctcgctggtacctcgcaccgccacgtccttgttcgcaagagcgaccggcccgacgagccacacgcggcggccgagcgtcgtgcggtagtgctcgacgtagtccggctccagctcgtggaagctgttgaacacctcgccgaagctcctctggtcggcggcgtctaagctctggaacttctcccagtggtccggccgcttcttcgggtccatcatttggctccgcctcagctcgacgcagtgaggcaagcccggcaggggcacgacggcgtcggggtcgtcgggggcggtctccagcgggttgttgcgcagcatgctgttggtgcaggccctcgcgaacacgctggtgccgaggaaccccagccgcgggacgccgtgctcggcggcggcgtccgcggcccacctgaagaagctgtccaccacggcggcgtcgacgtggtgctccgacaggtaccggtcgaagggctcatggagcagcctaatgccaaggaagaacttgtcacggtcgtcctgggtcgtaagcgccgtgccactctcgaagcccggcgggagcccaacgtccggaaatggcacgacggtgagttcgatcgccaggccgccgttgttgcgacggaacgagtcgttggcacggtccacggccgagcggatcacggcggcgttgacaggggtggtgaggatggtgcacctgacgccacgagcggcgaacagagcggccatatcggcgatcgggatgagatgaccgggcgcgaggaatgggaagaagaggatgtgcagtggctgctgctcatccttgatagccatgtgtgacctagtcagctagaacagagtagaatgctagttcagaacttgaaagcagagtgtgttgcaagtccaaaacttcagatgcccggacgcgtgg

SEQ ID NO: 102104 - DNA, 2455 bp, Oryza sativa
  Clone ID: PAT_MRT4530_9965C.1
atggccggagaaggatgggtgatgggcatcatttggcatgtgttggtacttgcccggaacacgattgtcgatgtttggggcggctggtcaatggagatcctgctcggcgccagcttcctgatgcagcttgtgctgaccttctctgccgggttccgttggcgcggggactcccccatgctacgcaacgtcatctggctcttctatgtaagcggcgactttgtggcgacgctcgcactcggccacctctctgtaagtggcacatccggcaagcgtcgtctcgtcgcgttctgggcgcccttcttcctgctgcacctcggcggccccgacagcatcaccgcctatgagcttgaggacaaccagctgtcggcgcgctatgtgctggagctcgtcctgcgagtcaccggagcggtgtacatcgtctacaagtccatttccggtagctgggccttggtcccggcagcctggctgatgctccttgtcggcgtggccaagtatacagagaagacgttggcgctccacggcgccaacctggccaatgtccggagatccttagagaggcagcagcaccgccatcacatgggaggtggcaaccaccattctcagcagctcgcgtttgcgacagatgacaatgatggcgcccttgtgatgaaggctcatgccctgttccacatctgcaagaactccttggtggactcgtcggtggatatagaatccacatctccttccaccgcgctgttcgatctcaggtggaaagagctgttcagggtgatggagatagagctctccctcatgtatgacttcctctacaccaaggccaccatcatccacacctggcatggctactgcatccgtgcgttgtcgccactggcgaccaccgtgtcactggttctggttgagctgagcaatgagggcggccgccgccacaagcaatcggacattgtcatcacccgtgtactgctggtggccaccttcctccttgagtcggcgtcgctgctcagggctctcagctcgacatggaccggcttcttgctgcatagcaagttgcaaccgggttggattcgccatgaagtcctgtgcatgagacggtggcatcgtttccatagcgtcatcatgtcccttggctggcccgccaaggtgcaagctcaccggcagtggttaggcaagatggggcagctcaacatgttgcagctggtcatcacccagaaggagctagagcgaccggcgccaaagggtggtcagttctgggacaaggaatatcagcgatgctcaaatgaaaccatgatcccagaaaatgtcaagaaactggtttctgagcttgtcagccgtcagttgaaggagttgagggattatgtgaaaaaggtggtggcgcaagaaggggcggatgcgttgtcacaggacgttaacttgctggagatggcagtgtacttgaggaagaagaggggtcagcaggcactagaaaagaacaatttgctctcggatctccgttggagcctcggcaatgagctccagctaggcatcctcacatggcacattgccaccaacatgttcctcttgttgtccggcaaagccgccaaggcgaagggtgacgaaggaccgaaggtgtgtgcaatcatgacactgtccaactacatgatgtaccttctcgctcttcgcccttacatgctgccgggcctggtcacccgcaagcttatcgaactgacctgcgaggaattggcccagatttggtccgaacatcaggcagcacctgccgccgtcgatgacctagagtcgtcgtcttctccgagcttctgcaatattagggtcttcatgcggggcaaattctcccagtggcacaatcgttggcgagtttctaccaggctcagtcacggcagggcggaggaggaggagcttgctaggatgctcatcgaaagggacaatgaaactgcccttaacaaatatctctctcgtggaatcgatgtcgcccagaaactgctcgacctagtagacttgcgcaaggagattgacatggtgcaggtgatcctggcggtgtgggtggaaatgctgttctatgcgagctaccagtgcagcaaggagtcccatgccaagcagctgagccaggggggcgagttgacgaccatcgtgtggctcatggcagaacacgccggcctgttccttgtcaacaaaaccagaaagggagctgaagaggctaactggaggaaaaggaaagctaataagaaaaaagaggccggaacgtctgatgctacagttaacaagctaagttaacctcctccgtcattaattaattgcatgtcctcctgtttgattgcatagagttcttgttatcattctcctatttgattgcatagagtggcaagttataactttgtacgtgccaaaatagtttccatggattgcaatttgtaaacaaactcttgctcataccctaaggtaatataattgctcactactgtctgct

SEQ ID NO: 102105 - DNA, 4417 bp, Oryza sativa
  Clone ID: PAT_MRT4530_99660C.1
aagaaatgcatctccattctgatttttatgcgaatatggtacatatttgtgacatacacagcctgcacccatgctcaaatgcacatgcacaagaaaaagaaattctaccatagcatagattcagatctctcattcttgatttcaaaacagccagccacatgagcatgaattttcagtatctgaaaaccctctgaaaaacaaattcagtattacaacaatccacatacattgtaacagatagatcatgcttgattctccaagtaagatttttgaagatgatctagtcagaatccgaagtaagatccatttcagggtgaaacgggcggagtaactttgctaggtgctcccccatgtcatccacctcctccctcccgaagccccagtcacggaggaccaaagacccgatggcacctcttgcgacaccgtgcttctggaggctccccgatcgcctctctatgaaaggcaggacagtgctgcttgatcgtaatcgtgccgccatcggtatcgattcaatatcgagtgagccctttggctgggattcttctgcatggtcgctaaggatctccccgtgccggccaatgttgcctctgaagattgacgggaacggaagggggacagggagggggcaaagagatgctgagagatgggaaaattttggctttgtctctctggcttcgtagactgaacataccgagtctttcacttgtgatatggaagtcctttgcccacctctatcaagagctccatgaaccaccagcgattcaactgaataaggatcttcgtcctcgtcgctgatttcaggggtcaaagagtgcagcttcatctctatgttccccaatagcatctctatctgaatatggtcgcattcttcaacaaagaaccttagcctctcattcatttcctctatttgcgaccagtctgaaacaacctcttgtgcgctgccatagttatcaaacttgtcaaagtctgtccatgacccatgtaactcatataaactctgaggatgatactgaacttttgaataatccgtccaaaagttgacgccattctctagacagtcgatcaggtccttatcttcaacacttttctgggagttgctggcaccattgctagtgcttggattctgcccttcttcaactaagctttgcagaaacaagttccgcccatgaggttttgagactgatcttgttacatttccagaccggatgaactcaaagaaccaagggacccctgcaaatgataccaccgtgaacacgcagcctacactcgagaaccaaccgataccagacgagggcagtatgtgggtacaccctttattcatgttccatctcaaccgatgcaatgctacagctttaggaggaaagacctcaaaattttcaggggattcgctacccctgctggtgcttgtgccaaaattctcttgcattgaaggagcagctaaaactatggcaccagtttcttgtccttcatcaggttcatcttgttgaccatctctgatgctcggatttatagcacaattgtattctgagttggcaagaagttccccttcttctataacatgcaattgagctacatctttgcaagttttagtagcccgtttggtccccagaggaacatttgacaaaggagagtttggtaatgcaataccaattttaatggttgttccctcctctgataatgaaccacaaagaaaatatggtacacggttcctcccaggttccttttcccagaatctcggagtaagctcaaagcaaacagcagttccatcagccacacaataagccgcatagcctgcaatttctgaggcatggacactccagatcaaatattcagacaattgataggtagaaacaccctgagttttcattccaacaaatggccttccagtaacaggaacatcatttgcgattctcgacaagctaacgaactttaacgtgccatcttccaatgatatgacaatacctcttgcatccttcaaccattgaagacttattacggcccttcgagcagtagttaactcccaaagatggcgatatggatctcttaaatcccagaatttcagaccatcctctccagcagtgacaaaggcattcatgttttccttactcacagatggtgtccacgacacggttctgatgggagcagattcagcagttacacacataaaaggttttgaaccttgaaatgacaagtttgctgagaacttccataaagcaactttggcagagctaaacacaggcttcagctttaaaaatcgagggtcagtaccctcctttgaagaagaggaatatattttctgaatcatgcttggtgatggaacttcccatacttcaagcgagccattccccaagagtactgcaagaaaacccaaacatgatttatgttctgactgatttgctgaaggaggtttccattttatgtcccaagcaacttttccattatgagctaaacataagacaacccttggtagagaaatgtcttttgggacacgagaaagggtcttttctgcagaacaaatcatatgataatctttagttgattctttaaatcgagccacttctgtatcttttagttcatcaataacctgagcactgttttcagaaggaacagatacagcctgatttctctctgcgttttcaaagttacaagcaggagtacaacatgaagtatatgcagttgatgcagaagatccgtccatgttctgtacttcaacactaagcactactgaacttctttcatttgaaacagatttctttttatcttgaacactgccctttccgggacatgattctttcttgcaattttcaactaaggccgcattgtcgcttgacttgggaattgtctgtgttttttgttcttcacccctgcatgctttagaacaaccgcgttccgttgaaattggctgctttctaggtctgcctctacccttcttggcacttgattcttccttgcattttgcaagacatatgccctgtgctggtgttgcaacacgagatgttccaacactcaaatggacactgttctctatagcacagcttgatcgaccaatgtcatttgctaaaatgtcacaattactcttggccaagaccatgagattatttgaattggtcaaagtagaacctttctttggggtctcagtaccaggagcaaatacacaactggttgtactcggaaatggtttcttcctaggtcgtcccctccgcctcggaccagttgagttactcttgttgcttgattcaggtaaaatatacgtaggcaacatggatcctacgtcagactgtccagattgcatggaattatcaatatgaattacttccttttctggctgttctctacccctctgacctgacaatggaactggggaggctgcatcaactgcagcatgagttatattagcaccagacccagtattttcagtgggacccaaaccacaatcaattgaaccaggcaacagacagacagaatcatttcctaattcagtatcagtgcctggaagatgcttgctgttgcttggagcaggatactttcggggcctccccctttttttcttgggctccatgcaggttaaagctattggagatagagctgtagacaagtcttctgttagtttaatgccagacaaaccttttatttcaacaggttttttcctaggtcgccctctaccttttcttggagttgattccacaggattaacagttggcatgggacaagctattgcaacgtcacatgaaacaactgctgaactgacaagaggatcaataagagcaaactcttgacttgtgtcgttttgggatgaatcttccaatttggcaattggcagcggatattttcttggtctgccccttggtcttttgacacttggttccaagtgatcagaatttgtgatggtctttcttggtctaccccttcgttttggttgattggatggattatatttattgcatgcaaccaatgactgatgaggatgaccctcttcagatggtgctaggagacaccaaacttgaattatacctctcccgattaatggcatgccaattttatggtaagaagaaccaggagggtgagcagcaacagcaagatactggggaacagatgcagacgagaactgtggtaagtttatcttgtgtgtgtcaactctggatggagctgatctggcgtcacaagtgaaactaacattttttggctcataagagaggtgcctccattctctgaggaaagttattgaagaggcgagccgctctacttcggcgtcagggaagttcggctcgggctccccggctgtgagctccgagatggcgtgcaccgctctggagaagacctccggtgactcgtcaaatacgcagacctcgacgccatccttaacctcctctccttcagtctggggcagcgcccccgtcgcctccggcagcgccgccat

SEQ ID NO: 102106 - DNA, 786 bp, Oryza sativa
  Clone ID: PAT_MRT4530_99661C.1
ttagatcctctgacaccggataatgcctgcagcacctccatagcacaaccatttctcgctacctttattcatggtccatctcaaccgatgcattgctacagctttaggaggaaatacctcaaaattttcaggggattcgctacccctgctggtgcttgtgccaaagttctcttgcattgaaggagcagctaaaactatggcaccagtttcttgtccttcatcaggttcatcttgttgaccatctctgatgctcggatttatagcacaattgcattctgagttggtaagaagtttcccttcttctataacatgcaattgagctacatctttgcaagttttagtagcccgtttggtctccagaggaacatttgacaaaggagagtttggtaatgcgataccaattttaatggttgttccctcaaagcaaacagcagttccatcagccacacaataagccgcatagcctgtaatttctgaggcatggacactccagatcaaatattcaggcaattgataggtagaaacaccctgagttttcgttccaacaaatggccttccagtaacaggaacatcatttgcgattcttaacaagctaacgaactttaatgcgccatcttccaatgatatgacaatacctcttgcatccttcaaccattgaagacttattacggcccttcgagcagtagttaactcccaaagatgacgatatggatctcttaaatccccgaatttcagaccatcctctccaccagtgacaaaggtattcacgttttccttacgttccat

SEQ ID NO: 102107 - DNA, 1701 bp, Oryza sativa
  Clone ID: PAT_MRT4530_99662C.1
atgagggaggcggtgacggtgcaggtcggcggcttcgccaactacgtcggctcccacttctggaacttccaggatgagttgctcgggctcgccgacgaccccgacgccgatccggtcttcaagaacgccgcgctggacatggacgtcctctaccgctccggcgagacgcaccagggtgttgctacctactgccctcgtctggtgtctgttgattctcgagtgtatatactgcatgttcacggtggtatcatttgcagggtctcttggctctttgagttcatccggtctggaaatgtaacaagatcagtctcaaaacctcatgggcggaacttgtttctgcaaagcttagttgaagaagggcagaatccaagcactagcaatggtggcagcaactcccagaaaagtgttgaatataaggacctgattgaatgcctagagaatggcatcaacttttggacagattattcaaaagttcactatcatcctcagagtttgtatgagttatatggatcatggacagactttgacaagttcgataactatggcagcgcacaagaggttgtttcagactggtcgcaaatagaggaaatgaatgagaggctaaggttctttgttgaagaatgtgaccatattcagggcatccagtttattgtggatgattcaggaggtttttccagtgtagctgcacagtttttggagaacattgctgatgattacacaaatacacttgtattgctttactgtgtgagggatccaatgacccttggaccatccaggaggaatcaaagggagtccattatgagagctcttcatgatgctgtttcattttcaaaactttcgtccttttgcaacctgatggtacccataggaccgccttcattaagtagaagttgcatgtcaccgtacctttatatacaagatgagaaaccattccatgctagtgctgtttgtgctgcagcaatacattcaatcactgttccatttagattgcaacgaacgggaccgagttcagacttagcacattcatctggtaatcttgacattggcgaacttgtgcacattttatctgatcaaggtcggcagaacatggttactgctctggatgtagcgatgcctgccccttctttgacagatagagatgctatggggaacatagagatgaagctgcactctttgacccctgaaatcagcgatgaggacgaagatccttattcagttgaatcgctagtggttcatggagctcttgatagaggcgggcaaaggacttccatatcacaagtgaaggactcggtatgttcagtctacgaagccagagagacaaagccaaaattttcccatctctcagcatctctttgccccctccctgtcccccttccgttcccgtcaatcttcagaggcaacattggccggcacggggagatccttagtgaccatacagaagaatcccagccaaagggctcacttgacatcgaatcgataccaatggcggcacggttacgatcaagcagcgccgtcctgcctttcatagagaggcgatcggggagcctccagaagcacggtgtcgcgagaggcgccatcgggtctctggtcctccatgactggggcttcgggagggaggaggtggaggacatgggggagcacctagcgaagttgctccgcccgtttcaccctgaaatggatcttacttcggattccgactag

SEQ ID NO: 102108 - DNA, 1326 bp, Oryza sativa
  Clone ID: PAT_MRT4530_99663C.1
atggcggggacggagagaagtcgtcgccggcgagaggtcaagctcaggaaggcgtggaggaaggaggctgccacggcggggccgaccagcgtgaacgacgtccccgacgaggtcctcgagctcgtcctcctccgcctcggcgattccctcgccctcctccgcgccgcggccgcgtgcaagcggtggcgccgcctcgtcgcggacgccgggttcctcgcccggttccgctccctccacgagccccacgtcgttggtcactaccacgtcgtcgaccctaccttcgcgggggcgctgcgcggcggcaaccacgtcttcgtgccggagcgctcaccgtcaccggcggacgctctcgaccgccgccgcctctccctcgacttcctgccggagccggatggcgaccgcgcatggtggaagctcgccgacacccgcggcggcctcgtgctcctctacccgaagacgtggaatgcctccttccccgacatggtcgtctgcgagccgctcacgcggcggcaccagggcatcctccgcccacaagagatgaactctccctacaggatatgcttcggcgtcttcttgatcgatggcgccgccgccgatgagacgggcggctgcatcagcatgtcgaacttccgggtgctctccgctgtctacgaacccgaaacgccatactgcggatactggcacggtcatggcacgccgccccgcccgcgcgcctacgtcttctcctcgggcgtcgacggtggctggcgcgagagcgactccggcagcgacgtcgaacttccaagcctcgaattgataaacttcgtggggcgagcgggctgctctctgtactggggattggatggcaaggacgccatgctcgctctgcacaagaccacggcagagttctcgctggtcacgatcccggcgatcgtcggagagtcataccacccgtcaaccttccgtgtcatcggtggcggcgacgacggcacgatgcgcgtggtccgcttgatcggcgacgacctgaaaatcttcacgcagctcaaggggagcggcggcgagtgggtggtggagaagctcgtgaggctgccggtggcgacccgtgggttgccagggcacgacgtcgggttgttccaccactacgcaaggatcgtcacggcgaacgagaggtacatcctcgtgacgccacgggtggcgacgtggctgttctccgttgaggtcgagacgccggtggttgagcgcgagcatgtgaggaacaagtacgccggcgcggcctacccgtacgagctgccatggccaccggtcttgcaggcttgcattgctgggagacgccgcagcaggagatga

SEQ ID NO: 102109 - DNA, 3267 bp, Oryza sativa
  Clone ID: PAT_MRT4530_99664C.1
atggcggcgccgccggaggcgacgggggcgccgccccagactgaaggagaggaggttaaggatggcgtcgaggtctgcgtatttgacgagtcaccggaggtcttctccagagcggtgcacgccatctcggagctcacaaccggggagcacgagccgaacttccctgacgccgaagtcgagcggctcgcctcctcaataactttcctcagagaatggaggcacttctcttatgagccaaaaaatgttagtttcacttgtgacgccagatcagctccatccagagttgacacacacaagataaacttaccacagttctcgtctgcatctgtcccccagatcacacacctagacaatgggaaggctaaaacagacagcttttgcagctcagatttcgttatatttgccggaggcaatgtttgggcgttggactggtgccctaggttgtgtgacaggcctcattctcccataaactgtgagtatcttgctgttgctgctcaccctcctggttcttcttaccataaaattggcatgccgttaatcgggagaggtataattcaagtttggtgtctcctagcaccatctgaagagggtcatcctcatcagtcattggttgcatgcaataaatataatccatccaatcaaccaaaacaaaggggtagaccaagaaagaccatcacaacttctgatgatcacttggaaccaagtgtcaaaagaccaaggggcagaccaagaaaatatccactgccaattgccaaagtggaagattcatcccaaaacgacagaagtcaagagtttgctcttatttatcctcttgtcagtccagcagttgtttcatgtgacattgcaatagcttatcccatgccaactgttaatcctgtggaatcaactccaagaaaaggtagagggcgacctaggaaaaaacctgttgaaataaaaggtttgtctggcattaaactaacagaagacttgtctacagctctatctccaatagctttaacctgcatggagcccaagaaaaaaagggggaggccccgaaagtatcctgctccaagcaacagcaagcatcttccaggcactgatactgaattaggaaatgattctgtctgtcagcctggttcaattgattttggtttgggtcccactgaaaatactgggtctggtgctaatataactcatgctgcagttgatgcagcctccccagttccattgtcaggtcagaggggtagagaacagccagaaaaggaagtaattcatattgagaattccatgcaatctggacagtctgacataggatccatgttgcctacgtatattttacctgaatcaggcaacaagagtaactcaactggtctgaggcggaggggacgacctaggaagaaaccatttccgagtacaaccagttgtgtatttgttcctggtactgagaccccaaagaaaggttctactctgaccaattcaaataatctcgtggtcttggccaagagtaattgtgacattttagcaaatgatattggtccatcaagctgtgctatagagaacagtgtccatttgagtgttggaacatctcatgctgcaacaccagcacagggcatatgtcttgcaaaatgcaaggaagaatcaagtgccaagaagggtagaggcagacctagaaagcagccaatttcaacggaatgcggttgttctaaagcatgcaggggtgaagaacaaaaaactcagacaattcccaagtcaagcgacaatgcgtccttggttgaaaattgcaagaaagaatcatgtcccggaaagggcagagtgcaagataaaaagaaatctgtttcaaatgaaagaagttcagtagtgcttagtgttgaagcacagaacatggacggatcttctgcatcaactgcatatacttcatgttgtactcctgcttgtaactttgaaaacgcagagacaaatcaggctgtatctgttccttccgaaaacagtgctcaggttattgatgaactaaaagatacagaagtggctcgattcaaagaatcaactaaagatgataatatgatttgttctgcagaaaagaccctttctcgtgtcccaaaagacatttctctaccaagggttgtcttatgtttagctcataatggaaaagttgcttgggacgtaaaatggaaacctccttcagcaaatcagtcagaacataaatcatgtttgggttttcttgcagtactcttggggaatggctcgcttgaagtcattcccttgacagttgattggtcaccctctcatgatatgatattggcgggatgtcacgatggaacggttgctttatggaagttctctgcaaacctgtcatttcaaggttcaaaaccttttatgtgtgtaactgctgaatctgctcccatcagaaccgtgtcgtgggcaccatctgtgagtaaggaaaacgtgaatacctttgtcactgctggagaggatggtctgaaattctgggatttaagagatccatatcgtcatctttgggagttaactactgctccaagggccgtaataagtcttcaatggttgaaggatgcaagaggtgttgtcatatcattggaagatggcacattaaagttcgttagcttgtcaagaatcgcaaatgatgttccttttactggaaggccatttgttggaacgaaaactcagggtgtttctacctatcaattgtctgaatatttgatctggagtgtccatgcctcagaaattacaggctatgcggcttattgtgtggctgatggaactgctgtttgctttgagcttactccgagattctgggaaaaggaacctgggaggaaccgtgtaccatattttctttgtggttcattatcagaggagggaacaaccattaaaattggtatcgcattaccaaactctcctttgtcaaatgttcctctggggaccaaacgggctactaaaacttgcaaagatgtagctcaattgcatgttatagaagaagggaaacttcttaccaactcagaatacaatggtgctataaatccgagcatcagagatggtcaacaagatgaacctgatgaaggacaagaaaccggtgccatagttttagctgctccttcaatgcaagagaattttgacacaagcaccagcaggggtagtgaatcccctgaaaattttgaggtctttcctcctaaagctgtagcattgcatcggttgagatggaacatgaataaaggtagcgagaaatggttgtgctatggaggtgctgcaggcattatccggtgtcagaggatctaa

SEQ ID NO: 102110 - DNA, 1003 bp, Oryza sativa
  Clone ID: PAT_MRT4530_99665C.1
aaaaaaagaaaatgggagccgcgcccccccacaggagagtatagtggacatacataaataagcagcaacattgaggcactttttttttttttattaattgggttctctctgaaaaccgctaagatttttactcctcaaaatatgttccatcacgcgaaccgaagtgaaaacaaacaccaatttctacttgcaaggcaaacagagttccaacaatccaacaccataaaacctgatacactgttacacggcaaggcgccaacagagggcacatgctacgatggcctagactgccagaggtggcaagaagtacaaaaatgtcgcgatctcattttggctggtagaatctgcgggtatgatgatcaggtttctttgatagcttgcttgcttctccgttggtgcacgtcccagttgaacacccgagcaattgtaacctgagtgatcgtttgttggtcccgcaagaactggagatcagcaacaaggacttctaaactggccttggcgttttccagattctttttcaagagggcgttggcctcgtcgcaggagtactccagcattacatttgcacccaaccataggcacacagaatcggtgtcctcgattttcgcacgggagtagattccctcagataattcaaaatcggctgtgagtgcctcacccaaagcttttttagcttgtaaagttgcaacaatatccaagcacttctctatatcaggaatttttgcctgaagatctctctgttgtgctagaagtttcatctccactattttgtactgctgcagcctttcctggaggaaggcgaggccggagttgacgtcgagcccggcctggcggaggtaggtctcgacgtcctcgacgaaggacgccgccgggatgccccgccgctccgtcaccccctgcggcgtcgccgccgccgacgaggaggaggaggaggccgccgccgccgccatgagaaatctcgagggagttggaggaggaggaggaggaggaggagggaggagaa

SEQ ID NO: 102111 - DNA, 129 bp, Oryza sativa
  Clone ID: PAT_MRT4530_99666C.1
atggcgatctccctcttcggtgcaagatcctttggatttcttgagggctttcgcagaggatttcatggtggtgatggtgacgcagtagctcgcaaatggtggtcgggtttggccgataattttatatga

SEQ ID NO: 102112 - DNA, 443 bp, Oryza sativa
  Clone ID: PAT_MRT4530_99667C.1
gcacctcggttgtaggcggaggcgtcaacaatggcgccattgatgtcagggagtggtggtggtggtgctgctcggcgccgcccgctgcggcagccgccggtggtggacgacgacgacgtcggctgcagctgccccaagcagaggctgctccgctcgctcctctcctcgctggtgtcccgcgcgcgcggcgcactaggcggcagggcggtgtcgaggcccaagtcgtccgcgccgccgtcttcgtcggcctccaccaccaccaccgccgccgccgccttcacctccacctccaccaccggcgccagcgccactaccggcgactcctccaaggagtcgtggggccccgcgacgtacgccgccaccaacacgcacacgctgtacgaggtcgaggacgaggtgaggcggcagaggaggaaggacatgaggaggaggaggaggaggag

SEQ ID NO: 102113 - DNA, 747 bp, Oryza sativa
  Clone ID: PAT_MRT4530_99668C.1
gggggacttggatatagattgtgtgccgagtgaggagctttgcggagcgtactccggtagacatatttgattcaaccgagtcctcaatcattgtagtgggaatacccggtatgagtagtaagcacttagagggtatttcctctattgtcgcttcgtgggtctttcgagatgcgaagaatagcagagagaaaaggttgccccacttgaataaaaagcattccctatttctttcgctctcggcgtagacggttaggatttattaaaaaaaactcttggcccgtcaactcttgcccggaagaatatcaaagatagagcccgtgccccttctgttctcttacattgtttcgttgctccgaatagaattgattttactcccgaattgcattgtttcagagttaattactttcatttcccccaactattttactatcccgagataagttctagaattgcctgccagcgagggagaatgacttgatccactagcatttcggcatggaatttatagattccccaggtactttttcttttgaggagaaaacaacacgaattactagatttgtctaactcttctcccccagagactttggtttcggaatatattgacttctaaagaggattgcgccgggattcattgacgaatatatatttacttttgcatattctcagaagaggaggcgggcggctcgctacattctgtagttcgttcactcctttctatgtttctgagacccggaaccagtcaag

SEQ ID NO: 102114 - DNA, 470 bp, Oryza sativa
  unsure (1)..(470): unsure at all n locations
  Clone ID: PAT_MRT4530_99669C.1
ggccagaacgcacaaaatcatatatagtactttatcaccagctattttgttttcaaaacatttcattattcattatttgttttgatcactatctcgttgcatgcaacacagcaacggggtgatcctactagctatgaggcaagccagctaagcctagtactggccggcggcgaagatgctgcactgctggggctcaaaccggcacatngacggcaggtgggccgcgtacttgctcggcctgggtaggcttaagcggggtattccccggttgttgttgttgttccccgaattacccttcttcggacaacccttggcggaagtaccctggttcggacaacaacccttggcggcggtattattcggacaacaacaacaacaagctttgttcaaggggcttgggatggctttcttggaagctcttaaccatccgggggtgggggggccaggggacttcggggttaaggtcttga

SEQ ID NO: 102115 - DNA, 336 bp, Oryza sativa
  Clone ID: PAT_MRT4530_9966C.1
atggccatgccatccgttggcatcgccgccctctcttccaccagcattgcgactccgccacgcccccgaaggcaaggccctgttgttgacgtcctctcttccgccggtatcaccacttcaccactctcacggtggtcctgccttgtgccaccattgcaaggggctctcacaatcagagaggaaattgagcttatgagaaatgtgtacaaacttcttggtggtcttcacgcatttaacgagttcaatgcagggaatttggatgagctgattatattgaagagcattgcaaggaaccatatcttcatagccattgtagagataattattgcaacatga

SEQ ID NO: 102116 - DNA, 478 bp, Oryza sativa
  Clone ID: PAT_MRT4530_99670C.1
gtccagaacgcacaaaatcatatatagtactttatcaccagctattttgttttcaaaacatttcattattcattatttgttttgatcactatctcgttgcatgcaacacagcaacggtgtgatcctactagctatgaggcaagccagctaagcctagtactggccggcggcgaagatgctgcactgctggggctcaacccggcacattgacggcagctgcgccgcgtactgcctcgccctggtcagccttacgccggttatccccggcttgttgttgttgttgccctaataacccttcttcgaacaacccttggcggaattcccctggttcgaacaacaacccttggcggcggaattcttcgaccaccaccaccaacaagcttggttcaaggggcttggcattgttttcttggaagttcttaacattccgccgattggcccgaccccttggccgaccccttggttcaacccggaattt

SEQ ID NO: 102117 - DNA, 702 bp, Oryza sativa
  Clone ID: PAT_MRT4530_99671C.1
atgtcgtcgtcaaatggcacgacgacatacttgccgggaggagaggcggccggcggcggcggcggcggcaactccggatgctgcagcaccacgacgttgttcggcgcgttggccgcgtcgttcgccctgagcttcttcctcatcaccatcttcatctgccttcgagcactccgcgttgctcgtcgccggcgtgatcgtcccctggtcatggagcaggagcagcggcggccgacgccgcctaggttcggcctagacgccgccgccatcgcgcgcctcccgtcgttcccgtacgtgcgagcccgtgacgacggcgaggtctcggactcggcgtcgtcgtcgtcggtggagtgcgcggtgtgcctcagcgccgtcgacgagggggagacggtgaggcagctcccggcgtgcgggcacgtgttccaccgggagtgcatcgacatgtggctctcgtcccgcgcctcgtgcccggtgtgccgcgggaaggccgcgccggccgacgagctcgccgacgccatagtcgcgcgcatagcggtgacgcccgacctcgtcgggccacgcgtgtctatgtccgtcgtcgtgccggttgagatgctgaagggtgaaatggtgggcgcgtcgtcaacgtcgcgtgccgcgtcggcgccgccagagcagctcgatgcgcgagcgcctggcccggaaacggacttggagagtaaatag

SEQ ID NO: 102118 - DNA, 393 bp, Oryza sativa
  Clone ID: PAT_MRT4530_99672C.1
atgggcggcgccggatttgctcatcgcctctctttccccctctcttccccgctgccgctcgttgccatcgtggccttcggctcctctaccacctcaccgcctacagctctgcccaagggtggaaaggggaatacagatgtggggagcgcgcttgcggtaaattgcttctcccgtccctcccacgcgacgcctcccgctcccgtgccggcaaccgatgggtggtcgtgccacactgccgcctgcaactgcaaggtgggggacactgcgcacaaccgcacccgtcgtgggctcgtgatggtcagcctggttgggggtgggcgggtgcggttggagttggagaacctgctgcgatgcgagatgccaccatcccggccagcacgctacccaacgcca

SEQ ID NO: 102119 - DNA, 402 bp, Oryza sativa
  Clone ID: PAT_MRT4530_99673C.1
atgtctcaacgacaagacaaaggagtggtggcggctcagcaacaacaaggaggagctacggggcccaagtggcagaactcaggaaatggcacagccaaggctacaatggacagatctggaggtggagatcgagctgcagtagcaagatctagcggcggacctagggcagcaacggggcccagtggtgtcgagggcggcggatctgctgccactgggccttgggagcatggatccgtcaccacaaggccttggaaagcaatacctcgtcttcgtgggcacttaactgtgcagcctaaaaaaggagattttcgtggggctcttagggtggacacttgcgaaaatcgatttttacacatagatgaaaatccatctacaaaaattgatgattttcacgggccttaa

SEQ ID NO: 102120 - DNA, 1008 bp, Oryza sativa
  Clone ID: PAT_MRT4530_99674C.1
atggctagcaagattcgtcccatgtggaggcgaggttggggatggccttgccactgcgatgataggggtggtgatggtgtggtcgatcggcacacgggcaaggaggaagggccgatcgaagaagctcaggtgaggaggatggaccaggcacgtggcggtctctgggcgaaaccgagggcaggccaggggagaggaaagcgttgtgatgtcgggggaggtggtggcgcagctagccggcgcactgacaaggcggtaggggcggccggagtcggcgctagcgagaccgaggaagaggcggcgcgggcgatgacgatggggagcttccggcaggcttcgacggacgggaaccggctgctgggattctcttggctgtttctaacacagcagagaaagcggagaggcttggtgacgaccgaggcggctggagcgcgctcggcggcggagagagaagacgagcgcgtggagaggtggcgtggccgcagggaagctcgggaggaggcaaaaacaagagaggggaaggagggggttccattttataggctccggaggggagccggccacgggagaggtggggccagcaccgagaatggtggccggcggccatggaaggtggtcgggaaaggcacagccgttccggcggctgtggcggtggcggcttccgcatcgacggggacgaacgggccacacttgatggcggagttcattggcaacgcggtgccgaatggcacgcagagcttcatcaacgtcgggcactcggcggcgcttgcctccgtcggtggcaaggtggcgtgcttctggcaagagcagttctccaccgtccacatgctgtcaaggagctatgaaggggagcccatcgtgaggcttggcggcaacggcggctacgagttcaggtactcgacgtcgctggccggcagcgggcatatgtccgggcttggcgcgcaaggcggcacgccgttcttgaagtccggcatcgccggcagcgaaaagtggcaaggtgccgcccaatag

SEQ ID NO: 102121 - DNA, 364 bp, Oryza sativa
  Clone ID: PAT_MRT4530_99675C.1
gatcttcaatgggtacgaggcttgcagttcactactaaccagccattactgtacgtgtgggcagctaaaagaggaaaaccgccgacgcgaagtcacagttctatagtgaagagaagatcaagagtgctcatatcatgtaataattgaccactatatgttcgtccgcgcgatagtcaaactctactatcgagagcagagagtgtatgagaccatcagcgatgctcttatctgatacgagacgccattgctcaagctaaactaggagttccccctccggtagacgcgagactgcaagacgtcaaacacactgtctctgaagatgatgctcaatcatctccaagaggggcgcccgaaccctaaggtc

SEQ ID NO: 102122 - DNA, 324 bp, Oryza sativa
  Clone ID: PAT_MRT4530_99676C.1
atgtgggcacaggtccacatgtcagtgacttctccagcatgggcagtactgcagacaatccccattggtctttttccccttctactggcatactttagcttgttcaggatcaagtttttatgtttcagtccagaactaggttttggtactgaaaatagatgttgcttgcaggagccctttgtgaacatacctgaagatagaatccgtgaggctctaaaagttgtgctagatgtggcaaatcacccggtgcttattcactgcaagcgtggaaagaatctcaaattgcaaggaaaaaccatcatggcccttcaagcccttgactga

SEQ ID NO: 102123 - DNA, 1479 bp, Oryza sativa
  Clone ID: PAT_MRT4530_99677C.1
atgggccgtcggatgacatgtcaggcccaagttgaagtgagcccatacagcgactccggccttgttgacgaacgaacgaatgatgcttcggagcagcgcccaccgccatcggagcctcgccctcgcgcggccatgcttggtctgaggggagccagggcggcgcagctcccgtacgcttccgccgccgtcgctcccacccccacgccctcgttttccggcttcgcgcgccgcctcccgctcctcgcctccgcggccctctcgcctctgccgccctccttctccttctcctccgcttccgccgtcaggagggatagggaccctcccatgcgtcccgtctccggcgccctctccagggagggcaaggagttgcttgtccagcatctgctcgtcggcgaacaggatgtcaggcttttggtcgatcttgaaaagaacatcattacaggaggtgcagacttgagcgatttagctgtcgagtactctttatgcccatcgaaagaaaatggtggaatgctggggtgggttcgaagaggacagatggttccagaatttgaggaagcagctttcggtgctcctttgaacaaggttgtacgagaacaatgcgtagtggaagacattccaccagaggagcttcatgcaaaaatgcaagatcctaactttcttgaagaagctcagttgattgatgttcgggagcctgatgaagtagataaagcttctcttgaagggtttaaagttctacctcttcgacagtttggaacttggggaccagttatgacagatgaatttgatcctcagaaggacacttatgttctggcatatgtgcaacaactagagagcagtaagctgaagcttgcacagctagagcaggaacttcagaaagctcgtcagcagggaatcttcatctctagctctggagaccagacccatgccatgagtggaaatggggcattgacttttgacttagaatacactagatggctcgaggagcaaaataagcagataaatgagttgaggacagcagtgaatgctcatgcaagtgacagtgaccttcgtcttattgttgatggcataatggcgcattatgacgaggtattcaaggttaagggtgtagctgcaaaggccgatgtgtttcatatactttcaggcatgtggaagacacccgcagaaagatgcttcctgtggcttggtggtttccgtccatctgagcttctaaagctcctagcaaatcacctcgaacctttaaccgagcagcagttgctgggattaaacaacctccaggaatcttctcagcaggcggaggatgcactttcacaaggtatggaagcactgcagcaatctctggcagatactttggctggatctctcggttcatcagggtcttctgggaatgtggcgaactacatgggtcagatggcaatggccatgggtaaactaggaacgctcgagaatttcctttgccaggcaagtatcttcaccttctaa

SEQ ID NO: 102124 - DNA, 861 bp, Oryza sativa
  Clone ID: PAT_MRT4530_99678C.1
atgttacaaacttacagcagcgatcgatggcactacgatgcttgcacggttacaccggccatgcccaagcgtaaatgcgccgtgaaggagcaacattgctttggtcttctccgatacatgtacaggctctcgtcttcaacacactcatgggtcatggctcgaatggcatgtacctggatcgaccacgcgtcgttcagcagtgccatgccacgcagacggcagacaccgacaatgtacttggctactggccattattcaagatttcaagttgtggtagaaatttatgatcgttgcgcagagcttggtcgctatattaacatgtgtcagttagtcggcattgtcaatactctatccagattgatcacacgaaagaaatttaatataccccgaaacttcaggatacaagaaccgatataccagtttcagcagtacgctgttgcttacagtcctcaaatactcgtcatgtctcacatagcgattgttcaagaaccacgattagacagtcttgaacagagcgccaaacctgtccacgaaacgaatcatatcgcccaaatcgaatacacacgccgagaagaaggaactcaccggcccaatgcaaaacgtactcccacggcccaaatgcaacgtagcaacgagcccaaccaagtagcccaaatgcgatattggagtactatagaatatagaaataagtccacttcaactcccttaaaattactactcatgaagaataataggcgattgggcatgacatgtcatctaatcgacattggtttgaaaacaactcaattattccacgtaggtgacgatgtctacaactctacgctctacagtgccccccggaccagaaccatgatccttgag

SEQ ID NO: 102125 - DNA, 4530 bp, Oryza sativa
  Clone ID: PAT_MRT4530_99679C.1
ctatctctgctggaaatttaaggttctgatggagtaagcatatgtaaaagcgaagaagacagtaaagccagccagcactgcagccacgacgcccatgaagtccgggtcatagccaaaatagtccttgatgaaaggtctgacttgctgatcagattgtccagggaccgtgataaaatcctccacatctccgtactgtgacacaataaggccgtatactgtccatgccactggacaaagccaatagtaccaaacccaccattttgggattttcggtcttgggatgaagaatcctgaaaagagattgaaaagggtgtaaaaggcagcacccaatatggaagcaacctgaaggtttggtgatacggagacgttcatcatgccatagtaagtgaaatagaggaaggtgaagaatgaaacatagaagaaccagaagaattttgctggtgtccattggaacgacatcattgggtagacaataagtgtgtaaatgacagtctcaacgaacacatacggtatctccacaacaacctgagctagagcatatggtatagccgagtacattccagctgcccgctctctgtaaaatacagtcctttccacagcaacaacgggttgaacagttacagaattctcaaaaccaacaaacaagacggcagcatacattgatccaatgatgaccaagagatcttttgaactctccatcttgtgaccaaccctccaaaatatagtccccaacattaaagcagtaaataatgcaaagaaaatcctgacaaggttataatcagggcttctccagtaagtccaccattgtttccagaggcagagcttgaactgattaaaggtgctctgcgagtattgactagggaagtagaggtcatcggaaccaggaggtggattgctcagttcttttaccaatgctttggttcgctggtgcatagtcgatgacctgtaatattcagcaaaatcaatttccaatcgaacttctgatgcagctgagcttacatccagcatccatgtagctgggttgcgattctcttcgatctttgggactccaggaattgcctcaaagtactcaacaactttatgagaatttgtacccaatggtccagaatatataacctggcctcctctttttagtagcaacaactcatcaaaagcttcaaaaatgtcaatgcttggttgatgaatagtgcatacaacggttcttccagtattgacagtgttacgtacagttctcataacaatagcagccgctcttgcatcaagaccagaagttggttcatccataaagataattgaggggtttgccacaagctctacagcgattgtcagcctctttctttgttctgttgacagcccattcacaccagggaggcccacaatagcatctttcagaccagtaagctcaaccagttccataacttcatccacaaagatcttcttttcttgatcattgacctccttaggcaggcgcaggaaagcagagaaaagtagggactcccttacagtaatctgtggggagtggatgtcattttgctcacagtagcctgatattctagcaaatgttgcttggttctttgggtaacccgatatatagatttccccttcaatatatccacctgtctttctcccagataagacatccatgagggtagtctttccagccccactaacacccataagagcagtcagaacaccaggtcgaaaagctccagatatccctgacagcagttgaagcttatcggcagttactccctgactcttcatttccaaaggcatatcaacatagtaatttatctcattaaaggacatgtagagcggttcaaatggaagaaccatccctcttcctggagcagttctgccagcagcattaatgtatgagtgcgacctatcagaagtgtttgcggaatatccacgcaattgttgaatcaccttatccagggtgataattgagttcggggatacaggttctggtgtttcaactgtaattatctgttttatatgtgccttgttttttccttcctgaatgttctcctgactatcggtttcttcagggaggatggattgtggttttccaacagggttcaggtacataagtgatagcgagaataacacgttgaacagaatggtgaaccctagaagggcgccagttgcaatccagtaccattccttattggtgaagacacctgaattttctagaactgccactcccaatctctttccatcaggtacaaatttgtccatccaccttggagaatgcatttcattggaagaaaaggcaatgtatgcataagtaaggggtgaacaccagtaagcccacacccaccatttagggattgcatcttttggtaggatgaatcctccaagcacaaacatgatcagaactgcaagagaccctgcagtgttcgttaccacaacagtcctgcataacccagcggtgactctgaacagtcctgcagccatctgctgaagcatgaagactacaagcaggtgtttgaagaacctgctagcttcaggggcaaaccccatggtgtagtaggttattgcaacccaaattatcgactcaaacagggagctagggattctcacgagaacatttggaagtgcaaaagtccatggcctataaaacaggaagtccctatgtttgtagaataccgggagccttgccagagttaaagataaatcagcaaaaccactgaacatattagttatcataacaaaaataagggctcctatatagatttggccatcgtcctcatctcttgtgttgagctgggtccgcaagaaaactgttgatgctatcaatgcaactaggattccctgaactgttttgaaaatgtagacaaatgaattccgcttcatgagaagccattccttggagcacgaggtcttgagaagctccaaagtagaaacagactgcttggagaataccagagcagacttgtggattttccccttgttgaaaggaacagaaagctgcttttttaggctcttccccatgtgaaatttcttaaactttgcaacaaattcaggtactgatacgtagcgataaggtttctcgctctgtatccagtactgctcctgatctttctttgatgtaacctcctgcaagaagtcagcaacacctttcctctcggggcagcggaacccacacctctcgaagaactcaagcacatgctcccgggggccctggtacacgatctgcccctcggagagtagcatgacgtcgtcgaagagctcgaagatctccggcgcgggctgcagcagcgacaccaggacggtggcctcgcccatgtggacgatctgctggatgcacctgatgatctggaaggtggtggagctgtccaggccggtggatatctcgtccatgaacaagaccttggtcgggccgaccagcatctccgctgtggtgaggcgcttcttctggccgccggagatgccgcgccgcagctcgtcgccgacgatgacgtcggcgcacatgtccagcccgaggatcctgagaatgtaatctgtctggagagtgctcccctcaactgaagtagccttcatgaacaggtcgacttctggatctgggtatatgcccagctgcctctccttcttcgcgagctccttgagcaactcgtatctctggccaaccccctgacacttggcggagaagtcgagcgtctccttgacggtcatctcgccagcgtggacgtcgtgctggctgatgtacgccgccgtcttctgcggcacgaactcgtccagcccgtagccgttgtacgtcacctcaccgctcgtctcaagagttgggtcgagcttgccggccagggccagcaagagcgtcgtcttgccggaagaaggtgggcccagcagaagcgtcatcctggacggcctgacgatgcccgagacgtccttgaggatgtggagggccttcctcttggcgaagttgaggccgacgaggcccagcagagactcgcccacgtcccgcgacacgttcgccagcgtcggcagcgcgcgcgtcccgacgtggcactccgcctgcacgttcacgttcctgaacctcacctccaccgtcggcatctggatccccgcccggtcgatgcgggcgcggagcttcttgaggaagcgctcgttgtcctcctcggcgacgtggaacacgcgctccacgaaggcctgacgctgcgcgagctccagcgtgcgcacgtccacctcccggtgcgcgtaccacctgcggccgcggcccacggcgccgacgccgacgccgctgctgtccgcgtccgcccgcatgaggcccgtgcggaggcggtcgaacgacgggagccgctccagcgcggcccaccgcagcgcctcctcgtcgtcgacctcgtcggccgcgctggggcgccgcgacgacgcgccggagaagtaggcgctcacgtccgggctcgccggcatgctctgcaggctccggctcaggatctccatgacgacggcgccgtcgtgtcgggctgcgtgtgcgtgcaccgcctcggctccggctgcctcctcttgtacgtgctgcgggtcagccat

SEQ ID NO: 102126 - DNA, 251 bp, Oryza sativa
  Clone ID: PAT_MRT4530_9967C.1
gcttttaccatattacaagttgtaaggcggggggggggggctaaactagtctcatcctgtagaggcctggacatctccaggcctgagatgaacgattaccatcaaatctgtcgtactaaaggttaccagtttttgctaaaaaaaaaattttttattaaaaaaaaaaaaaaaaattgtggtctcgccaggggggaaaaaataaaaaaaaacacaaaatatatatatttatcctaaataaaaatacactttct

SEQ ID NO: 102127 - DNA, 339 bp, Oryza sativa
  Clone ID: PAT_MRT4530_99680C.1
atggaccccgttcaccgtttccctgcggtgaattcaccgtcctcctcctggtcgtcgtgtgcgtcgtcaaggcagcgatgtggcggctggcggccggagctgaagatgaagggaggaggctcgtcgtcggctactactgccgtgatgatgatggtcgtgctgctcgtcgcggcggcgtctgacgccgccgcggcgccgcggcgcctgctgggagctgacggcggcggcggcggtgggtcgccggcgctggtgtccgagagcaaggcggcttccacctgcacttacgaccaaaacacgcactctaatggccctccttgcccaagtccaccgcataattaa

SEQ ID NO: 102128 - DNA, 5484 bp, Oryza sativa
  Clone ID: PAT_MRT4530_99681C.1
atggccaagacatccacagcagcaggaggtaatgaaacaactcaagaagaaagaattgctggtgcggtggtggaagaaacagggaaaacacccatgaatgatgtagagcttgctgaattggtccaagcgcaaggggctgtcatggtgagtaaaggacaatatgaggaattgcaaaaagagttacaaagattgcaaaccctacacaatcagacagtaggagcaggaggatcaagtgatcagtgtgcaataccaggggctagggaaaagcaatcagatcaggcaaaaggagatgcccagggggagaacaaagaaggagaaagtatcaaagccactcaagctcaagatctaccacgaacccaagctcccagtcaagtacaaaacccatctcaggctcaaattcccattcttacccagaatacacctcaagctcaaattaccattcctactcagaacctagctcaaaccttgatccctagccaaaaccaaattcctattcaaacgcacatttctttccagccgcatattccaattcaaactcaaaatcctaaccaagtacaatatcctcaaacacaattacatcaaacccacccagttcttcccaatcaaatccaaatcccccaacctgatatcctacaaagtaatatcccacgaacacaactcccacaaaatgatacaccacaaatacaagttccacaaacccaaataccacagattcaaacatctttgcccaacttcacacatacgcaatcaacaaacactcaagcagctcaaaaccatcaccaagtcccccaaggtttttcccttttccatatgcaacaaccagagatgatgtttgaacaagggtacatcccacaaatggccaaccatatacaatatgcaggtcaaataccgaaccaagcctttcaattccagcccacacaaccctattttcaaccaaccagagcaatagatacaaagaatcccttaagtcaaaacctgcaaatggcaccttggccaataaacttcaagttgtccaacatcacaaagtacaaaggagacacagatcccaatgaatacctcagagtatatgagacagcagttgaagcagcaggtggagatgataccacgaaagctaagatactcccaacaatgctagaaggagtagcattatcatggtacactaccattccaccaatgacaatctattcatgggaacatatgagagacacctttcgagcaggattcattggggcgtatgaagaaccaaaagaggcagatgacttgtatgccatgaagcagcttccaggggaaacattgagaagtttcatcgtgaagttttcaagggtaagatgtcagatcaggcatgtagatgatgaaatgctcatagcggcagcaaaaagggcattgctacccggtcctcttcgttttgatcttgctagaaatagaccaaagacagcaaaagacttgtttgaaagaatggaaagttttgcaagaggagaagaagatgagttgagagtgcaagaggaagaagccgtcttgttgggaaaaaaagcaatcaaagaacaagcaaatttcccaaggggaagaacaaaagggagagaataccggaaagccctggaaaaagttcaaatggatccaacaatgaaagagaaaaaagaaaacatcaatgggacaacactcgcagagggagaaacaattgggggcaatctggaaaaggtcgaggacaatggtggaattcaggcagaggtagaggacgatggtggaacaatgaaagaggaaaaggaagagaaaataaacctgaccaaaccaaattttgtcaaacacatggaccaggaggtcattccacagaagaatgttacaaataagtatgaaggagctcgtgatcaacaaggacaaaacgccatagaagcaccgcaagttatgaagatagaggcaattgaagaagtgccaaagagagtgataaatgccataactgggggctcttcattgggagttgagtcaaaaaggcaaagaaaagcatatgtcagacagaaaatgcaaataccagaagataggttaacaaacgcaggagtacctttacaaggttttggtggacaacaagtacatgcaattgaaaaaatatctttacaagtggtctttggaaaaggcactaatgtgagaaaagaagagatagtatttgatgtggtcgatatgccatatcagtacaatgcaattcttggaaggtcaacaatcaatatttttgaggccataatacaccacaactacatatgtatgaagctcccaggaccaaggggagtaataacggtccgaggagaacagcttgcagcaagaaagtatgagcttcaaggaacaccaagtgtgaaaggagtacatgtggttgaccaaaaacagggagaatacataaaaatacaaaagccaattcctgaagggaaaacaaagaaagtacagttggatgaacatgactctggaaagttcattctgataggagaaaacttggaaaaacatattgaggaagaaatcttaaaggtagtaaaagaaaacatggctgtatttgcatggtcaccagatgagttgcagggagttgatagaagtctaattgagcacaacctagcgattaagtcaagatacaagcccaaaaaacaaaaattgagaagaatgtctacagacagacaacaagctgcaaaaattgaacttgaaaagttgttgaaggcgaaagtcataagagaagtgatgcacccagaatggctggcaaatccagtgttagtaaagaaggcaaatggcaagtggagaatgtgcattgactttacagacctcaacaaggcatgcccaaaagatgattttcctttgccacggatagaccagttggtagatgccacagctggatgcgaactaatgagtttcttagacgcatactctggctatcaccaagtttttatggtgaaggaggatgaggaaaagacatcatttataacaccatttggaacttattgttttatcagaatgccatttggtttgaagaatgcaggagcgacttttgccaggctcataggaaaagtcttggctaagcagttaggacggaatgtcgaggcatacgtagatgacattgtggtaaagagtaaacaagcatttacccatggcaaagatttgcaagaaacatttgaaaacctgagaaaatgctcagttaagcttaatccagaaaagtgtgtttttggcgttagagcaggaaagttacttggtttcttggtgtccaaaagaggaatagaggcaaatcctgacaaaatcgcagcaatccatcaaatggagccgccaaaaaacacaagacaagtgcagaggttgacaggccgaatggcatctttgagtagatttctatctaaatcagcagaaaagggattacccttcttcaagactttgaggggggcaaacaccttcgagtggactgctgaatgccaacaagctttcgatgacttgaagaaatacttgcatgaaatgccaacattagcaagtccgccaaaaggtcaacctctgttaatgtatgtggcagcaactccagcgacagttagcgcagttttggtacaagaagaagaaaataggcaagtgccggtatactttgtctcagaagcattacaaggaccaaaaacacgatactcagaagtagaaaagttgatttatgcaattgtgatggcttcaagaaagttgaggcattattttctgtcgcatgacataacaataccatcggcatacccgataggagaagtgttaacaaacaaggaagtcgcggggagaatagcaaaatgggcaatggaactcttaccttttgacctgaaatacatatcaagaacagccataaagtcacaagtactagcagattttgtggcagaatggactcccaatgaggtagaacaacaggaagaagtcgaaaaaccatggatagtattctccgatggagcatgcaatgccgccggagcaggagccgctgcagttgtgaaaacaccaatgaagcaaacgttgaagtattctgttcatatagcttttccttcaacaaacaacacagcagagtatgaaggcgttttgttggctatgagaaaggcaagagcgctaggggctcggcggttaatagtcaaaactgactcaaagttggtagcaggtcacttttccaaatcctttgaagcaaaggaggaaactatggctaagtacctggaagaagcaaggctgaatgagaaacacttcctggggataacggtaaaagccataacaagggaagaaaatggggaagctgatgagcttgctaaggcagccgccacaggccaaccattggagaattcattcttcgatgtgttcacccagccaagttatgagaaaagagaagtggcaaacatacatggcgagatagattggagagagtcaattctgaagtatttggttagtgaacaacttccagaaaaagaagaagaagcaagaagaatacagttaatgtcaagaaaatacaaagtgatagaagggcagttgtacaagagtggagtcactacccctttgctaaaatgtgtaacaagagaagaaggaatgaaaatggtggtagaaatacatgaagggctgtgcggagcccatcaagcaccaagatcagttgcatcgaagaagtacattaagacatgtaaggcatgccaaaaatttggtgcaacgtcaaaagcaccaccaagagagttgcaaccaattccaccagtttggccaattccaccaagagcaaaaggagatttacgttttgtcattgtggcaattgagtatttcacaaggtggattgaagcagaggcagtagcacgaatcacatctgcttcggtacaaagattcgtttggaagaatatcatatgccgatttggaatacccaaggataatggaaaacgatccgagtcaggaaagttcaaagatatgtgtaaatgtcttaacctgcaaatcaactttgcttctgtgggtcatcctcgaacaaatggtgccgttgaaagagcaaatgagaaaatagtagaagccataaagaaaaggctggaaggttctgccaaaggaaaatggccagaagatctgttgtcaatcctttgggctttaagaacaacagttgttcgatcaactggcatgactccattcaggctaatatatggagatgaggcaatgacaccaagcgaggtgggagcgaattcacctcgaattgtgtttgatcaaaaagacgaagaaggaagggaaatcaccttggaaatgttgcacgagataagagtggaagcattagacaaaatggcaaaaaacacagaagaaaccaaaagctattacaacaaaaaagtgaaaatcaggcaaatagaagaaggtgatttggccctcaagaaaacactaaatgaagtggctgttggaaggaccattcatagtaaaaagaaagttaaaacaggagcatacaagctggcacacctcgatggagaagaattaaagcatacttggaatgctgtttccttgaagaagttctatgtgtaa

SEQ ID NO: 102129 - DNA, 339 bp, Oryza sativa
  unsure (1)..(339): unsure at all n locations
  Clone ID: PAT_MRT4530_99682C.1
acggaggcgctgaccgaggaacgatgcggcggcggaggactcatgagctactgcctgatcgcgagcaagcagatggggctcctctccctgcccgtgtagataaggaaggagcatcctcagcacggcggccatctncggatggactgcgtggagctcgtaatgatggattggctcggatacaagggctgaatgccgctcaacatgacgctgcaccacgccagcctgtggttcgctctgccgacacctcaactccgagaagaaggcaggcgacgagctgcggcccatcgccaacgtcgccgggatgctgaagagcgcgcacttgccgtgctcctggcgacc

SEQ ID NO: 102130 - DNA, 861 bp, Oryza sativa
  Clone ID: PAT_MRT4530_99683C.1
atggcaaagtacttggaagaagcaaggctgaatgaaaaacacttccttgggataacagtaaaaactataacaagagaagaaaatggggaagctgatgagcttgcaaaagcagctgccacaggccaaccattggagaattcattcttcgatgtgttaattcaaccaagttatgagaaaagagaagtggcaaacatacatggcgagatagattggagagagtcaattctgaagtatttggttagtgaacaacttccagaaaaagaagaagaagcaagaagaatacagttaatgtcaagaaaatacaaagtgatagaagggcagttgtacaagagtggagtcactacccctttgctaaaatgtgtaacaagagaagaaggaatgaaaatggtggtagaaatacatgaagggctgtgcggagcccatcaagcaccaagatcagttgcatcgaagaacaacagttgtccaacaactggcatgactccattcaggctaatatatggagatgaggcaatgacaccaagcgaggtgggagcgaattcacctcgaattgtgtttgatcaaaaagacgaagaaggaagggaaatcaccttggaaatgttgcacgagataagagtggaagcattagacaaaatggcaaaaaacacagaagaaaccaaaagctattacaacaaaaaagtgaaaatcaggcaaatagaagaaggtgatttggccctcaagaaaacactaaatgaagtggctgttggaaggaccattcatagtaaaaagaaagttaaaacaggagcatacaagctggcacacctcgatggagaagaattaaagcatacttggaatgctgtttccttgaagaagttctatgtgtaa

SEQ ID NO: 102131 - DNA, 4506 bp, Oryza sativa
  Clone ID: PAT_MRT4530_99684C.1
atggagaagccgtcgccgccgccgccggggaagtcgcggccggattgcgtcaactcgtcgaacccgtaccacgagtgctccgactactgcctccggcagatcgtgaagtccagggaagataatcatcggtggtcgcgcgtccatccccactgcatcaacgcctccaacccctaccacgcctgctccaacttctgcttcaggaggatcatccacgccaaaccctcaccttcagggttggagcgtccggtgcaagagccgcctgcgtccgaagctgttcctgcccaagctgacgacgatgatgatgcccaaactgacgacgacgacgaggaggacgctgccgcagacgacgacgatggttacctgaagatgacagtgacagagaatcagaagctagtatttgagcttcgggataggcgggaaaagggggttttcccgtctatccctaatcttgtccgtgaccttgggtcaaggcaaaagtcagtgccaatccgctacaccgacacttttgcaagcgcagcagcagcacttgaaagagagtgggaagagatgactggacaatcagcacaaaccggagtggagaaagcaatgccaggcagaaagactgccggtccaacaagagaagaaacaagagaaaacccgcctagtgaagtagagctcgccgagatggtgcaagcacaaggggctattatggtgaacaaagaacaatatgaagaactgcaaaaagaaccacaaaggcttcaagctttgcatgatcaaaccatgggagcaggaggatctggcagagaggcagagacattaaacactgacaaaggtcaaccgaatcaagtcgggaaagagatccaaagaaatgttggaaatgtggaaaaagagaatccccaagtagggaatgctccagttgacaagccaacgcaagaagttcctcaaaaccaacttcccactcaaatcccacaatccgttcaaaaccaacttcccactcaaatcccacaatccgttcaaaaccaacttcccgctcagatcccacagtctgttcaaaaccaacttcccactcagatcccacaatctgtgcaaaaccgactttccacccaaaatccacaatccactcaaaccttgcaaactactcaaaatctaccttccattcaaacccaacagctcacacaaccacagttctacaaccagacccattttcctcaaaaccaaatcccccaaacccaagccaacattccacaaatgcaaattccacatattcaaatccctcaattatcaaacatcacaaagtacaaaggtgatacagatccaaatgagtatttgagggtgtatgagacggcggtagaagcggccggaggagatgacacaacgaaagcaaagatacttccaaccatgctagaaggagtggcattgtcgtggtataccaccattccacctatgtcaatctactcgtgggagcatatgagagatacttttcgagcaggtttcattggtgtatatgaagagccaaaaaaagcagatgacctatacgcactgaagcagatgccgggagaaaccttgagaagttttatggtaaaattttcaagaataaggtgtcagatcaggcaggtagatgatgagatgctcatagcatcagcaaaaagagctttgttgcctggccctctccgtttcgatcttgcaaggaataggccaaagacagcaaaggacctgtttgaaagaatggaaagttttgcaagagaagaagaagataagctaagggtgcaagcagaagaggctgcattattgggaaagaagcagacgaagaacaagcaagtttctttaggagaaaaacaaaaagcagaaaacactgcaaaaccatggaaaaaattcaagaacgattacaagcaagatcagaaaaaacaagtaaacttcattggagatgactcaaataatggagaaggaaaagggaagagacaattgggggcaatctgcaagaggccgaggacaatggtggtcattctacggaagaatgctataggcaagttttgccaaattcatggtccaggaggccattccactcaggaatgtaggcacatggcctacttagtggaaaagcataagcaatcgaagaagctcccaaaaagggtgataaatgccataacaggaggctcttctttgggaattgagtcaaaaagacaaagaaaagcatatgtgagacaagtaaatcatgtagggacaagctatcagtcaaatccaccagttcattcgaagacagtaatttcctttgggcctgaagatgcggaaggaatacttttcccccaccaagaccctttggtgatctcagtggaaatagcacaatgcgaagttcaaagagttttggttgatggaggaagctcagcggatgtgttattctatgatgctttcaaaaagatgcaaatacccgaagacagattgacaagtgcaggagtgcctctgcaaggttttggtggacaacaagtacatgcaattgggaaaatacgtttgcaaatagtttttgggaaaggcaacaatgcaaggaaggaggaaatagtgtttgatgtggtagacatgccgtatcaatataatgcgatactcggaagatcagcaatcaatatcttcgaggcaataatacatcacaattatatatgcatgaaacttcctggaccaagaggagtgataacagtccgaggagaaaatctggaaaagcatgttaaggaggaaatcttgaaagtagtgaaaagcaacatggatgtctttgcttggtcaccagaagaactgaaaggggtagatagaagcctgattgaacataacttggcaatcaagcaagagtacaagccaaaaaatcaaaagttaagaagaatgtcaacagacaggcagcaagcagcaaaagtggagctcgagaaattgctcaaagcaaaagtgataagagaagtgatgcatcctgaatggttggctaatccagtcttggtgaaaaaggcaaatggaaagtggagaatgtgcattgactttacaaatctcaacaaagcatgcccaaaagatgacttcccattgccaagaatagaccagttagtagatgctacagctggttgcgagttgatgagtttcttagatgcatactccggagcaacttttgcaaggttaataggcaaggtattggcaaagcagttaggccgcaatgtagaagcttatgtggatgacattgtggtgaaaagcaaacaggcgctcactcatggcaaagacctgcaggaaacattcgagaatttaagaaaatattcagttaagcttaacccggaaaacaagtccacgaaaggtcaacctttgctagtgtatgtagcggcaacaccagtgacagtaagcgcagtcttagtgcaagagaaagaaaacaagcaaatgccagtttacttcgtatcagaagctttacaagggccaaagacaaggtacacagaagtggaaaagttgatttatgccattgtgatggcttcaagaaagttgagacattacttcttatcacatgacataacgataccgtcagcatacccgataggagaggtattcaaaaataaggaggtagcaggaatgattgcaaaatgggcaatggaacttctaccatttgatttgaagtataactcgagaacagctataaagtcacaagttctggcggattttttggcagaatggactcccaatgaggtggacaaaaaggaagaagatggaaaaccatggatagtatactctgatggagcatgcaatgccactggtgcaggggtagcagcggttgtaaaaacaccgatgaagcaaacactcaaatattccgcaaagctagttttcccatcaacaaacaacacagcagaatacgaaggagttttattagccatgagaaaggcaagagcactaggggctcgacgattgataatcaaaactcattcaaagctggtggcagggataacagtaaaagctataacaagagaagaaaatggggaagctgatgagcttgcaaaagcagccgccacaggccaaccattggagaattcattctttgatatgttaattcaaccaagttatgagaaaagagaagtggaaaacatacaaggcgagatagattggagagagccaattctgaagtatttggttcgtgaacaacttccagaaaaggaagaagaaacaagaagaatacggttaatgtcaaggaaatacaaagtgatagaaggagaagaaggaagagaaatcaccttggaaatgttagacgagataagagtggaagcattagacaaaatggcacaaagcacaaaaggaaccaaaagctattatgaaaaaagagtgaaaatcaggcaaatagaagaaggtgatttggtcctcaagaaaacactcaatgaagtggctattggaaagttggaatcgaaatgggaaggaccattcatagtaaaaaggaagttagaaacaggagcatacaagctggcacacctcgatggagaagagttaaagcacacttggaatgctatttccttgaagaaattctatgtgtaa

SEQ ID NO: 102132 - DNA, 551 bp, Oryza sativa
  unsure (1)..(551): unsure at all n locations
  Clone ID: PAT_MRT4530_99685C.1
tttttttttttttttttttttaccagatgagatcatgagacatgaatttgcccatcaacggcttaagaacgtcacgcactttcaccgccatcgacgcaacaattccgatatgaatcacacactaatttaacaacaactcctgcatttttttacatgttgcccctctatacaagcatacagattcagagacaaaagcacgggtcgaccatgagagagtacgagcatacgtcacggtggcacgaagcagtggcgatgtccatggggaggccaacgcacgccttccctcggccacgggagcagcggcgccggctgcgccaggaacgtcggataccgctgccccggcatcagcaccgtcagatcctccgccggcacgacctccaacttgcccggtgtacagaagagcttgtccggcgaagancgcgcggcggnggnggnggngtggtgggaccacaacnactggccgngcccgtcgccgtcgccgtgggaggcccgggaggaggaggaggacgaccaccaccaccaggaagacgaggagaggctgggcttgatga

SEQ ID NO: 102133 - DNA, 5904 bp, Oryza sativa
  Clone ID: PAT_MRT4530_99686C.1
gtgccaatccgctacactgacacttttgcaagcgcagcagcaacacttgaaagagtgggaagagataactggacaatcagcacaaaccagagtggagaaagcaatgccgggcggaaatactgtcggtccaacaagagaggaaacaagagaaaacccgccaagtgaagtagagctcgccgagatggtgcaagcacaaggggctgttatggtgaacaaagaacaatatgaagaactgcaaagagaattgcaaaggcttcaagctttgcatgatcaaaccatgggagcaggaggatctggcagagaggcagagacattaaacactgatgaaggtcaaccgaatcaagtcgggaaagagatccaaagaaatgttggaaatgtggaaaaagagaatccccaagtagggaatgctccagttgataagtcaacacaagaagttcctcaaaaccaacttcccactcaaatcccacaatccgttcaaaaccaactttccacccaaattccgcaatccactcaaaccttgcaaactactcaaaatctaccttccattcaaacccaacagctcatacaaccacagttttacaaccagacccattttcctcaaaaccaaatcccccaaacccaaaccaacattccacaaatgcaaattccacatattcaaattcctcaagtacaaacacgccaagccaatataccttacatgcaagcatcacatgatcagacaatgcaaaaccctaaccaacagcatcaagcctttcccttttttcactcacaacaactagaaacaacacaagagcaatactacattccacaaatgcccaatccaaacataacccagtttgccacccaattccccaaccacataggccaattcgcataagcacaatcctattttcaaccagcgagagcaatcgatacccagagccccttgagccaaaatctgcaaatggcaccttggccaatacatttcaaattatcaaacatcacaaagtacaaaggtgatacagatccaaatgaatatttgagggtgtatgagacggcggtagaagcggccggaggagatgacacaacgaaagcaaaaatacttccaactatgctagaaggagtggcattgtcgtggtataccaccattccacctatgacaatctactcgtgggagcatatgagagatacttttcgagcaggtttcattggtgtatatgaagagccaaaagaagcagataacctatacgccatgaagcagatgccgggagaaaccttgagaagttttatggtaaaattttcaagaataaggtgtcagatcaggcaggtagatgaagaaatgctcatagcatcagcaaaaagagctttgttgcctggccctctccgtttcgatcttgcaaggaataggccaaagacagcaaaggacctatttgaaagaatggaaagttttgcaagaggagaagaagatgagctaagagtgcaagcagaagaggctgcattgttgggaaagaagcagacgaagaacaagcaagtttctttaggggaagaacaaaaagcagaaaacactgcaaaaccatggaaaaaaaattcaagaacgattacaagcaagatcagaaaaaacaagtaaacttcattggagatgactcaaataatggagaaggaaaagggaagagacaatgggaaaacactcgtggaggaagaaacaattgggggcagtctgcaagaggtcgaggacaatggtggaattctggcagaggtagaggacaatggtggaataatgacagaagcggaggaaaataatatcagcttgatcatggcaagttttgtaaagcacatggtctaggtggtcattctacggaagaatgctatagcaagttttgcgaaattcatggtctaggaggccattccactgaggaatgtaggcatatggcttaattagtggaaaagcatgtcagtcaatatgagaacaagtatgagggggcccgagatcagcgagggcaaaatgctatagaagcaccacaagtcatgaaaatagaagcaatcgaagaagctccaaaaagggtgataaatgccataacaggatgctcttccttgtgaattgagtcaaaaagacaaagaaaagcatatgtgagacaagtaaatcatgtagggacaagctatcagtcaaatccaccagttcattcgaagacaataatttcctttgggcctgaagatgcggaaggaatacttttcccccaccaagaccctttggtgatctcagtggaaatagcacaatgcgaagttcaaagagttttggttgatggaggaagctcagcggatgtgttattctatgatgttttcaaaaagatacaaatacccgaagacagattgacaagtgcaggagtgcctctgcaaggttttggtggacaacaagtacatgcaattgggaaaatacctttgcaagtggtttttgggaaaggcaacaatgcaaggaaagaggaaatagtgtttgatgtggtagacatgccgtatcagtataatgcgatactcggaagatcaacaatcaatatcttcgaggcaataatacatcacaattatatatgcatgaaacttcctggaccaagaggggtgataacagtctaaggtggccagttggcggcaagaaagtttgagctttagggaacgccaaatgtcaaaggagtccatgtcgttgatcaaaagcatggagaatactctaagttgcagaaaccagttcctgaagggaaaactaggaatgtacagttagatgatgatgatcctggaaaatacattttgttaggagaaaatctggaaaagcatgttgaggaggaaatcttgaaagtagggaaaagcaacatggatgtctttgcttggtcaccagaagaactaaaaggggtagatagaagcctgatcgaacataacttggcaatcaagtaagggtacaagccaaaaaagcaaaagttaagaagaatgtcaacagacaggcagcaagcaacaaaagtggagcttgagaaattgctcaaagcaaaagtgataagagaagtgatgcatcctgaatggttggctaatcctgtcttggtgaagaaggcaaatggaaagtggagaatgtgcattgactttacagatctcaacaaagcatgcccaaaagatgacttcccattgccaagaatagaccagttagtagatgctacagctagctgcgagttgatgagtttcttagatgcatactccggttatcatcaagtctttatgatgaaggaagatgaagagaaaacatcgttcatcactccgtttggaacttactgtttcattcgaatgccatttggcttaaagaatgcaggagcaacttttgcaaggttaataggcaaggtattggcaaagcagttaggccgcaatgtagaagcttatgtggatgacattgtggtgaaaagcaaacaggcgtttagtcatggcaaagacctacaagaaacattcgagaacttaagaaaatattcagtcaagcttaacccggaaaagtgtgttttcggggtaggagcaggaaagttgcttggtttcttagtgtccaagagaggcatagaagcaaatcctgacaagatcgcagcgattcaccaaatgcagccaccaaaaaacacaagggaaatgcaaaggctaacagggagaatggcttctttgagcagatttctttctaaatctgcagagaaaggcttgccatttttcaaaaccctaagaggggcaaactcatttgagtggacagccgagtgtcagaaagcttttgatgatttgaagacatacctacagaatatgccaactttagcaagtccacagaaaggtcaacctttgctaatgtatgtagcggcaacaccagtgacagtaagcgcagtcttagtgcaagagaaagaaaacaagcagatgccagtttacttcgtatcagaagctttacaagggccaaagacaaggtacacagaagtggaaaagttgatttatgcaattgtgatggcttcaagaaagttgaggcattacttcttatcatatgacataaccatactgttagcatacccgataggagaggtattgacaaacaaggagatagcaggaaggattgcaaaatgggcaatggaacttctaccatttgatttgaagtatacctcgagaacggctataaagtcacaagttctggcggattttttggcagaatggactcccaatgaggtggaccaaaaggaagaagatgaaaaaccatggatagtatactctgatggagcatgcaatgccactggtgcaggggcagcagcggttgtaaaaacaccgatgaagcaaacactcaaatattctacaaagctagttttcccatcaacaaacaacacaacagaatacgaaggagttttattagccatgagaaaggcaagagcactaggggctcgacgattgataatcaaaaccgattcaaagctggtggcaggtcacttttccaagacatttgaagcaaaagaagagacaatgacaaagtacttggaagaagcaaggctgaatgaaaaacacttccttgggataacagtaaaagctataacaagagaataaaatggggaagccgatgagcttgcaaaagcagctgccacaagccaaccattggagaattcattctttgatgtgttaattcaaccaagttatgagaaaagagaagtggcaaacatacaaggcgagatagattggagagagccaattctgaagtatctggttagtgaacaacttccagaaaaggaagaagaagcaagaagaatacagttaatgtcaaggaagtacaaggtgatagaagggcagctgtacaagagcggagtcactgcccctttgctaaaatgtgtaacaagagaagaagggatgagaatggtggtagaaatacatgaagggttgtccggagcccatcaagcaccaagatcagttgcatcgaaggtgataagacaaggagtatattggcccacgatcatcaaggacaaagagaagtacattaaaacatgtaaggcatgccaaaaatttggtgcaacgtcaaaagcaccaccaagagagttgcaaccaattcccccggttcggctattttacagatggggactagatatagtaggtcctttaccaagagcaaaaggagatttacgttttgtcattgtggcaattgagtatttctcaaggtggattgaagcagaggcagtagcacgaatcacatctgcttcggtacaaaaattcgtttggaagaacattatatgccgatttggaatacccaaggagatagtgtgtgataatggaaaacaattcgagtcagggaaattcaaagatatgtgcaaaggtcttaacttgcaaatcaactttgcttctgtgggtcaccctcaaacaaatggcgccgttgaaagagcaaatgggaaaatagtagaagctataaagaaaaggctggaaggttctaccaaaggaaaatggccagaagatctgttgtcagtcctttgggctttaagaacgacagttgttcgatcaactggcatgactccattcaggctagtatatggagatgaggcaatgacaccaagcgaggtgggagcgaattcacctcgagttgtgtttgatcaaaaagacgaggaaggaagggaaatcaccttggaaatgctagacgagataagagtggaagcattagaaaaaatggcacaaagcacagaaggaaccaaaagctattacaacaaaaaagtgaaaatcaggcaaatagaagaaggtgatttggtcctcaagaaaacactcaatgaagtggctgttgaaaagttggaatcgaaatgggaaggaccattcatagtaaaaaggaagttagaaacaggagcatacaagctggcacacctcgatggagaagagttaaagcacacttggaatgctatttccttgaagaaattctatgtg

SEQ ID NO: 102134 - DNA, 5185 bp, Oryza sativa
  Clone ID: PAT_MRT4530_99687C.1
cccttgaaaattgaaaccctcgggttttaatcccccattttcaaatccctcaagtacaaacccgccaagccaatatcccttacatccaagcatcccatgatcagccaatgcaaaacccaaaccaacaacatcaaaactttccctcttttcactcacaacaaccagaaaatgcccgatccaaacacaacccagtttgctagccaattcctaaaccagatggtccagttcgcaccaacacaatcccatttccaaccaacaagagcaattgacacccagaatcctttgagttaaaatctgcaaatggcgccctggccagcacactttaagctatcaaacatcaccaagtacaaaggtgatatagaccccaatgagtatttgagggtgtatgagacggcggtagaagcggccgggggagatgacacaacgaaagcaaagatacttccaaccatgctggaaggggtagcattgtcatggtacaccaccattccacccatgtcaatctacttgtgggaacatgtgagagacactttatgagaaggattcattggtgcatatgaagagccaaaagaagcagatgacttatacgccatgaagcagatgccaggagaaaccttgagaagttttatggtaaagttttcaagggtaaggtatcaaatcaggtaggtagatgatgaaatgcttatagcatcagcaaaaagagctttgttgcctggccctctctgtttcgatcttgcaaggaataggccaaagacagtgaaggacctgcaaggaataggaaagttttgtaagaggagaagaagatgagttgagggtgcaagcagaagaagctgcattgttgggaaagtagcagacgaagaacaagcaagtttctttaggagaagaacaaaaagcagaaaacactgcaaaaccatggaaaaattcgattataagtaagatcagaaaaaacaagtgaacttcattggagatggctcaaataatggagaaggaaaagggaaaagacaatgagaaaacactcgtggaggaagaaataactgggggcaatctggaagaggccgaggacaatggtggaattctggcagaggtagaggatgatggttgaataatgatagaagcggaggaaaagagtatcagcctaatcatagcaagttttgtcaagcacatggtctaggtggtcattctacggaagaatgctatagcaagttttgccaaatccatggtctaggaggccattccactgaagaatgtaggcacatggcttacttagtggaaaagcatgtcggtcgatatgagaacaagcattagggggcttgagatcagcgagggaaaaatgccatagaagcaccacaagtcatgaaaatagaagaaattgaagaagctccaaaaagagtgataaatgccataacaggaggctcttctttgggaattgagtcaaaaagacaaagaaaagcatatgtgagacaagtaaatcatgtagggacaagctatcagtcaaatccaccagttcattcgaagacagtaatttcctttgggcctgaagatgcggaaggaatacttttcccccaccaggaccctttggtgatctcagtggaaatagtacaatgcgaagttcaaagagtcttggttgatggaggaagctcagcggatgtgctattctacgatgctttcaaaaagatgcaaatacccgaagacagattgacaaatgcaggagtgcctctacaaggttttggcggacaacaagtacatgcaattgggaaaatacctttgcaagtggtttttggaaaaggcaacaatgcaagaaaagagaaaatagtgtttgatgtggtaggtacgccgtatcagtataatgcaatactcggaagatcagcaattaatatcttcgaggcaataatacatcacaattatatatgtatgaaacttcctggaccacgaggagtgataacagtccgaggtggccagttggcggcgagaaagtttgagcttcagggaacgccaaatgtcaaaggagtccatgccgttgatcaaaaacatggagaatactctaagttgcaggaaccagttcctgaagggaaaactaggaaagtatagttagatgatgatgatcctagaaaatacattttgctaggagagaatctggaaaagcatgttgaggaggaaatcttgaaagtagtgaaaagcaatatggatgtctttgcttggtcaccagaagaactggaagggggtagatagaagcctgatcgaacataacttggcaatcaagcaaggctacaagccaaaaaagcaaaagttaagaagaatgtcaacagacaggcagcaagcagcaaaagtggagctcgagaagttgctcaaagcaaaagttataagagaggtgatgcatcctgaatggttggctaatccagtcttggtgaaaaaggcaaatggaaagtggagaatgtgcattgattttacagatctcaacaaagcatgcccaaaagatgatttcccattgccaagaatagactagttagtagatgctacagctggctgcgagttgatgggtttcttagatgcatactccggttatcattaagtttttatgatgaagatgaagagaaaacgtcgttcatcactccgtttggaatttactgttttattcgaatgccatttggtttaaagaatgctggagcaacttttgcaaggttaataggcaaagtattggcaaagcaattaggccgcaatgtagaagcttatgtggatgacattgtggtgaaaagcaaacaggcgttcactcatggcaaggatttgcaggaaacatttgagaatttaagaaaatattcagtcaagcttaacccgaaaaagtgtgttttcggggtaagagcaggaaagttgcttggtttcttagtatctaagagaggcatagaagcaaatcctgacaagatcgcagcgattcaccaaatggagccaccaaaaaacacaagggaaatgcaaaggctgacaggaagaatggcttctttgagcagattcctttctaaatctgaagagcagggtttgccatttttcaaaaccctaagaggagcaaacacatttgagtggacggccgagtaccagaaggcttttgatgatttgaagatgtagttacagaatatgccaactttagcaagtccacagaaaggtcaacctttactaacgtatgtagcagcgacaccagggacagtaagtgcagcattagtgcaagagaaagaaaacaagcaaatgctagtttacttcgtattagaagctttacaagggccaaagacaaggtacacagaagtggaaatgttgatttatgcaattgtgatggcctcaagaaagttgagacattatttaatatcagatgacataacgatactgtcagcatacccgataggagaggtattgacaaataaggaggtagcaagaaggattgcaaaatgggcaatggaacttctaccatttgatttgaagtatacctcgagaacagctataaagtctcaagttctggcagatttttttggcagaatggactcccaatgaggtggaggaaaaggaagaagatgaaaaactatggataatatactctgatggagcatgcaatgccactggcgtaggggcagcagtggttgtaaaaacgccgatgaagcaaacactaaaatattttgcaaagctagttttcccatcaacaaacaacacggcagaatatgaaggggttttattagccatgagaaaggcaagagcactaggggctcgtcgattgataatcaaaactgattcaaagctggtggcaggtcacctttccaaaacatttaaagcaaaagaagagacaatggcaaagtacttggaagaagcaaggctgaatgaaaaacacttccttgggataacagtaaaaactataacaagagaagaaaatggggaagctgatgagcttgcaaaagcagctgccacaggccaaccattggagaattcattcttcgatgtgttaattcaaccaagttatgagaaaagagaagtggcaaacatacatggcgagatagattggagagagtcaattctgaagtatttggttagtgaacaacttccagaaaaagaagaagaagcaagaagaatacagttaatgtcaagaaaatacaaagtgatagaagggcagttgtacaagagtggagtcactacccctttgctaaaatgtgtaacaagagaagaaggaatgaaaatggtggtagaaatacatgaagggctgtgcggagcccatcaagcaccaagatcagttgcatcgaaggtgataagacaatgagtatattggcctacgatcatcaaagacatagagaagtacattaagacatgtaaggcatgccaaaaatttggtgcaacgtcaaaagcaccaccaagagagttgcaaccaattccaccagtttggccaattccaccaagagcaaaaggagatttacgttttgtcattgtggcaattgagtatttcacaaggtggattgaagcagaggcagtagcacgaatcacatctgcttcggtacaaagattcgtttggaagaatatcatatgccgatttggaatacccaaggataatggaaaacgatccgagtcaggaaagttcaaagatatgtgtaaatgtcttaacctgcaaatcaactttgcttctgtgggtcatcctcgaacaaatggtgccgttgaaagagcaaatgagaaaatagtagaagccataaagaaaaggctggaaggttctgccaaaggaaaatggccagaagatctgttgtcaatcctttgggctttaagaacaacagttgttcgatcaactggcatgactccattcaggctaatatatggagatgaggcaatgacaccaagcgaggtgggagcgaattcacctcgaattgtgtttgatcaaaaagacgaagaaggaagggaaatcaccttggaaatgttgcacgagataagagtggaagcattagacaaaatggcaaaaaacacagaagaaaccaaaagctattacaacaaaaaagtgaaaatcaggcaaatagaagaaggtgatttggccctcaagaaaacactaaatgaagtggctgttggaaggaccattcatagtaaaaagaaagttaaaacaggagcatacaagctggcacacctcgatggagaagaattaaagcatacttggaatgctgtttccttgaagaagttctatgtg

SEQ ID NO: 102135 - DNA, 428 bp, Oryza sativa
  Clone ID: PAT_MRT4530_99688C.1
atctgagcggcacagcccaggcacggccgtgctcgggccagaatctatcggggtggcacggcccgaccaacactccaggccgtgccgtgctagcccacgggctgcacctcaggccaaggcacgacacactagtagtcaggccatgccgtggcgacccgaaggcacgggcgggccgtgctggcccagcgtactgaggtagcagcccaagcacggcacggctgttgagccgggccggcacgggcacgacccgagtcgagccatgccgtgcctgggccgggccaaaatcaccgggccttgggcgggccatcgggcctcggagcatatggccaagagagggagagagagaggggtagaaacaaaacaagacttgtcacaggccaaacaacaacacaagaaacccatccacatatgcgtacatcggtacatga

SEQ ID NO: 102136 - DNA, 630 bp, Oryza sativa
  Clone ID: PAT_MRT4530_99689C.1
atggagaagccgtcgccgccgccgccggggaagtcgcggccggattgcgtcaactcgtcgaacccgtaccacgagtgctccgactactgcctccggcagatcgtgaagtccagggaagataatcatcggtggtcgcgcgtccatccccactgcatcaacgcctccaacccctaccacgcctgctccaacttctgcttcaggaggatcatccacgccaaaccctcaccttcagggttggagcgtccggtgcaagagccgcatgcgtccgaagctgttcatgcccaagctgacgacgatgatgatgcccaaactgacgacgacgacgaggaggacgctgccgcagacgacgacgatggttacctgaagatgacagtgacagagaatcagaagctagtatttgagcttcgggtcagctaccggataagtcgaaaagggtggtcgaactggaaaagactatttgccatggaaaagacccatggtggtggaaaagaccctcggtcgaggagaagacccatggtggtggaaaagactcttgatcatgaagaaggcgacttagacaacaaagatgccaagagaatattcctgaggaccactcaaccacttcatctagctggcaccaaaagactataa

SEQ ID NO: 102137 - DNA, 368 bp, Oryza sativa
  Clone ID: PAT_MRT4530_9968C.1
cccacgcgtccgaaaaaaaaacaaaaaaaatagctaaaaaaaaatactcactaaaataaactaaaagggacagggagtgaacaaaggcttacctatcttctactgttaaactccctttttttggaaatactgtcatggtgtgaacggcgcacggccgcctggtttgtttttttggtgcatctgttgcgtgtgctctgtgtgttgctgttgctttgacatgtcttcccgtttacagttcagggattttgttctgtgccctcgcttatgagggtttccgttgcgtgttctccgtccattcggggagctgttccctttttcttgtggtgttttggggcggccgttttttaggttcccatggtttcctcccc

SEQ ID NO: 102138 - DNA, 248 bp, Oryza sativa
  Clone ID: PAT_MRT4530_99690C.1
ccctcgcgcgcgctcttgctcgccttgtcaacgagtgcgtcgccggtcccgacgctacgagagagttagcctcgccgttggtggaggatgccgtggcactctttgttcattctgtcgcgctcctagcagccaccggctttgtttccgacggctgcgacctcagctacaaggtcaacgagctcgctccggtctacgctaacaagggtcgtcccttgcacaatccaagagagacatatcggtactttgac

SEQ ID NO: 102139 - DNA, 340 bp, Oryza sativa
  Clone ID: PAT_MRT4530_99691C.1
cttgagagcactaaactaaacttgagagagtacgagaagctcttgcttgaggtgtgtggagaaagtgagagggtgaggggtttatatagcctcccaatgatggttgtgacggttggaatgatcggaaataccctccaatcgtctttgggggctaatctagaccgttccctcaaagccctacatccaacggcgatgagacagggtttggccgaacctcaggctggcccaaccagcccactttttggctggcggcctccctgacttcttctctccgcagacttgtgaattttgggcttattgggtcttcttaaattgacattctcagcccatctccccttaa

SEQ ID NO: 102140 - DNA, 621 bp, Oryza sativa
  Clone ID: PAT_MRT4530_99692C.1
taggcaatagcgatagaaaaaattgcaaaaaaaaaaaaaccaccgccgccggaggatccaccctcggacgaagccgacgccgtcgccgccgtcgccgtcgacgccgacggggagagggagagggagagggagagggagagggggagggacggccgtctctgccgcaccccgccgtcgttgcgccgtgccggcgagacgggaaggagagccgccgccgccaccgccgctagtgtagggaaaggtgctgctgccgctagcgtgggggaagccgccgccgccgccgcagccctccgccgccgccaccgccgcagccctctgtcgccgccgccgcagcctgccggcgagaaaggagggagaagggaagggaagcggcgtcggtggtgggagaggcggccggctggggggagggggagaggcgggagatggggaaagggagcggcgccgccggagggaggggaggggaagcggcgccggtggggagagggggaggcggcgtcgggagtgggggaggcgacgagcggcttgggggggcgggggggaggggtggggaaggttagggttagggttagggttttgataaggccgtgggccgaccggcatgggacggaaataagactattt

SEQ ID NO: 102141 - DNA, 194 bp, Oryza sativa
  unsure (1)..(194): unsure at all n locations
  Clone ID: PAT_MRT4530_99693C.1
aggaattcgcggccntgtcagtgtgtccgcagaataacggtttctactaccgtgtgagattatacattggtatataatggtacttgctagctttcattcgcagggtttttttttttaaagttttacccggatcatttttttggtattggatggctttttggcggggtaggttgttaagggggcggttatttgga

SEQ ID NO: 102142 - DNA, 459 bp, Oryza sativa
  Clone ID: PAT_MRT4530_99694C.1
tttttggttggttttttttttttttttttttttttctttttttttttttttttttttttttttttttttttttttttttttttttttttttggggaaggggcaaccccccaaaaccaaggggtttattaaaaatttaaacggggccgaacgtccccaagcctataagggttaaacccgcaaattccaagtttttttttcctttcgctgaacgggggcgggcttttttttatacccaagcagaacccggccccagggggcctgggggggaaaaaaaacccccaaaaaccccccccctgaaccgggggggcccgggggcccccccggggggtaaaaaaagggccggggttttattccgggaaaaaccccccccccaactttggggggggggcccggggtgaaaaaaccttggcccgaccccttaaatcccgggggggcccccaaagaataaaccggggggg

SEQ ID NO: 102143 - DNA, 189 bp, Oryza sativa
  Clone ID: PAT_MRT4530_99695C.1
atggtggacctcatcagcgttcttgctggcatcgtcttcctgcccggctatcaaagaaaaggttgcgccgactatttgctccatctcctgcgagtctcctacacctacgctaaccatggttcttctgctcctgctgttgccatgagtgaggatccaaccatcgccaatgtggtcgttggaaggacttga

SEQ ID NO: 102144 - DNA, 1412 bp, Oryza sativa
  Clone ID: PAT_MRT4530_99696C.1
atggcacaactgaggcttacgctgctggctatgtctttgctgatactctcgccggcgatggacggcggcggtggcggcaccgtccaggcgcagatcgtgccggcggcgatctcgttcggtgactcgaccgtcgacgttggcaacaacaactacctgcctggtgccgtcttcaaggccaactacgtgccttatggggtgaacttcggcagccgccctgaaacgcttggctttgagagctatgcaccaccgtaccttagcccgcaggcgaagggggataaccttctccttggcgccaactttgcctccgcggcgtccagctaccatgacgacacggccgccatgtataccgtgtcgctcgtgtcgttgtccaaaacgacttcctttacgaatatggagggagtacaagctaaggttcctatttttggtgaggatgcaattactttgacgcagcagctcaagtactacaaggagtaccagtccaagcttgcggcgttgatcggccagaagaatgccaccgccatcctgtccgacgcgctgtatatcgtcagcacagggaccggcgatttcatccagaactactaccacaacgcctcgttgtcgagccgctacaacgtcaacagttactgcgatctcctcatcagcatcttctccggcttcgccaaccttgtgctgtgggtgcaggagttgtataggttgggggcgcggcggattggtgtcacgtctctgccgccgctgggctgtctgcctgccacaatcaggctgtatggcaagggccgcagcgggtgcgtggagaggctcaacggcgatgctgagaccttcaacaacaagctgaacatcactgtcgaagcgctggcgaagaagcattccgacctcaagatcgccatcttcgacatctacacaccgctccgaaacatgtccgagtcacctgcatcgcaaggcttcttggaggcgaggaagacttgctgccagacagggacaaggaagacgagggtctacctctgcaacccggcgacggcggggttgtgccgcaacgccagcgacttcgtgtacttcgacggtgtgcacccttcagaggcggccaatcttgtcatcgccgagtccacgatattggcagggataagcctagttacctaactcactcggtctgactctgaactaccatggcaggtgcatgaaggcgctacagttcatcatcaattagtttcgaaggttgtgttgtgttttcaacctaagaaaaagtgttctccacgtgatccacttcgcatatacaaacaatatagtttgtttctataaatatgtgcgtcagtctcctactgacctgcataactgcaagttaaatccaacttaaaacatgtcatccaactaagtatgaatgacgaacagtgttactctaaaaaaaaaaaaaaaaaaaa

SEQ ID NO: 102145 - DNA, 595 bp, Oryza sativa
  Clone ID: PAT_MRT4530_99697C.1
ctgggtgtcgggtttttttttttagtccaacaaagttaagttgtttttttatataaaaaaaacatataacacggttaattaaggttgggaactataatagaagttcaattcacgttgctgctaagatagttgggcaactaattaggtagatacgatacaagagttcatccgtctaaacatcgaagctaataaccatggttcctgcagcatggacatgttccgtttgccagctagcactacgcctgaggtaaattaaacttggcagaagctacaacttcacaaaagcaccggctccagttcttgtctaccgcaacgttcctaaggcgtagttttcttctgccttaatggttgagagtaggtaggctgactgccacccaaacatcgtcactgaaaggaagaacggtcgcgccctccggcaataccaggtcaggacggcgtggatagacctggactcggttagttaacaaggagcagccgcatccagtagaactgacagtactggctgaggctaaggggacagagccgcatccagtagaattgacagtactggctgaggctaaggggtcagagccgcatccactagaactgacagtac

SEQ ID NO: 102146 - DNA, 235 bp, Oryza sativa
  Clone ID: PAT_MRT4530_99698C.1
agcacgcctgcccgccgctcgtctgcttcgccggccagccgctccccgcgcagtcagcagcggcgaaggtgaccgtgccggcgtcgaggttgtagccgacgtggatgttctgctgcccgaggttcctgaggatggacaccgtctgctgctccgtcgtcgccacgatcgccaggcacaactagagatggcaatggggccccgttcaccatttccccgcagtgaattcacctattag

SEQ ID NO: 102147 - DNA, 552 bp, Oryza sativa
  Clone ID: PAT_MRT4530_99699C.1
ttatttcgggatgaatttatcaggacgtgacatactagcaacatcaaccatttctcccgcaccatgctcctcaggttcaatcctccttgtcgtccatttcatgtctttcaatttgtttggcaggaaatccgcatggcctctcttcagtataagagagggcttccttatgctcctcatataatgcggatgattgaacatgtcactcaacttcagtttgtgtgcgaggagccacattcggctctttccctgcgtttgcccaagcgtgggtctgtgcctcaggacatcccctcctcatcctctcagccgccttcggctcctgagcgtccttcctctgtggctcatcgtgagccgtctcccttattccgcattttgcggactctttttggtatctgctccgcgggggccaaaaagaaccgccgattgcggaattcggagaagaaaacggctcgcgacatcaagtgtcgctcccgagccaccgatctacttgtggttggctgggagaagtttgtaaaggccggatcttgcctccgcaagggaagggatatctcttag

SEQ ID NO: 102148 - DNA, 413 bp, Oryza sativa
  Clone ID: PAT_MRT4530_9969C.1
ggccctgaatatatatcctaattaatgtatgacactttttatgactataagaatcaacaaaagaattggcggggacaaattctacaactgggcgcggcggaatagcgaacagggacggtgttgactcaagatcaaggtggacaccgaagaaaagatagagcaattggaaccgcagtccagtggaccatgctagccaccataacaacgcttgtaacaaccaactgtccgaagtatttgagtgaatcatactagactaaaggaaagctgcatggggatgacctcatggccttttgaacatatggtgggtacctcgagcagggaatcagtaaatagctatgctaccatctactgcccagcgatggcttattggcgggaccttgctcttgaccttgtgataaccataaatcagtggg

SEQ ID NO: 102149 - DNA, 1254 bp, Oryza sativa
  Clone ID: PAT_MRT4530_996C.1
atgggatcaccgcggaccccaaatgggagccagaagaagccggttctcggcaaggtgaagagcaaggctaagaaatggatgcacctactgcatcacaagaagaagccgcaagaggacatgcaggacccagtgcagacggcagcagcagcaatgagcacaacaatgcagactacggatccccaagcacagctcgacatccatccccattcctcgtgtgaatcagcatgtgcacctgaggtatacatggaagcatcaccaaggcaaaattcaccactcccgagcccaactgcacacaatgaacaacaatacttcaagatcagcagcagaaggcaaatgttagagaagatcatatcgttcaatagatacctgatgctgaagctggcacctggagaaggtgataaagtactctcaaaagtcattactgaggctgccctcgatatgttttatgcctggtgtgtgaatgttgagaggcctttggtacagagggcaaagaagtgttttcttggtttctgccagaaaggagagaagagttacctccatcctgttgcactgtccacccatccttgtgtttatgaaggggaggtggacgaacctgatgagggctgggaggaaggggttgcggtgtctaccaccctcaccggcatcctcggcggcggtcgccggcgacgacgaggctggactgcaggaggaccacgggcgccgacctctgctcgccggattggggtggagaacgccggcgccacctctgctagcaggatggagatcggcgccggcggcaggcggaggagacgggagtcgtcgacggcggcgggcgacgagacgggatggattggggaggcggagggcttccgcctcgtcacgctggccaagctcctatccctcgagctcagggccatccctgctgagctactcaaaagtcgatgtgttcaggtgtccccgagctctgcctctcctccgcggaggagcacgcgcggctccgccgcatcatcttcgagatcaactccatttacaccacgatgtggttacatcatcctcgatgcctacgcccttctccctgtcgcccgccactatcaagcttctcgacagctgccagccttctccccgcccatcgttgatgcgcgcgagctgccgcacaacggcgtggcggtgtgccctgaggggacgacgtgccgggagcccttcctacttcgcttctccgcactcttcaccgagctcggccgctctttgcacgcgcatgatcgagatttcgactag

SEQ ID NO: 102150 - DNA, 282 bp, Oryza sativa
  Clone ID: PAT_MRT4530_99700C.1
atgccttccggggcaaactctcctacggcggccatcgccgtcgccgccgtcttcgccgtgctagtactgtcctcctccgtcgcgccggccgcggcaaagatgttctgcggcagctgcgatgacatctgcactgcttcgtgcatctacgcagacactatccccagggcgtgcgccccgcagtgcgacggctgctcgccggaggcttgccagagctgccttcaggcgctgaggcaggaatgcttgacgagctgcggcgactcctgccgcaagaactgcacttaa

SEQ ID NO: 102151 - DNA, 1188 bp, Oryza sativa
  Clone ID: PAT_MRT4530_99701C.1
gcacgaggcacgagccgagcggagaattccacgaaccgtctcctcctcctccccggcctcttctccactgcccccgcacaaatcaactctactttccaaaacgcggcggcggcggcggatcaaaccctcatttggtgggattttttgctgcgtttaatcaaatcctctctctctcttcgaccgcggggagatccggggttcgattgtttcgtctcctcctccccctctcgtgcgggcgtcggaatcgatccacgccccgcccgctcgctcgctcgctcgctctgtgagcccaagaggacattttgctcagtgctgtgctagctttgttggctcaagttcacaatgggaggttgtgtgggcaagggacgacgacatattgaggaagacaagcttgatttcaaaggtggaaatgttcatgtcataacaagcaaagaggactgggataggaagattgaagaagcaaacaaggatgggaaaattgttgtggcaaatttcagtgcttcctggtgtggaccatgtcgtgttattgcacctatttatgctgagatgtcaaagacttatcctcaactcatgttcttgacaatagatgttgatgacctaatggatttcagctcatcatgggatatccgcgcaacgccgacctttttcttcataaaaaacgagaagcaggtcgacaagcttgtgggcgccaacaaacctgagctcgaaaagaaggttcaggcacttgctgatggcagctgaaccttattatagcgcaacggctagaactgaaacgaatttggcatgtctgtccggccaagtttgtgtccgtgtgctcccttgcagcttctagtgtatagttttggtgtctctgttcaaaccatgtttctttttctttctgaattttgcccatgtgtctggccacacacatatgcaatctgtgaactaagaagttgtgatgtgttcagagctgtaacataagagtaatgtactagagtagttttaaaagacagtgatatggttgtattttgagctatgaagttgtgccaataaatgagtgggttttgaaagtgactcattaaaaaaaaaaattcagctcatcatgggatatccgcgcaacgccgacctttttcttcataaaaaacgagaagcaggtcgacaagcttgtgggcgccaacaaacctgagctcgaaaagaaggttcaggcac

SEQ ID NO: 102152 - DNA, 714 bp, Oryza sativa
  Clone ID: PAT_MRT4530_99702C.1
atggctgcagaagatgagctgaagctcctgggattttgggcgagcccctacgtttgcagagtgaagctcgcactccacctcaaaggcctgatctacgactatgtcaaggaggatgtcttcaccaacaagagcgagctcctcctcagctgcaacccggtgcacgcgaaggtccccgtgctcatccacaacggcaagcccatctgcgagtcgcaggtcatcgtacaatacatcgacgaggtcttccccgacgccggcgtcaccctcctccccgccgacccccacgatcgcgccgccgctcgcttctgggccgcctacatcgacgacaagctactgcccccgtgggtgcacgcgtacaggggaaagacggacgaggagaaggccgagaggatgaagcagacgcttgcggtggtcgacgcgctggagacggcgatggaggagtgctccaaggggaacgccttcttcggcggcgacaccgtcgggtacgtcgacgtcgcgctggggggcttgctctcctggttgcacgggaccgaggagctgtgtggcgccaagatcttggacgccgccaagaccccgctcctgtcggcgtgggcgcggcgcttcggcgagctggatgcagccaacgcggcgctgccggacgtcggcaggttggtcgagttttgcaagatgaggcatgtcgagctggaggctgcagaggcagcagctgcgcgcaactga

SEQ ID NO: 102153 - DNA, 376 bp, Oryza sativa
  Clone ID: PAT_MRT4530_99703C.1
ttccagcgacgcgaaacgcgagctcgcgaagtcccaccaccacccaccgccggcggggagggaagcttggaaggggcgcatcggggagggaagggagcggatcatggaggatttctacgtcaccatcccgtacggcgccgcggtcctcggcggcggcgtcgccggctacctcaagcgcgggagcaaggcatcgctggccgcgggcggcgggttcggcggcgcgctcctcctcgccggcgcgctgagcgcccgggcctttgcgcgcggccaccccggcggctccctcttcgccaccgtcctccagaccggtccgtttctggtagtgttgctacagtgctactccccccccatccttcattcatcccctccgttttat

SEQ ID NO: 102154 - DNA, 730 bp, Oryza sativa
  Clone ID: PAT_MRT4530_99704C.1
ctcaccccgccgacgccgccgccgcagactcctcaaggctggtcccatcctgtgcttcgagttagctggctccttattgaaccatgggtaaggagaagacgcacataacattgagtgattggaacctgactccggaagtggaccaccacgggcacatcagatctacaagcttggaggcatcgacaagcgcgtgatcgagaggatgcagaaggaagccgctgagatgaacatgaggtactttaagtacgcggggtggcttgacaagctcaaggccgagcgtgagagaggtattaccatcgatatcgacctgaggaagtgcgagaccaccaagtactactgcacggtcataagatgcccctggtcaccgtgacttcgtcaagaacatgatcacggttaccttccaggctgactgtgccgcgctcatcattgactccaccactggtggatttgaggctgtggatctccaaggatggccagacccgagagcacgctcttcttgctttcactcttggagggaagcacatgatctgctgctgccacaagatggatgccaccactcccaagtactccgaaggcccgttacgatgaaatcgtgaaggaagtctaatcctacctgaagaagggcgggtacaacccctgacagattcccttagttcgcatctatgggtttgagggagacaacatgactgagaggtgcaccaaccttgactgggacaagggccccaccttg

SEQ ID NO: 102155 - DNA, 621 bp, Oryza sativa
  Clone ID: PAT_MRT4530_99705C.1
atggtgaaagaagactttgccaagcttgttatttctggaactaacaacaattatctggcatgggcttgtaaagtcgaatctcatctagctaggaatggtctcagtgacacgattgttcctggctccaactgcaccgacgcagaaaaggcaacgactgtgctcttcctaaggcgccatctaggcgaaactttgaaaaacgagttcatgttcgaaatggatccatctgttctttggcaatccctcaaggatcggttcgatgaacagaagcccatcattctgatccaagcacgatatgactgggagcacttgcgattccaggacttcgactctgtggccgagtacgattcaactctccgcgacatcgtctctaagctcaaactgtgtgggcgagatgtttcagaggatgagatgatagagaagacattgtttacattccacccaagccagcttgtactccagatgatgtacatggacagacattatcagaagtattcagagcttatctctgcactgttgctagtggaagaaggggataggagactcctggagaattactatgaccgagcaggtggctctcaacatgtgcaacgggcttcatgtcgaggacaatccaatttctaa

SEQ ID NO: 102156 - DNA, 1796 bp, Oryza sativa
  Clone ID: PAT_MRT4530_99706C.1
cgaggcctcctccttccttctttaaccgccgccgccgccgccgccgcagcttcatcgccaagccacctccgccgccgaagccaccaccgcttccctcccactcgggcgagctcccccgtctctccgtagccatggcgaagaagaaggacgtggaggtggaggagttggatgaggaggtggttgccgctgccgccgcccccgccgcggacggtggcgaggagcaggaggccgagccaccggcgcgtcggccgtcgacgttcgcggagctgggcgtcgtcccggagctggtggcggcgtgcgacgccatggggtggaaggagcccaccaggatccaggccgaggccatcccccacgccctcgaagggagggacctgattgggctggggcagacgggctccggcaagacgggcgccttcgcgctgccgatcatccaggcgctgctcaagcaggacaagccccaggcgttgttcgcctgcgtgctgtcgcctacaagggagctggcttttcagattggacagcagtttgaggcactcgggtccgcgatcggtctgagttgcacggtgcttgttggaggagttgatcgggtgcaacaagcagtatcccttgcaaaacgcccacatattgtggttggaactcctggacgtcttttggatcatttgacagatacgaaaggttttagccttaataaattgaagtacttggttttggatgaagctgataagttacttaatgtggagttccagaaagcccttgatgatattctgaatgttatccctaaagaacggaggactttccttttttcagccacaatgaccaataaggtttctaaactgcagcgtgcttgtctaagaaatcctgttaaggtcgaggtagcgtccaaatattctacagtggacacacttagacaggagttttattttgttcctgcagattacaaggattgttttctcgttcatgttctgaatgagttgccagggagcatgatcatgatctttgtccggacctgtgaatcaacaaggctccttgctctcaccctaaggaatcttcgttttaaagctatctctattagtggccaaatgagtcaggataagagactaggcgccttaaacaggttcaaaacgaaagactgcaatatccttatttgcaccgatgtggcaagtcgtggtcttgatattcaaggagttgatgtggttatcaattatgatattccaatgaattccaaggattatgttcatcgggtgggtagaacagcacgtgcagggaatacaggatatgctgtatctttggtgaatcaatacgaggccatgtggtttaagatgatagagaagctccttggatacgagattcctgatcgtaaggtggataacgcagaaatcatgatacttcgtgaacgtatctctgactcgaagaggattgcgctgacgacgatgaaggagggcggtggccacaagaaaaagcggaggaagaacgaagatgatgaggaagaggaggagcgcaatgctcctgtttccagaaaatcgaagtccttcaacaaatcaagaagacggtgaaagcattggagcaagtgatcgtgaggcgagcttgggatgagttagattagtattatactggcataccaccgccacaattttatgtaaccattcaagaatagatatttatgtaggtccatttcgacgaattagctattttattatttgtgaagctggatcttggaaaatttgctcatctgttgctacaaaagcatatatggaaaatttgctcatctgcttccccaaaaaaaaaaaaaaaaaaagttg

SEQ ID NO: 102157 - DNA, 837 bp, Oryza sativa
  Clone ID: PAT_MRT4530_99707C.1
tttctgtctactgggtgggccaatggcatataggaggattaggacgagaagaagctgtcctctctgttgcctctcctgtacagcccaacatactactatcatattgtctgtagctagcacatgcagaagatagactggcaggatgaggtggtggtggttcttccccagacccgtcactgctctggttgcatttattaccttttgggttgttgtcctatgaattgagcctaattagttgatattcaacagctggaggttatatttcctttttacattgcatcttcttggttgttcaacagcagtgatagcatttgttcccttagtgaaacagctatcttgttgtagcagtgatagcttttgttcccttagtgaaatagcttttggcaaattgtactatcttgttgtattggctagatgagctcagagagtgacggacgtagtcctaatggctttccaagcatgcgcctgctcccagggttgcatgaacaatttgacatttggagacgacactcataaaacaaatgtaatattgtctcatctttgtgacaaaagcaacaattcttacttccttgccaattgcgcttagctaggttatcccttgtcaaaactaccccacgacgtaaataccataggaagatcttcactttaagcggtatttttaatttccaaattactttgtttatgttgggcaaatctgaatgtaccaaggcaagataatgcgacttcactgaaaactctctcattttgggttaaattccaatgaaacttatcttgatcctgagtaagaactaagttagcgattcgtggaagaagggtattccacgccactaatttttg

SEQ ID NO: 102158 - DNA, 648 bp, Oryza sativa
  Clone ID: PAT_MRT4530_99708C.1
atggagctgccgctcggtccagcgcgcgcgcccgccgccgccgctctcccatgccgtttctccccgacgttccggccacacgcccctccgcccgctccgagcaacagccgcgcgcacccgccgctcctcgcccgcgcccgcaggaacaagagctcccggatcgacgcggacgcggacgcggagcccaaggtcatcaccatcggccgccccgggaagaagagcaggcggcgccgcggacagccgccgccgtccaaggaggaaggcagcgaggaggaggacgaagaggaggaggaggagagggacgtggcgatcccggaggtggtgacgaaccggatgatgcggcgggtgggggtgtcggtgggggcgccgctggcggtcggggtggcgttcctcccggcgttctactacctcaagaaggcggcgaaggtggacgtgccgacgtggatccccttcggcgtctccttcctcttcttcggcgccgcgctgctcggcgtcagctacggcatcgtctccgccagctgggaccccgccagggagggctccctcctcggctggaacgaggcgcgccgcaactggcccgtcttctgggactcgctccgcggcggcggcggcggcccctcctctccgccgcctcctcgccggagatag

SEQ ID NO: 102159 - DNA, 861 bp, Oryza sativa
  Clone ID: PAT_MRT4530_99709C.1
cttttttttttttttttttttcttttttttgttgcagcaacgaacctgcacccaatatcattcataccaacataattgctggattgaccatacttaaaatctcatgctaaagcattagtacaaaatctcgttgcgcaatgtaaaaactagtaagctgcactgtaacatgggtatcacagataacaaaaggatttgtttggtaaggcgatcttcagttgtctaggccgggcacctgcatgcggcggttggcgtccgacttcttgccgccgaggaactcgtcggggacgaccttgagctgcttccgcttcttggacttggcgatcttctggatggtcttggggttggtgacccgctgcagcttggtgcccgagcggagcacgttctccttcttgcgcttctcccgctcctcccgctgcttccgcttcgccgccttgctctgccggatctcctccttgagctccgccacgcgggcctggtacgcgcgcttcagggacttgtcgcgggcgcgctgctccagcggggtcggcttccgggacgccgccagcgcggaggcgcggcgggtgcgggcctccttccagcgccgcccggagacgcgcccggcgatgacgccgtcgtaggtgggctgcccgaaggaggcgggcttggaggggtcggacagggagggcaccgcgcggagcttggacggcctcggcgcgtcggcgtcggcgtcgaggtccatggagtcggcggcggccgcctcctccgcctcgcggcgcttgcgcttcccgcgctcgccgccgaggccctcgtcgaggtagcggaagtcgaggtgggacgccatgggggggatgggagaatcgggaagctaggtcgccgccgccc

SEQ ID NO: 102160 - DNA, 2499 bp, Oryza sativa
  Clone ID: PAT_MRT4530_9970C.1
atggggatcttcgagccgttccgcgccatcgggtacatcacggccggcggcgtgcccttctccgtgcagcgcctcggcaccgagaccttcgtcgccgtcagcgtcggcaaggccttccacgtctacaactgtgctaaactgaatttggtcctttctggacctcaattgcccaagaagatccgtgctcttgcatcgtacaaggattatacatttgctgcgtatggaagtgatatcgctgttttcaaacgaactgatcaggtggttacttggagcaaacatgaagaaaagatcaatatattatacccatttggagaatacattctaagtgcagatattaaggggaatgtatttatatggtccttcagaggatcagagccaaatatcggatgttctgatggaacaattcatgttcataatatacgatatgatgaagagttgatgtctttcaatcatcaaattcgtggtgctgtgactgcattgtcatttcgaacagatgggcaacctcttctggcctctggaggatcgtcaggtgttattagtatatggaatcttgagaaaaggcgccttcattctgttatccgggaggcccatgatgcttctatagtttcacttcattttttcgcgaatgagcctattttgatgagctcggcttctgataattcaataaagatgtggatatttgatactaatgatggagatgctcgtttgttacgatttcgaagtggccatagtgctccaccacggtgcattagattctacggcaatggaaaatgcatcttatctgctggtcaagatcgtgcctttcgccttttttcagttgtccaggatcaacaaagcagagaactttctcaaagacatgtgtcaaaaagggcaaaaaagcttggattaaaggaggaagagatcaagctgaaaccagttattgcatttgattgtgctgagatacgctcacgtgattggtgtaacgttgttacctgccatacggatactccacaagcgtatgtatggcgtctacagaactttgtcattggggagcatattctgacaccgtcatcaggcagcaagtcaccaattaaggcttgtgcaataagtgcatgtggaaattttactttcttgggcactgaaggtggctggatcgaaaaatttaacctgcaatcggggattagtcgtggcagttatattgatacatcgttggcaattaagcgtgcacatgacggagaagttgttggattagcgtgtgatgctacaaatggctctcttattagtgctggatacggtggtgatattaaggtttgggattttaaaagttgcaagctaaaatccagactggatattggtaaatctgtcaccaagattgcataccaccgggcaaatggtcttcttgctactgtagcagatgatatggtgcttatattgtttgatacagtagcaatgaaaatggtccgtagattcgaaggccatacggaccgtgttactgatttgtgtttcagtgaggatggaaaatggctcatctcatcgagtatggatgggactcttagaatatgggatatcagtttagcaaggcagattgatgcaatgcatgtcgatgtatctataacatctctctctatgtctcctaatatggatgtgttggcaaccacccatgttgatcaaaatggtgtctatctttgggttaatcaagctttgttctcaccatcaacaaatgttgataattattcaagtggtaaacatgtcagaaatgtgcgtttgcccactgtttcatcaacagaaaaatctgaggaagagcccattcatagttcagaagattcaaaagaaagtaaagttaaaccttatgttataatggatcaccaaataccaaatatgatcaccctctctttgcttcccaagagtcaatggcaaagtctggcgaatcttgacattataaaggttcggaataaaccaattgagccaccaaagaaacctgagaaggcgccttttttcttgcccacagttccatccctttcgggggagatattatttgagcctgcggcgaacagtaaagaaacagacagcagtactgaggacacaagtcacaaaaaaatggctgacctctcctctcactttagtcggctgttacaatcctgtggagatacaaagaattattcggcatttactgactacctaaaaggcttatcaccatcatctttagatatggaactacgagtgctacagttaatcgatgatgagccacaaaatttggagcagagacctgaacttcaatccatttcattgctgttggactacttcatacatgagctttcctgcaggaataactttgagtttgttcaggctgttctcaaattgtttttgaagatacatggtgaaacgatacggcgtcactcaatgcttcaggacaaagtgaagaagcttctagatgtccagagcttagtttggcagaagatagacaaagtgtttcagagtgcacgatgcatggttacattcctcagcaactcacagttttag

SEQ ID NO: 102161 - DNA, 240 bp, Oryza sativa
  Clone ID: PAT_MRT4530_99710C.1
cttgctatgctttctatgcgagcggcccgttcctttttttttttttttttttttaaaattttttttttttttttttttttactatttttatatgtttcatgtttatataatgagtactctttaccttttatttctcttaatttgtccttcaaaatatctagtttcttgtcatgatacactgcccatattgtttcaagactttaaactgggtcccaatgatccatatacaaaaaagattat

SEQ ID NO: 102162 - DNA, 112 bp, Oryza sativa
  Clone ID: PAT_MRT4530_99711C.1
atgtatttccctgaaggtagtcagtacagccttttgacgaaccacatcaaggtttcactggaaggcagcaagccaaaggacctcatcgtccccagaagcgtccgcaatccac

SEQ ID NO: 102163 - DNA, 213 bp, Oryza sativa
  Clone ID: PAT_MRT4530_99712C.1
atggcggcagagagaggagagttgcgacatcaagctaacaacaatctatggcatgggctacaccgagttggaggtggagaacctgtgggaaggaggtcaccgccactgccaaaatgggaagagttgatgggaagagattggacgtatcacatcagatctatgtcatctttcatgaacaaggatagagacaaaaatgactatggccaagtttag

SEQ ID NO: 102164 - DNA, 426 bp, Oryza sativa
  Clone ID: PAT_MRT4530_99713C.1
atggagtcgatgcttttgagtgcccctgtgatccacatcctgatccatactctaattggtccttattcaagaacaagctcaaggacgccacatatccattcaagaacaagaactaaatcacaaatacaacataataagaacaaggaccgccagtacatgcttcaagctgaggatactgccacctctgctgcttatcatggaagtactgtagcccgtgctggtgttaaggttgccaaggacatcgagaaggcttagtcgccccaggcgtctaggcgggcagatatggtggccttgccaccagtgagggggagacaggtggaggccaacatccccgttgttgtcacagtgacaacatttgccaggctgaccaccattgtgccaccttcgtggcttcgttctcccgagcggcctccgttgcctctctaa

SEQ ID NO: 102165 - DNA, 798 bp, Oryza sativa
  Clone ID: PAT_MRT4530_99714C.1
atggccgatgatgatggctaccgatgccagcagcggcggcggcggcggctggtgcagaggatggtggcgtgcttcgggatgttgtcgcggcggcggcggacggtgaggctggtgctgtggggaggcgaggtgcgggcggcgaggcacgggaagatggccgggcaggtgatgctcgacttcacggacagcgtcgtgtgccgcgccgacgggttctgcatcggccgcccggcgccggtgctggcgatcgaggaccgcctcgtcgccgggaggacctacctcgtgctccccgtcgaccgcctcccgcagggctacgacgccgtcacggccgcctcgctggccgcgctctcctacgacaggggcggcgccggcgccggcgccgccggggcgacgtccatcgccggcggcgccaagagccccttcgagtacgtcaagggcgacgacggccggacggtcatcaaggtcacgccggagttcatcgtgagatccatcacctcctcgagaccaataggcgcctgcgccgccgccggcgacgaggtggtggagggcggcggcggcggcggcggggcgcagctgtgcagcacgccggagctgaggaagcactacgagcagctggtgggcgcggcgaggtgccgcgcgtggtcgccgaggctggagacgatcaaggagcgcaagggcgccaggaggatcgtcgtggcggcgcaactaattcattttgatctgaacaaatttagcgatgaatttgaattcggttattattggagagtacaggaattcatctatgtgcaattaagctagaaa

SEQ ID NO: 102166 - DNA, 307 bp, Oryza sativa
  Clone ID: PAT_MRT4530_99715C.1
tcataacaagtggtatcaaagcctatggaaggtccatgatagattgatagagatatgatggaggtactccacatagcaacgaccacacgggaagtctagggatggacatggacgcacggtggagcacgacatagatcaacgaaatttgatcggtggatcgaacacttcaggcgacggtctagaccgctcgatggttgcaatcaacaagaagacgactagatatggtgctcaggttgatggtggcggaagcgattggtgatccaatcggtggaagcagacacttcggacgggtgactcgaatttttca

SEQ ID NO: 102167 - DNA, 363 bp, Oryza sativa
  Clone ID: PAT_MRT4530_99716C.1
atggacaccgtgccatttaaattagctcagggacaccgtgaaatagctcagcggggagcaaagcagagcagcagcacgcacgccctggatcccccgaagcaggaggtggtcaagccgtcgccgccgggccgcatccgcaacagcacgccctcctcccccaacctcctcgtctcgagcgccgacgccgatgccaagaacatgtgctgctactccgcgctgccgagcgcctgcccctcttcccctctctttccaatcctctccagcggctcccacgcgcgtgcgctcctgagcaagatacggcaggcgcgcgacggcacgggccgaggcgacggcggcggcctaaagggagcctggcggcgttga

SEQ ID NO: 102168 - DNA, 4143 bp, Oryza sativa
  Clone ID: PAT_MRT4530_99717C.1
atggtggcggcgcttgtgggtgaaggagatgtggaggacgtcggcggtcggggggacgagccgcagacaccaacagttggggatggaggcggcggacgtccaccagatctggccgttggtcggcgggggaggcggcaggcggcgccggctggcggtcaggaggcgagggaggtggctgcgaacgctggcggtcggcggaggcgggggaggtggccgaggacgccggcggtcgacggtcggtcggcgggggaggcggctgctgccggatccacgtcccccaaatttgttgaggtcggatccggcggcaggcggcggcggctcacggtcaggaggcgggggaggtggccgcagacgccggcggtcgctggatccgcatcctccaaactcgtcgaggccggatccggcgaccggctattgggagacggggggaggagacggcggccccgagctcctggaggccggcggcgagcgaaggagacggcgacgcggtcatgggagggaggcgggaggccgcggcagccggtcgtcgtggggggaagcgacagccggtggagggtggacagggcgacggccgatggccgagtggcggtgccgaccacgttcgccgtcgggagagggggggtttacgtgcagccggcgccgttgcctaagtgcctcgggcaatccccagtgactggtggtcactacaatgaagcctccgaggcaatgctatataccaagccgtcctcctacccgccacaccgccgtggcctcggccgcgccgccgcgcgctaccgggccgccggcgcctgcgctgctgcgcccggccgtcaccccgcaccgccccgcgccaaccgcctcccgctcaggcgtgcactcacatggaatgatgtcaacaacttgattagcatcctcaagttcttcggcgaggccacaggccttcaagtgaatctgcacaagagctcggtcgtgcccatcaaatgcgcagagcagaacctgtccgaggtgttggaaaatttcaatggacagcggggcaattttcccataacatatttgggattgccgctcaccccaggccgcatcaagagaatacacttgcaaccggtgatggacaagttgcaatcaaggatcgggtactggatggagtgcgctgactacttcatcggctccgggcggcggtgctcgccgtcgacgtcgacgtcgacgtcgagagaggcgtggaggccggagaagcaatggcggaaagccaccaacgtcatcagggggtgtcataggcttctgcgcctcggcgtcctctccgccgccgccggcatcatgcgccggaacccctcctatgtcgagatcaaagtgcacgacgaaggcgagctggacgtctcatccggcggcgacggcgaggcacccgtggcgttcactgtcgccgcagatgatgagtcgttcaagggactcgtcaagaacaagcgggaggactgcttccgccttctgggcggcggcgccggcgtcgcggcggtgctggcgtccggcgcggagcgcggcatccgcggcgacgatgccgacgtggcgcgccgcaagaaggcgttcggatcgaacacctacccgaagcccaagcccaaggggttcttccgccacgtgtgggacgcgctcgccgacgtcttcctcatcgtgctcctcgtctgcgccgccgtctccctcgccttcggcatcaaggagcacggcatcaaggacggctggtacgacggcgtcagcatcttcctcgccgtgttcctcgtcgccgcggtctccgccgtcagcaaccacagccagggcaagcggttcgacaagctggcacgggagtccgagaacatcatggtcagcgtcgtccgcgccgcgcggcgccaggaggtgtccatattcgacgtcgtcgtcggcgacgtggtggtgctcaagatcggcgacgtcgtccccgccgacggcgtgttcctggacggccacgcgctgcaggtcgacgagtcgagcatgaccggcgagccgcaccccgtcgaggtcgacgccgtcaagagccccttcctcgcctccggcgtcaaggtggtcgacggctacggcaagatggtggtcaccgccgtcgggacggacacggcgtggggcgagatgatgcgcaccatcaccagggagaacaccgacccgacgccgctccaggagcgcctcgaggggctcacctccagcatcggcaaggtcggcatcgccgtcgcggtgctcgtcttcgccgtgctcacggcgaggcacttcaccggcagcaccagggacgagcagggcaacgcgctgttcgacaagaggaatgtcaccttcaacgccgtgttcagcggcctcgtcggcatcttccagcaagccgtcaccatcatcgtcgtcgccatccccgagggcctcccgctcgccgtgacattgacgctggccttctccatgaagaggatggtgagggagaacgcgctggtgcggcggctgtcggcgtgcgagacgatgggctcggtcaccgccatctgcaccgacaagaccgggacgctgacgctgaaccagatgaaggtgacggagttctgggtcggcgccgaccggccaagatccgccgcggcggtgaacggcggcgtcgtgaggttgctctgccagggcgccgggctgaacaccacgggcagcgtgtacaagccggacaacgtgtcgccgccggagatcaccggcagcccgacggagaaggcgctgctgtcgtgggcggtggaggagctccccatggacgccgacgcgctcaagaggaaatgcaaggtggtgcgcgtcgaggcgttcaactccgacaagaagcgcagcggcgtgatgctccgcgacgccgccaccggcgcggtgaccgcgcactggaaaggcgccgccgagatggtgatcaacgacatggcggcggcgagcctccgctgcatcgcgttcgcctacaagcaagtcgtcgacggcggcgacagcgacaacgccaagatcgacgacgaggggctgacattgctgggcttcgtcggactgaaagacccgtgcagaccagaggtaaaatccgccatcgaagcttgcaccaaagcaggcatcgccgtcaagatggtcaccggcgacaacgtcctcacggctcgcgccatcgccaaggaatgcggcatcatctccggcaacgacgacgacgccgccggcgtcgtgatcgaggggcacgagttccgcgccatgtcggagcaggagcagctcgccatcgtcgacaacatccgcgtcatggcgcggtcgctgccactcgacaagctggtgctcgtccagcgcctgaagcagaagggccacgtggtggccgtcaccggcgacggcacgaacgacgcgccggcgctgaaagaagccgacgtgggcctctccatgggagtccagggcaccgaggtcgccaaggagagctccgacatcgtcatcctcaacgacaacttcgacacggtggtgacggcgacgcggtggggccgctgcgtgtacaacaacatccagaagttcatccagttccagctcaccgtcaacgtcgcggcgctcgtcatcaacttcgtgtcggcggtgaccacgggcaggatgccgctgaccacggtgcagctgctgtgggtgaacctgatcatggacaccatgggcgcgctggcgctcgccacggacacgccgacggcggggctgatgcgccgcccgcccatcggccgcgcggcgccgctgatcagcaacgccatgtggcgcaacctggcggcgcaggcggcgtaccaggtggccgtgctgctggcgctccagtaccgcggcttcggcggcgccggcgccggcgagagggcgaacgggacgatgatcttcaacgcgttcgtgctgtgccaggtgttcaacgagttcaacgcgagggagatcgagaggaggaacgtgttcgccggcgtgcaccggaacaggatgttcctgggcatcgtcgccgtcacggtggcgctgcaggtggtgatggtggagttgctgaccaagttcgccggaacggagaggctggggtgggggcagtggggcgcctgcgtcggcattgccgccgtgtcgtggcccatcgggtgggccgtcaagtgcatcccggtgccggagcggccgttccacgagatcatcacggcgaggaggaggaggagaagatcgacataa

SEQ ID NO: 102169 - DNA, 3252 bp, Oryza sativa
  Clone ID: PAT_MRT4530_99718C.1
ttatgtcgatcttctcctcctcctcctcgccgtgatgatctcgtggaacggccgctccggcaccgggatgcacttgacggcccacccgatgggccacgacacggcggcaatgccgacgcaggcgccccactgcccccaccccagcctctccgttccggcgaacttggtcagcaactccaccatcaccacctgcagcgccaccgtgacggcgacgatgcccaggaacatcctgttccggtgcacgccggcgaacacgttcctcctctcgatctccctcgcgttgaactcgttgaacacctggcacagcacgaacgcgttgaagatcatcgtcccgttcgccctctcgccggcgccggcgccgccgaagccgcggtactggagcgccagcagcacggccacctggtacgccgcctgcgccgccaggttgcgccacatggcgttgctgatcagcggcgccgcgcggccgatgggcgggcggcgcatcagccccgccgtcggcgtgtccgtggcgagcgccagcgcgcccatggtgtccatgatcaggttcacccacagcagctgcaccgtggtcagcggcatcctgcccgtggtcaccgccgacacgaagttgatgacgagcgccgcgacgttgacggtgagctggaactggatgaacttctggatgttgttgtacacgcagcggccccaccgcgtcgccgtcaccaccgtgtcgaagttgtcgttgaggatgacgatgtcggagctctccttggcgacctcggtgccctggactcccatggagaggcccacgtcggcttctttcagcgccggcgcgtcgttcgtgccgtcgccggtgacggccaccacgtggcccttctgcttcaggcgctggacgagcaccagcttgtcgagtggcagcgaccgcgccatgacgcggatgttgtcgacgatggcgagctgctcctgctccgacatggcgcggaactcgtgcccctcgatcacgacgccggcggcgtcgtcgtcgttgccggagatgatgccgcattccttggcgatggcgcgagccgtgaggacgttgtcgccggtgaccatcttgacggcgatgcctgctttggtgcaagcttcgatggcggattttacctctggtctgcacgggtctttcagtccgacgaagcccagcaatgtcagcccctcgtcgtcgatcttggcgttgtcgctgtcgccgccgtcgacgacttgcttgtaggcgaacgcgatgcagcggaggctcgccgccgccatgtcgttgatcacctgctcgagcttcctcctctgctccacgccgagctcgcgcgcggcgccgtctgcgccgacgtacacggtgcacctcgcgagcaccatctcggcggcgcctttccagtgcgcggtcaccgcgccggtggcggcgtcgcggagcatcacgccgctgcgcttcttgtcggagttgaacgcctcgacgcgcaccaccttgcatttcctcttgagcgcgtcggcgtccatggggagctcctccaccgcccacgacagcagcgccttctccgtcgggctgccggtgatctccggcggcgacacgttgtccggcttgtacacgctgcccgtggtgttcagcccggcgccctggcagagcaacctcacgacgccgccgttcaccgccgcggcggatcttggccggtcggcgccgacccagaactccgtcaccttcatctggttcagcgtcagcgtcccggtcttgtcggtgcagatggcggtgaccgagcccatcgtctcgcacgccgacagccgccgcaccagcgcgttctccctcaccatcctcttcatggagaaggccagcgtcaatgtcacggcgagcgggaggccctcggggatggcgacgacgatgatggtgacggcttgctggaagatgccgacgaggccgctgaacacggcgttgaaggtgacattcctcttgtcgaacagcgcgttgccctgctcgtccctggtgctgccggtgaagtgcctcgccgtgagcacggcgaagacgagcaccgcgacggcgatgccgaccttgccgatgctggaggtgagcccctcgaggcgctcctggagcggcgtcgggtcggtgttctccctggtgatggtgcgcatcatctcgccccacgccgtgtccgtcccgacggcggtgaccaccatcttgccgtagccgtcgaccaccttgacgccggaggcgaggaaggggctcttgacggcgtcgacctcgacggggtgcggctcgccggtcatgctcgactcgtcgacctgcagcgcgtggccgtccaggaacacgccgtcggcggggacgacgtcgccgatcttgagcaccaccacgtcgccgacgacgacgtcgaatatggacacctcctggcgccgcgcggcgcggacgacgctgaccatgatgttctcggactcccgtgccagcttgtcgaaccgcttgccctggctgtggttgctgacggcggagaccgcggcgacgaggaacacggcgaggaagatgctgacgccgtcgtaccagccgtccttgatgccgtgctccttgatgccgaaggcgagggagacggcggcgcagacgaggagcacgatgaggaagacgtcggcgagcgcgtcccacacgtggcggaagaaccccttgggcttgggcttcgggtaggtgttcgatccgaacgccttcttgcggcgcgccacgtcggcatcgtcgccgcggatgccgcgctccgcgccggacgccagcaccgccgcgacgccggcgccgccgcccagaaggcggaagcagtcctcccgcttgttcttgacgagtcccttgaacgactcatcatctgcggcgacagtgaacgccacgggtgcctcgccgtcgccgccggatgagacgtccagctcgccttcgtcgtgcactttgatctcgacataggaggggttccggcgcatgatgccggcggcggcggagaggacgccgaggcgcagaagcctatgacaccccctgatgacgttggtggctttccgccattgcttctccggcctccacgcctctctcgacgtcgacgtcgacgtcgacggcgagcaccgccgcccggagccgatgaagtagtcagcgcactccatccagtacccgatcctgatcgatcaggcgctgccgaatcaagcgaccaacaaagatgaatggatcaaactactcacaatttcgagaaacacaagcgattactctcaaagaaaatggtccaaggatttgctgaattggtcctcgtg

SEQ ID NO: 102170 - DNA, 441 bp, Oryza sativa
  unsure (1)..(441): unsure at all n locations
  Clone ID: PAT_MRT4530_99719C.1
tccctattaagagctatgacgtcgcatgcacgcgtacgtaagcttggatctctaagcggcgcgcactcggtctcggcgcgggtctgtgctgcatctgttggaggttctgctgtgtccctgtcatggtcgaacctcctgatgagctgggggcggcgacggcggaggcagcgggagcacgatggctgggcttgtctgtcgtcgacgtcacgccggcgctggctgctcgctgtgccgacacagngtggctggtggctgctggcgagcgacgctggctggctggctgggctgctggtgacctgtgtgcttggcttgngcctggcgtgatcttggtacttgcgccctgtacttgcctggtgctgctgctccatctcggcgtcgacgaggatcttctcgatgctgctcggtcgcggtacagcgggatgttgatcagctgcgccctgc

SEQ ID NO: 102171 - DNA, 447 bp, Oryza sativa
  Clone ID: PAT_MRT4530_9971C.1
atgacggttgtgatggtcggaatattccgaaatacccgcaacctcaagaagcgtgtcggtgcaagaggggacctcatcagctgggtcagtgtgacaaggtcagcgcacgagcacctcgtccgagtagtcttggcctggaggaagcaatctatccggcttgtactaggcgcgtcggcggctttcctctgggtcggcctcatggatcaaggccctctccccgtcgcgctggtgccgacgcttgtccatgacattgcggaggttagcatttacccccgccctccgtcgctgcctcggacttcctcccgcctcggcgccgccgccgacgtcgtccaccaccacgccgagcccgtcgaccgccggaacgccgccgtccccgttgacccgagccgcgccaccacctccctccgctccggccgcctccttcgtcgccgccatcacccgggatga

SEQ ID NO: 102172 - DNA, 190 bp, Oryza sativa
  Clone ID: PAT_MRT4530_99720C.1
ttttgtgttttttttttttttttgttttttttttcccaaaaaaaggaatggatacgtgttaaaattttttgaatacagggaaacagttattacatcgtgctaggaatccacaaagtaagtcttgtttttatacttatggctcattcacatgtgactaagaattggatgtacaatttttcatattaaaaag

SEQ ID NO: 102173 - DNA, 391 bp, Oryza sativa
  unsure (1)..(391): unsure at all n locations
  Clone ID: PAT_MRT4530_99721C.1
ggaagaagccgtgttgattacgactgttttggagatgtcgtggtgtttgacacagcatatcgtaccagcaaatataatatgatttgtgccccatttgttggtgttaatcaccatggccaagatgttatgcttggttgtgcacttctgttagatgagtccctgacatcctatgaatggttgttcaagtcattcttagattcaatgggtggccatcctcctaaaacaattttcactgttatggctgaaactatatccaaggcaattgaaggcgttctccctgagacacgtcactgcatctgtcaatggagtattgaaaagaacctacagtcccatttaggcactctaaaatggttctggaacatttcatagcatggttgacnaaatgcatgag

SEQ ID NO: 102174 - DNA, 956 bp, Oryza sativa
  Clone ID: PAT_MRT4530_99722C.1
tttgaccccactgccctcccaccgcggtggcggccgctcggcacctaccgggtcccccggcctgctgcatgtcggcccgcgccatcccttgttgtgtccttcgtgcttctggccatgcctaccaacctgggtgctctgacctcttggctgcttctcgtcagaaaaggggactgtttcgtgcctcgcttaaacttacaacgactgctcattttctcaaaatttgttgtattatagacttctggtagctagtgccctaaattaaacagaactagtgaaacatgcttgttaatcacacatattagtttgaagccaattactaatgtatgtcctgtggacgaagcaccattggtgtggtgatggcgtcatgaaatgcatgactgaatgttttaattacttcatttgtcccaaaaagaaagatacatatatcttgtttattactgttgtacgtatctgttattgaatggaattctgaataacatgatccactttgttgtacatgtcttactacatcatctcttgatgtgtcgatggtgaatctggcaagtaaaataacctggtatttatgactttatgtttggtaagcatcatccattgtttcttctgtcatgtctgaatatgtagcttcatattttgtgctcacttatataccctggtgatgtctatctgatgtagggttgtttgcttatgtttatgcttttcgttcttttattttcgaggattatacttttagttcttgcctcggtgcctcattccctgcttgaactctcatgcagtttctcttgaagaattttgacacgttggtatacgtaccataaatgccaacaaattaagaattcttctctgggctgcccagaaatcattgccagttttattacgacaattcattctccagtctgtactctgttaattttacactgtggaatcatcaccatgtaaattttggacatggctgtatt

SEQ ID NO: 102175 - DNA, 507 bp, Oryza sativa
  Clone ID: PAT_MRT4530_99723C.1
tattgctttgccaaacgtaaattctaggagaagcaagtataaccccatgtttagttcttctaaggatcgctattgatggccagacgaaccttgaatgagacaatccctggtacatgttatgtgtgatgtatttctcgggtaccttcctttgtagctctggtatatatccgcgcccgatacagtcgcacttctagattcgatcaatgtgtcccgaccgttgttgatagctgtaggtcgtgagtgctgaaggatattgatactcctaccgcaacactggtaagatcttcaaccctatcgccatttgtcgcaggcacccaagcgccattgtcaatatacgttggtgagatgatatgtatggtcaaagtgatgtgtggatgtcaggtggtagctattcacaagtggggcttctagaggcttccaatttattatcgatactattcccccgtcatctgtaaaaaaataaaataccgggattcgttacgagtgattaaaaaaaaaaaaaaaaaa

SEQ ID NO: 102176 - DNA, 800 bp, Oryza sativa
  Clone ID: PAT_MRT4530_99724C.1
actgagattgagcacagagcaggggaggtgccggggtcattgcagcatacaagtgcacagccagcatcgtatggcactatcaactccctaccagatggaattggagctcaaagcaacatcctccccaacatcagaatttcatgcactgcaactcgtatgaaccctccatggatgagtcatgatgcttgttgaggatgtgagccatatgaaaacccgcagcttgtttgcttagttcccccggagccttcaagatctgatatcaccttaattgctggagaagtcccatcgattgccgatagatatgctcctctccatctgggtatcgcaatgcaaagcttgtaagatgtcgatatcatcttcacttttttctgacatcttgtacattacaaccaagaaagtccccttcaggtcccgcgtgttgattgaaagattgaagctgcaacctttgcttcagcgtaattgtgcttgcaatattagttcttttctgttgcttgcaaaaaccatgctctggttaacaaggatcaggaggacgaggatggtgcattagttgttgatgaatttactgctgtgttccatgtatatctgttaaagctgtattggttcagagagcctgagagcattgtttcacccttttttttttttttgcactctcttttggtgtgtgaatgatttctagttaaaaggtgttgtaaccttacagatattcagaccatacattggttagaagaaagtcttgtataatagataatgtaaacagagaagtctgtgtcctttgataattgatacttttctgctagagt

SEQ ID NO: 102177 - DNA, 351 bp, Oryza sativa
  Clone ID: PAT_MRT4530_99725C.1
acaaaccccaaaatcaaggagaaaggggagtttatgaacatcaggcaaggcccggggttcatttattaatcacaacgccgtttgaataaactgggggcaacaaaacattgaaatgggaggaggggtttttttcatttcgacaggatttgccgacccccgggttggggtaaccaacatagactggatttgggggaaacctataccggcgggggcgctggatttttaaacaaggagggcgcctcccccgaggcgcccggaaagggtaactgcccaaaaaaaaaccccgggggtgcccccaaccttggggtccccggtgggagaccattcctccggacagcataaagggcttta

SEQ ID NO: 102178 - DNA, 391 bp, Oryza sativa
  unsure (1)..(391): unsure at all n locations
  Clone ID: PAT_MRT4530_99726C.1
cttcgcgccctcgctatgtagacggaccgcccaccacccgccaccccccccccccccccccccccgccaccacccccccccccccagcgaccaggccaagccnaaaaccctcgaccacaagctcacagtaaactaacactaacccagcatcccctntcacacattacagcccaacacccaccacacctccccccgcccctcacccctccacgcccgaacggcaccccttccccccacacgcaacagcccccgaacccccccccccctcatccacacccgaccaaccgccccttccgtcgccccatccccggccccccctacagcctattggcctccctgcccggcgccgggcttcccccccgcccaagccggcaccacgcccacggcccac

SEQ ID NO: 102179 - DNA, 1360 bp, Oryza sativa
  Clone ID: PAT_MRT4530_99727C.1
cagcatctcactctccagaagctatcatggcttcatccaagactgttctttctgcaattttcactgcttctctgtgcttcactgtagctcttgctttccctgctcaccatgaggatcttcacccagttgtgcagagcccaccaaagccagttctttctccagattactataaggctacatgcccacaagctgatgagattgtggtctctgtcctaaagaaggctattgccaaggagcagaggattgctgcttctcttctcaggctcctgttccatgactgctttgttcagggatgcgacgcgtcggttttgttggatgacagtgaagaattcgtgagcgagaaaaaggctattcctaacaaaaattctattagaggatttgaagttatagacgagatcaaggctgcacttgaagaagcttgtccacacacagtctcttgtgctgacaccattgccctagctgcgagaggttcaacagttctgagcggtggcccatactgggaacttccactaggaaggaaggattcaaaggcagcatatatgaaattagcaaacaagaaccttcctccaccaaatgcgacactgcatcgtcttgtgaaattctttgaaaggcaaggactggataaggtggaccttgtggcactgtcaggaagccacaccattggaatggccagatgtgtgagcttcaagcagaggctctacaaccagcacagagacaaccagcctgacaaaacgctagagagaatgttctactccacactggcctcaacatgcccacgcaacggcggtgacaacaacttacgcccactggagtttgctaccccttcgaaattcgacaacacctattacaagctgctgatcgagggaagagggctcctcaattcagatgaagttctgtggacaggacgagacccgcagatcgcgggtctcgtcagaagctatgcagaaaacgaaccgctgttcttcgagcactacgtgaactcgataaccaagatggggaacatcaatcccctcactggttacgacggagaaatccgcaagaactgccgtgtggttaacaagaagatctagcatatgaaagcgggttcggtttaatttgcatcaatatatttcctttgcttttggtcaccgttgtaatttagagattgttttccagtttggatgtcaccacgcaagtgtggtggcatgaggtgtaattgcagtctgcaagccctgtctgcttttctttttcaaaattaatcctgtttcttttttgtactcaatgtaattccagtcctttcgatgaatgttatcacatcgtctcttaaaagtcaaaagtcaccaatttgttttgccaaaaaaaaaaaaaaaaaaaaaaaaaa

SEQ ID NO: 102180 - DNA, 153 bp, Oryza sativa
  Clone ID: PAT_MRT4530_99728C.1
tccccgggctgcaggaattcggcacgaggaagacatccaccatgggtgatgctacgcttgttattaactgatggcataatttgcaggtctcacgtgaatttcaccctaattttgcagccaaatggaggagatacctgtatatatttcctcttg

SEQ ID NO: 102181 - DNA, 159 bp, Oryza sativa
  Clone ID: PAT_MRT4530_99729C.1
gatcaaacgttggttacatgtactctagtaataaggtgttgcatactatcgtgtgcaaacactgcaaaataagaagcattgaatgaagctttaatcaattgcagacttgcaactatcgtcagtataaaacctactactgaaacaaggtcagcccatgca

SEQ ID NO: 102182 - DNA, 411 bp, Oryza sativa
  unsure (1)..(411): unsure at all n locations
  Clone ID: PAT_MRT4530_9972C.1
anaaaaagaaggggtctttatttattcgggggaaaaaaaaccttaactcctacgtaaaacatgattcatattaggatggatcgaccggaacatgctcagctcatatcacttgagtgcatgcgatcattatttaatcaacataaaccagatgctcttagcacgactacaaggcacgctaaccaatggtgggggtgccggcaacagtatctacaaacatgccgaccccgttggggcggaagtccttggttaccggccggcgaccccgccaaaatcacgacaatgacggcgtccggcatgtccttgaggatcaccttgttcgcctactgcacctggaggcccaacaacttcgggcacgacttcttccggttcttcttggccgccgacgaccacgcgtacgtttacgcgtgggcc

SEQ ID NO: 102183 - DNA, 1177 bp, Oryza sativa
  Clone ID: PAT_MRT4530_99730C.1
ctaccccgggcggcgacggcggcggaacgagggaaggggcggcggcttaccgacggcggcggcggcgcaaggcaaggcgacgctcggcacgacacacggcgcggtgcggcggcaccgagggcggcagcgcggcggcaccagggcggcagcgcggcggcacgagggcggcggcgcagtggcacgagagcggcggcgcggtggagagggaagaggggaggaggagggaaatgcagtggggaaaagtggggagggggtggggtatttatagggaagagagggagaaggagaggggaaggggcggcggcttaatggcgatgcgacggcgcgcggagcgtggggcgcgaggtggcgggcgcgcggctcgggacggctcggggctcggcgggcggtgatggcgacgggcgatgcgacggcgacggcggagcgtcgacgggacggcgacgcggcgatgggacggcgcggcgcggcacggggcttggcgcgcggcgatggcggcacgtcggcgatgcgatgattacgcggcgcggggcgcgaggcggcggagccacggacgagcggcgcgtgggcgcgggggagcgaggcgacgcggcacggggcgcaacgcgggagcgacggcgacagcgcgcgcggaggggaggggctcgagacgatgcgaccgacgacggcgacggtgatgtgggcggtgatgcgacggcgatgggacggcgcgcggcagcacggggctcggggcttcgaaggcgcggcagcgcgagggcgacggctcgcggcgcgctgcgatggctacgcgacggcgacagcgcgcggcgcggcagcggggacgggatgcgacggcgacggcgcacagcagcggcgcggggcgcgagacggcaggctcgcgtcgcagttgacgggacgggcgagcggcgtgcgggcgcgaggcgcgaggcgacgcgacggcggcgcggcgcggcagcggcaatggtgacggcgcgcggtgcggcggcggcgacaagacgcgacggcgatggcgcgacggcgacggcggtgcggcggcacgtgatgacggcgacgcaacggcgacgcggcgcggcagcggcgacgcgatggacgggctcggggcggctaggggaagaggtgggagaggagggggaaggctagggaccacatcgaacaccttaggcgcaatgaacagtgccat

SEQ ID NO: 102184 - DNA, 759 bp, Oryza sativa
  Clone ID: PAT_MRT4530_99731C.1
ggtcaccctgcggggcccggcgcgggatcgatctccccccaaccaaaaatctctctctcaatccattgatccattaattcacaagcttatcgaatcggagatgaagcacccgaggcaggaggaggaggtgtcgctggcgctggcgctgagcacggactgctcgtcgacggcgtcggactcgtcggcggcggcggcgggcggcgcggcgaggaggaagagggcgcggcggaggagcgtggtggcgacgtcgggggaaggggagttcgtgtgcaagacttgcagccgcgcgttcccgaccttccaggcgctcgggggccaccggaccagccacctccgcggccggagcaacgggctcgacctcggcgccatcggcgacaaggcgatcaggctgcacagggcggccgacaaggagcacagggacaagcacgagtgccacatctgcggcctcggcttcgagatgggccaggcgctcggcggacacatgcggcgccaccgcgaggagatggccgccgccggcggtggatcctccgccgacgactgggtctggcgctgcgacgcgcggccggaggggatcgccgccgagccaccggtgttgctggagttgttcgcctagttaccgctggtctccattagtttcgtccaagttttgaactgacgcagtgtgtgtcaccattaattagttcatgtacatggtctagaaaaaaaagtcaggttcattcgatcttgtaactatgaataggggtttaatttttttttttc

SEQ ID NO: 102185 - DNA, 422 bp, Oryza sativa
  Clone ID: PAT_MRT4530_99732C.1
ggtttgtttggggggtttttttttttttttttttttttttttttttttttttttttttttttttttttttttttttttttttttttttttttttttttttttttttttttttttttatataacccaaagtttaaaagggaaaaaaagaggagggggggggggattttaaatttccgaaccacttttttgttaaaactaattaaaaaaaacccccaaggggggaaaggggccggggggccccattgtccctaggggggaacccatatttagaggggacgtaaaaagcaaaaaaagtttgggtttgggccaaattccgataaaagaaaaaataaaaaaactgggggagtggaagttgttgccctttggcctaaaaaaggtaaaggtcctgaaagggaaatgggggggccaccagcgcaagccga

SEQ ID NO: 102186 - DNA, 188 bp, Oryza sativa
  Clone ID: PAT_MRT4530_99733C.1
atggacgggttaatctttttcaacatctcccgacgacccgacttgagtggaggcgctgaggggagttgggaggagcacggcactgactacagtccgccgccgccgacatccaataggtctccgctgtcgtcgtccactccgacgatcactgcctctactgtactagcacagaaagaagggaggaggag

SEQ ID NO: 102187 - DNA, 287 bp, Oryza sativa
  Clone ID: PAT_MRT4530_99734C.1
ggttgggggtttttttttttttttttttttttttttttttttttttttttttttttttttttttttttttatttaaagaaaatcaatggcgggttaggcaataagtgaatgaaaaaaaaaaatagaacaaactttctagggaactaagggggggggggggaacaaacaaaagcaagctctttgttacctgctaaacaaagagagccacggccagcaagggccggggaaggggggccttcccacgaacggcttgcttccgggggggcctgggaagggctatcagttac

SEQ ID NO: 102188 - DNA, 193 bp, Oryza sativa
  Clone ID: PAT_MRT4530_99735C.1
gtgctctggagctgaacaaacataaccaggatttttgattgatcttagtgataccagatcgttatgaaaggcactgtgaggggaggcactattttggccaaaacgtatcaaaaaattaagtacagaaaaagttgcactccaagggtaccggacttgcttcaaaggccaagacgcaaggccataaaacacaaag

SEQ ID NO: 102189 - DNA, 316 bp, Oryza sativa
  Clone ID: PAT_MRT4530_99736C.1
ctcctctcttccacatattccagccggcggcggcggagcctgctcctctagccatctcccgtcctctccttcaaggcagctacctgcttaatcaaccatgggtaaggagaagacgcacatcaacatcgaggacattggccacgtcgactgtggagaggcgaccaccacgggccatgtgatctacaagcggggaggaattgacaagcgtgtcaatgaaaaggaccagggtggcaggcgcttacggattaataccgctcatgagcgcggttggcatgacaaccgaatcgaggccatccattacccagctactcacccc

SEQ ID NO: 102190 - DNA, 1056 bp, Oryza sativa
  Clone ID: PAT_MRT4530_99737C.1
atggtggagcctgtgaaatcggagcttggcagcctgttcttacctccaggcttcaggtttcatccgacggacgctgaagttatcttgaactatctccttgagaagttcatcaaccctagcttcacctccttgcccatccacgaggtcgacctcaacaagtgcgagccatgggatctcccaacggcgaggatggggaacaatgaatggtacttcagccgcaaggacatgaaatacccgacggggatgcgaaccaaccgagccaccaaagagggatattggaaggccaccggcaaggacagggagatcttcaagcctgccatttacgaaggaagcagcaagaacaataagcagcttgtcgggatgaagaagacgctggtgttctacatggggagggctccaaagggcaccaggaccaactgggtgatgcacgagttccgtccccacgccaacctccacaaccactacccaaaccttcgtctcaatcccaacgaatgggttgtgtgcaaggtgttccacaagaagcagggagacgaagccatcaacaaccagcagcagcagcctgccgttgatcaagccgacgacgacgacatctttcagctagatgacatcttcgccgaccccagcatctacgacttcagcaactcatctgccaacatcttgtcggcgccgcccaacaacaatgcggttcattcctccgtttctgcaggtacgacgatgactagtacgactaccgccagtagcttccagcatcagccaaactgctatagtgcgcctctgcagcagcacgtctcctcttggaataatacgcctggagctggaggagcccatggaattggaagcagctactacaacttgcagcagcagcagcagcaggcagcaatggtgaaagacctagaagatatcattgctgtcccggattatggtacgctactgccgagcagcaacaagggttcatcaataaggtcggcgacggctggagtttcgcagcagaatccccttggcgtgccgcagtacaagatagagaattatggggatcattacatatcacgagagtaa

SEQ ID NO: 102191 - DNA, 438 bp, Oryza sativa
  Clone ID: PAT_MRT4530_99738C.1
atggcggagatcatcctgaacaaccactgcgagggctgcgcgatcgacatccgcaaggccgtcgagaaaatgttcggggtaaagagggtttgggtggacatgtatgggcggcgggtggtgatcgccggccgaaaggtcgacgcgacgaagctcagagagcgactcaggcggaagaccggcaagtcagtcaccatcgtcagcgacggcacgccgccgccgccgcccgacgacgtcccctttgtcgggatgatgcacctggcgccgtcgccgccctactacccattgcccgcgccgcctccgccgccgccgccggggagctacctgtacggcggcaactacccctgccagaacccgtaccaccagtacgttcaaggaggcatgccggcgcgcttcgtcggcgacgacacctacgacgacggatgctgctccatgcagtga

SEQ ID NO: 102192 - DNA, 1877 bp, Oryza sativa
  Clone ID: PAT_MRT4530_99739C.1
gcacgaggcccccatctcaccctccccactctgccctactttctctctatacacccataccacaagcagtagtattgtctagagagagaaacaaacaacaatggccagtagtgagagagagtgaagctagagtgagaaagagatggagatgagcaacaagaagaagaaataaagaagagaggagagcaaagcaatgcaccatttggtactcctactagcacggtagtagtaccactaccactagtaaacacactctcaccttcctcttcttctccttcctccatctcccaatctccccaagaacacctaatctaatctctctccctcctctctctctattgtccatcaatggagatgatgatgccatgatcaaatgatgagagaagaagaggagtagagagggagggggtggggaggagagagagacgaaggaggaggatcgatgtacaagaaccagctgcaggagctggcgcagaggagctgcttcagcctgccgtcgtacgtgtgcacgagggaagggcccgaccacgcgccgcggttcaaggccaccgtcaccttcaatggcgagaccttcgacgggccatccaactgcaccacgctccggcaggccgagcacgccgccgccgaggtcgccctcgcccgcctctccctccgcggcccctcctcctccctcaccgcccgcgtgctcgatgagacgggggtgtacaagaatttgctgcaggagacggcgcacagggcggggctgaagctgccggtgtacacgacggtgaggtcggggcccgggcactcgccggtgttctcgtcgacggtggagctcgccgggatgagcttcgccggtgaccctgcgaagaccaagaagcacgccgagaagaacgccgccatggccgcatggtcctcgctcaagcagatgccggaggcgcgcaaggagcccggcggcggcggcggcgaggagcaggagcatgtggtcgtcgccagggtgctcgccgcgctgaagccgcgggacgattgcggcggcggcggtggcgaagggaaggcggcggcggcgtctctaccgaagaagcatctcgccggcgcgtcttgttcgtccgccacgtcgctgtacagacatcaatgggggcgtccgtcgccgccgccgccggcggccggacccaagatactgcctcccctgcacctgctgcagcagcagcaagcggcggcgtccggctcccgagccgccgccgccgagctggagcaagagcggaggaaggccgccgagctggtgcacatgctgcacgccgtcatgctgcgcgacagggcggccgacgcaatgccgccgccgatgccgtgctactacgcgccgtactaccaccacggcggcggcgtcgccccgacgaggcccttcgccggcgccgccgggttccacgcgccgccggcggtgagcgtccgttcagtgatccccggtctgcgccgcgccaccgtcgccgcggccgccgccgcgcaaggaggacgatccagcgacctcatccaagagggcgtagtagtagtaaaaactagtatccaatcaatcgcgcagcctgctccgatctgaagacgacgacgacgaggaagacgatgagagatcgatgggtagccatgaactctgcttcttgcaggggaatttcgatcacaagtctccctgtatatctaaatcgttgcaaagtgatcagcatttcttcttcttctcatctctttgctgctgaaatcttcagaaaagaagcagaccatgaaggattgaagatagttgaatatagctcgatcgatcgatctcctagggcttcattagaagccatccatccatgctttgtcgcatgaaaaattttaagctcatgagaatgcacattacatttctttcccttgtt

SEQ ID NO: 102193 - DNA, 273 bp, Oryza sativa
  Clone ID: PAT_MRT4530_9973C.1
atgggacggcaggggcagtgcagggagccgccggtcaccgccgccagagccgccgccaccgtcgccggtgggaaggccgggagggaggaggagagtgaggaggagagaagaggagtggataatgtgactggatatggagagaagaggaggggatatggagagaaggagaagaggatgagacttgttgatcatatggcgtatccatgtaaatggaggaagaaacctttagaggatatgggtggcattgtgatggagaccataccaaaattctag

SEQ ID NO: 102194 - DNA, 557 bp, Oryza sativa
  Clone ID: PAT_MRT4530_99740C.1
gcacgaggcttactagctcttgtacaggtttcctcacctgctgtatctgatcgatcttgttgggggcatggagatgatggcggcgagcggcgggcagcaggcggcggggtgcggggggaggtacttccagatgccgctgcactacccgaggtacaggaaggaggactacgagaggatgcccgagtggcagctcgaccgcctcctctccgagtacggcctccccgtcgatggcaacctccagcacaagcgcgccttcgccatcggcgccttcctctggggcgccggcggcggagccaacgccgcctgatccatcggccgatcgacagctacctgatagatgaatcgacagtcgatgatcgatcgacacacactgatcgatcttgcaggctagtattatgctttgatatatggatacaagtgttttgtaattaaggaggcataggagtatgatctactgctagcttagctagttttttgtacgtcttctttgcgagttctgagtattttggactttggagtaggctagtgttgtgatcgagttgtgaccatgtgaggat

SEQ ID NO: 102195 - DNA, 1914 bp, Oryza sativa
  Clone ID: PAT_MRT4530_99741C.1
atgctccgctcgccgggccactccccgcgccacctctccccgtccccggcgccgtccacgcctcgcccctcctccccgacgccctcgtccgcctccgcctccgcctccgcatcggccctcgccgccgccgccactaccaccacctcctccaagcgccgccgcccggaggtgctcgacgaggacacctacgtcgcggccgtcgagcggatcatcgagcgggacttcttcccggacctcccgcgcctccgcgaccgcctcgactggctccaggccctgcgctcccgcgacccgctcgtcctccgcgacgcgcagctcaagatcctcgagcgccgccgccgcgcccagcgccagcgccagggcggccccgtgcccaccccgacgccggccacctccaccgcgctccgctccccgtccttcctcgccaccccctccgtcgccccctccgtcgccggcgacgagggcgccgacgtcgacgacgacgtcgaggccgcgctctcgctcgacgacttcttccgccgcttcaccagcgaggacaacgagtccttctcccgcatcctcgagaaggtgaaccaccgccgccgcgagcgctatgcccacctgctggagcctggtgaggtggcgaaggcgccccagttggaggacgccaagcgcgacaggataaccgatgggtacggcacgtcggggcagccgctgagcaccttggagggtgccaagttcacggccaagaacctgctcatgtactacccggctgaccgtggggaggccccgcttactgatgaggagcgcgccgagcggctcaaggggatgaccaaggagatcgacaggtcgaacaccaggttccatgggaagtcttctgttgatgatggtgcaaaggaggaggaggcagctgctatactttatgcgccagttgcaggttccactcccggaggtatggcataccatgatcctgataaagcgaagaagtacgatttggaggatctaaggaagactccaaacccattctacgttgagtcagggaagaatgcaaacaatgggtatagttttgtgagaacgccatcgccagcacctggcgtggatgagtcaccgttcatgacatggggtgagattgatggaacaccactgagactggacccagaggagacaccgggtggttctgggggaagtgatagggcgcatttcaagatcccacctccgcctgctcgggatgtaaaggcacatctgctgtcaagggatgcagcaaggaagataaaggagcgcactaaaatgttccacaagccaccgctaccatcgcctgtgaggggaggaagtgcaagcccaaggaccttctctcctgcagcacagaagtttgttaggaatgccattgcaaagtcctctcgtaccattgatgagtcgctccgagcgagctacagagccgcgcaggttgtgacagtgcacgggcacgtcttggccggggtagacccgctcgtcgtcggtgaagtagatgctgtcgctggcgcaccacggcaggtgccgcgcgtcggtgacgaacgccataccggcccttccttccatggcaggcttttctcgttcctcttctccacagcagcggcgcagtgggacaatgatagggaacggttaatggtgagcactcttcatatccctctcccaccccgaggcgcagcggaatcacgaatggcagtcgatggcttggacatcagaaccaaggaggaaggccatggcgtggactcgaggtggagcggccaaagaggaggagagtacgccaccgctagccttgcggagaacgatgttggccttcccacgggagaggcggctgtgacctcggtctccttacggaggctcacagtaacaggcaccggaaccgcctgcttcttcatcctccttcctaccggacgccacaaccctcaccatggatga

SEQ ID NO: 102196 - DNA, 272 bp, Oryza sativa
  unsure (1)..(272): unsure at all n locations
  Clone ID: PAT_MRT4530_99742C.1
caacatcacagagttccgtatctcgctctgggccagtaatttgaggcgaaaatggagcacataccacccttaactctcccttcgtggattccctttctttcaggcctggagaaaccctgaatatttaacggtatgggcccaaatgtgagaagcttgttttcccctggcccaccccaagaacccatggccccttccatgtacacggatngagtgattccacagtgtctattattngaaaaaaaaagtcttctgaaaaaaaaaaaaaaaaaaaa

SEQ ID NO: 102197 - DNA, 315 bp, Oryza sativa
  Clone ID: PAT_MRT4530_99743C.1
tttgttttttttttttttttttttttttttttttttttttttttttttttttttttttttttttttttttttttttttttttttttttttggggggaaacggaaaaaaaaatttgggggatgggccccgttttgtttttaaaatccaaaaggaacactggggggcccaaagggtttttttcataaaaaatttttgagggcgggggcccctccaccttggcctaaaaaaaaactcttagccttaaggggttcctagtttaaaaccccggggaaaatttagagctggcaaaaaaaaatttaaaaacgggttttaaat

SEQ ID NO: 102198 - DNA, 447 bp, Oryza sativa
  Clone ID: PAT_MRT4530_99744C.1
atgaccccagtcatcccggcatggagtcaggaggctacccggcttctcttttccaagaagataagtgtactttttaccccaagttacaatgaattaacctcattctacctcggcgtaagggggctactgggcatagctactgacccgtattttctgaagatcgagcatgaggcccatgtccgggtgggcgtacccgagacctcgagccatacctaccgtggagggctgccttacttggctaccacattgttgccgcctgaaggcttacatctccacgccggccacctacgccgccgccaggtgacgtcgtctccacgcagcaaccgcgcggtctcgctcaaggttggcaagcttcgttttcttctgttccaggccttggccctagctcttaatcttcttagtttatggttgaatttcgtgattgctctcattggtcttgtaccttga

SEQ ID NO: 102199 - DNA, 242 bp, Oryza sativa
  Clone ID: PAT_MRT4530_99745C.1
gtcaccccgcgacgatacctttaatcatgcagaggcaaaggcggatcaagcattgtctgtgttgtactttggtagcacgcgaactgggggggagtggtaatctgccgagacgtacgtatgttcaccattcccttcacccaaagtcgagcggcaatcagaggtctgtgacttttgtactctgggatgtgcttcttttgtgtgcagtaccattagcacactttctggccatgaagaaccccatc

SEQ ID NO: 102200 - DNA, 519 bp, Oryza sativa
  Clone ID: PAT_MRT4530_99746C.1
acgcgttgccgagagagaggcagctcatttgccgtcgaattgatggaaaagagagcgtgagtagtaaagaggacagctttttccttaacgcctctccgtgtgctcctctccgttctggaaatcgatcaagcggccagccatctccatctccatcgtcttcttcttcttccttctcctggagccctttgggttttggtggtgtctgatcgtctgatactctgattgctagttttgggggattgttactagtgcagaaaagctgactgttttgtctcttcttatccattctagtaagtggtactcttgtgccatcggcttgattctttcttggtccctttgatatcttggtttaggtcctaagtcctcttcacctaatcttgtttttcttttgttccttcggttggtgagtcataggctatctcagtgttgcctccggttcttatataaccttccagtcctcttgctctttaacctgttcttgtacacttcacattagtccattctccttctgtttcccaa

SEQ ID NO: 102201 - DNA, 369 bp, Oryza sativa
  Clone ID: PAT_MRT4530_99747C.1
aaggctggcccgcgtgcgggcaccgccccggatttcgcggcgcgccccacgcgcgtgtctctagctgactagtaggactgcgtgaggcgagtgaatggcttcgttgtcgggtactcaaggaccgtcgcgtctgagggcatggctgctttgcaccgtggattcaacatatcctgggtggtgctgcactcttatccttgcttgttctcacctgtgtatgatgctccagggccaggcgctttagttggcaacctttaagatcacttgcttgccagcttgttacttggctggggtggtaccattgttgctgggctgccttcatagacaacggacactgttcttgggtggatgataatgacatccggtgaggct

SEQ ID NO: 102202 - DNA, 600 bp, Oryza sativa
  Clone ID: PAT_MRT4530_99748C.1
ctatctccacgacgtcgaggccagatcagcgttgccgccaaggtccgtgcctgcttccaccgtgccacacgccgttggatccgcgcggggagagctgccaccggcttcatgcttgagcccatcaccggatctgcacctcccgttgtcgccggcaatggatccgtgtgcgtggaggctagatccatgccgccgccagagcccacgcctaccgccgctgtgccgcccaccgctagatccatatgggggagaaccgccaccggcctccagctcgagcctatcgccggatccgcgcgggggagagccaagggggccactgccgtcgcccatgccagccgtcgccatagtcgccagatccaccgcccttgccgcagtcgccgcccaccatctcagcagccgctcccgagggtggtgccgctgccggatcctacacccttcaacgccggaggggaccgccgtgcgtgggggagcatggaggaggccgccgcgcgccgttgcccacactcgccgccaccctcgctcactgtgcacctccgccaccagtgcttgccgtcgggagggaggagaggggagaagaggagctgggagagaaagaagagcgga

SEQ ID NO: 102203 - DNA, 848 bp, Oryza sativa
  Clone ID: PAT_MRT4530_99749C.1
tgggttgcaggggggcgcgctggagggctcgggctccccgactctgccgtcttcctcgcctcctccccctcgccgccgccgccgccgcctccaaaccctacctccccggaaaacctagccccgcgcctcctcctcccctctcctccccgccgccgtttccctctctctcccgcctcttctccaccaccccctcctcctcaggtgattccagcatggtggtggtcggatcggcggagtccttcaccagcatcatgtccaaggtggaagcggagaagcttccggccgtgttctactacacggcggtatggtgcgggccttgtagagcgatggcacccgtgatttcaaaactgagcagccggtaccccaagatacctatctacaaagttgacattgacatggatggtgttggaagcaaactaagtgatctaaaaatattctctgtgccaacattccatttctactaccaaggtcggaagacaggtgaggtggttggtgctaatgcgacaaaacttgaatcaaccatggaaagtcttcacaagcaactatagaagttttgtggaagaatatgaccgggaggtggccagatgtctccatgtgccttccatcaacgtgtttgacattgatatttctgaaccttctggttgttttttatcatgctgaattcagtacattgcacctcttgtttatttagcacaactttgtatagtctgcatgtctaatatcagaatcaacgcaaacattctgttgggatgcagcaacccactaattttgttgggatagacgtgaaggaattctgggcctgtcagtcaaaaaaaaaaaaaaaaaaaaaaaaaaaaaaaaagggacaa

SEQ ID NO: 102204 - DNA, 2643 bp, Oryza sativa
  Clone ID: PAT_MRT4530_9974C.1
atggccggcgaccgagcggaggaggaggagggggaggcgccgcctccggaggcgcgtgccgcggcggcggtggagagggtggcggcggattcggctgctggggcccttcgtggaggagctccgggagcggaggcggggggagggggagggggaggaggaggagcgggcgctggcgccgctcgccgacgcgctcgaggcggcgctcgcgctgctccggctcggccgcgaggggagcaggatctccttgctagatttcttgttgagctgagattgcttcttgttcaatgcgaccaatatatgttcttcttttgtggtgcaattttgtggatattgtctatagctttgaattgttcttttgaggagaggcctcaaacccttcatcgagtccgtgttatcaatgggatgctttatgagtgctatgacataatattggttcttgagagggacagcgtaatgaaaaagtttcagggagtaattttgcagctggaacaagctctgtgcgacattccgtacaatgaattggatatatcagatgaagttagagagcaggttgagttagtgcacgcacagctcaaaagagcaaaagaacggattgatatgcctgacgatgaattctacaatgatctactatctgtatatgacaagaactatgacccaagtgcagaactggctattcttggaagattgtcagaaaagctacacttgatgacaatcaccgatctcacgcaagaatcactcgccttacatgagatggtcgcatccggcggtggtcaggacccaggagaacacattgagagaatgtcaatgctactgaagaagattaaggattttgtgcaaacacagaaccctgacatggggcctcctatggcttccagggtattggattcaaatggggattcaaggcctataaccattcctgacgagttccgatgtccaatttctcttgagctgatgaaggatcctgttatagtgtctacagggcagacatatgagcgggcatgcattgagaaatggatagcatcaggccatcatacctgcccaaccacgcaacagaagatgtcaacctcagcattgacgccaaactatgtccttagaagtctcatttcccagtggtgtgaaaccaatgggatggagccaccaaagcgctcaacccagcctaacaagcctacgcctgcatgctcttcgagtgaacgtgctaacatcgatgctctgctatctaagttatgctctccagacactgaggagcagagatcagctgctgcagagcttcgcctccttgcaaagcggaatgcaaacaaccggatttgcattgctgaggcaggtgccattcccttgctattgagtctgctgtcctcatctgacctacggactcaagaacatgcagttactgcccttctgaacctctccatacatgaggacaataaggcaagcatcatatcatctggtgctgtcccaagcatagtccatgttctgaagaatggcagcatggaggcacgggagaatgctgcggccacactttttagtctctcagtgattgatgaatataaagtgacaattggagggatgggggctatccctgcgcttgtagtgctgttaggcgagggtagccagcgggggaagaaggatgcagcagcagctctcttcaacttgtgtatataccaagggaacaagggacgagcgattcgagctggccttgtgccactcatcatggggctggtgaccaaccccacaggagcgctcatggatgaggctatggcaatactctccatactatccagccaccctgagggcaaggcagcgattggggcggcagagcctgtccctgtgcttgtggagatgatcggaagcggaaccccgagaaatcgagagaatgctgcggctgtcatgctacatctgtgcagtggagagcaccatcttgtgcatttagctcgtgcgcaggagtgcgggatcatggtcccgttgcgggagctggctttgaacggcacccgatagggggaagaggaaggctgtgcagctgctcgagcggatgagcagattcctagtccagcaacaagaggaacaggagtcccagtcgcaagcctccgcgcaggtccctcctcaggccacccctgagcaggtcccggaaaatgacatccctgaacaattggacagcccagcgtctcaataccctatggttgtatgaactcgatgatgagcgagtcatcgtcgcaatcctatcaaatgtcggattgagtagcatcctggtcactttgcattctgctcatgattcatggcatgccgaccaattgaggtttttccacaagcttgaactataaggtttccatgcttgtgtgctgaaactcccaggttgtgagaatttgtttaggcagcccaggatgttgagatagatgtgtacagtttcttaaacatgcagctgctatatgtagacaacataatgcaaggttttcccatgtatatcctgaagactgtaataccatatgtaaaagagaagtttcaaatgcggatttgagcagtaaatctgatggctttactactagtaactactccctctgtccaaaagactcaattcctgagtttttttgactaacgtttgactgttcgtcttatatgaaattttttttataaaaaaaaaaaaaaaaaaaa

SEQ ID NO: 102205 - DNA, 570 bp, Oryza sativa
  Clone ID: PAT_MRT4530_99750C.1
atggctctggctcaccgactctgccgtcttcctcgcctcctccccctcgccgccgccgccgccgcctccaaaccctacctccccggaaaacctagccccgcgcctcctcctcccctctcctccccgccgccgtttccctctctctcccgcctcttctccaccaccccctcctcctcaggtgattccagcatggtggtggtcggatcggcggagtccttcaccagcatcatgtccaaggtggaaggattggatcatggtctcatggatgcgcgcgatttcctttttgcagcggagaagcttccggccgtgttctactacacggcggtatggtgcgggccttgtagagcgatggcacccgtgatttcaaaactgagcagccggtaccccaagatacctatctacaaagttgacattgacatggatggtgttggaagcaaactaagtgatctaaaaatattctctgtgccaacattccatttctactaccaaggtcggaagacaggtgaggtggttggtgctaatgcgacaaaacttgaatcaaccatggaaagtcttcacaagcaactatag

SEQ ID NO: 102206 - DNA, 1485 bp, Oryza sativa
  Clone ID: PAT_MRT4530_99751C.1
atgaaccagttcgtccctgattggagcaacatgggtgacgcatccaggacactcggcgaagatgacaacctcattgagctgctctggtgcaacggccatgtcgtcatgcagagccagaatcaccaccggaagctgccgccgaggccgccggagaaggcggcggcggcggcggtgcaagaagacgaggccggcctgtggttcccgttcgcgctcgccgactcgctggagaaggacatcttctcggacctcttctacgaggcgcccgtcgcggcgacggcggaggcggcgcctgctggcccgggcgcgggcgccgacggcgaaggaaagacttgcaagggcgacgcggcaatggcggaggaggagcgtggcgggccgggcgcggcgtccgaggcgccgcgcgagctgatgccgccgcccaagtcgacgaacgcgtcctgctcgaggcagcagacgatgagcctggcggacggcggcgacaacgccggggacctgtcggagctcgtccgggcgaggaggtcgtccggcggcgcggctcggcggaaggcggaggccggcggcggcggcggcggcgcgtcgtcgtcgatgctgagcgcgatcgggtcgagcatctgcgggagcaaccaggtgcaggtgcagcagcgcacggcgagcgagcccgggcgccgcggcgcgccgccctcggcggtggggagcgcgaacgccatcccctgcggcgggcgcgaccacggccacggccacgaggcgaccaccgtggcgtcgtcgtcggggcggtccaactgctgcttcggcaccaccaccaccacggagccgacgagcaccagcaaccggagcagcaagcgcaagcggctcgacaccaccgaggactccgagagccccagcgaggacgcggagtcggagtcggcggcgctggcgcgcaagccgccggcgaagatgacgacggcgcggaggagccgcgccgccgaggtgcacaacctctccgagaggaggagacgggacaggatcaacgagaagatgagagccctgcaggagctcataccacactgcaacaagactgacaaggcgtcgatgctggacgaggcgatcgagtacctcaagtctctgcagctgcagctgcagatgatgtggatggggagcgggatggcgccgccggtgatgttcccgggggtgcaccagtatctgccgaggatgggcgtcgggatgggggcggcggcggcggcgatgccgaggatgccgttcatggcggcgccgcagccggtggtgcccacaccgccggtgaaccaccttgacctgggcgtcaaccacctgcagccgccgccgacccagggagtggggtattatccgttgggggccaaggccgtgcagcagcagcaaaatccaccacttcacgtgccaaatggaagcattatgcctcctcctgaaaatgcacccaacacaggatcaggtatgggatccttctacttctacttctacttctcttccgattaa

SEQ ID NO: 102207 - DNA, 495 bp, Oryza sativa
  Clone ID: PAT_MRT4530_99752C.1
atggcccgcaatgcctgccgcaacctccacggctacctcctgcgcggcctccttcagccgggccacgagctccgtgttgacctctccgaccgccccagcagcaggcgccgcagccaccgcgagcccgtcagcatggaggacgccgtccacgccgcgtccctcggcatggagccagatctgggagggagggaggtgtccaccgccgccaccaccctcccttctcctcgtaggggccagatctgggagagggaggggaggggagccgcatccgcgccaccgccgtcgctccccctccttcggccagatctaggagcgggagggagagagggggagctgccgtcgccccttctgcgccgcggtcacctcgtccgcgccgccaccgtcgctccccatcctccggccagagctaggagcggggggagagagggggagccgccgccgccatcgccccttctgcgccgccgccgttgctccctcttctccagccagatctag

SEQ ID NO: 102208 - DNA, 364 bp, Oryza sativa
  Clone ID: PAT_MRT4530_99753C.1
atttctttcccacccacagtggcacgaactaggagggcgggcttctttgatctctccggccactactactcatccatcaaatcaacgtcgctccccttctcctcttgcggcgcggctcctttccaagattctccgatccccaaacccccaatcgccagagcaaagaagggggaacatcgccaggaaaaagatcggtggcgagagaaggcggaaagcgaaggacagcgaggggagcaaaaggagagagagagagagtcttttccattttctttcgtttttcttttctccctgcaagaggcagctcggcgctgctgcgaattccatccatgccgttcgccgtcctcaggatgaggggtttgatgcc

SEQ ID NO: 102209 - DNA, 184 bp, Oryza sativa
  Clone ID: PAT_MRT4530_99754C.1
gctcagtactctagattacgcgattcgactggtcaggcaccctgcgcgaacgtgcgcggcatctcggccataaacctctcaggtctcgatcgtcaatctgagcatacaagctgtacacgcgtacccggcctgcgtcgggacataccggtccggactgttcctgctcatgcgctatacgcgccac

SEQ ID NO: 102210 - DNA, 722 bp, Oryza sativa
  Clone ID: PAT_MRT4530_99755C.1
tcgttgggcggcggtgttatcgccacggcgtgaaggagagacacataaggttttgtttaagtacggatagaatgcatccatttggagagatgcgcagcggtcattgcacttggcctgtgaccatgtgtatctaaaacctttccccttagttatgcatgaagcggaagtacatcatgatgccgattattattcaaggcccaaaataacctagtaaagacattgatgtgtacttaaaaccattggttgaagatctgaaactgttatgaaagaaaaaaagttgtcattgtgtggaatgaggacaaatatgagcaatttaacctacgagtattgctgttcataaccattaacgattgacaatcaaacaaggagtataaggcttacacccactgtatggatgatactgacagtacgtattttgaagataaggcagaccaccatactaagcctaaatatcgtaacggaaaaatcgtgtttgctatggtgaaagatctgacaatagtatttggaaaagtgatccggcagccaacctatagcaagtgaagatggtcatgtggcgatgtggaagaagaagtctattttttaggagttaccctattgggatgtcttataggtctgccatgcaatcgacgtgatgcacctcactaagaacttgtgcgttaacctgctaggcttcctaggtgtatactgggaagtcttaggggcgtttgtaagatgccacatgc

SEQ ID NO: 102211 - DNA, 410 bp, Oryza sativa
  Clone ID: PAT_MRT4530_99756C.1
ctagtcgtgctcgtgcttgagtgccgcggccaccagctcgtgcggcatggccgcgccgacatgcacccgcgcgttcccggtgcgcacctcgtctaggaattcggcgacgcccgacttgtcgtgcttctcgaacgcccccttgtagtcttgtactgccgcatcgccacggacaccacgcgcgtgtagggcatctgctcccatttgcccgtggtcatgtacacctccgggagctcgaggaccttgagcagcggcatgagccccttgcgccggagccagttgcagacacggtaggcgtagtgctcgtcggagaggaagaggtactcctagctcgactcgcgcgggaagatgcggcgggcgatgcccccgttgccccgcctccccccgcccagcctcggcctagctcgccgcat

SEQ ID NO: 102212 - DNA, 411 bp, Oryza sativa
  Clone ID: PAT_MRT4530_99757C.1
atgaaggagacagagaggtatatgtatgcagagttggagaaccagagcggcagcggcaggctagtgagcggccgcgagcgcgcagcgggcgagcgctacagtgggcgggcgggcaggcggcggagcagagcggcggcggcaggcgagcactcgggcggtggagcggagcggagtagcggcggcatccgcggcggcgccggcgcagctggaggaggaagaggaggtaaggaagaccgcatcggtgagctctacagccttgtccagcccgacggctcggcccgccgtcaccgcccccgctccgctctctcgaccacggcaatggcgccgcacggcacgcggaggaggaggagggaaggcagacgaccgccgcagtcgtccctcgccagccgccggccacgacaggcctcctga

SEQ ID NO: 102213 - DNA, 240 bp, Oryza sativa
  Clone ID: PAT_MRT4530_99758C.1
atggcgatggagacaacatgtgccgctggaggggaggcggcagcggcaggcagcgacctcgcctccgccaagtcaggctggaagggaggcgacagcggtggcatgcgacggtgggagggaggtggaggcatcgactggtggcgcttcgccagatccgtcgggaggaaaggctgcgacagcagagtgccaccgcgggtgggaggcagaggcagcgacgggcggtggcctctccttcgctag

SEQ ID NO: 102214 - DNA, 537 bp, Oryza sativa
  Clone ID: PAT_MRT4530_99759C.1
atggcggcgtgcggctgcgtccatcatgtggagatcgactcgacgacgccgccatcaagtcgctgccgtcgggcgtcggcgatggcggcgcatggctgcggccagcgggggaggcggaggaggtataagcggacgccctcgccctcattgtcgatgtcgacaccaatgaagaggtccgcgccgctcaccacggacaagcgacgagaagccggcggcgcggcgcccccgccgcggacgagcgacaagaagccggcgacgtggcgcccccacccgaagccgccgacgacgatgaggccgagcggcgtggagtcgtcggggccgccgctccccatcccagccgcgcacgcctactgctgctgcggccgctgcctctctgccaccgcgaacgcccgccgacgctgccttgccctgccgctgccctccccttccccgccgctcattccccgtcgaccgcgcgaccctcttcgccgctccttctcctctccgcctctccttccccgtcggccgtgccgtccctcttccctgctgcatcggtga

SEQ ID NO: 102215 - DNA, 613 bp, Oryza sativa
  unsure (1)..(613): unsure at all n locations
  Clone ID: PAT_MRT4530_9975C.1
tggcaaattttacacgtctcacttgcacccttgataggttggtcaaaaaacctggcagtggaggtgattccaaaaaggaccattcatttcccgaatgcntgtttgagaccttactacaaaaggatgatgcggtggtgtggaacgtctgttgacacgcattgctggacttccagagcttgaaattttgagagatggcctcgtgctattcatcaagcagcatgttattgctaaggacaccggtaaggacttggctagcaaattcaagagtcgcaaagaaagcgcttgataatactgctggagttgttgatgtaatttgtctgacatttcaaggtgttacctccctgtacccatttttgactctgtgtccctccaggtgttaccgtagtacaacgtagcaatcatgtgacacagctctaggttgtagggttcattagttgtgctctgagaaatcagaggatgttttttcgtaagttacccacatgaggaatttgagagaatcttcatgtgtgacactgatgcattcgcaattagaaagcttgtcctgagagaccttgatggggcttgaatgttaaatcgaaatttctgggagaatgaaaaaaaaaaaaaaaaaaaa

SEQ ID NO: 102216 - DNA, 621 bp, Oryza sativa
  Clone ID: PAT_MRT4530_99760C.1
atggcagccagttctgaccttggcagctacgccggcggcgcctccccggcgagctgcgcggcggtggacatggccatggcgccatggaggaagaagaggaagaaggagatgaagatcgggtcgcacgagagagtgtcatcaggtgggccttcttccactaggagccttctaggtggatgcaagcggtggagctgggaggccgagaaagagctcaaggcgacgaagggggcggcagagctcggggctgcggaagggacggcggaggagccaaggccggtgggcgggcgcggaggcggctgtgggcggcgggcgaggagccgaggctggtgcgggggccgaggcggctacgggcggcactcgttcggacggctagttgcggcggccggctacggaggaggaggcgcacgcactcggacggccgtcggccgaggcggtgctcgcccatgcggcgggcgaccgaggcggagctcgcccgggtgtccggcggcggcgaggcagagctgctcgggcactggcggcgacggcgggcggctgagacagaggcggagtgggcggccgacggcgaaggcggagctccctgggcagctgagacggaggcggagggggcagccggtagcgtag

SEQ ID NO: 102217 - DNA, 355 bp, Oryza sativa
  Clone ID: PAT_MRT4530_99761C.1
tcggtcgtcttcttcgcgggggcgctcatggcggacatggtggtcatcttcggtgcgcagctgttcgagtcggagatgatgttcatggacaggctgtgccagcggcaggtgctggacagaccgctggacgcgtgccggcaggtgctctaccggtagctcaccgcccgtgagaggtttcagccgatgttggcgacgacggtcgcgctctggctgtgagatgcagtgctgccagcagatgtaggacgtgagctgcctgtgcctgtgcaccgtcatccggcggatggtgaggtgctactaggagagcatgccgatgcccttgtagcacggctggtcgtcgtagtacctctggtactac

SEQ ID NO: 102218 - DNA, 684 bp, Oryza sativa
  Clone ID: PAT_MRT4530_99762C.1
atggtgaaactgcacggtgatgagaaggtgaagaacaatcaggcgaggttctcgtgcagttcagctgtgcaggatgtgatgggatgggacgaacccacttttaaaggtgtttggtttaggggtgagtgggatgggttggttcctggacaggaatattcctctcagatccggaaccaagccatccggaaaaatctcgtggacgagctcgtcccacctgggacgagcgcacggcgtgaggcgcgccgcttcgccacgctcgttcgctcgcaccgtcgcacgccactcgctcgcccctctcactcgcatcttgctcctccacccatcgtgagtgatgacgatggcggcagatccggtggtggggagggtggcggcagtgaatctgaaggcagggagggcggggagggctcgtcatcggtggcgaatccggaggcggggatggcggcggtggcgaatccggaggcggggagggcggtggtagcgaatctggtagcgaggagggctgcggcggtgtggagggctccgatggcggcgacagtgatggcgggcaagggtgagtgctccggccaccacttccgcatcgtcgttgcctctgactcgctcctccttccgcccgcgccgatggtagccgctcctccttccgcccgcgccgccggtcgcccctcctcattccgcctgcgccactag

SEQ ID NO: 102219 - DNA, 229 bp, Oryza sativa
  Clone ID: PAT_MRT4530_99763C.1
caaaactcgaaacaataggttgattgttatcttttaaatatacacatcaccaacacattcataatttaggcacacttaacctaacagccataccccaaaaacatctaactcgttagccacaaatgcatccaaccacaattaactactgctaagctacagtcccccacttcatttgccggggactaagttggtggcgtacgcccagtcggttgacgttgactaatacttc

SEQ ID NO: 102220 - DNA, 615 bp, Oryza sativa
  Clone ID: PAT_MRT4530_99764C.1
atgggtgttctggctggtacctggtaccttggataccggctggtctctaggtatcagaccttgggcgcccacgagaccaccacaaccacctccgtctcccccaccttcgccgggagagaccctcatgaccggggagtagggaggaagggatctaatgggtcaggcggcaagaacgggcatgtccgtgttcgtgcgaggaggcggggacggtttcgctcccgttcacgcggttgtcgccggcattcgtccttccccgccggtactcccgttccgcgcagccacggcttcgacctccaccgcccccaccgggcctccacctccggcgtcagcttcctttgcgcgccccaaggagctccaccgccactgggtgcccccgtcgcccgtcgcccatggccgccgtcggttcccccccccgacgccgcggccggcgccaagccgttgtcgtggctctccggcaccggatctggtggctcggtgtagaaactgaacggcggcggtgtcaagaatcggcagcggcgaggaggcgcttccaatggtgtggaatgaaatcctccaaatcgatcctggaagcggcgatggcaaaatcaatcttgctgtgcgctgttctatttcttt

SEQ ID NO: 102221 - DNA, 485 bp, Oryza sativa
  Clone ID: PAT_MRT4530_99765C.1
ttttgtgtggttttatttttttttttttttttctttttttttttttttttttttttcttttttcttttttttttttttgggcaagggacaaaaaccctaaattcatccccccccccaagggggccccaactgggcttaccgggcccccccacatttatccccacagaaacccggccaggggaccattttaaggcccggaaaattaacccaccagccgtaaaaccagcctcccccaatccctatctctaccaataaaacatacgaccctcaattcctctcccaaagtttacgccacccaccactatacatgagaccccataaacttggatcccccccatgcccatccccctcaatgatcccgtcaaaccccaccgctcggtccccaaacctttggtccccaccaactcacacgcatccccctctatgtaccgctgaattgcacaggttaacaaggctgcagaactgcccccgactgtttaaaatgt

SEQ ID NO: 102222 - DNA, 455 bp, Oryza sativa
  Clone ID: PAT_MRT4530_99766C.1
cccaagcgtccgactgcagttgacccagttactccatcatcaatccttgttgccattgctgccagttactgtttcctattccccactgcttcgtcccttttgactccaatactttggcacatcatggtcggaaaggtatgtggtgttagaagcttgatctagtcatcatcaatcggatcttgtaggatattgcgatgggaagcttattccaggctggaagttctttttatggagattatatcctcgattttaatgccaattgtgagagatgcgtcgtttcattgagtttttataaggacaatgatgaagataagaaagaaacatatttcgctactggtataatttttgcttcgggaaagagatcatgctgctgtttaacaacaatagatgatgctagtaaaaggaaagatgaatcatgtgtggtatattttttgatggaacttcaaaaattattg

SEQ ID NO: 102223 - DNA, 148 bp, Oryza sativa
  Clone ID: PAT_MRT4530_99767C.1
aaatggagctttttttttttcacaagtgtgatacacaggacacattaatcgtgttacagccgtgagtccagaacatatatttacataccaacacgaacaaaggcatgggtgctatgcactagacttaattgcaactgggaaaacctac

SEQ ID NO: 102224 - DNA, 147 bp, Oryza sativa
  Clone ID: PAT_MRT4530_99768C.1
atgatgttgtattcagagggatggagccgtcgctccaatcatgcctgcaatgctgtgtggggaatctctccccccgctaaaatatttaaagctcatatggaacggaaaattgtaaggtacctaagcagaaaaggcaatgagagatga

SEQ ID NO: 102225 - DNA, 1161 bp, Oryza sativa
  Clone ID: PAT_MRT4530_99769C.1
atgtacagaggctactacacgttggacacctttaggttcagagcccatgatgttaagaaggagaaagatcatggagtgagttactccttcatcttgtctaaattcaatcatgccaaacgtgtttgcttccgcagtgatagtgatgagagggtgaaggagctcaaggttgttgtaagcctagaaactatcattggagatgccaatgagttcataaaattatcgagcacatacccttgtctctcccgtcagccgcacagcatgtacttgcttctggacaagtgcatgtttggtcggcagatggagatggaatgtgttatcaacttcctgttgcatggagagatcacctatggcgctgaccatctgggcgtcctgcccatcatcggcccaggaaaagtgggcaagagcacccttgtcgagcatgcctgcatcgacgagcgagtgcgcagccacttctcgcaaattgtgttcttcagcaaagatggtcttacacatggaaacatagtgactctcaaagattgtggtacaaccaagcaccagaccgatgatgccctgggtggatcaaaaaggaggctagttgttgttgaactagacggtgagatcgaccagggtttatgggaaagattctactcggcttcgaagagttgcttcgcatatggaagtaagatcataatcacaagccgatctgacaagattgcgagcttcggaaccacgcagccacataaagtgcgtgcatttggaagctcagaccccacagagaaccccaagctggcatcattggtgatggacatggccagcgagaaaaacctaagtatttataacagcacaaatccacttgatccctgggcagtgatggcgtcactgtatatccctagggcaaataaaaatttggatccggttgcaattctcaataactatcagagaaactgtaacgaggctcacaattactctggcctgattacggcctctagtcctagtgcagcttcgcagataacggtgcaagatatcatgtttggaaccgctacgcctctagggcaattcaaggttcttgcgtggagatctcacataccaccatactacagttgtgtatttgactgtgagataaagaggccaccaacacgtatggtctctaggaagaagaagaccaagaagattggcatttga

SEQ ID NO: 102226 - DNA, 192 bp, Oryza sativa
  Clone ID: PAT_MRT4530_9976C.1
gagcaaatgctggtgactggtcatgcctggcatttcaagaactatgacaaacggccacaatttgcgaagtgggaaaaaatggcacgtgatgcacgacaagggctttgggcatatgataaccctgagaagccgtgggaatggagaaagaacaagcggaaggcatctgaacatcacaattcaggtgttcgttga

SEQ ID NO: 102227 - DNA, 536 bp, Oryza sativa
  Clone ID: PAT_MRT4530_99770C.1
cccaaacaaaacccccccttttttttttggataaaacaaaaaaaaccacccacaaatggcaaagcagcaggggaaaaaaaagggggggaaattagtggcagaaaggaaggaagggctagggggaagggccaaaaagggggccgaaaagaaaggggtcccaggggggggggagcccagggagcccccaggggatccagccggggaaggggcaagggccgccctgctgctccggggaaaaaagtttgccctgcccaagggggggccccaacgggggcccgcccttgaaaagccccaacgggcccgggaggcccaaaaatggcacccccccccgccgaatgaaccgaaaaaaaccgggccccacccggggaagcctcaagtccgcccggaggcccaccccccctgagggccggtaaacaaaggggggggtttccatggggcacttaaccgcccccgccgatccccccaaagcctccggaataaaggggtgggaaaacaggcccaaaaaaaaaaatgggtttggttggggtcaaaacccc

SEQ ID NO: 102228 - DNA, 325 bp, Oryza sativa
  Clone ID: PAT_MRT4530_99771C.1
gcagtaatagggtaatatatcatccagttacatacacaacaacaatgcatagcaaaaccttgggttctgaactatgcaaattgatctgaagaatgcaaatctttcatcacatgaaaacaagaataaagaaaacgtttacatcacaagcaaaaggctatacaagctcggatgaggctcctctgttctttcatgacaaactcttcgctgtcccaaactgacaaaggcttcagtacgtctgctatgcacactttagtgcagttcatcttcgctaaaacatcaacatttttggcaatggcatcagagagatttttcgaatgctttcggg

SEQ ID NO: 102229 - DNA, 1992 bp, Oryza sativa
  Clone ID: PAT_MRT4530_99772C.1
atgagcacggcctcggcgacggcgccgccgagccgccggacgcggagccgcccgccgtcggcgtcctcccgcaagtccgacgacccctccgccgccgccgccaacgggaacgggaaggcctcctccaagcccacctcccccggccagctgaccggggagaggacggtgaggaagctgaggctgtccaaggcgctgacgataccggaggggacgacggtgtcggaggcgtgcaggaggatggcggcgaggagggtcgacgccgtgctgctcaccgacgcgcagggcctcctctccggcatcgtcactgataaggatgtagctacaagggtggttgctgaggggctgcgggtggagcaaaccatcatgtccaagatcatgacaaggaaccccacatatgccatgtctgatacgcttgccattgaagcattgcagaagatggttcaaggtaaatttagacacctcccagttgtggaaaatggtgaggttattgctatgctggacattgctaaatgcctttacgatgcaatatcaagactggaaaaggcagcagaacaagggagtgcaatagcagctgctgtagaaggggtagagcgtcaattaggaggcaacttttcagctccttatgctttcatagaaactctaagagagaggatgttcaaaccttctttgtcaaccattgtcacggagggcacaaaggtagcaattgtttctccttcagacccagtgtatgtagcaacacagaaaatgcgtgaatttcgagttaattcggtggttgttgctacaggaaacacactacaggggatcttcacctcaaaggatttgcttatgcgtgttgttgcacagaatctttctcctgaattgaccctagtagaaaaggtgatgactgtaaacccagattttgctacattagacacgacaattcttgatgctctacatataatgcatgatggaaagttcttgcatattcctgttcttgatcgagaaggacaaattgctgcttgcttggatgtcctgcaacttacccacgcagccattcaattggtggttgaaggaggaaatgacactgtaaatgatgtggcaagtacagtaatgcagaggttttgggattctactcttgctttggagtctcctgatgaggaatgcgatagccgtagtgaagtatcattgctcttggcatcagaaactggagatggaaagagtagcatttacccccctgttattggaaattcgtttgcctttaagcttcaagaccaaaagggacgcgtgcatagattcacttgtggctcagagagcttaaacgagctagcgtcttctataaaacaaagattaagtattactgacgaagagggcataatgcaactcctgtacgaagacgatgaaggtgaccgggtgctactgacaactgatgccgatcttgctggtgccgtgctccatgccaaatcgtccggtttgaaggttctgaagttgcatatcgacctgtctgaatccagcacagaggtgacaaagccatcacagcagctggcagctgcacgcaggagtcggttgtcgcctgttcgtgttgggctgatggctggtgtggtcgctctcagcggtgcagcagtgatggtttacctgaaacgagctaaagtgtgatttccccatgaattactggtaatttttccaaacctgtattttttccagttcctggagctaattatgcatcatgccaaagaaatgacacattggagagcaaccaaagttgcatcagatgcactgaaactctctgacgccgggctgaagaatctgcctatgttggtttttgtttcctcaatttgcacgcatatcagcaaatttcactagtactgtgaaatgtataaacacttaggatgttcctagttcatatttatgtacttgtttacagataaacagatatgtaaactcattttgaaggacagaagtaaatagatccttctctcctatctggctttaagttccaaaaaaaaaaaaaaaaaa

SEQ ID NO: 102230 - DNA, 792 bp, Oryza sativa
  Clone ID: PAT_MRT4530_99773C.1
cttttctgggatgcatttctgaatatcactagtaattaccgagctgttaaccaattttatgacaaaggtatactgtacttgtatcagctgaatatatagaaaactgattggcactttgtagtgcctgagactcagagcagcttgctctgaaagattctgcaggtattttatgtccacgttgatctccatcgtcagattaagatcgatatcggataaagggacatatatataacaagctgtaggaagaaatcgctgaagcttggatagcagcggcttcggttggaacggttcgacggcggcgctcctcctcgggtgaacggcgacggctcgaacaggacgacgagctgatctccggctagggttcttgaggcgtattgaagaggaggttgagacgatgacgatggcgcagcggcttgctccgaggtggacgagaatggccggacgacgacgatggttgaagcggcggcgctccggtgcgtgctccagggcgtcgttggcgtggtcacgttccggtgggcgaaagagatagtggtgaccttgactcaaacggagatagcgatggtcgtcacctccatggccagtggtgaggtcgctggtgaaggagaggcagaggacctgctcccctcggcttcttcggctctgagtgatgagtgaggaatggcgactcagacatcgccggcaccgtgaaccctctgctgctgctgccgccggctgctgcaaggtgtgaagagcaacagcaccgctgaaggaagatgaagcaaggagcaaagcatgggcttcttccttcctcat

SEQ ID NO: 102231 - DNA, 155 bp, Oryza sativa
  Clone ID: PAT_MRT4530_99774C.1
aaagctgacaccctgcagacacctccccaaaatccccgtctcgacccacgcgcgctagtgagctagcgaaactgcaagctagctaagtggcatttttaaaaacgctcggtgcgtctaaaacttacaaggtatcatgtccactaacaatccgatca

SEQ ID NO: 102232 - DNA, 103 bp, Oryza sativa
  Clone ID: PAT_MRT4530_99775C.1
atggttagcggtgacgggttgcgggcgtcgcgggacgaggtggatcggcaggtgttcgtggtagtaggtcgtgttttggacgtcgtaggcatcgagggcaacg

SEQ ID NO: 102233 - DNA, 2346 bp, Oryza sativa
  Clone ID: PAT_MRT4530_99776C.1
atggacccacatccgccaccgctatcgtcgtcgtcccagtccctgccgcctcttccaccttccgcctcgctttccggcttccgctccacgccgcgtcactacgccacctccgccgagtgtggccagctcgagggctgcttcgcgcatggccaggaggtcatcgccaacgaggaggtcacctcgcaccggttcaccccgacgaggatgtcacacgcgtcgtccgtcaacgacagcgactgcatccggcgcaagagcatgaaccgcgccgacgcgctccgcaaccggagctacaactccgagggcaacatccagccgcgaaaccctaatcccccacttttcccgactcctctccttcccggcgccatcgcctcctccctcctcccgccgccggcgccgccgcctcgcctcgcctctcctcgctcatcggcgctagccatggccgggaagaagcgcaagtccgcctcctccgacaagcagccgaagcagcagcagcagcggctcccactcggcgccgacgccgacgcggtcgccgacgcggcgaagcgccgccgctcgggggcgtcgaagaagcaccaggcggaggaggaggcctccataccttcctccctcagcgccaagatcctccgcgaggcgctcacccagcaacaggaggagtccctcgccgaccagcgccccgccgccgccgccaccgccgctccgtccccatccttctccttccccgtgcccaagaaagatggcgaggaggacgaagacgatgatgacgtcgacgagttcgatggcttcgacgcgcagagcgagtacgacggaggcgtgccggagattgatgaggaggacgagaaggctctcgctgcattcatgtcaaaggacacctcttcgaagcgctcacttggtgatatcattctcgagaagatcagggaaaaggatgcagaaatctcaacagaaggacggactcctgtgaagttggactccagtattattgaactttataaaggggttggggagttcttgagccgatacacaagtgggaaaattcctaaaggattcaagcgtatcccatcattggaatgctggccagatgttctgcagctgactgagcctgaaaattggtctcctaacgcagtatatcaagcaacacggctcttctcttcaaacatgaacgcgaagaacgctgtgcgattctatgaagctattttacttcctcgtgtccgtaatgacataaggaagaacaagaggcttcattttgcactataccagtctctgaaaaaatgcctgtacaagcctgcagcgtttttcaagggaatattgttgccgctgtgtcaggaaaggaattgcactctgcgggaagctgtaattattggtagtatcatctcgaaagtctccattcctcctctccatgccagctactttattaagctatttcttgataagaaatatgctttgccatatcgtgttgttgatgcggtttttgctcatttcatgcggtttattgatgaggagagggtcatgcctgttatatggcatcaatcactcctagcctttgtggaaaggagaaatggccagcagtttgcagtggatttgaaaatcaggagccattcgtcactggacctcggtggcagcgagctccaaaatcaggcgctaccagatgaactggaatttgagaatagattgctacctaatgattatattgtgatttggatcaatggaggggacagggagacatgtggagaaggacttagagccatagaggatcatcgaggacgtccaagtcaaagtggaggcccaaaccaagtcgacttcgagtgcgattcagagtccatgaccagagccatccgtcagtggacctcggtggcagcgagctccaaaaatcaggcgctaccagatgaactcgtgaaacaaatcggtagctgcctcactgaacttcgcaatcagctacttgttcagccttgtaatgacgattggaaggtcggtaactcccacaacaagcgtcgttgcctaggctgcacccttgcacgcggcaactccgtcgacgcttccacgctgctccatcacctcggccgtcgcgcgaccccagcttctccacacctccttgttggaccacccaccccagtgcgccacacccgtgagaggagttcgggagccccgccgctgccatccttgcacccgctcgacttcgccgcgatcctcctcaagcttgataaagcaaaatcttttgattctgtcaactggccatatcttctcgaccgcttgagagatcttggttttggccaggtggataaattgggtcacctccattatagcaagcacgtcatccaagatgagaagggtgaactcgactactcaagttag

SEQ ID NO: 102234 - DNA, 1190 bp, Oryza sativa
  Clone ID: PAT_MRT4530_99777C.1
tctattagaagactctgtacttgcgctggtgtctgtaattgattattccatgtttgctcatgctgcagattattttgattctgttcttgactcaaggagcctgctcgagttcccgtgacggcaaaacatcgcctcctcaaggcctggatgctggggagaaggacatttaccttagccattcttgcattcatgatgaaatacttcatcagcggcgacgagcctggcggaaggagtactctgtcatgcctcaagtctaccatgaacgcagagagaacatggaacggctaagaggaagacacttgctgggggtgtcatcttggcatgcttcacagaagaatgtcaaaaagccaatacggatttatctcaactatgacgctgttgggcattcacctgacagggactgtaaaactgttggtgacattgttaagctcggggaacctcctgttccatcaataccaggaacacctgtctgtgatcctcatggagacccaccattggtgggagattgctggtacaattgcaccgttgaggatatagccggggaggacaagaagcaaaggcttcgaaaggcactgggacagacagtagagtggttcagaaaagccttagctgttgaacctgtcaaagggaaccttcggctcagtgggtactctgcttgtggtcaggatggaggtgtacagctcccccatgcatatattgaagatggcgttgccaatgctgatttagtactcctggtaacaactagaccaacaacaggtaacacccttgcatgggctgtggcctgtgaacgtgaccaatggggccgtgcaattgcaggacatgttaatgtggccccccgtcatttgaccgctgaagcagaaacgttactttcagccaccttgatacatgaggtcatgcatgttctaggctttgatcctcatgccttcacacattttcgtgatgaaaggaaacggaggcgtagtcaggtaacttctcaaattttggatgaaaagcttggaagaatggtcacacgtgctgtccttccacgggttaacgcccaaaacctgaattaatcctgttatgtttgaaatctcagccgattcaatttctttgtataaagcttcttaaagaagcaactcaattggatgtatatgcaaattttaggcaaaggcacaaaggcccctaagtttctgttgttaccatattgggcg

SEQ ID NO: 102235 - DNA, 496 bp, Oryza sativa
  Clone ID: PAT_MRT4530_99778C.1
ggccgtgcttgagcagcttgagggcgatccggcggtcgagctcggggtcgtaggcctcggcgacgacgcccatgccgccggcgccgagcgtgcggatcaccaggaagcggccgacccgcggcgggatcgcgggctcgccggtcgcgggctcgctgccggcggtgcgatcggcgtcgggctcgcgcgcgccgctgtgcgcggtgtcggcgagcgcgacgtcggcggacgcggccgtgcgatcgaggacgcggacggtggattgattggcggtcatgggccgatcgttcaggggagcatggtgcgccacacgacgccgtcgctgaactccttgtcgtcgcaggcggggatcgggcagcggtcgagcacctcgccgagctcgacgtggcgcggggtgtcgaggcagacggcgccgtggaggccccacttggcctcgagggccttctcggcgaacggcgggtagacggtgccggcggcgtcgcgccaggcgcctcgtgcc

SEQ ID NO: 102236 - DNA, 2910 bp, Oryza sativa
  Clone ID: PAT_MRT4530_99779C.1
atggccgggaagaagcgcaagtccgcctcctccgacaagcagccgaagcagcagcagcagcggctcccactcggcgccgacgccgacgcggtcgccgacgcggcgaagcgccgccgctcgggggcgtcgaagaagcaccaggcggaggaggaggcctccataccttcctccctcagcgccaagatcctccgcgaggcgctcacccagcaacaggaggagtccctcgccgaccagcgccccgccgccgccgccaccgccgctccgtccccatccttctccttccccgtgcccaagaaagatggcgaggaggacgaagacgatgatgacgtcgacgagttcgatggcttcgacgcgcagagcgagtacgacggaggcgtgccggagattgatgaggaggacgagaaggctctcgctgcattcatgtcaaaggacacctcttcgaagcgctcacttggtgatatcattctcgagaagatcagggaaaaggatgcagaaatctcaacagaaggacggactcctgtgaagttggactccagtattattgaactttataaaggggttggggagttcttgagccgatacacaagtgggaaaattcctaaaggattcaagctatatcaagcaacacggctcttctcttcaaacatgaacgcgaagaacgctgtgcgattctatgaagctattttacttcctcgtgtccgtaatgacataaggaagaacaagaggcttcattttgcactataccagtctctgaaaaaatgcctgtacaagcctgcagcgtttttcaagggaatattgttgccgctgtgtcaggaaaggaattgcactctgcgggaagctgtaattattggtagtatcatctcgaaagtctccattcctcctctccatgccagtgcagctttaatgaaactagcagagatggagtactgtggcacaactagctactttattaagctatttcttgataagaaatatgctttgccatatcgtgttgttgatgcggtttttgctcatttcatgcggtttattgatgaggagagggtcatgcctgttatatggcatcaatcactcctagcctttgtggaaagatacaagaatgaattagagaaaaaggacaaggagaaacttgcacgcttgttggatcaccagaagcactatttggttactccagaaattcgtagggaacttcggatgagctgcaacagggtttctgtgatcacgaaaccaattgaagaagacaggtggaatgttccggaagtacctatggaggagagaaatggccagcagtttgcagtggatttgaaaatcaggagccattcgtcactggacctcggtggcagcgagctccaaaatcaggcgctaccagatgaactggtgaaacaaatcggaagctaccccactgaatttcgcaatcagctacttgttcaggtcggtaactcccacaacaggcgtcgttgcctaggtagcaccctcgcacgtggcacctccattgacgcttccgcgctgctccatcgcctcggccgtcacgcgaccccaacttctccacatctcctcggaccggccttcaacatgatcggggtttacgccaaggcgaccccctctctctctcatgttactcatccttgcgatagacctgctgcaaaagcttttatctgcagcccaacaaacatgtattctacagcaacgcgctacaaggatgatcaggaatctagtaaagtctatgcaatcaggtgcgactaccacaatcagtccaacaaaaaacttttcctagctcctacctcggacttccgctacacattaggaaactttatcttggcgactaaggtggctctgcttttcagggcatcgacgatcatcactctaggtaatggagatttggagccatacttgggagaagaagatgagcttgagtcgaggacgagttcagttcaagaggaggaggatgatgcggacatcactctttcggatacacacaacaatcctccaacggaatttgagaatagattgctacctaatgattatattgtgatttggatcaatggaggggacagggagacatgtggagaaggacttagagccatagaggatcatcgaggacgtccaagtcaaagtggaggcccaaaccaagtcgacttcgagtgcgattcagagtccatgaccagaattagttttctcggcccatacgagctgagccggagcagagcgtgtccttatccagagcgtttttttcttttccgccactcacctatccgtgcactctcctctctttcttcttcctccattctcttgcaaacccccactcccgtgcctccttcccactctctcccggcggcgccctctattgtgccgttctactccccctccccttctcctcttcatcaggctgcggcagagatccgacagcggcacagaggctgggcgaggtggcgggcggtggtggtgtcgagtaggctcgctgaccccctctgtttcttggccctgccccgcgccatcctccttcccttctcctcctcatccgatggatccatttcggtggacgggcgcttacggtgccagcggtcgccggggggaacggtgacgacggcggtcgtgcctctggctgcagcgtacacgacagtcagcaacggtcattgctggggtggcgactacgtcgccttcttttctgatgagagagaaattgaccagcagtctgcagtggatttgccgatttggaaagcaggagccatccgtcagtggacctcggtggcagcgagctccaaaaatcaggcgctaccagatgaactcgtgaaacaaatcgttgaaaagaagatgaagctgcttgctcgattgtcccttgcttatccaggcatgatggacttgcggtggcgagatgaacaagagagatgggaggaggaagaaacggggatctaa

SEQ ID NO: 102237 - DNA, 425 bp, Oryza sativa
  Clone ID: PAT_MRT4530_9977C.1
ggggaaccaaaaatccacattattgggcaaacaaaggaaaacaaaaggcccaggatttttgtataaggaccggaaggaaaaaaaagggtttttttagggagggaaaaaaaaaaaccatttttttaaaaccaaaagccgggatggcccccccaaaagttttagtttcaaaaaggcccaagaggggaaaaacggaaacccccccccaaaacggggaaaaaaagggccaccccttaaagggggggggagcaaaaaaaaaaactctttcaaataattttcaaaagactttaacccccaaaaaagaaaggaggggccggcccctaattcccgggaaaaaactggaaagcttggaaaaaggaggcccggggaaaaccaaagtccaccaatttggggactttgggttaaaaaacccccccccccgggggggg

SEQ ID NO: 102238 - DNA, 697 bp, Oryza sativa
  Clone ID: PAT_MRT4530_99780C.1
caaggatcgtgcgccggtgtccaagaaggggctcgcccacccggcgccatcgcctcctccctcctcccgccgccggcgccgccgcctcgcctcgcctctcctcgctcatcggcgctagccatggccgggaagaagcgcaagtccgcctcctccgacaagcagccgaagcagcagcagcagcggctcccactcggcgccgacgccgacgcggtcgccgacgcggcgaagcgccgccgctcgggggcgtcgaagaagcaccaggcggaggaggaggcctccataccttcctccctcagcgccaagatcctccgcgaggcgctcacccagcaacaggaggagtccctcgccgaccagcgccccgccgccgccgccaccgccgctccgtccccatccttctccttccccgtgcccaagaaagatggcgaggaggacgaagacgatgatgacgtcgacgagttcgatggcttcgacgcgcagagcgagtacgacggaggcgtgccggagattgatgaggaggacgagaaggctctcgctgcattcatgtcaaaggacacctcttcgaagcgctcacttggtgatatcattctcgagaagatcagggaaaaggatgcagaaatctcaacagaaggacggactcctgtgaagctggactccagcattattgaactctagaaaggggctgggggagttcttgagc

SEQ ID NO: 102239 - DNA, 1156 bp, Oryza sativa
  unsure (1)..(1156): unsure at all n locations
  Clone ID: PAT_MRT4530_99781C.1
tattgaactttataaaggggttggggagttcttggagccgatacacaagtgggaaaattcctaaaggattcaagcgtatcccatcattggaatgctggccagatgttctgcagctgactgagcctgaaaattggtctcctaacgcagtatatcaagcaacacggctcttctcttcaaacatgaacgcgaagaacgctgtgcgattctatgaagctattttacttcctcgtgtccgtaatgacataaggaagaacaagaggcttcattttgcactataccagtctctgaaaaaatgcctgtacaagcctgcagcgtttttcaagggaatattgttgccgcttgtgtcaggaaaggaattgcactctgcgggaagctgtaattattggtagtatcatctcgaaagtctccattcctcctctccatgccagtgcagctttaatgaaactagcagagatggagtactgtggcacaactagctactntattaagctatttcttgataagaaatatgctctgccatatcgagttgttgatgcggtttttgctcatttcatgcggtttattgatgagaagagggtcatgcctgttatatggcatcaatgcactcctagccctttgtggaaagatacaagaatgaattagagaaaaggacaaggagaaacttgcacgcttgttggatcacccagaagcactatttggttactccagaaattcgtagggaacttcggatgagctgcaacaggggtgaaaaggacacaatcatgtcgatatgctccccagtttctgtgatcccgaaaccaattgaagaagacaggtggaatgttccggaagtacctatggaggagtaatcgtttgattcttaatactggtggggaggggcaattttccgtaccagtgttgtagttttgcttgccgaatgaacttttcaagaggtatttcagttctatgcagcaatggatcgatgccagcaagggaagttgtaatgcaaatttttgatcagtttggaaatgtatctgatagtaacagagtattcagcgtgtagctgtaatatacgtcaccagaattgtagtgttttgtacacaaattgtctttagttttcaaatataccatcacaattcccaaatttaaaccgtgcccattacaaaaaaaaaaaaaa

SEQ ID NO: 102240 - DNA, 500 bp, Oryza sativa
  unsure (1)..(500): unsure at all n locations
  Clone ID: PAT_MRT4530_99782C.1
tgttcctctcccacaccgccggccgcgtcgcccctcccctccgcctccgccgctgccgccgccgcctccctgcggccccagtttccgtttcccaagcgagtgtcccaagccgcgttgagggagcgggcggcgctccccccgtcgcccggcgcgtggcatcccgcccggccgcccgcccggatccggccggggcctcccaccgcgggggacggagcgcgtcctccgccgccgtcgccgccgccgccatttccggtggtcgacttcgccctgaccgagggagacggtctcgtccctctcttgtctgctgcagcttcctagctcctgggctgcctccccccgcggcttctcgggcgccgcgatgtcggagggcaggngaggtaacggcgcgcgagtgatggtccgggaggcggcctgcaacgccatcgcgggcggttcggctggtgtgatctccgcacggtgctgtgcccgtggacgtgatcaagacgcggctgcaggtgtac

SEQ ID NO: 102241 - DNA, 804 bp, Oryza sativa
  Clone ID: PAT_MRT4530_99783C.1
atggagagaacggcgtcactcgctccagccacctcccgctcggttctgtcgtggcgccgcccgtaccctgccgccgctcgtcccccagcgccgctcctccgcctggacgccggtcgtctacctcgacgtcggtcgcgctcctccgcctggacgccggtcgtctacctcaacgtcggtcgccgccgctactccgcacgctgctcctccgccgagtcgccgccggtgaagctgcgcatgctcgtgcccgctgaatcgcctatcggcgacgctccttcgcccgctcgccgagtcgccgtccgctcgccgagtcgcgccgcccactcgcgaagctctgcgtgctcgcccctgccgagtcgcttgccggcgctgctccttcgccggcccgccgagtcaccggctcctctacctgctcgctgccgtcctgctcgtcgaggcgagctccttcgtcggcctgctcctccgtccgggctcagcagcggcggatccggggatggggagtgctgcggcggcggatccggagatggggagggctgcggcgacggatccggcctctccctctccgccgcggacctcgccgatgccgtcgtcgccgagccacggctgctcgcagtgaaggccgacaccattgcccgccgcagatcggcagctccctcctgtctggcggcgcgacgcatctcggtggtggagagggaggtgagggcagaggcggaggtggccatggttattgcaaacggcgtcgtcagtggttgcaaacggaatggtttcatcccatcccaccttgtcctagaaccaaacacacgctag

SEQ ID NO: 102242 - DNA, 309 bp, Oryza sativa
  Clone ID: PAT_MRT4530_99784C.1
atggcgaagatggatggagtgaagaggagacgcggcgaggaggggagctcgaaaataaaaacgaaattcccaaggcaaaaattctataggatatcccccttcgggttctcgcagagcgatatccccttcggcaaaaatatggaggatatccccttcgggttctcgcagagcgatatccccttcggcaaaaatatggagggatctagcgttgtctctgatctcgccgggcacggattcgaggaggaaaactaccatgttgtcgactacgagtcagaccttcagatcgccatgtcgataacagttagatag

SEQ ID NO: 102243 - DNA, 289 bp, Oryza sativa
  Clone ID: PAT_MRT4530_99785C.1
atgaaatgccacttcgcctctccgaacagcactcatggactgcaacagcctgatagtcgctggtttccgctcggaatcgccgcgtggtggttccaaaagcttgcatgccgccgcatcggtccatatccggcgactccttctgccggtcgctgtcgtgatccgctcgatacactcaccataagaactgcacggcagccgcgcggggatggcgacctccaccgtgggtgcacctcccccgtcatcgctagttcctcacacccacgactgcaagagcagctcggatctgccc

SEQ ID NO: 102244 - DNA, 300 bp, Oryza sativa
  Clone ID: PAT_MRT4530_99786C.1
gctgatgagcatatactcgcattagatgctcttaattatttgcattgatctacctcttgtgcatgacaaggtactagtagtacggaatacacatggctggcaccaaaaggggggccccatgtgggaaaaacgaagaagggcgacaggtgaacacctaaacaggattatggcacaacagtggccagacagccatgagacactatcgttcgtagtggataaattagctatatgcgcttctgcaatgtggacaccatttcccagcacctgtgttggcgtagaatacacgatcgatcagtgtta

SEQ ID NO: 102245 - DNA, 135 bp, Oryza sativa
  Clone ID: PAT_MRT4530_99787C.1
taatgaagttcttgtttcttagagaactttgggttttctttagataacagtaaagaaagggctcctttcgcaatcttcatgtaaggggagggttcagtaccacgttccgatctttctttcttctccacttctact

SEQ ID NO: 102246 - DNA, 844 bp, Oryza sativa
  Clone ID: PAT_MRT4530_99788C.1
atgggttctaatgttgagattgaggattgtgtcaccatggcacaattcaatgagatgaagcaaagcatggaggcactaacagccaatgttcaagcacttatgaatcgattgccagagcctcctcctgaagatgcaaatgcaagtcaccatggagaagaagatgaagaatccgaaggagaagctgctgctcgccttgcaagagaacaacgaagaagacggagagatcgtgttgttgcaaatgcaagaagacctccacatcctggtcgtggaaatggtggtagaggtgctgatcgtggaagagaacatggactagaagaaagtgggactgacgaagaggttgaacagcctcatcgtgatgatcgtcgtcaccgaggaaatcgtgggcgaaatcagcccaatgaagagagatttggcaaattaaaattcaccatgcccaagtttgaaggaggatctgatcctgaagtctatcttacatgggagttgaaggtggataaaatctttcgtttgcataattattctgagcggaagaaagttgccggggctgctctagagtttgatggctatgctctaatctggtgggagcaaatgctaaatgaaagagaagaagctggccaaggcgatgtgcgttcatgggctgaaatgaagagagaaatgagggcaagatttgtccctaaacattatcgccgtgatctttttgacaagctgcagaatttgaagcaaggaagcctcagtgttgatgaatattataaagagatggagaaggcaatgattagagccaatgtttatgaagatgaagagcaatcaattgcacgttttatgtcaggactgcaccgcaacattcagc

SEQ ID NO: 102247 - DNA, 369 bp, Oryza sativa
  unsure (1)..(369): unsure at all n locations
  Clone ID: PAT_MRT4530_99789C.1
actattaggacgagatgggtcaccctacgnaggccggcgcggggctgacaaccactagcacgggagaggctccactaccaaatggaccgcagcacccgcattctaaaacctatccacggcgagcctcccgagcaaaaccatacacaagaggcccttcgatgaccacgcaggataactaaagcgaacagcgacccagtaacaaatgcacgactgaacaaaaatgcagtatgccagcaaccacataaagggaacatttaacgctggctaccgccaagggcgccctctaatactaccacacgattactgagactaaagaaagccagatgaatggatcataccccaaagccgataagacaaccccaaatgcca

SEQ ID NO: 102248 - DNA, 795 bp, Oryza sativa
  Clone ID: PAT_MRT4530_9978C.1
atggggaggacgccgtgctgcgacagggaggcggtgaagaggggcccgtggtcgccggaggaggacgacgcgctgcgcgactacatcaaccgccacggcaccgccggcaactggatctccctccccaacaaggccgggttgaggaggtgcggcaagagctgcaggctgcggtggctcaactacctccgccccgacatccgccatggcgccttcaccgacgaggaggacgccatcatcacctccctctactccaagctcggcagcaagtggtcgaccatcgcggcgcagctggagaggaggacggacaacgacgtcaagaaccactggaacaccaagctcaagcgccgcctcgccgccgccgccgcctgcacgcccttactgccgctcccggcgccgccgcccctcgccgccacgcacacgtcgccgtcgtcgtcgctgctgctcctcccgccgctcgccgtaccgaccgtcaagaccgaggcgtacacctgcgacgacttcctgcagcagctgctgccgaccgccaccgccgccacggcgctccgggatcccttcgccgacggcgccgccacggacggcggctcgacgtccgcctccgccgcgtcgtcggggtccaactggtcggcggacaccggcgtcgtcgtcgtcggtggcggcggcggcggcgggctgttcccggaattctgcatgagctccgacgacctcgccggcgccgccacggcggaggacgaccacttcatcggcggcggctactactaccctctcgatccgagcttgtcatcatcactagtgtag

SEQ ID NO: 102249 - DNA, 2741 bp, Oryza sativa
  Clone ID: PAT_MRT4530_99790C.1
cgagacttgtgtagagttcagataagcggacagaatcttcttctgattctgataagacaagcagaaagttcgaagcttggtttggtctcacggtgaactcaatgtcgttgcctaagccgcattgcaaagtttcccgaggttgatggaagctgacgaatccggtgtaccgccgcggccggtcgccggagatgttcacatcccggcgagccgctctgccaaggagccaatcttcatggagcggcacggcggcgacctgctcaccgccatggcgtcctccccggacaccacgctggcgttccacgcggctcgcccggtgtccatcagcctgccggcgtcgccgaccgggttcgacgtcgccaggtccggggtggagctccagcgtcacgccatgacggacgccccgtgcatgctgccgctgcccgggtggccggcgatgatggccgtcgcgcagcccgacaggatgatcttccgctcacagccgatcgccgtcctcggcggcgcggccgctctgccccagcagagcagaagctcccaggtgcacgacggcacgagccgcgatggcgcgccgcgcgcggcggcggcggcggcgacgacgacgggcaaggcgcgcgggcgcagggacacgagctacgactcgttcaagacgtggtcagggaagctggagaagcagatcaccacccacctgagaggcggccggcaacagcagcagcagcaacagccagagcagcggcggcaggatgaggaacccgaggacgacgacgcggcggcggcggcggcggcggcggcgacgacggcgagcagcagccggtcgtactcgtcgatgccgagagtacagcgcttcttcgcggcgctggaaggccccgagcttgacaaactacgggtacaccatgagcaaccctctccctgtcgtctcgcattggtcgaacagttggcatgcaccctagtacgtagtcgctcacaacgcgccgccgtggtggtggtgttggtgtcgtgtcgtcggcagtcgtcggaggcgctggtcctgccgtcggacaagacgtggccgttcctgctccggttcccggtgtcggcgttcggcatgtgcatgggcatgagcagccaggcgatcctgtggaagaacatcgccatctcgacgtcgacgaggttcctgcacatcaccgtcaagatcaacctcgtgctctggtgcgtctccgtggcgctcatgtgcgccgtgtcggcgctgtacgcgtgcaaggtcgccttctacttcgaggccgtccggcgggagtactaccacccggtgcgcgtcaacttcttcttcgcgccgtggatcgcctgcctcttcctcgccatcggcgtgccgccgatggtggcggcgagcctcccgcactggctgtggtacctgctcatggcgccgatcgtgtgcctggagctcaagatctacgggcagtggatctccggtggccagcggcggctgtcgagggtggcgaacccgtccaaccacctgtccatcgtcggcaacttcgtcggcgcgctgctcggcgctaccatgggcctccgcgagggccccatcttcttcttcgccgtcgggctcgcccactacatcgtgctgttcgtcacgctgtaccagcggctccccaccagcgagacgctcccgcgcgacctccaccccgtcttcttcctcttcgtcgccgcccccagcgtcgcctgcctcgcctgggccaggatcaccggcgagttcggctacggctcccgcgtcgcctacttcatcgccatgttcctctacgcctcgctggcggtgaggatcaacctgttcagggggttcaggttctcgctggcgtggtgggcgtacacgttctcgatgacgagcgcggcgatcgcgtcgatccggtactcgtcggaggtgaagaacgcgttcacgcagtcgctctgcatcgcgctgtccgtgctggcgacgctcacggtcacggcgctgttcctcaccacgctgctgcacgccgccgtccaccgcgacctcttccccaacgacatctccatcgccatcaccgagcgcaagctcaagcccatcgccgagatccacgagcagcagcagcagcagcgcgacaagaacgccaccaccgccgccgacatccaccccgactcagcctgcattaaggacctcgaagccggcgtgccgccgccgccgtcgtacgccggcgatcgatcgacgacgacgacgtcgacggacccgtgcccgctcggcgccgggcagttctgaccgtgcgatcgatcgatggttcttcagacagcgacgtggacgtgcatgtcagtgtaattaattagcttaattaatttgctgtagctactcgtatcgtatgcgtacgtggcgatgtagataggagattgagtcgttgacgacttgggataaggctaagctagcgccagtaataagtccatctgtctcagcctctcagaagcatatgcaccatgcagtgtacaatggttcgatattgtggtcatccccggtagatcgtggcgtactggcgtgagtatgatgaagtactaccaacgtctcccattgttgtagacttgtagtacagtacacttgcgactttgccaaaaagacaggccgactcatccagcttgatctcctgatgatccattgatcggtcttgacgacgatggatagaaaggaagctcgaggcgttgatgctgtgcagcgagtaggggcagggatggttgccgaagcttttgaccaacacgtgaagaaaccggcggttcat

SEQ ID NO: 102250 - DNA, 571 bp, Oryza sativa
  Clone ID: PAT_MRT4530_99791C.1
gtgtagagttcagataagcggacagaatcttcttctgattctgataagacaagcagaaagttcgaagcttggtttggtctcacggtgaactcaatgtcgttgcctaagccgcattgcaaagtgtgccctcgtttcccgaggttgatggaagctgacgaatccggtgtaccgccgcggccggtcgccgaagatgttcacatcccggcaagccgcttctgccaaggagccaatcttcatggtaagtttcgggccgtcttcatggttaacgcagatcacctgatcggagcacgagtatgaacagtcgcgtgccggtgtaggagcggcacggcggcgacctgctcaccgccatggcgtcctccccggacaccacgctggcgttccacgcggctcgcccggtgtccatcagcctgccggcgtcgccgaccgggttcgacgtcgccaggtccggggtggagctccagcgtcacgccatgacggacgccccgtgcatgctgccgctgcccgggtggccggcgatgatggccgtcgcgcagcccgacaggatgatcttccgctcacagccgatcgccgt

SEQ ID NO: 102251 - DNA, 434 bp, Oryza sativa
  Clone ID: PAT_MRT4530_99792C.1
gccggcccagcccagcccgcaactcctcaccttcttcctccttgagccagcctcatccacgcacacaaggtgttcgacagaatgccgacccaagacgccgcaccgttttcgtgtcgtggcagcgccgcgtcgcactcccgtgcaccgcgtgtcgtgccaagaccacctccgcaccaagccgaggccgcgccacaccaaaatcgcgtcgcgccaagccgtcctcgccccggtttaagtctgcggagtggagcaatagaggacgtcgccagccgaagatgggctggtttgggccagcccatggttcggccgaaccagggggttcggccaaacccccatctccaccgttgaggccagggtttggcatggacgtccaagattgcaccccaatgacggttggagggtacttcagacaattcctcttccacaaccgtcat

SEQ ID NO: 102252 - DNA, 493 bp, Oryza sativa
  Clone ID: PAT_MRT4530_99793C.1
aaaaagggaaaaaaaaaacccttgcccaggggggggaaaaattaccaccgcggaggccaaaacccaaatcccccggtcggggggaacaaaatcccccccccccggggggggggggccccaaacaaaaaaaaatgccaaaaagatcgggaaacaccggggaaaaaaccatagggggttttttttatgaacaacgggaaaccctgggaaaccccccatttaggcaaattttttgggaggttttttttttgagcccaggggggccatcccccggaaaaaaaagggtctcgaggcaaaaaatccgggggcccttatacccaacaagaaaaaaaggggggggggggggaagaaaaacaagcctaaaaattttgccccggggggggggggggcaaacgggttggggggccttggctgccaaaaaaaccaccattcacggccccatttttataaggggggccccgggggggaacactttttgaccctggttcattggggg

SEQ ID NO: 102253 - DNA, 186 bp, Oryza sativa
  Clone ID: PAT_MRT4530_99794C.1
atgggcggagatctggtcaggaacgaaatcgcctggggatcgccttatgcgtcggggagatcgtcggagagagagaacaaaatcgaagcgaagtcgaaggcagagatcgagttcggaaacagagcaggaatcggctggagtccagatcagctacgattaggatcggctgagtctgagtcggactag

SEQ ID NO: 102254 - DNA, 1777 bp, Oryza sativa
  Clone ID: PAT_MRT4530_99795C.1
gaactagtctcgagttttttttttttttttttgctgaagaatattttcacttgaaagttcatgcaatacaacagcggctcctgctcctcttcttttcttttccttttgttttttttttttttttttagagcaaagcatcagattgcaactaactcgaaagtcacaaaaacatgatgccccaagcaatcaataatcaacatcttacaaaagtgggcaaaggtctttaatccgcaaaaaagactaataaatcattcccccttctccatggccaaaaacagcatccaatctcgcaaaagtggagaaaacaaaaacaaaaaaagaaagaaaacaaatctcatctcagttatttaggactattgtcttcttcctcctccatagaaatactcatgtggaacgaccatttcgttcaacagcctagcgcaaattgtccaccgcctcgtcgaaaagcatctcctggtaccggcactcactgctgcagaatgctttatcacctcggtagatgaagatgtcattgccatgtccaagctgcttgttgcatgcgtagcaagagttcaggaacccattggttcgcaccgcgtcgccgtcgccgtcgccgccgccgccggccaccttctccacgagcacatcgccgcagctctcgacgatgcagtcgtcgaagatgtgggtggtcctcgggttggggccgcgggagatgacgcaggtgtagtcctccgacatggccatctccccgggcgacaccacggcggcgggcgaacacccgcgcggacggcgagctgaccacctccggcaggaacctcctcgccggcgacatcgccgccaagtgggcgtcccggttcttgacgccgaactcgatcggggaggacaccagctcgacggccctccccgtgggcacctggattctgagctgcgacccgaacaccaccttgccgccgccggccttgccgcccccgtggtgctcccggagcacgtcggcgaggccgacgccggccggctccggcggtgcggcggccatctccacgtgggccttcctgaggctcctctccgacaggaacggcggcatggcggacgagcagcagaactgcttggtctcaagaatggaggtggggctcatcgacgacgagggcccctcggcggcgccgtccaagaacccagcctgcggcgggtgcgggagcgccatgaacggcctcggggaagggaacacgggagaagaggaggaagacgacgacgaagattgcgatgacggcggcggcggctcaggctgcgccatggcggtgacgcctccttgcttggcaccgactgatctcctcgatctgttgcgaagcatatcgcctcctcggaatcccagaaagcagcagcagcaacaatagctgcttcttcttcttcttcttcttcctcctccagcacattacctcagaaaaaccacgatttccatgtccatttctctccctctccacacgctcacgtacgcacaaaactgatcgatcgattaattgattggcacgttgtgatgatcgagtaaatggggggggggtggggaaggtggacagcgagattgcgagaacgacaaagcggtggaataaaaagagaacgagaggggaagaaaaaaaaaacttccgaaaaagaggccaaaattttcaccggaaaccgccttctcttctcctttgcggttcttgcgtggtggtggtggtggtgggtgggtacttatgcgagtgggagtgatggagctctctctatctttctctctcttgagtcccgggggaaacgggaagaactgttc

SEQ ID NO: 102255 - DNA, 528 bp, Oryza sativa
  Clone ID: PAT_MRT4530_99796C.1
atgacgagtcccggcgcggctgaggaggagaagatggggttaagcagagagaagacagaagaggtgaggcggagggcgtgggctcaccgtggcggtgacgacgagtcactgcgcggcggcggcgtcctggcggtggcggggaggggggtggacgacgaggacccggcggcggcgactgccgaggtggaggcgcggccggccgaggtggaggcggcgtcgacgacgaggaaccggcggaggaagaggaggtcccggcggcggtcttggcggcggcggcggtgggaggaggaggcggcggcggcggcagagaagaggagccggcgggcgagtcccggtggcggcgacaactcccgaggtggaggaaggaggagccgggggagaggtagagctcaatctagcggcggcggtggtggagacggcgggtcgatcgaggaggaggtggcggagaggaggaggatgcggcggccgtcagtcggagaggagctggatctagcggcggcggtggagaggaggcgcgaatggatctag

SEQ ID NO: 102256 - DNA, 600 bp, Oryza sativa
  Clone ID: PAT_MRT4530_99797C.1
atggatccggcggcttcaggcaacgatgttgcagggaccgtcggctccacaaccaccttcctcaggagtggtgaaccgtcatcgctggcctccgctgatgatgatagatctgacggcgaggagatccagggcggtggattcggtggcttctggtgggtggcggggctgggaggcaacgatggactacagcgccccaaatccccacaaatcctccaatcccagcaacccctcgacaagtatggcggagcgccgagcagcaacgccgatgacagggtgcgaccgcggggacggcaggtattgagcccgctcccgagcgaactcgccaactaccagttcctcaactcgctcatgctctccgagaagtccttcttcgaccaggactttgagtccctctgcgcccacgcggggccgagcgcggcggggttgcacgtcagccagtccctaattaagaaggccaccatcgtcactggcaatggcgaggagggaggagggcgcggaaggcctagcttggcttatcttggtcacattattagtgctgaagggtttccaacttatcctgagaagatacaagttgttaaagaatggccaactcatgtttaa

SEQ ID NO: 102257 - DNA, 180 bp, Oryza sativa
  unsure (1)..(180): unsure at all n locations
  Clone ID: PAT_MRT4530_99798C.1
cgtccgaatcccggtcgccccgcgtccgaggtggcttcggggaggcaagggtggaggcttcggtggtggcttcggagaggcaaaggcggaggagttgcggcgggcggcggaggattcggtggcggcggtggcgctggacaggaggcggttcggcggaggcaagggaggtggtttnngtgg

SEQ ID NO: 102258 - DNA, 615 bp, Oryza sativa
  Clone ID: PAT_MRT4530_99799C.1
ctaggccttggcagcccagtcagccgagccggcggccttccttgaggatgccgaatcatcatactggcatgtagcgtccttgcgaccacgagggcgcgtcttcaagcggcacggatggtggcagtaatcggcggtgacgccactccatggcaggccatcgccgacaacctcctttacgtcatttcgtcgaccatagggcgggatcggctcggcctcgccgctgggcctagcgatggtgccgtcgctgttggcgccctcaacggagtcagagaagacgacggtgagttccacttcgatggcgacacaacacggcgacggttggagcagagccagccggcgtatggcggcgcgattcactagcgcgacgggtgggcgcggcattcgcttgtcgtgatggcgcagatcgcgccgggtccgcgagttcaagtcgaagttgggggcgatttcttttggcgtggcccaacttctcttctcgcggacggcgctcctcacgcgcatgttgttggaggcagcgctatctacgggaggagcaagggtttctcctcttttctcctcatctgggcaatttaaatgggctagactggtgggctgggcttcgatctgcagctgatccat

SEQ ID NO: 102259 - DNA, 971 bp, Oryza sativa
  unsure (1)..(971): unsure at all n locations
  Clone ID: PAT_MRT4530_9979C.1
acattttttgtcattcgtcaagttcttgtccgtagagagcttgatctttctgccaaagagttgcaggaacaagtgagaagtggtgatgcaagtgctactgagtattttgagcttggagcagtcatgctacggagaaaattttaccctgctgctatcaaatatctacagcaagcaatccaaaaatgggatagggatgagcaagatcttgcacaggtatacaatgccctgggagtcagctacaagcgagataacaaacttgacaagtcgatccagcaatttgagaaggctgttgagcttcagccaggctatgtgacagcttggaacaacctcggggacgcatatgagcaaaagaaagatctgaagtctgcgctcaaggcattcgaggaggtactcctatttgatccaaacaacacggtcgccaggccacgccgagatgacctaaagcagcgtgtgggcatgtacaagggagtcccagtgaagtcagaaaaacgataggtcctgtgagtatgtgttaaggggggcgcgcttgtgtgtgttagtgtggtgtgcatttgtgcataattgtgcgcgcaacatgtaattggggaaaagtagaaaagcagtaggctcagatctcaaatttgtgcaaaatctttgtttcctcaattttgaacggtagtatatgttttaattagcaacggctagctgcgtaggataactaaggatgtacatggttgacaagcctaacattattactacgttcatttatcaacaatcgcatggatttaagagtttgcacangacaaaaaaaaaaaaaaaaaaaaaaaaaaaaaaaaaaaaaaaaaaaaaaaaaaaaaaaaaaaaaaaaaaaaataaaaaaaaaataaaatataaataaaattattatataataaaaaaaaaaaataaaattaaaaattttaaataatataatattggggggggggctttaaagggatcaaatttttcgcccc

SEQ ID NO: 102260 - DNA, 421 bp, Oryza sativa
  Clone ID: PAT_MRT4530_997C.1
atactaagaaaactctgggggctctatccccagacaaataatgtatattcttctcctccgatttacacactcaaaaactttacctgacgcctaataacatgtaaacggtgttcataccttaaatttattgaaacgcaacaacatacgaaagctcatgatgtggcaacttcaaaccttgcaccagtttcagaatctaaatttaaccaccaccaaaaccaaactttttaccaaagacgaccacctgcagcttgacatatccagaaagcacacaagcttcaggcagacaggtcgctataatgttatcacccacgcccttgaataattacttcctaccctccttctcaacaatttgctttaacgcattcaaggagctcttgtacttgacagccttaccacccacgcgttcgtccacgccttcgca

SEQ ID NO: 102261 - DNA, 244 bp, Oryza sativa
  Clone ID: PAT_MRT4530_99800C.1
cccacgcgtccgcccacgcgttcgctaattttgtacagtaaccagcaagaacaaagaggagtggtcggagtgggcgggggagatgagctcgtcggcggcgtcgactaggttcatcaagtgcgtcaccgtgggggacggcgcggtggggaagacgcgcatgctcatctgttactcctgcaacaagtttctcaccgattacattcttactttgttctacatcttcagcgccaatgtctccgtggac

SEQ ID NO: 102262 - DNA, 1194 bp, Oryza sativa
  Clone ID: PAT_MRT4530_99801C.1
atggcgactcgggagggaggaggacgaggaggagggcggccgccgctgcgagtcgggcggacgcaggagtaccggatggggagggagacgcagctgctcgccgctgagggctcgccgccggtcagcctcttcgtgctgtgcggcgaccgcttcgaggcggcgcggctgttccgctccggcggcctgtcggtgcgcatggcccgcgtcgagggccacccggtctccatggcctcctgcgccgtcggcaaccaccactggatgctgtcccgggacgccctcgtcgcgcgcctcgacgcccgcgtcttcgtcttcgagatgcccggattcttctacgccgtcgtcggcggcggtggcgccgagaggaagtgcgccaccctcgccgagatcttctcccggttctgctcctaccacgatctctccaccacgcagcaaggtgaagacgaagccggcggcgatatgaaccaacactccaacccgtgggtgcgcgcccacggcaggatacagcgtctgaagaagcccacctcgccgcccgccggcgccggccaggccaccgccgacgcggcggccgaacgcgccggcgccggcgccgttgtcggactcgcgagccagctggagcgcgccgtacgcacgtcggcggtcgtcaagctgctcagccgctccctcctcgccggcgcgctccagcccgcgcgccacctgatgatcaccctcgccgccgccgccggcggcgctgccgccaataatgccgccgggaccagcgccggcgccggtggctcggcggcggcgctgccgagcaagtcggtcgtgtccgaccttctggaggccatcgagacgagccgtacgtcgccgcggcgggaggcggcgcggagggcgggcggcggcgccggcgggcccgggtggtggagcctcaacgtggagggcgtaatgctgctgctcagggtcgtccaggcggtcagggggcggaagctgccggcgccggagaagaggacgcgcgacggggcgagcgacgccgccggcctgagaggcggcggcatcatgggcggcggcggcggcggcgccgcgaggcggtggtgcggcggccggccgaagaagctgggcaacacggtgggcgcgtgtggaactcctgatctgaggctttgtgttaatgttcccaaaagtgaaccgagagagagagagagattattaataggtaattaa

SEQ ID NO: 102263 - DNA, 402 bp, Oryza sativa
  Clone ID: PAT_MRT4530_99802C.1
aggcaaggacaaacctttttctgtaaaaaaactactggttcccccctttttaaatttaacccccaaaaccggaaaaaatgcttttccaataaaaagtcccaatgggggccaaaaacaaatttttggttcccctaaccccggactttttttttatttcccggggctaaaaaaattcccgtcaaccttttcacccttgtttgacttggaaaacccccggcccttttttttcaaaaaaaaatccccctcgatccttttacctgggggcttgggctccctttttaaagggggggtttccctttaaaacccagggggtttcctttttaattcattcaaaaaaatgctttctgaactttcaatgttgaaacccctaaatcttggttttgaaacttactcccctctgct

SEQ ID NO: 102264 - DNA, 1047 bp, Oryza sativa
  Clone ID: PAT_MRT4530_99803C.1
atggcgactcgggagggaggaggacgaggaggagggcggccgccgctgcgagtcgggcggacgcaggagtaccggatggggagggagacgcagctgctcgccgctgagggctcgccgccggtcagcctcttcgtgctgtgcggcgaccgcttcgaggcggcgcggctgttccgctccggcggcctgtcggtgcgcatggcccgcgtcgagggccacccggtctccatggcctcctgcgccgtcggcaaccaccactggatgctgtcccgggacgccctcgtcgcgcgcctcgacgcccgcgtcttcgtcttcgagatgcccggattcttctacgccgtcgtcggcggcggtggcgccgagaggaagtgcgccaccctcgccgagatcttctcccggttctgctcctaccacgatctctccaccacgcagcaagaccgcatcagcgccctgccggacgaggtgctccgcctcgtgctgttgctgctcccggcgcacgaggcggtggcgacgtgcgtgctcgcccgtcgttggctccaccactgggaggaagcaccgggcctctccatcgattggtggggttatcaggagttggacaggttcatcagcttcgtggatcgcgttttcacgctccgcagctacaacgcgcctctgaatcactgccatttctacatgtatttcctgaggttagtgcctggaagggagcggctcttcgtccgctggatccggcaagccttgcgctgccaagctcgggtgctacgaatctgtttgatacttaggggctgtgaagacgaagccggcggcgatatgaaccaacactccaacccgtgggtgcgcgcccacggcaggatacagcgtctgaagaagcccacctcgccgcccgccggcgccggccaggccaccgccgacgcggcggccgaacgcgccggcgccggcgccgttgtcggactcgcgagccagctggagcgcgccgtacgcacgttggcgggcgtcaagctggttagtcgcttccttcttgccggggcggctcaagccggcgcgccaacttga

SEQ ID NO: 102265 - DNA, 1127 bp, Oryza sativa
  Clone ID: PAT_MRT4530_99804C.1
atggcgctcctccccctgctgctcctgctgctgctccgcatcgtcgcctccgccccggcctcgccgccggccaccgccctcttcgtcctcggcgactccaccgccagctgcgccgccaccacactccccctcaacctctccctcacctcctcctccggcacctgcctcttcccctccgcccaccgcctcctccccgacctcctcgccgccaagatgggcctcccgccgccgcccctcatctcgacgctcaacggcacggcggcggaggtggccaggggcgtcaacttcgccggcgaggatggcgggcgcggcgcgatcttccgcttgggcgccgtggggcagcagctgcggctggccaccgagacgctgcagctgctgcggctggaggccccgacgccgcaggacgcggacgcggcggcggcccgcgcggtgttcgtcctgtccttcggcaccgacgcgtacgcgcgcgtgctctcccgcggcgcgggggccgacgcctcggcgcccaagcacggccgccgcggcctcgcccgcctcctcgccgaccgcgtcgcccgcgccgtcgaggagctgtacgaggccggggcgaggaggacggcggtgatgggggtggcgccgctggggtgcgcgccgcgggtgatgtgggaggggctgcacgtcgtggatggccggagctgcgtggaggaggcgaacgagctcgtccaggggtacagcgcgagggtggcggcgcggctggcggcgctgcggccgcggctgcccggcgccgacatcgtcttctgcgacatctacaaggggatcatggacatcatcacccatcccgccagatacggtaatcaagattggagcaagtttaataatagtatagccaactactaaggtacggtggggtgcttgacgaaggagatggtgtgtcccaccccgcagagacacgtgtggtgggacctgtatagccccactgaggtagtcacctccctcctcgcaaactggtcgtggtcagcgccatctcattccaacaccaccatctgtcgtcccatcaccttggagatgttgaccggccatatatccctaatttctcctagtatgtccgaactttagctaccaatctgtagcagattaaaaagagtttt

SEQ ID NO: 102266 - DNA, 1017 bp, Oryza sativa
  Clone ID: PAT_MRT4530_99805C.1
tcgcggacgcgtgggcgaatgaagactagtagctgtgctcttcgtccacctcgactcgtcggctcgcctcggcttccttcgttggtccgcaccttctcccctcacccgccgccggggatccgctccgccgtctcgcctcccgccccgtggatccaccttgccgctccagatggaatcctgcccttcggtgaagaacatccttctgctggattccgaggggaagcgcgtcgccgtcaagtactacacggatgattggcctactctctcggcgaagctggccttcgagaagtcggtgttcgtcaagacccagaaagccactgccggagcagaagctgagattgtaatgtttgatggccacattgtggtgtataagttcatccaagacctccatttttttgttactggaggagaggaggagaatgagcttattttagcatcggtccttcaaggattcactgatgcagttgacattattctcagaaataacgtcgacaaaagaacagcactcgaaaatctggatctcatcctattgtgcctcgatgaaattgttgatggagggattgtcctggaaacagaaggaagtgtgatagctgaaaaggtgtcagcacatggaatagaaggtgctacttcactcgctgagcagactatagttcaagccctaacaacagcaagagagcacttgaccaaatctcttcttatgtgatgtgctctgcttttggagctgaagatggagtagcatcccgttgttacatctctaggactgatacgttcattgcaatagaaacgacggaacagaatatctgaatccatttgcgtgtagagtggcacgttcccttcattgacactatctggttcagttttgcgagtatttaaaaaactgcacaaacaagattgtgaacggtgattgtttcaattttgattgttctttgttttgtagatttatatatatgttgttgtgcagtggatcaatatattgcttatggagatgaatgtctttctttaaaaaaaaaaaaaaaa

SEQ ID NO: 102267 - DNA, 303 bp, Oryza sativa
  Clone ID: PAT_MRT4530_99806C.1
cttcagatagcaaattgagccaacggaggttagtcgaaacctacatccccggggcactaattacgggcgcttctgcccgatccagcatattacagcgtataagagttactacgactcatggccggaccccactggcagccgctccctctcacaatactaagtggccatgtgcaggcacagaaaggcccgcccctctatataagagaggttctaggatagagtctgaatctaactctaagtataacacctagtccaactccaagtcctaaactggaactgggctttgtacactaattccacaca

SEQ ID NO: 102268 - DNA, 231 bp, Oryza sativa
  Clone ID: PAT_MRT4530_99807C.1
atggtagacactacaaagacccacaagtattttaaggagaaaacacacccggcatgtgaggaaacacacctccggccaatcagacacaagcacatagattggagggcccacaaggcccaccagtcagtgtccctgtcaaaggagaggccaggaggtggggcccaccatgggttcggccgaaccaccacagcctcctctcatcctgaccttcgacgtgtacgctccggttga

SEQ ID NO: 102269 - DNA, 261 bp, Oryza sativa
  Clone ID: PAT_MRT4530_99808C.1
atggcggaatggagcggcgatggaggtcggccggtcatggagcagagccggcgaggacccgctgccctctgcgccaagtcgtcgcccagcagcgactcgctcggggagcagcggcggtgggcggagtggctgggagcgggagctgcgggctcggtaaagcaacggcggtgggttgcgggggcggtgggctcgggagaagcggcggcggtcgggagcgtcgggctcgggagtggcggcggcgagcggctcggcggacggtga

SEQ ID NO: 102270 - DNA, 497 bp, Oryza sativa
  Clone ID: PAT_MRT4530_99809C.1
ctagagcacagtatctctaaatattcactagtactttgcgtgtccaccaatttttatcattaggctccttggcgtgagtcacaaagttcccaggtcgatgggatcgaggaacgtggtatgctacttgtgagaggtttttataacggtgggaatgaaaacacccacgtttccaggatggggacggcattccccggtgtcaaggaatgcttccttcgatcctgtttcctgtgacatgccacttggttttctgatcttacttccaattgcaacgatagctcatacagggataaaaaaaggatatcaaaactgacaacattgcagatggtttatatgtactaagcctcagttgctactaaatctcataaaagtgaaaaaagcgcattgcaaaagtaatcataggataattagttcaaatcagcttatctgaaaattggagctttacaaagtcactgggtgtgccgactgatatacttcactaatggaccatcctggccact

SEQ ID NO: 102271 - DNA, 548 bp, Oryza sativa
  Clone ID: PAT_MRT4530_9980C.1
gctgcaggaatcggcacgaggtttttttttttttttttttttttttttaagtcaaactgttcagtcgttttatgtgtagaagatataacaagttcctatagtacccaattctgatgataatacaggatgacattcacaattaacctgcttggtgaaacttgaactgttctacaataacactgagacaccacctttatttggttgtacaaaatgaacatatacagacagaactttccttcccaaaaaggtcgaggaacaaaagaatggaataaaacgcattaactagatgcaaatgcaaaaggaaacattaacaaggaatactggtacagggaagatcagaaggcacagtgaggtaaggactaatgagagctttggaccgcagaaatatctacatcagccagacggtctctgataaatgtgttttgttcttgggtcaacaattaggcctctcccaccgttcacctccaaatcatgctgaaagacaaaatcaggaatagttagttgttcgcgtggtacatatctgaacagatgcacaagcctatccacgt

SEQ ID NO: 102272 - DNA, 336 bp, Oryza sativa
  Clone ID: PAT_MRT4530_99810C.1
atggtgattgaggtgttcgggagaacaaggaaacgacagcaccagtatggtaaagcaaccgacgtgaggcggacaaagaagcgaccggagaatggaggagaggagtcgtcaatgaacatatggaagaagggactgatcagagggggaggggttaggaaaggaaaaaagaaaagaaaagggagggtgactgacaggtgggtccacaagaagcttaaggcttttaccagtcaccaccagtctaccacacgcgcgtgcatgccgacggacggtccgtcctcccctctcgcgcacgacaacagaacaagagatggggacgagaaagaaagagaccaatga

SEQ ID NO: 102273 - DNA, 285 bp, Oryza sativa
  Clone ID: PAT_MRT4530_99811C.1
acggccggaacccccgtccacccacgcgtccgggcaggcgcgccatttaacaacctaagctagcttactggtgctggaaatcaaccgagacaaagctctctttccctttcggtcggggttctttttctgccgcggattatccacctggaggagagaaggacctgttggaatgccgtggaatatatcgatgattagacgcggggaacaattaattagaagcacgccagcacctggttgggtggcccggcccggcaaccggcaagaacattgggagggtcatgtaat

SEQ ID NO: 102274 - DNA, 408 bp, Oryza sativa
  Clone ID: PAT_MRT4530_99812C.1
gaaactaaagtcaaggttgaagtccttgctctataaattttctagaacagtgtaatgtgtagacatgcatgatgtgattttacagttttactagtaccagtgaagtttgacaatgtagtagtactacaagtctctagctaggtcctgaagcttcttacatatcggtttatcaagcctataaatagaaagccagtgcatgtgtatagactgatgatggtgtgctgcccaacgtacaagcaagtgtactgttcagccctcaagcaagcaagtaaagaaaccagttaaaactagcacaagcttccctcctccttttctctgatcccctgcttaggaaatatttagcaccaacacctgattcaattgcctcttcgtcatgacatattatcatctaataataataaaatattt

SEQ ID NO: 102275 - DNA, 726 bp, Oryza sativa
  unsure (1)..(726): unsure at all n locations
  Clone ID: PAT_MRT4530_99813C.1
ccggccgggaccacatgcgagcgttgcaaaaaaaaggagaacgaccagtgattgccatccgccggcttgtacgcatcccagcgaaacctcctcagaatcgcacgcgatttctcgcttccttccaccgaggcgagcatcgtccgccggctcctctgcatctcggcgaatcctcctcggaatcacgcacctccgcgcttccttccgccggtgcgagcgttgcccccagtttttcctccgcatcctagcgaatcctcctcggaatcgcgcgcctccgtgcgcgattcctcggttcatttcaccgttgcacacgccgtctgtcgatttcctctacaactcagcgattcctcggttgattctgccggcacacatgccgtctgcgatttcctctacaatccagcaatttcagttgatttcgtcagctcctttgctcctacctcctcaattgattctgctacaagtgtgatgtgagctcaacatcagcctgcgtttcaacgccgactaccctgtggagaataaaaaaaagtgatgcccccccgagtgaatcccctttgtgtacacgttctgctagttctgttctttctaagcagtcaggtgtgacaacaaatagtagatgtatagagaagcgctgaattatttcctcaataattcaggcggtanaaagagtcagaaacaagtggtgaagctagtggtacagagatgcaatagactacaggtaaattattggcc

SEQ ID NO: 102276 - DNA, 629 bp, Oryza sativa
  Clone ID: PAT_MRT4530_99814C.1
cggacgcgtgggtgcatccaaaggaaaaacgatgaagcaataatcagaccaagaaatttttcctctcgatcttcttgccatggaattgcctgcagccaagaggcagttcagcaccaccagccagggcaaagaagtttcagggatcagttcttgcaagcctacttaccagagataccaatcatgccctcctgaggtctaccgtcgtcaggcttcctcttacagcgttccatcttcagagatcagcaggagctcggttcgcagcagcggctcgttcagggcggcggcgcagagtctcgccggagttttcagttgctttgtgcccaggaagtccagaaatgaggatgaacttgagatttctcggacgacgatttctcaagggagcagaagtacaggttaccaagtctcgattgatccagcagggacagggtatccccaagaaagcacagagctcacagttgcagagatatttaaggcaacctcaaacttcagtgacaagaacataataaagcagggaagttatagcagcatctacagagggaagctcagggatgggtctgaaattgccatcaaatgtgccagaaagttaaacagtcagtatgcatcagctgagcttcggagagagcttgaaa

SEQ ID NO: 102277 - DNA, 404 bp, Oryza sativa
  unsure (1)..(404): unsure at all n locations
  Clone ID: PAT_MRT4530_99815C.1
gggagaaatggttgcaatccgtctgctggtgcngaaaatcctaggtatcagctattgtgtcaacttgatatatctggcccaagagcagtatggactgtgtgccntcttgcgccggtaccaagctttagagggaaagctgatgcaaatagcttttgtttgcataacctttttcaattagggaaacataatttcccatattaggcatatggagaattatgtgaggtattgattgtttgtacaaaaataaccattttattcttgaatattgcattttcacatgttaactaaggttcttaagttgatctgactgccatgtacaatatggagcccaacaaggggtagtgacacatatttctcaacttcagtatgcaataagtcagtcattttataaaaaaaaaaaaaaa

SEQ ID NO: 102278 - DNA, 1185 bp, Oryza sativa
  Clone ID: PAT_MRT4530_99816C.1
atggcgtcggaaaccctccaaaccctccttcctccgccgccggccgaggaagcgccgacgacgacggtcgccgccctcaccgacgacaccctccgcaacatcctccaccgcctcgcccccgccgacctcctccgcgccgccctcgcctgccaccgctggcgccgcgctgccgcacgctgcgccaagggcgcgcctcccccactcctcggctacttcttccacccggccgacacgcccccgccggtgcacttgcccttctcggcgtccaggggccgcctccaccccgccgccgtctcccccgtcgacgcctcctcctcctcctccccgcgcctctccctcgactacctcggcgggaccaagggcttcatcatctacgacgtctacctcggcctcgtgctcctcctcccgacctcgctccccccccacgcgacgcgctgccgggcgaccgctggcgtggccgtcggcacatcgtcggcgccgccgtgctctcgcgcgcggcacccgagcaggctctgcttcgacgccgtctgcctcaccgtcgacgacaagcacccgcgcgcctgggtcgcgtcctaccgcgacggcgagtgtagctggagggcgctcccgcgggacaccggagtcacggtcgcgttcgacccctactggttcgagggccgctgcgtgcacgccgcgggggacatctactggcacatctgccactccggccgcctgctcaagctcgaccctgccacgctcagcttctcctacctgctagcgccgtccgagctgggggacagcaacaagaagttccgaatcggggagacgccggaggacgggcggctgggcatggcgaccgtggaggaccaggagatgcagttctgggtgcgcggggaggccagcgggagcgacaacggttggtttctgaggaagaggatgaacatgcgcaaggtgctcgacaccatcccggggttgcccagggacatgatgagccgtatcatctccatctggctcagcgacatcgactcagggcgcaccgggaagctgttcatcaagacacaggggtatgggcgctactccttccatatggataccggcaagctggaccgattggctactgaagatggaaaggagtatggccaccccatctacgcctactacgtggcctggcctcctgccttcctcgctccagaattggaggtgtga

SEQ ID NO: 102279 - DNA, 1530 bp, Oryza sativa
  Clone ID: PAT_MRT4530_99817C.1
ttacatacggaaacccacaactgcacttaaaatgggacggagggagtaatgggcagtgatcagctagctatgattgtgattgaactcaaccttaacacaatcggagctcctgtcttgagtcggcgccgcggcgacggcggcggcgccggcgggcgcgtcctgccggcggtggtatgccctcctgaccgaccacagcgcctccgtccaccgccgcatcgacggccgctccttcctcggcggcgcgacgcactgctcggcgagctctatcaccttctccaccgtcgccactgacgccgggctcctcctgatcctggggtccatggccaccaccacctcccctcccctgaacctctgcaacgcccatttcgtggtggggcggggatcgaggtcgcggcggcgctcgatgggcgggcggccggtgacgagctcgacgaggaggacgccgaaggagtagacgtcgctcttgtcggtgagctcgtacgtgctcaggtactccgggtccacgtacccggcggcgctcttcccctgcgtgtcctccgactccgagctctcgccgccggccatccgcgccagcccgacgccggccagcttcgccgtcagcgtgtccgtcaggagcacgttcgatgaccggacgttccggtggatgatccgctgctctttgaattcgtgcaggtatgtgatagcatgagctacgtcgatcgcgatgttgagccgttgcgcaagttctaaaccatttccacaggattcatctaagtgttcccttaaggaaccattgctgacatactcaacgacggtcaggctctcatcttcgcgctcaaagaatcctaggaacctcactagattcttatgatcaattttctgaagaatttcaagctctctccgaagctcagctgatgcatactgactgtttaactcatgaaaaattgctgaatatgcgtattccctttgtttccatacctttctggcacatttgatggcaatttcagacccatccctgagcttccctctgtagatgctgctataacttccctgctttattatgttcttgtcactgaagtttgaggttgccttaaatatctctgcaactgtgagctctgtgctttcttggggataccctgtccctgctgcacttaaatttgtcatttctccattctgattttcacacggtgggggatattcatgtttatctagtgctggatcaatcgagacttggtaacctgtacttctgctcccttgagaaatcgtcgtccgagaaatctcaagttcatcctcatttctggacttcctgggcacaaagcaactgaaaactccggcgagactctgcgccgccgccctgaacgagccgctgctgcgaaccgagctcctgctgatctctgaagatggaacgctgtaagaggaagcctgacgacggtagacctcaggagggcatgattggtatctctggtaagtaggcttgcaagaactgatccctgaaacttctttgccctggctggtggtgctgaactgcctcttggctgcaggcaattccat

SEQ ID NO: 102280 - DNA, 334 bp, Oryza sativa
  Clone ID: PAT_MRT4530_99818C.1
gtcgactgtagaggattcccggtgcgtggaatggcgagggggtatcactcccacccaggagacagctctagccttgaagatgctcagccttgtgagcaatcttcagtcaatggtaatctcaccggacagcgagttgttcctcacgctgaccactctaagcatcgggcaggtcgacagggatagaggcaatgtgccattcaattggttggaagccaagtttaaggactgcaagctgctcaatttgccaaacacatcagggatattgccattgaacatgttatatgacaagtcaatctgcgtaatctcagtgaggttaccgaggtgcgtcatctaa

SEQ ID NO: 102281 - DNA, 744 bp, Oryza sativa
  unsure (1)..(744): unsure at all n locations
  Clone ID: PAT_MRT4530_99819C.1
taaccngcataccttccttggnctgatacccatctccttatcttccccccttgtgnttgacccctacaaggncatgattgaaacaggacaaatatattaaatcaattaacaagttcaaaataatatggataagcagttgtactaggactaggagtactagaattaatataggtaatcaaaacatgaattacatatcaacatgtacttggtgccccagaatgtcaaatcacacaggtacccctgttaacatgttactaggagtgggagatgtaggagtactaggattctggagttgatggacaattaacatggatagacagttaacttttttttgtttctttcactctttatttcagttcaagaacttcaggcaccacgggaaataaaccaatggcagcacggagtatgtgtacaacagtacatgcattcaagtgtacaggcaccagcagaaggaaactctacaacatgtatagatcagcttgtataccaacataaacccactgtggaggcttgtcaatgagtaggaggcttccatcatcaccatttgataatgcactttgtatcttccttcttgtaaatgcacgtttgtaacttctttttgagactgtaacatgttgggagcagaatttgataatgcagtttataacatgttgtaaataccgttgttgaactattgggagcagaatgaatgaatgaatcgatctgacagtgtatccctacggccaaaaaaaaaaaaaaaaaaaa

SEQ ID NO: 102282 - DNA, 254 bp, Oryza sativa
  Clone ID: PAT_MRT4530_9981C.1
agtctctgaaaaacgcacaaacaacggtgctgctagtgggtaaacacgcagcaattacaaccatttttttattgtaaatcatgccgcaattacaaccatttgtattttcttcatgggcaaaaacatttatccttttcattaaaaaaggaataatttcattacaagggaacacacgatgttacaatgatatagtaacattagctttcaaaattttggaatttggatcatagatccttcttcctgcctactggatc

SEQ ID NO: 102283 - DNA, 610 bp, Oryza sativa
  Clone ID: PAT_MRT4530_99820C.1
tttttttgcacgttgaaaattctaccattgaacatatcaacaagttttacactcgcgggggaaaaaacttgaacaatttgtaccaattctagcgaacagatatgcacatccacgtacttcatggcttggggggtaaaaaaatcgacagttttagtctatggtatgaccagttggagtttttgcggacaaagatggtcgtcaacaaactatgacatggtttgcgctcccttgttcatggagaacttttacactactggcttgccacgttggcattctgtgacccaaaaaaaagggttgggctggtcctcggcgtagaagggatcctttgggtccagaaagaacttaggtttggggataccatccaagtggtatctgacactcttttttaaagggctcatgatggatacacaacttcctttaagaagccatggtgaacaaaaaaaaccgcgcggcttctagggctaacaatagatgccccattctttgggggccttaatattctagtacaagagacctgaaccattttcttccgactgaatttcttctcaagtggcctatctacccttacagggaagttgttaggggcctcccgcatggggtttggaacatg

SEQ ID NO: 102284 - DNA, 1381 bp, Oryza sativa
  Clone ID: PAT_MRT4530_99821C.1
cagtcaggaacagcaacaaaagtaagccaagaatctctctgcctcccaccaacaaccacacacactcacagctttggtcatggaggtcacccccaaccacacgcagaccgtctccggctgggccgccatggacgagtccggcaagatcgtgcccttcgtcttcaagagaagggagaacggggtggacgacgtgacgatcaaggtgaagtactgcgggatgtgccacacggacctgcacttcatccacaacgactgggggatcaccatgtacccggtggtgccggggcacgagatcaccggcgtggtgaccaaggtgggcaccaacgtggccgggttcaaggtgggcgaccgcgtgggcgtggggtgcatcgcggcgtcgtgcctcgactgcgagcactgccggcggtcggaggagaactactgcgacaaggtggcgctcacctacaacggcatcttctgggacggcagcatcacctacggcggctactccggcatgctggtggcgcacaagcggttcgtcgtgcggatcccggacaccctcccgctggacgccgcggcgccgctgctgtgcgcgggcatcacggtgtacagccccatgaagcagcacggcatgctgcaggccgacgcggccggccggcggctcggcgtggtcggcctcggcggcctcggccacgtcgccgtcaagttcggcaaggcgttcggcctccacgtcaccgtcatcagcacgtctccggccaaggagcgcgaggccagggagaacctcaaggccgacaacttcgtcgtcagcaccgaccagaagcagatgcaggctatgacgaggagccttgactacatcattgacacggtcgcggcgacgcactctctgggtccgatcctggagctgctcaaggtcaacggcaagctggtgctcgtgggcgcgccggagaagcccgtcgagctcccttccttccctctcatcttcggtaagaggacggtgagtgggagcatgacgggtgggatgaaggagacgcaggagatgatggacatttgcggggagcacaacatcacctgcgacatcgagatcgtgtccacggacaggatcaacgatgcgctcgccaggttggcgcgcaacgacgtccgctaccgcttcgtcatcaacgttgggggcgactccaagctctagactcatgctactatcatattgctacctagtaccaacctccatgcctttcttaatttaatttattggaggctctgcacgcagaatgggacagttcgagctgtcgttttctcgttggccacgtgaagtaactgtacgcactttgtacttattcgagaaatgatcagtgataaatcatcaatggccttattttattcttaaaaaaaaaaaaaaaaaaaaaaa

SEQ ID NO: 102285 - DNA, 1508 bp, Oryza sativa
  unsure (1)..(1508): unsure at all n locations
  Clone ID: PAT_MRT4530_99822C.1
cgagacggggcgaccgacgcaatcgccgcgagccggtagccggcgaggcggtccggggtgcgtgtgtatcgtcgatccttatcctatcaccagccgcccacctataaatggcgtattaatttggccaccataaacccggcgttgagggcgacagctaaaacctcgtggaatgggggagccgccggggaagaccgggcgacgtgacgcgggcgggacggcgccggcggtggaagaccggtggacgcagctcccgccggagctcctcccgctcatctgcaagaagctgccggactcggccgacttcgtgcgcttccggacggtatgcagcgcgtggcgcgacgccgccccgttgtccgacgtcccgccgcagctgccgtgggtcgtcgagcgccgcgggtccgcgttccaggcgagggcccatttccgcttctactcgcctagctccgggaggacgtacggcgtccgtggctacggcggccgctcctggctcgtcatgggcggcgcgtgccaggagcacctcgtcaccaccgtggacctctccacgacggcgctgtacaacccgctcaccggggagcgcctcgcgctgccccccgcgccgtacccgcagtggcgccacggcgtcgtccacgtcgtggccgccggccgccgccgcggcggcgctcccctggtggtgaacgcatccacgaggacggggcacttcgggtactgccgccagggggataccaagtggaccctggtcgacgggcgccaggacatgggccaccgcgcgtaccacggcgggcggttctacgtcaacacaaacgcgcaggagacgctggtgatcgacgcctccaccggcgccgtcgagtccgtcctgccgccgccgccacgctcggccgacgccggtgccggcgtctcctgcggggactacctggtggagtcgcgcgggaagctgatcagggccgtgctgttcccgcgcgacggcgtggtgaccacgtcggccgaggactactacctcaacgtgtatcagctgcaggaggacgggaaggccgccgccgcgtgggccaaggtggagagcgtcggggatagcgtgctctttttcgacaagcacgggcacgggttctcgctggagcccaacggcgccgcggagctgaagcgggattgcgtctacttcatgcacgagaagcggacatggctggacgccggggagtacaggttcctttgtcggtataacatggagaccggagaggtcgatagagttgtgtcgctgcccgacacgttcggggacacctgggttgtccccggattgaaggccaccacggtgtgggccaaggtggggagcattgaggaccgcgtgctattcctagacaagtagtccttgaattttcattgaaaaattaaatagatgcatttagttgctctgggtgaatgattggtctttgaaaaatgagaaangtcttgggttgtgtgtgtcacacaatcacatgcattttccattatgtttaataaaatttaatttgtgtgtctna

SEQ ID NO: 102286 - DNA, 569 bp, Oryza sativa
  unsure (1)..(569): unsure at all n locations
  Clone ID: PAT_MRT4530_99823C.1
naaaaaaaaaaaaaaaaaaaaaaaaaaaaaaagaaaaaaaaaaaaaaaaaaaaaaaaaaaaaaaaaaaaaaaaaaaaaaaaaaaaaaaaaaaaaaaaaaaaaaaaaaaaaaaaaaaaggggcgggcccttttaggggttcccaactttccttccccttccttgccacgtcttgccttttttttgggggcccctaatttcatttcattgcccgtctttttccaccgtcgggtctggaaaacccctggggttccccattttaatcgctttgcgccccatccccttttccccggttgggtttttagcaaaggggcccgccccgttcccctttcccaccatttgcccaccctgattggcaatggggcccccccttttaccggccctttaaccccgggggttttggtgtttccccccagggtgccctttccctttgccagccccttagcccccgttcctttcgtttttttcctttcttttttcgcccgtttcgccggttttcccctttaggttttaattgggggcctccttttggggtcccgttttggggttttacggccccttgcccccaaaa

SEQ ID NO: 102287 - DNA, 539 bp, Oryza sativa
  unsure (1)..(539): unsure at all n locations
  Clone ID: PAT_MRT4530_99824C.1
ctcctgtgagactgagtcatagttgaggctaggatgcaagcgggctgacgcgcgaaaccacttgtaggtaaaattagtgagtaatccactggattgactcacgggttatctacaaatttgacctataagtggatttatggattatttcacttgtatttatagatgcgacaagtcaggctacgacgcgagaacctgtgggttaccacttatttaacctataatcgggtttacgggttggtccgcttgcatcctacttaaggcctttaataagtacaggttgaagcttcattggcatggttttccnaacttagttgcttgacaatagcagactattagccggctataaatatattttagtgagataaaagatgagagagaagagcagcggactacagatctgtagctagctgtagcgcggacttcaagacacaatgtgtgtatgacaggtaggaccatatattaatagtatagtaaacactattgtatgaattggctattagaatgactatagatgtattgaagctaaaaaaaaaaaaaaa

SEQ ID NO: 102288 - DNA, 1576 bp, Oryza sativa
  Clone ID: PAT_MRT4530_99825C.1
atggcgtgcacggcggcgcgcatgttcgcctccaacgccaccctctgcgcctgcgagccgggcttctacctctccgccgccatcaacggcacctgcctcggcctgcccgacggcggctggcaggtcggctccgtcggcgcctcccgcaaccagagcttctacttcctcacccccgtcctctccctcgacgtcgtccgccgcctcacccagtcccaggccctcctcctcgaggccaccatcgctgccctcctctcctggcttgccttttgtgccttcgccaggttcaccggacacgaccccaccggcaacaagaggctcttccgcgcgcgcttctgggtcagccgcctcgactgcatctacgacaccacccactgggcggatgaccagcaagtactgaggaaaagaaaaacagagttgggtggtacgtgctcagtagctagcttgatactcttcgttggattagtcactgtgctgctgtaccaagccatccaaagacgcaacattgaagtgcatcgggtcaaaccagccaatgctcctgatttgttgtcttttgtcaatgatatcgagttccacataaccaccatctctagcatgtcttgctctcagttggttgccccttctacaattgcaatgggaacacctggatctatggacttcaggctgctgcctttgtcaacattgttgacatacaattgccagaacacgagccaggggccatctgtttcactcaagtgcaatggctgcagaatcccgccaagagaccactacgtatcctggcaatttattgacctgccaaggcaaccagctgccgctgttggcttccagtttaatctcactgcgaagcaacatggagatgacaaacatgtgagctctgtcagtggaactataaactccgacaattttactgatgacaagctgaagacattcagagggagagattccaatgtgctcaagattcaattgtttcctcaaacatacatcaatcatcacaatttgaagcttctgcaacctctggttcaggacttcactcaaggttctaccttttcaaatgttagaaacttgaatgcttccttgcaaaaccctatggatggaataataaatactacactctacataagctatctttccaactacattgtggagattagcaacgaaaatgtgctaggcccagtcagtatacttgcaagtattggtggcctttatgccttcagtgtggcaatatttctttgccttatggctcaatgtgaagctaggataaaaaagcttcgagacgaggattccagaatgctaaaaatactgaggaaaagacgtgctcaacagaattgggataaggtgaggaagtttgtcatgtatacctggggccctagcaacttggatccaagtgatagaagtggcaaatggcctgaaagttcagtgatggattctctccatggatccttccacaagaaaagaaaaccgattagacgagcaacctcgaatggtaacaaacctaagagaaatcctgctgacgcgggagttattgacatcgaaagagttggggaaatgcaggagtcgagtagttctagacaggcttaat

SEQ ID NO: 102289 - DNA, 192 bp, Oryza sativa
  Clone ID: PAT_MRT4530_99826C.1
ccccgggctgaggaaaatattctccagaagcgtcttgataaactatgtctgtggcgcaagatgagatccagacaactctgtcgaaccccacgaaggagattattgatttgagcaagaagataagttcattgatgatgaacaatgatgattggtctgcagttgctaaagttggctgatgcataatgcagcctg

SEQ ID NO: 102290 - DNA, 1749 bp, Oryza sativa
  Clone ID: PAT_MRT4530_99827C.1
atggatccggaggcggaggaagcgcagcttcgcctcgagatggagttggcaaagaaggccaaggcggacatgtctgggttgcaacgctccagcagcctcggcttggaccacgccggcttgtatccgctgccattgccgccagggtggcggtccgccccaacctcgcccctgaggacaccatcgagcccgcccccgctccagttcccgccggcgtgggcggctgatgttgccggcacgtcgggctcggcggcgcccgaggacgatggcccagcaagaaatgccggcgctgatgaagccacggctgggtctgcgcccaagaacgaggacccagcaagagctgcgggcgccgatgatggccccacgaggtctgactacgccgcgatgatgcggatggcattggccaagttccaagacgacgatgctgctgccgacgacgaggaggcggcgtccgcggtgatggagcaggcgatgaccggcctcatggacctcacctaccgcaaagcgaagcctccagagctgccttacgagttcgccacaagatggcctattcctattgctcatgatggtacgcttcaagcggaagtaatgcgtgatcctgttatcttgccttctggatattctgttgatcaaacataccaaaacaaccaaaaacggcagaatccatggacaaataccagcacatttactgatcactccttgccctactctctctctgttccaaaccaccttctccgtgacatgatttctgcatggtgcctcgatcactcggacctttccccatctaccacttctgatacaccttccactcccttggaaccttcagaggaggaacaaattcaacgcatcctaaaactattctcagggaattctgcatcgcaacgagaggctttgaaactgatccagctactcactaaaaccaccaaaggggtgcaaccttgccttgccaagtatgcggacattatcccagtgctgataaatcttaggaggaaatataaatcgagttggacacaagatcttgaggaagagaggctcacaataatcctcaatctgaccatgcacaggcaaaacagggagatcctagctggacagaatgaattagcaggtgctataaaaaaaattgttaagaaggctggcaatcgtggtaagcgaacatcatccttggcgaagaaaagaatgctggatgctggtggaatgaaaatgcttcgaggtatgctcaagataaaggatactgaagtgataacggaggctgccactgcgatccttgcactctacgcagatggtgaaggcgagcaaccagccagatttcatgaggtgcctcagatgctgctggaatgccacatgttcactgatgggatcctgcttcttcttgaccgtctgccaaaatccccacgtgttttcagaaaaatctgtgatcaggctttgcaattggtgaatatcgtcatggctgaagatgcaagtgggccggtgacacgtaagggcatcctctcagcaatttccttgatctacgagattgttgaaagggatgtgggtaagatgaatgcggtgaagaacatggaggatttcatcgagcggttgcgtcagctatcatcagatagattgccgatgcagaaaatgctccaggtggagagaataatcaggactctgtcagatgcgtttccagctcctacgatctcaaaaggctcgagattttacttctgctcgcttaactttctggagaagtttgaatttgttgactgtgcagcaatgtga

SEQ ID NO: 102291 - DNA, 1794 bp, Oryza sativa
  Clone ID: PAT_MRT4530_99828C.1
atggatccggaggcggaggaagcgcagcttcgcctcgagatggagttggcaaagaaggccaaggcggacatgtctgggttgcaacgctccagcagcctcggcttggaccacgccggcttgtatccgctgccattgccgccagggtggcggtccgccccaacctcgcccctgaggacaccatcgagcccgcccccgctccagttcccgccggcgtgggcggctgatgttgccggcacgtcgggctcggcggcgcccgaggacgatggcccagcaagaaatgccggcgctgatgaagccacggctgggtctgcgcccaagaacgaggacccagcaagagctgcgggcgccgatgatggccccacgaggtctgactacgccgcgatgatgcggatggcattggccaagttccaagacgacgatgctgctgccgacgacgaggaggcggcgtccgcggtgatggagcaggcgatgaccggcctcatggacctcacctaccgcaaagcgaagcctccagagctgccttacgagttcgccacaagatggcctattcctattgctcatgatggtacgcttcaagcggaagtaatgcgtgatcctgttatcttgccttctggatattctgttgatcaaacataccaaaacaaccaaaaacggcagaatccatggacaaataccagcacatttactgatcactccttgccctactctctctctgttccaaaccaccttctccgtgacatgatttctgcatggtgcctcgatcactcggacctttccccatctaccacttctgatacaccttccactcccttggaaccttcagaggaggaacaaattcaacgcatcctaaaactattctcagggaattctgcatcgcaacgagaggctttgaaactgatccagctactcactaaaaccaccaaaggggtgcaaccttgccttgccaagtatgcggacattatcccagtgctgataaatcttaggaggaaatataaatcgagttggacacaagatcttgaggaagagaggctcacaataatcctcaatctgaccatgcacaggcaaaacagggagatcctagctggacagaatgaattagcaggtgctataaaaaaaattgttaagaaggctggcaatcgtggtaagcgaacatcatccttggcgaaggtagcttctatagttgctgtcctgtcagagtttgacatgttcaggaaaagaatgctggatgctggtggaatgaaaatgcttcgaggtatgctcaagataaaggatactgaagtgataacggaggctgccactgcgatccttgcactctacgcagatggtgaaggcgagcaaccagccagatttcatgaggtgcctcagatgctgctggaatgccacatgttcactgatgggatcctgcttcttcttgaccgtctgccaaaatccccacgtgttttcagaaaaatctgtgatcaggctttgcaattggtgaatatcgtcatggctgaagatgcaagtgggccggtgacacgtaagggcatcctctcagcaatttccttgatctacgagattgttgaaagggatgtgggtaagatgaatgcggtgaagaacatggaggatttcatcgagcggttgcgtcagctatcatcagatagattgccgatgcagaaaatgctccaggtggagagaataatcaggactctgtcagatgcgtttccagctcctacgatctcaaaaggctcgagattttacttctgctcgcttaactttctggagaagtttgaatttgttgactgtgcagcaatgtga

SEQ ID NO: 102292 - DNA, 588 bp, Oryza sativa
  Clone ID: PAT_MRT4530_99829C.1
atggcgacgaggtcgaagcggcggcgacttcgggttgacgacgacggcgacgctctggcgagaaacggcggcaacggaggggtggacgagatgctgctcctccttgcgatcccgatggtggcgacggtgaccgaagacgacgactgcaacggcggcgcggtgcggctagaccgacggtggcagttgagaacttcggggcgacggagtcggcggcgctccggcgatctacggtggaaacggaggacgggacgaggacggcgacgacttggcgaacctggtgacggctttcccgagcgacggcggcgactggagcagcggcgcgacacggccggactcatggcggcgacggcggcgcaagagctctcgcggctagggcgctacgagcggcggcgagctaaggcgagggtggcggcggagagaggatatcctggggatccttttatagaggctaggaggcggcgacggaggcccacggcgaccggcggcgagaaggaaagattagggttcgggagagagagaggaatccgattcgagatcgaatccggcactttccaaacgaaattggtcgatgcttccaaaagagaatag

SEQ ID NO: 102293 - DNA, 997 bp, Oryza sativa
  Clone ID: PAT_MRT4530_9982C.1
acgagcccccttttttttttttttttttttttttttttttgtttttcctttttttttttttttgcttttaaaatatttttttcgcgtttcggtgattccaaaaggaaggaatataataactaactgccctttgttcatgaggctgtgttggttggccagccaccagattagaatgcacaaacgtgtgatctccgaacggaattgtttcacttttggtcttctcttacagcgacatattaatgaagtatacatacatcagctcaagtacgattttccatacagaagaacctaaaacatggttcaaggtgcagaaggtccatcaggcagttttgtcttccttttcctaccaagaatggacgctttctgcagcctcacaccgccagcgcgccacttcttgaaagcggtcatcgagtccctagcagattcgaacacttgagcttcttcttttgtaaggcgcggaacaaacttgggcactgtcatcatggaagagctgtgtgacttgcttagtatctccttgtacctactagtgaatgcatagcgcaagaacagtccaatgctcctgtcgttcaccaaagggactatcttgcatcctagctcatagaagtaagggcaacgaatcctcaaatcaacacaggctgcatcagcttggatctccttccgggttttctgggtgaagcaaggaggtacatttattgaaactgcttgttccagagacagcagcccatgtgcaagccaaaatggaaggtccaccttagcacccttttcaacactgtttctttcagcgccaggatctagtagtccaacaccatttgcactcacttgaaaaactaccgaaataggctcctcctccatcaggatatcatcgatgtcgtaataaccaggcattgcaccaagcaaacagaatactattgcttattcttgatttctgtcacccgttgcagttgctcgaatgctcggttgctgtgatgttgctcgaggatgggagccgaaggcccga

SEQ ID NO: 102294 - DNA, 363 bp, Oryza sativa
  Clone ID: PAT_MRT4530_99830C.1
atggccggcggcgagttagatgaccggtgtcatgctggatttgttccccatgggtcaagatccgtgcctccacgaaggatgtcgcacgccctcagggatgaatcgggcccccctccccagatctacgactaccgcgtgcggcggcgctatgtccccctaatgggcgtgacgatggccgactccgggcctccatggaaggctccgtgcgagcgttggcggaggcccccccttccccggtccgtctacggcccttcggctgtggcttgctcgacttggcaggcccggaccgtgggtagccggctgccaaggcttgtgcagatggccagagcttcggacagggcatggctagccgaccgcagctga

SEQ ID NO: 102295 - DNA, 351 bp, Oryza sativa
  Clone ID: PAT_MRT4530_99831C.1
atggaggaagagagagaaggggtaggaggaggggatctataccttttgaagatggcggcagagggtgcgggcggactggacggcgcgatcggcgttgagggcggcagactggacggccgtggaggaggcgggctacccggcgaacggacagcgagtctcgatatgtggcggcgtgacggcgcccgcacgaacctgccgaaactcctgttcgtgaatggcaaggaggcggggcccaggtggtggtggagggaggcaccggcgggcggcggcggcgaagacgggagcggccacaggagccgatgtgagggaggcaccacccggagtggcggagtgggaaggaggcggcgatga

SEQ ID NO: 102296 - DNA, 708 bp, Oryza sativa
  unsure (1)..(708): unsure at all n locations
  Clone ID: PAT_MRT4530_99832C.1
gcttgctgccaggtaaggactaataggtgattttcanctgaacaattggatcccagaaatattggaggattctcactgaaacactgctaattataacagttggtgctctgaatgttattggctcttttccattcagtggttatgactgcttattgtaatctaagtgaattttctgtagatgatgtaccccatttcctgcagtaataattagtacgtctgatgcagtatgcagctataatcaagaacttaacggtgcatgtagaccatctgatgttgtacttcctttccagcataagtaaaaggcttacatttatactcaatttacgtctaatacacttttcttttgaatcctatttttacttgggacactgttgaggtggtacgatgttggaactgccatggaggccgagctccaagtggtctaccacgtattcattggcgagattggcctcaagttacaactgtggaaatttaacatgttaactaccgactacgggcctgttgacttggtgttgtatcatatgttttttactagcccaaaagttaagaccggttgattatgtaaaactgaatcattttagctttgttttatcagtgctaaatatgtgattgatgcgatctgtaactttggtcacattgccgtgtaagataacatgtgatatctgaagataatatatagtgcatatgaaaataaaaaaaaaaaaaaaa

SEQ ID NO: 102297 - DNA, 205 bp, Oryza sativa
  Clone ID: PAT_MRT4530_99833C.1
atggcccccttgccgccctcacagaaggcgattttacactacgcaggggaccgcctgcttaaagggcggcaggatgaatataatgaaaaatcagagagggagaaggagttttatatcccgcaggggcataaaatcgccctcacagaggactgcaagggagccgcctacagaatgacaggccgtcctcgctgcccttttgcaggcg

SEQ ID NO: 102298 - DNA, 222 bp, Oryza sativa
  Clone ID: PAT_MRT4530_99834C.1
atggcgcactggagattgggggcagggatggcacggtggagattgggggcaagggcgacacgacagaggttgggggcaagggcagggccacacggtgaggcggaggttggggatggggacggcgcactagatattgggggtggggatgcgaggcagaggttggggatgggggcagcacggtgcagtgtggcggaggttgggggagggggcagcaaggtggag

SEQ ID NO: 102299 - DNA, 1221 bp, Oryza sativa
  Clone ID: PAT_MRT4530_99835C.1
atgcaagagagcagagagtattggcgcgacggcggcgatgtcgtcggagaggagctcttgagggagatcctcgatgagaccgccgcggtgcattccaattccaattccaattcaaattcaaattccaattcaaaggaggcggaggaggaggatgagagagaatattttgccgcagctgcagcggatgagcagctgcaggtggaggctccttgcgggcggcggcggcgggagtcgatggtgaacaagctcatctccacggtgtattctgggccaaccatcagcgacatcgagagcgctctctccttcaccgccgccggcgaccatcagctactcgccgacggtcacaatttcgctgcaagtagctgtagcccagtggttttctcgccggagaagacgttgagcaagacgatggagaacaagtacacactgaagatgaaaagctgtgggaataatggtgggctcgcagatgatgggtacaaatggagaaagtatggccagaaatccattaagaacagcccaaaccccaggagctactaccggtgcacgaatccgcggtgcaacgcgaagaagcaggtggagcgagctgtggacgaacccgacactctgatcgtcacctacgagggtctccacctgcactacacctactctcacttcctccactccacttcttcctcctcgtcgtctactaccacccaacaacaactgcagcctcagcctcagatgatgaccaactgcaagaagaagcccaagctgcacctgcacccgctgctgcacgacgacccacccccacccccaccgccgccggaaatgacgaccatgatgataatgcagagcttcagcatccagcaacaacaacatgatgatgatcagctgctgcagcctgctgcagatgatcacttgatggtgcaggctccccccgatgattgttacaatattaacggcagcagcagcagcggcttgatgatgagcttggacgacgacgagcaggccgccggcgccggcgggctactggaggacgtggtgcctctgctggtccgccgcccgccgccgcccatctgcaacaacaacaactactactactcgccggccaccacctgcacctctgacaacgagtacggctcgtcggcgtcggcgtcgccgtcctcctccgtctccgtctccagctggactactcccatgtctccctgcatcgacatggccatactctccaacatcttctag

SEQ ID NO: 102300 - DNA, 2223 bp, Oryza sativa
  Clone ID: PAT_MRT4530_99836C.1
cggtggccaggagtactactacttgtactatcaacagtgcagcatgactgacgataccgcgacgagacgacattgatcgtccaaatccaactctgtccgcctgccaattgccacaaagtccccaatccgccaaagacccagatcatcacgaccctgttggcgcgtcgactagcacaagctcacacaactcatccctaatccctcccccctactctccctttttttctccctctcctccctccgacccggtggccggcacgccatcccaccccctaacctcccattttagatccacagcctaatccttccccctactatccctctccctctcctccctccgctcggtggccggcacgctatcccagcccctaacctccaccttgctgccccctcccccaacctccgccacactgcaccgtgctgcccccatccccaacctctgcctcgctgctctctcttcccttcacccgatggtcggtgccatccccgtcctcaacctccgcctcaccgcgctgccccaccccatcccccaacatccgctgtgccatcccttcctccaatctctaccgcaccatccccaccctcaatatctagtgcgccgtccccatccccaacctccgcctcaccatgtggccctgcccttgcccccaacctctgtcgtgtcgcccttgcccccaatctccaccgtgccatccctgcccccaatctccagtgcgccattcctgtcccccaacctccgcctcaccgcgctgccccacccctgtgcccaatcttcaccacgctatccccccccaatctccactacgccatccccacctccgatctccaatgtgccatcctcgtccccaaccttcgcctcgttgttgccatcccaaccaccaaaaaaacctctccctcccccttctcccgcgaaaccccgcgcgcgcgcgtcgccttatccaaccccccccacgcggccactcccccacgcacaccgcacgaggctctctctctctctctctctctctctctattccaatccagtcctgaatcagtccacccctttccttcgctctctctctctaactgcagatttccctcccctttcaacgcgcgcgcgggtggtggggggaggcacggcacgaggcggaggcggcggaggaggtggtgggaatcgatccctttctgttccggccgcctcgatcgcccgctacccgcacgccgccttttcgtcccggtggatttctgcctcccttttctcgattctttcctttttcttcttcttctgcatgcgcggcgggctgtgacgccgaccatgggggacgcctcggcatccacctccgcgcccgcgacgcccacgtccacgctcatctgccgggaggatggcaacgacctcttctccgccgaccccgccgacgacgatggcggcggcggcagcggcggcgactgggagttatccattgctgacgacgaccatgtgttgctcatggaccgggacgatgagtacctcgcgctgatgctgtccaaggagaggtgtgccggcggcggcggcggcggcgagcgtggggatgaggaggaggaggagatggtggaggagtggatgaagaacgcgcgcgcctcctccgcgctttgctggttgcagacgaacgcgggattccggttcagcttgaagacggcgtatgtcgcggtgacgtatctcgatcggttcttggcgcgccggtgtgtcgatagggacaaggagtgggcgctgcagctcctctcggtggcgtgcctgtcgctggcggcgaaggtggaggagcgccggccgccgcggctgccggagttcaagctggacatgtacgactgcgcgtccttgatgcggatggagctcctcgtcctcaccacgctcaagtggcagatgatcaccgagacacccttctcctacctgaactgcttcaccgcgaaattccggcacgacgagcggaaggcgatcgtcctgcgcgccatcgaatgcatcttcgcctcgatcaaagtcattagctcggtggggtaccagccatcaacgatcgctctagcagcaatcctcatcgctcggaacaaggagacggcgcctaatctagacgagctcaagtcggtcgtgggctcgttatggcagcaaatagacaccgggcatgtgtattcctgctacaccaagatgatgattcaagaggacaggtcgatgcaatcgacgacgggaggtagcttcctcgggtgtctctgttgccc

SEQ ID NO: 102301 - DNA, 492 bp, Oryza sativa
  Clone ID: PAT_MRT4530_99837C.1
gaacgccggcggcggcggcgtactggacgccgaggagaccctcatcgcgcggaaacccgtgcgcacgaacgcctgaaacaaaaaactccggggggtcacgagacagatctgccacctccatggctccatctgcaacgaaaatactacacagaaaaggatgcgacgaactagagcatcggcggagaaaccaaaaaggcccgcagaaagcttgcgagagagaggacacgcagcggcgccgcctcgggccacgcgcccccttcccccgctcctccgcctccgcccaaaccgacgcggacaccatccctcccacccaccggagcacgcgtctccgggagggagacgagaccacactcgcacacctcggaaccctcgcccgcgtaggctcgagaaggagaaagaggaggaagggaggtcggcgcctaccttcctggtggatgacgaggcggaggcggcgacggaggccggcgacgagtggccggcgaggacgcggag

SEQ ID NO: 102302 - DNA, 1029 bp, Oryza sativa
  Clone ID: PAT_MRT4530_99838C.1
atgggggacgcctcggcatccacctccgcgcccgcgacgcccacgtccacgctcatctgccgggaggatggcaacgacctcttctccgccgaccccgccgacgacgatggcggcggcggcagcggcggcgactgggagttatccattgctgacgacgaccatgtgttgctcatggaccgggacgatgagtacctcgcgctgatgctgtccaaggagaggtgtgccggcggcggcggcggcggcgagcgtggggatgaggaggaggaggagatggtggaggagtggatgaagaacgcgcgcgcctggtgtgtcggctggattgttaagagggacaaggagtgggcgctgcagctcctctcggtggcgtgcctgtcgctggcggcgaaggtggaggagcgccggccgccgcggctgccggagttcaagctggacatgtacgactgcgcgtccttgatgcggatggagctcctcgtcctcaccacgctcaagtggcagatgatcaccgagacacccttctcctacctgaactgcttcaccgcgaaattccggcacgacgagcggaaggcgatcgtcctgcgcgccatcgaatgcatcttcgcctcgatcaaaggtcgatcattccccccctctgctttcatttcaccgaatcggatcgcaagaatctcatttcatttccgcaatctcgtagtcattagctcggtggggtaccagccatcaacgatcgctctagcagcaatcctcatcgctcggaacaaggagacggcgcctaatctagacgagctcaagtcggtcgtgggctcgttatggcagcaactagacaccgggcatgtgtattcctgctacaacaagatgatgattcaagaggacaggtcgatgcaatcgacgacggaggtagcttcctcgggtgtctctgttgcccacattgggggatcggaggacagcgccatgggaggggccaataatgccaccaccttggaggcaaccccggacaagaagaggaaaaggttgcactcgcctcagcgccagtag

SEQ ID NO: 102303 - DNA, 120 bp, Oryza sativa
  Clone ID: PAT_MRT4530_99839C.1
atgatgacaagcatgtcgaaatcagctagaggtgcaaccagggaaaagtcatgtgaagagaagattccatccgcaacaggaggtcaagccaagcagttccgagtggtgaagttttgctga

SEQ ID NO: 102304 - DNA, 540 bp, Oryza sativa
  Clone ID: PAT_MRT4530_9983C.1
atgaagctgactgaagccaacaaaaaatctgcattgttcggtgaacagaagcagaatatggccaagcagagacatccctgcatgggagagctgccacaacaacagtccaattcttcagacaggtgggggccatctgtcagcgagagctgcactatcttcttcctcgggcaagggaggccaccgacagccggggcacacgtggagcacggcgacgcgtccacgtcggcgcgcacccacgtcctccatcacaaggatgatgttctttgcttcgcgagaggatcgcgcgttttcagtactgaaatgggagatcagagtgatgttcctggttcatgcctaatggacagaaataataagatccagtggccaccgcacatggagaatttctttccgggaaaggatgagccgagccggaattcagaccgctggcgacggggagcacaggctggagcggcggcgggcgagggccggagtggtggtagccggcgggagctaaagcggcagcgacgacgagctagagccgacgccaacgagatcgagtag

SEQ ID NO: 102305 - DNA, 3476 bp, Oryza sativa
  Clone ID: PAT_MRT4530_99840C.1
atggggtccctcgaggacggcggcggtgtgggtgcgggtgcgggtgcgggggcggggggatacaagcgtggccacccgccgccgccgtcgccgctgctgcgctccgtggtggggccgacgcggcgggggagcgcgagatcccggctggcgcggttcctgctgttcgagaaggtggactacctccagtggatcggcaccgccgcggccttcttcttcgtcaccatcctcgtcgtcgccttcctccccggatcggccgtcttcgagcgcccgacgatgctgctaccctcgcggagagctggcggcgggaggggagggggagctgaggcgctgctgccccgcggcctcggggtggtggagacaggcgagggcgtggcgttcgagccgacgaggctgagggagaggtgggcgagggagcggagggaggaggccgacggcttggcgaagctcgggaatcccgtgaggaggttcggggtccggaagccgcgacttgccatggtgtttggggatctctctcccggtgcaatgcagcttcagatggttagcgttgcctcggtgctagaggcgatgggctacgaaatgaaggttttcacatttaaggatggtccttgtactaatatttggagaactatcggggtcacagttgaccttttacctgaggacacagacttacatatatctgtagattggctagactatgatggcatacttgtaaattctattgaagcaagaccggagcctttcaaatccatacccgtcatttggaatgttcaagaaagttctcttgctcatcgtattagtgaatataattctagtggaatgatccagatcttagatggttggaaagaggccttcagtagggcgaatgttattgttttccccaactatgtattgccggtgatgtatgctgcatttgattctggtaactatttcgtgattccaggttcccctgcagtaccatttcaagatagaatttcagccaaaagttatgaccaagatgtgagagtcagtatgggtttaagtccgagtgattttgtaatttctattgttggtagtcaattttcatatggtggttttttgatggaagaagcacttgtcttacaagcagtagggtctctgttacaacagtatccttctgagaatagcacacaacttgaactcaaagtgagaatcttggcagaaaacgtaactgagaagcataggatggcccttgaggctgtttctttaaatgttggctttccaaggggtgcagtggaacatgttgcttctgaagataaggacaacctccttggtatatctgaccttgttatatatggttcttgccttaacgagcaatccttcccgagtgtgctagtccaagctatgtgtcttgagaagctggttatagctccagaccttgaaattatcagaaaatatattgatgatgggatgaatgcacttctttttccaagtaagaacattggcaagttaacacaagttctattgcaagcagtatcaaatgggaagatatctgttctggggcaaaaaattgcatcagctggaaaggtccatgccaagaatcttatggcttcagaaaccattgaagggtatgctgtgctattggaaaacgttatcaagtttcctgctgaagtactaaccccattaactgctggggagattcctgttgctttgaaacaagagtggaaatggcatctttttgaggatgtgaagcacttgtaccatatgaatgggactttggctggctacaatatactccagaaactagaggagaagtggcgcagcaaccaaatggaagatcatcacagtaatgcatcaaagattgatgatacgttctctcttatggcatgggaggaagagagagcagatgagatagcaaacattaaaaagagattggaagaagaggagttttggaaagaacacttgcaagtaagtggatggattgatattatgcagctgaaagagaggagtgaacagcctcatggaacatgggaggaagtgtatagaaatgtcaaaagagtagagaggatgaagaatgacttgcatgaaagagatgataaggagctggagcggacaggtcagccactttctatatacgaacctttctttggggaggggacttggccctttctgcatagaagctccctttatcgtggaattggtctgtcttcaaaaggtcgaaggcctggcgcagatgacattgatgcttcttctcgtcttccactgctgaacaatgggtactacagagatattcttggtgaatttggagctttctttgctctagccaacaggattgatcgaattcataaaaattcttggataggatttcagtcgtggagagtgacagcaagaaaggcaaacttgtcgaaaaaggctgaaactgcacttttggaagctattcaaactcaaaagcatggagatgccttctatttttgggttcggatggaccaagatgaaaggaacctagcaagccaagatttctggtccttctgtgatgcgatcaatgctgggaattgcaggtcagctgttctgaaagcttttcaaaggatgtatggcgtgcagcttgatgatgatttgcataccctgccactaatgcctaatgatggagacacttggtctgtgatgcaaagctgggttttgcctacgagatcattcctggaatttgtaatgttctcaagaatgtttgtagatgctctggatgcacaaatgtacgacaaacatcatgaaacagggcattgcatattgagtcttcacagggaccaacactgttactcccgtgttcttgagttgatcgtaaacgtttgggcattccacagttcaaggaggatggtttatgtagaccccgagactggtgcgatgcaggagcaacatctgctcaacggcaggagaggtcagatgtcaatccaatggttctccctcgccactctgaagagcatggacgaggacctggcagaagagttcgacgaggatcatcctgaccggaggtggctctggccgaaaaccggcgaagtgttctggcaaggcgtgtacgagcgggagcggaacatgaggcagcaggagaaggagcggaggaagcagcagagcaaagacaagatccagagaatcaagaagagagctcgacaaaaaactttagggaggtatataaagccaccgccagaagacgctggtagcttgaatgatactaggacggtagatcggtagcacttaaccacatacttagggcgatgattctttcagcaggaaattttgttcattctttgcctcgactaatgtcctaaccggtcgcaacctgatgggtgtgattgtttttgtccagttttgtcctgccccgctgatgttcgaggctttgtaaatttgcccatttgatgggtgtgatcatccaggacatcgagttgcaatcctagattctgtagatttggctttgccaaaaaaaaaaaaagaaaaaaaagaaaaaaaattaagggcggccgcgttagagggtt

SEQ ID NO: 102306 - DNA, 430 bp, Oryza sativa
  unsure (1)..(430): unsure at all n locations
  Clone ID: PAT_MRT4530_99841C.1
ctgcaggattcggcacgagatgggctacaactgtgttgggacttgttttgttctctatggcaggattgtcgttaaatgtaattgatttgtggctaaacggagctacaaccttggcaccacgctgaggctaggtatgcaggggatctgtgattatttgccacagctcacacatcatgtgccttcctaaagtggatctcatggtgctctangtggagcttgaattgccctttcctgacaccttactccctgcttctgcttgaacattttgatgaangtgcacatcaggaacntgaantgggctaagggctttcttgcagctaccaacgacagcggcactaacaccaggcggcattcgtcnacacactgcatttccatttcaccctgtatttgttccattcagttccctattatttgttccattcagttccct

SEQ ID NO: 102307 - DNA, 334 bp, Oryza sativa
  Clone ID: PAT_MRT4530_99842C.1
ggaagcagggtaatggatacatatacgggacttcctccgtttcacaagggaaggcattctagaattttctatattcaaatgggggttaaggaatctagataaatatatatgtctagattcaatacccccaatttaaatggggaaaaggctaaaaggacttacattgggaaacggggggggtccatcacagggaatggcaacccaatataatatcgggaaaaacaaacgaggcccaggacccccatttggggggaatatcagggaccagttatgcccaaggaagggtcataacaaagggagctgggcccctaaacgcccagaatcccccgaagat

SEQ ID NO: 102308 - DNA, 162 bp, Oryza sativa
  Clone ID: PAT_MRT4530_99843C.1
aaacgaataaaatcattattgcaaaaacatgattttcttcttaatctttttagagtccacaacaccaactggatcattatctcggcccactaaacccatgtttcccccaactccaaagacaaacgtaacttggccttggccactaaattccattccaactca

SEQ ID NO: 102309 - DNA, 711 bp, Oryza sativa
  unsure (1)..(711): unsure at all n locations
  Clone ID: PAT_MRT4530_99844C.1
ttgcccacattggcacgtccccaagatggtgaagatccaatttataggcttttgtggaaatataaagttcagctgacangtgtnaagttttctagtggcatgtcagtaattgtagtgccggctcatgctgttatgcattggagncatattggtcagattgcttttccggtgcagactgtaggcgggcatatgatactgtcctctcccgccgttaatttgtcaagaaagcaacatgcataagattgattatattggcaattactgccaacagggtgtgttgagataaatgttgatggtgctcaactgcgcattatgctgaccaatctcaaggtgtctccagtgtggtgatctaatcatctaaggaggcttttatcgcggtaatgtccaagtggtatgatcctattcatgttctctggttgcagtgtttaatttgattgttgagttggggggattgatcatgttatggtgcagagggactgccgatatctctagtttcactttggtcttgttagcatcgggcgtcaatcttgcatatcctggaggaaatacaagagctaagaaagagttttgtttcttttattattgtgtatgctaaaacgataaaactaatttagctactcatccgtgtgtaaagcagacaaacatgctgtatgattcgcacttggttgagtaattcaatgaaaagctcatggtctaaaaaaaaaaaaaaaa

SEQ ID NO: 102310 - DNA, 175 bp, Oryza sativa
  Clone ID: PAT_MRT4530_99845C.1
atggccgtcgccggcggctcagcgcgcgacgaggcgccttcccggggcggtcgacggcgcgggcgcatgtcctgggcatgcatcggtggcggcaacgcgaccccggaagaaggggagcgcggatctggcggcgctgctgctgcggcgccgccaggcgtcggctccgaatccgcaa

SEQ ID NO: 102311 - DNA, 729 bp, Oryza sativa
  Clone ID: PAT_MRT4530_99846C.1
atggcttcccatcaaaggtctgcaagtctgccatccaggcttcactccactgaatccaatgtggaagaagagcttcatggcttgagatcatgcatctcttcaccttccgcgacaatcggcacgatgtgcgatggtctgaggaggctcggagaggtctacaacagcatagaggagatcatgttcttgcccagcaaccaagctggcatctccttgcaccagcagaggaagatggtggaggaagaacttgacatgtccctcctgctgattgatctctgcaatgccatgcaagagagcttatcagagatgaagatgagcatccatgagctgcagctactcctcaagagaggagattctgtggcagttcacaacaagatcgagtcttttgtccggctcgcgaagaaggcgcagaagatgccattcaagaagacaagcattggagccatctcagagagttgcaagatgatcaggctactgggagaagccagagagatggctgtctctgtgcttgaatccacatctcttctgttgccaaagcagattgccaagaacagtgcaagcaaatggtctctggtgtccaagaggtttcagagaaggaatgttgttgtgtgtgaggagcagcagttgcaagaactggagcatagcatgggggatcttgaggatggtgctgagttcttgttcaggagattgatccagatcagggtttctttactgaacattcttagctcatag

SEQ ID NO: 102312 - DNA, 2022 bp, Oryza sativa
  Clone ID: PAT_MRT4530_99847C.1
cgggagcggctgtggcgaccggctggagctcgacggcaagcggcggcggcaaccgtcaccgccgccgtcgtcgtcgcagctgccatgctgccagacctcgcggcggacacggcggcgctgcttgcgttccgggacgcggtcggcccgcggctgccgtgggcgtcgtcgtcgtcctcgccgtgcgggtggcgcggcgtccggtgcgacgccggcggtgggcgtgtcgtcgcgctgcagctccccggcgcgaagctggtagggagggtgccgacggggacggtgggaaacctgacggcgctgcggacgctgtcgctgcgctccaacgcgctctccggcgggatcccggtggacatcggcaactgcggggagctccgggcactctacctgcagggaaaccagctcgccggcgaggtgccggaggggttcttctcgcttctgttgctacagcggctcgacctctcgcgcaaccgcatcacggggagcatctcgccggagttcaacaagctccggcggctcgccactctctacttggagaacaacggcctcaatggcaccctccccgccgatcttgatctcccgaagcttcaactcttcaacgtgtccaacaacgaccagctcaccggcgccgtgccggcgtcgctcgccgggaagccggcgagcgccttcagtgggacaggactctgcggtggccctctaagcccgtgtacaaacacttcgccgccatcgccgtcgccgtcgccgtcgccgccgattccgccgcctccggcagcttctcaagatagcaagagcagcaagctctccggtggtgcaatcgccggcatcgctgtcggcgccgcggcggcgttgttggtggcgctcgcggtgatcgtcctcctctgtttcaagcgtgggaggagaaaggaagggagaccagccgacgtcgacgaggacgcgtccccggtgtcggtcacggtggcgaggacggacaaggtcgaagtgaagcggtcgcggtcgcgcccgtcgcagcagacgacgacggcgagcggcgccaagaagctggtgttcgtcggcggcgagccggacgtgccctacgacctggacacgctgctgcacgcgtcggccgaggtgctcgggaagggctggctcggcacgacgtaccgcgccacgctcgagggcggcgccgccgtggtggccgtcaagcggctcagggaggcgcccatcgcggagagggagttccgtgacagcgtggccgagctcgccgcgctccgccacgagaacctcgcgccgctccgcgcctacttctacagcagggacgagaagctcctcgtctcggacttcgtcggcgccggagccctctcctccctcctccacggcggcggcggcgccgtgcgccgcgcgcgcctcggcttcacgtcgcgggcgcgcatcgcgctggcggcggcgcgcggcgtcgcgttcatccacggcgccggctcgtcccacggcaacatcaagtcgtcgaacatcgtcgtcaaccgcacgcacgacggcgcctacgtgaccgaccacggcctcgcccagctcctcggcgccgccgtgccgctgaagcgggtgaccggctaccgcgcgccggaggtgagcgacctgcgcagggcgtcgcgggaggcggacgtgtacagcttcggcgtggtgctcctcgagatgctcacggggaggccgccggcgaacgcggtgccggggttcgacggcgtcgacctgccgcagtgggtgcgcgcggtggtgcatgaggagtggacggccgaggtgttcgacgccagcatcgccgacgaggcgcacgcggaagaggagatgatgcggctgctaaagctcgccgtcgaatgcaccgagcagcggccggagcggcggcccaccatggccgaggtggcggcgaggatcgagcacatctatacaagtatttgaaaactatttgggaaatcaccaactcacatgatttccaactcccaacaatctgaagaagagactttttctaaacgcgggcttatcttgacatggtcagtgagtcaa

SEQ ID NO: 102313 - DNA, 488 bp, Oryza sativa
  Clone ID: PAT_MRT4530_99848C.1
gaaaatattgctatattttttttataaatttagtccaatctaaccaagtttaaattaaaaaaaatgtcaaagcgacttataaaataaaaaacagaggtagtacattacacctgtacaccaagttcttggaacatgagcgtaatttactctttatagcaagaaaagttaccaaggggaaaaaagatgaatggattaaatggtggagaaacaaaagacgctcatcaggaatcttgtcatgctctaataaattggtacattaaaatatggataaattatatttttaaaatgaaaagtcgatagatgaacagacacgtgcaactgaacatgcctgaggaaaaaaaaggaaatgccaatcatgaaaaattgaaggtaggggatttgcagttttgtaccacagaatctgtatcgaatgggaccactgaccatgattaaaaaaaagctggacgcatgcttggatccaaagataaatctcaattttataaatagag

SEQ ID NO: 102314 - DNA, 348 bp, Oryza sativa
  unsure (1)..(348): unsure at all n locations
  Clone ID: PAT_MRT4530_99849C.1
gctgcgcacttgttgggaagggcgatcggtgcgggcctcttcgctattacgccagctggcgaaagggggatgttctgcaaggcaattaagttgggtaacgccaggggcgaattcaagctcggtacccctatcagctcaagaggccaccacaatgacatgntgcagacggcagacctggtacatcagtcatcgatggacgcagcctcgtcgctcctggtgactgccctcaacgaagggagggatgtgatcatggacggcaccatgtcgtgggagccgtttgtccagcagacgatcaccatggccagggctgtgcaccggcaacggtaccgcatgggtgttggctacaag

SEQ ID NO: 102315 - DNA, 650 bp, Oryza sativa
  Clone ID: PAT_MRT4530_9984C.1
cggggggagctcgtccggcgggtctatggcctttgcttggtgcaatgcctggttattacgacatcgatgatatcctgatggaggaggagcctatttcggtagtttttcaagtgagtgcaaatggtgttggactactagatcctggcgctgaaagaaacagtgtaagtgacttttgcacctatggtttagtgctatggtatctccaggttgaaaagggtgctaaggtggaccttccattttggcttgcacatgggctgctgtctctggaacaagcagtttcaataaatgtacctccttgcttcacccagaaaacccggaaggagatccaagctgatgcagcctgtgttgatttgaggattcgttgcccttacttctatgagctaggatgcaagatagtccctttggtgaacgacaggagcattggactgttcttgcgctatgcattcactagtaggtacaaggagatactaagcaagtcacacagctcttccatgatgacagtgcccaagtttgttccgcgccttacaaaagaagaagctcaagtgttcgaatctgctagggactcgatgaccgctttcaagaagtggcgcgctggcggtgtgaggctgcagaaagcgtccattcttggtaggaaaaggaagacaaaactg

SEQ ID NO: 102316 - DNA, 369 bp, Oryza sativa
  Clone ID: PAT_MRT4530_99850C.1
atggcggggctagggacggcgctcggccctccgctactccagcgccggcggatgacggggccaggggtgcagttggcagggccaggagcggcgccgtcctcttcagcctcctacctcaatgacatcggtggcagcagccgttggggaagcgagaagacggcggccaccgtcgcattcgagtgggatagcagcggtgttgtacaacaccggcaagtcactgccgtcggtgacgacgaccttagccgcatcaaggccgtgcacatcaccgtgccaggcagcgtcgcgctcaccggcggatcccttcccagcggctgcggggaccgtggtgttgatgcgaaaaacacacactggcctgggagatctgcttaa

SEQ ID NO: 102317 - DNA, 2096 bp, Oryza sativa
  Clone ID: PAT_MRT4530_99851C.1
tttttttttttttttttttttccggggggaggtgtcattgagtttttttcatcagtgctttcactgaagtgaccatgaaaagtatgtgttgtttcttgtctagatccggaatacatcgtacaagacacatgtgtacatgcccgatgactccgacgagctccattcgatgcagctcgatcgcccggcaaaacgaaacaatatgccgggtggtaacggagtcaggatcagttgatacaatgtacagtatgatacgtacataacacgaactgtgtcccacgagccattgggcagccaccacacacaaccaacacccaaatacccccagtcctacctgaaatcgtgtcaaaagaaaagaaaattccaacctgacacgagtgatcgtgtgctgcagctacgagggcgtggacgtggtccggaagcgcgcctcgctcctctggaccgccgccatgatctcccgctgcgccggcgccctcgacggcgacgtgaccagggcctcccaggccgccgccgccgagccgtccggatagatctcgtggacgcagtcggcctcgtcgttgaggtggctcaccctctccaagcagccgatttcttcagggtccactagaaggttgctctcgccgtccttccatcctatcagcttggcggcgcccgtggagttggtgcagtagagcctcgcattgtcgacgaggttgcagtagctgtggaacgcggtggcgaaccgcttgtgggacttcagctgggacttcaccctcactgctctcccggtgatcacagctctcctgattcccctgacaaccgcaagataggcatcacagaccacacctacgagctcgatgcgatatggcttcctgtttctcgtctcgccttcttcatctgtactggagtcctcaactggctcccagtactcctcagtgattgacccgtcctccgtgaccttgtagccaacacccatgcggtaccgttgccggtgcacagccctggccatggtgatcgtctgctggacaaacggctcccacgacatggtgccgtccatgatcacatccctcccttcgttgagggcagtcaccaggagcgacgaggctgcgtccatcgatgactgatgtaccagttctgccgtctgcagcatgtcattgtggtggcctcttgagctgatagctcgatagattacatcagtttccttgaatgcatctgcctctacaactactgcatttgcagctgctccggaccagaatgcttccttgagtatatccttaagcacggtgctcttgccagctcccatcccaccacccatcaagagtagaactgggctgcgatcacaatgtgctgctgggaccatcacatcactccgtggtgcttcaacatgggaagatagtcctatggccttcagctcctccaccaatgtggagaatagtctggtcaccttcaagtttcttgtaaccctttcaaatctctgtttcctagtggcctctaataccatgttcctgagctttcttttaggagcaccttctacagtcaaaacctgggaaattatataggttgcatagttccaatggaatgagaagtagccaagtatacatttgtcgagttcctcgatgaactttacaatcagagtctcgggatcctggctgttttggaagaacgcgaatatgttttcttcgtaacccttgttcttcctcagataatcataggccagcgtacataggtgggggcattcatccacatggtcaaacccaatttgcctagcgacgtaatgcgagaacctctccatctcatggacgcggccggagtcggacaccagcagccgcggcgccgccgcgggcccgtactccctcatcctcgtttcgacgcccgcgcgcttcaggctgcggtggcggcggcggagaagctgagcaacccgggggcgacggcgacggcgagggcgagggcgaggcgagcaagctgcaaccccaccacgacgcccatccgctaccggccaggagcgacgacgacgacgacgacgagcgcgacgccgtgcggcatcgtgcctctctccccctttataccccaaccacacgtgccctcccggaaggaagacttcggagcgcgttcgtggttgt

SEQ ID NO: 102318 - DNA, 675 bp, Oryza sativa
  Clone ID: PAT_MRT4530_99852C.1
atgggggaaaggggtagaggaaagaggagatcactcgtgggccgaattggagggaaacggacagtcacgtatctaggagagagggaggggccgcctccgtcgctgccggtgctcgagctccccccttcgccagatctaggagggggggggaggggaatgggaggagaggcgccgctgccagcgcccgagctcccccggcctctgctggatctaggagggagagagaggaaggggaggggaggcgccgccttcaccactgtcggcgcccgagctcccctctccgccggatttgggaggggccgcgtcgcattcgctgaagtcgcctcccccatccgcctgctaatgccgctgccggcacactcccctttatgtgactcgtcgactctagaggatccccgggtaccgagctcgaattcgccctatagtgagtcgtattacgcgcgttcactggccgtcgttttacaacgtcgtgactgggaaaaccctggcgttacccaacttaatcgccttgcagcacatccccctttcgccagctggcgtaatagcgaagaggcccgcaccgatcgcccttcccaacagttgcgcagcctgaatggcgaatggcgcctgatgcgccccgacacccgccaacacccgctgacgcgaaccccttgcggccgcatcgaatataacttc

SEQ ID NO: 102319 - DNA, 1544 bp, Oryza sativa
  Clone ID: PAT_MRT4530_99853C.1
ttcgctttcgcctcttctccccctctcctctcctgtcctctcctctctgcgtgtgcatctctcgattccgatgccgccgccgctcgaagcgcgagactacatcgggctcgcggcgtccccggcctcgtcctcctcctcctgctgcgcgtcgacccccgtcgccgaggtcgtcggggcgcacctcgcgctccgcctcggcctcccggggtcggagtcgcccgcccgcgctgaggcggaggctgtcgtcgtcgacgccgcgctcacgctcggccctgctcctcctcccaggggcggcgccaagcgcgggttcgtcgactccctcgaccgatccgagggccgtcgtgctgctgccaccgccggtgatgatgagaggggcgtgagggaggaggaggaggaggagaaggggttgggggaagctgctgctggagctccgcgagctgccaaggcacaagttgttggatggccacctgtgcgaagctaccggaagaatacattggccgccagtgccacaaagacaaagggggaagaccaaggcaaaagtgaggtaggatgttgctatgttaaggttagcatggatggagccccataccttaggaaggttgacctcaagacctattcaagctatgaagatctttcacttgctcttgagaagatgttcagctgctttatcactggtaggagcagttcacataaaacatcaaaaagagacaggctgactgatggttctagggctgatgcccttaaggaccaagagtatgttcttacctatgaagacaaggatgctgactggatgcttgttggtgatcttccttgggacttgtttactactagttgtcggaaactgcggatcatgagaggttcagatgctgctggaatggctccgagatcactggaacagacaggtcagaacaaatagttgcccgagctttcatcatctggacagcaaatgtgtggaccaagtttgctgtagcaagtttccgctgaggggtgcagtgttttacctgaagtatctccgctattagtttatttacgtgtgtagtgaaatctgtggcgtattgtaaaacagccattttgcctacgaggttgtcttgtgtcaatctgtagatggtcgattttgtctttgaaagatcaagtcaggctgcttaatgcttcctgtgtgatactttcatcaattctctcatatatatattatctggagttgcacttgataatgtatccacaacaaaaaaaaaaaaaaaaaaaaaaaaaaaaaaaaaaacgcgccgatctgtgtggcagccaatcttgtttttcagcctgaagctcaaaactctgatgactatcccaacctgggaaagatagcctttctgcagtgtagttgggtggatcttccctatgcatctttgcctgaaactcgtagctctgaatctctgatgactatccctatccttttggctggcatctctgcctatctctgtaatatcccgtactaagtatgtaaattgtggcttcgtcttaaaaagaacactttttttttttgttgaaaaaaaaaaaaaaaaaaaaaa

SEQ ID NO: 102320 - DNA, 637 bp, Oryza sativa
  Clone ID: PAT_MRT4530_99854C.1
ggatcgctcactcactgcctatacaacactacaccgctcggcggtctgcacttgcctcctctgcaaaaaccaagtaggagtagttactgactcactgcctaccactactagtctcctccttggtggtagagtattcttgttgtgttgtgcacttgtgctgcatctgtgcagtgtgctgtgttgtgtagcagcagcagctacaagtagcaaagccaagcacaaccaccatcaatttcacttgctcattcagcagcagcagcagcagcatcagcatcagctgcagctgcagctgctggtcatctctcttctcctctgctgtgtgaagagagtgtgtcttggtgtgtgtgtttcagtgtgtctctcatccctatcaggataagcttctgcttctgctgctgatctgttgcatttgccctgttcttggcgctcgatttgttggtatctcggtgtttgcgatcaataattcgttggttcgttcgttcgccgctagttgccaccttcgccgcggcatgtccgtgggatgagagcgacgggcggtggcgacaaaccggccattcctcgtcctcctcctccggtggtggtggtgacctcaccgtgaaagcgagaggtacacgacgaggtgtccaagttgccagga

SEQ ID NO: 102321 - DNA, 171 bp, Oryza sativa
  Clone ID: PAT_MRT4530_99855C.1
atgccgctgttgatggagaagaatcctcttgcgttgaaggaggattggagtggcaagtgtgggttagttgcgcgtgtgctagaggacggggtcggaggcggaaggtgggcgatggatggaggcagcgtcatcgtcggcgttatcgtcgtcccgaccggccatggagggtag

SEQ ID NO: 102322 - DNA, 652 bp, Oryza sativa
  Clone ID: PAT_MRT4530_99856C.1
agagcaagaaggtaaaagatgcgttcatgcttgcagcttataagtattctcgggtagtcagctgacgagttgcttcctttccaaattgttttttaggatcatcctgatttactgtaagcaaaccgaacaatgttgcttgatagggacgttaatgtgacatcccggcccagggcttaatagaattaatagaatactcatatcaacaaattctaactttttttccggaagccgatctcgaaagaactctgaggttaagtatgcttgacttggagcaatttgggatgggtgaccgaccaggaaattctttccaggtgtacacgagtgaggacaaagtgtgcagaaaagacttgtgttggtttgtgagagcagtctatgacctatgaaagctgccagatgtaagtgggcccggcctaggagaggcgtgacgttacagctaatatgacactaaaatttcggtcatttcggttaattcggttaaccgaacccaataaccgaaataaattcggtcttttgagggctgggaccgaatagataaccgaatttctcggtctcggtcttaaagcataaccgggacttagtatcaggaatggcatgacttgcccatcaccaaaacacaaacatccaggaccgaaggtaatgacataacacaccc

SEQ ID NO: 102323 - DNA, 2341 bp, Oryza sativa
  Clone ID: PAT_MRT4530_99857C.1
atgggttcatctgtctcaaagcaagacgacgacaccgcattactgatctgcaaggatcggttgagacacattgaacaagcaattgatgcaaggtatgccctttcagctgctcaacttgcatacgagcaatctctccgcagtcttggcattgctctaaggcagtttgtggaggcacacaaggatgatgatgatatagagaggtctcctagttcttcttatgctatagtatcatcatcgccacctcaccgttccgatgttaaccatatgaagtcagaggcaagcacttctgtgacagtgacaatcaacacaagtcaggctagctctgttcagaaggagcagtcggttactgctttccttccaccaccgctgcagctagagttttgctcctcatgggatttctttgatccaactgttgttagtgaaaatgttgcatcagatgcctcagtgaacagccaaacatttgaattgagaacgttggaagatctgagcaatccaaatgaaatgggtttggcttcttcaattggaaacacaagtgaaattgttgaggtgcaagaagtgtttggtgcacctggatggaaacaggttcacaaaaatgataaccttcctgacttgcaccactctaattctaatgaaattcagatgtctggtactcatttacccaatgactcaagcttggaggaagagctcgagcaagtacagacgcaggctataggagggcagaattctaatgatgttagtgataatattaaaagtgaggccaaccatataaatgttaatgctcccaaaaatgaagaagccaaggccattttcatcactgactctgactcatccaaagattttctttcctgtgtgaaagatcttgaacgtcagttttctagggcagctgtatcctgccatgaggtctcgaggatgcttgagacgaagaagatccgccttagcatttcttcccagacaaaaggaaaatcatcagatgtgctttttcgaccaacatttctcatcggttgcaaagccggaactgcagcatctgatggatcagagaagcgtgtcacaaaagcaatcacttggaatcgctcactttcatcgcgatcatcagcatctaagaacccacttactccagctcaaatggacgatgaattttcagagatctgtagtgactttgttgaagagttttgtatgatttcaggaagccatgcatcctctttagatagactctacgcttgggaaatgaagctatataatgagttaaagggtacagaatcactcaagaagatatatgataagaaatgcgttcagttaaggcaccaatttgaaagggatgcgagtgccagacaagttgacaagactcgagttattgttaaagatttgtattcgcggctcaaggtagaaactgaagtgctatattcaatctctaaaataattgagaagttaagggatgaagagctgcagccccaacttcttgaactattaaaagggttgacgcgcatgtgggcaatgatgcatgaaattcaccgagttcagcagaccatcgtctcgtcgtcggatatcgtttatgtcctgagatctcctcgcggcgagccgtacaagcagcccttggtgaaccttgtcaacgagatgggtttcttctactccagcttgacgaattggattgctgcttacaaatgctatgtggatggtctccactcctggctgcagaaatgcgtgctgcaaccttacgatcacacccggggaaggaggctgacgctctcgcctcgccggcaccttgctcctcccatgttcgtgctccttgatgactggtcctcagcaatcgcgtcactcccgggtgaagaaaccttgggctctatcaagaacatcatgtcagatctcaagaaaatgttcaagaatcatcaagcagaaggtaacaaaccggagactggatcgaagctggcaaccctgcaggccggtttagcaaccatgttcgatcggctgtcaaagttttcaacagccatgtccagcttgtctgaaagcgtgaagaactcaaccgaggctgcccgcgaggcgtatgccgttggtcggtcaggttaagttacaggatcatacccattacctggtaaatttgtttgaattcagtttatataggacaaaaagaaataagtttcgtcagaaagatggtgattcggtggtggtggtggtggtatacccgtcaactgtacattccttttacctgtttgtgttccgaatgttggtagctcctgactaggccagtcagcgttttttgtaactgaaatggtgattctgtttatgcttctgggtgaagtttgtagacaagtttacctgccgaaaaaaaaaaaaaaaaaccgcggcc

SEQ ID NO: 102324 - DNA, 356 bp, Oryza sativa
  unsure (1)..(356): unsure at all n locations
  Clone ID: PAT_MRT4530_99858C.1
ccacgcgtccgataaaaaaaaacaacacataacataatctccgctccgcccacgcgtccgcccaccgccctccgngncgcntgggntnnnnggnnataatagttagtttnagatgttaatttnttagagttttttnttntatattaattnttgtacatgtagtaagtatatgttaattttttcttgattgatcgatgagccgatgtcttgctgattttatatatntcgagncttttctttgattcacatatcttaattttctccccccaagcctttttatgtttttttatcacttttagtttccccaatattttttttgatgatcttgtgtgatccattatttctagttggaactg

SEQ ID NO: 102325 - DNA, 404 bp, Oryza sativa
  Clone ID: PAT_MRT4530_99859C.1
ttattggttcacgctaccatagtcgataactgaaagatgcagattactcattgcggaagtgtaacggaaaaatgtgaatacaggtaaactcacgacgccggcaaccgtcatgcctcctaacgagtcccacacgctttccattcctcgccgcagatcggctcgcacgccaagaacgcgcatggaggtgtcgccggagcagggctcgacctggccggacgacttccgctgcccaatctcgctggaggtcatgaccgaccccgtcatcctcccctccggccacaccttcgagcgccgcagcatccagcgctggctcgacggcggccacctcacctgccccgtcaccaacctgccgctccccccctcgccgcccctcatccccaaccacgccctccgccgccttattg

SEQ ID NO: 102326 - DNA, 853 bp, Oryza sativa
  unsure (1)..(853): unsure at all n locations
  Clone ID: PAT_MRT4530_9985C.1
gatagatagaaagatagatagtccagccagaaaggtgccgtcgcctgtctgtctggtccaagaaacagaaacgttcgtgtcgccgtataagttgcagaactcgtcgatctccagtgtataagcgaatcagtttgtggtttgttccgggaggaagaacagaagaccggaagggttggctgcgatggccggagggaaggcggtgtactcgttccaggaggtgagcaagcacaacgaccggaaggattgctggctcatcatcgccggcaaggtgtacgacgtgtcgccgttcatggaggagcaccccggcggcgacgaggtcctgctggcgtgcaccggcaaggacgcgaccgcggatttcaacgacatcgggcacacggcgacggcgaaggagctgatgccgcagtactgcatcggcgaggtcgacgcctccacggtcccggccaagccggcctaccgcgtcgtctccgaggacgcgagcgccaagccggacgccgcgagccagggcgcctggctcacggcgctgcagctcgccgtgccggttgtgctgctggggctggcctacgcgctccaggacttcgccaagaccaagacggcgtagggctagggcggctctgccgccgcaggctgggggcctcttggaatcgtcatctgaatatttgggtccataggtcgaagtgtcagactgtcaattaagtgtaccagtgctaagtgctagttaattattagtaatctccgtaaagaaaaataaatgtttgccgatgaagttctgttttctaaaaaaaaaaaaaaaggggaccggctttttctgccattcagcatctgagcatggnccattgatccatctccatcgtcc

SEQ ID NO: 102327 - DNA, 410 bp, Oryza sativa
  Clone ID: PAT_MRT4530_99860C.1
ggtgctctctctctttttttccccctcttaagttctacaagtctccaattttcctttccatctttactctcctacaaagggttacctacaccggtgcgccaacacaacttattggggacgggagcaaagtttgcttgacagctgttgcatcccccattctagagggccttcctcatcctatcatcatactttatttgccataggcacctgtgctcatgggggctgttctttctgacggctttgtttcactaacgcccctttacatccctctccgcgtgccggaacgggacactcaactaacggaactctggttgctctacttgctcgcagctggtcccttagccagcctcctccatgtgcgaggtggcacgctctccttggggtcccttccgatgcccagacggtcctgc

SEQ ID NO: 102328 - DNA, 2355 bp, Oryza sativa
  Clone ID: PAT_MRT4530_99861C.1
atgaaggctcaagcaagcaaatcgcctccccaatcttgggtgcctgaagggatggatcctggtaaagcatatctgttgaaaatcaggctccatgggcaccaaagtagagaaaactttacatttagaacagaggaagtgatatatagcgacagaacaaacttcaaggattttattgatcacattagagagaagtacccatggggggtgaatgaatttgtaacaatgaactattttgatccagtaaacagaaactaccctcaagtatgctcagaccagtcaatgctagaaatgtttgacaagaatatgactagcaaggaaatatctatgttgattcaaattcataagaacaatgagcaagctgtagttctgccacttgctgattggccaacacctaaaaaggtagttagtggggcagaacctaatgcagttaatatacatgaggtgccatgtactccatctcttgcaatgccatctcaggctactatacttcagggaagcatcagaacactaccggttcttgttctgtacttgcaaaatttattcaaacaagctgcttcattcctgtgttactacctgatagtgccatccgtgagtacaataggtgtggctatcaataatgctaggcaatagaaagagcatactgttgttaattaacagtgtgctcacatatgggtggtactgtgatctctggttgcgcggtacttatggagtactccaagttaatctagcgttttggtactatggtgctgatggattttagtcagtgtatatggtgatggtactgtatgtggtgagatggcacttctatggcactgccaaggcattgcaattactgtgatggtactgtatgtggcactttaatggtagtgatgcattttggggcttgtatgcaaatctgtgatgagagatgatgcacgtgtatgtgctgatttcaacactttatgttcatgacccgtgttatttcagctgtagaagaccaatagtgtgcctcactcttgttcaagtgcaagaagaagtgaaaagattaaacctgcaagtaaggcttggatatgtgaaaaggttaaggattggttgttagaggatgcaaccgtgggagcaaaagaattgcaaagaaggatccttgaaactcacaaagttctgattaactacaagagggtatatgctgggaaggaattggctcttgaaaagttgtatggtaaatgggaggacagttttgacaaattgtacagttacaaggcaataattgaaagagaatgccctggaagccttgttgtaattgatcaccacacagtgctgaataagttgagattcagaagactattctttacactaaaaccttgcatagatggttttcgagatggttgcaggccatatgtagcaatagatagcacttttttgaccggcaagttcaagggacagctagcaactgcttgtgctgttgatgggcataactggatgtacccagtagcctttggagtgatggactcagagaccaatgaaaactacaaatggtttcatggaaaggtgtttgatgataacctctggcctgcagcatactcatataatccatattttttccagaagcacattgagaaaatggatgaagcaaagccagaggctatggcttatttaaggaaaaaccatgttaggctttggactagaagccaattctctgggcaatgcaaggttgattatgttacaaataatttggctgaatgtttcaatagctggatcaggccacataaaggattgcacttggtggatttcatggacaagattaggcacaagttaatggtgaagtggaacaggagaagatcaatttcaaaaaagctagaagggaatatactaccacacattatgaatgaattgaatgaaaagagcaggggtttgaaccatgaggttacaagaagtgatgatgcattagcagaggtggagtgcaagggaggaagtggccacaggtttgttgtcaatcttacagataggacatgtagctgtagagagtggcaggtttcaggcaaaccatgcacacatgctatagcttttatcacatccatccgaggctgcaaacttgagaattttgtagatgagtgctactctgttagtaggttccaaatggcttattcaaaagtaatccctcctttggttgacaaatctcaatggcccaatcctacccatgacttcttgcatccaccggttctaaaaagagagggtgatcctgctgattaccaagcaatgctagctgaaagatcaaggtcagtgacaggatccaaccaacctgaacctttgagtgtgttgatgccactagcagcgcctggagagaactctaaggccaaggctaagacagaccaaaactaa

SEQ ID NO: 102329 - DNA, 732 bp, Oryza sativa
  Clone ID: PAT_MRT4530_99862C.1
atggccccgaagagaggcgcgaaggcgccggtgccggcgaggaagaaggcggcggcggcggcggtgaacccgctgttcgagaagcggccgaagcagttcgggatcggcggcgcgctcccgccgaggaaggacttgcaccgcttcgtcagatggcccaaggcggtgcggatccagcgccagcgccgcgtcctcaagcagcgcctcaaggttccacccgcgctcaaccagttcacccgcaccctcgacaagaacctcggctgccagaaggaaaggcttttgaaaagagcgcaagcagaggctgaagggaagactgttgaagccaagaaaccaattgttgtgaagtatggtcttgaccatgtgacctatttgattgaacagagcaaggcacagcttgtggtcattgctcatgatgtcgaccccattgaactcgtcgtttggctcccagccttgtgcaggaagatggaaatcccttattgcattgtgaagggaaaggctcgtcttggatcgattgtgcacaagaagacagcatctgtcctttgtctgacgactgtgaagaatgaagacaagttggagttcagcaaaatcttggaggccattaagtcaaacttcaacgacaagttcgatgaggtcaggaagaagtggggtggtggtatcatgggctcaaagtcacaagccaagaccaaagccagggaaaagcttctagccaaggaagctgcccagaggatgacctaa

SEQ ID NO: 102330 - DNA, 532 bp, Oryza sativa
  Clone ID: PAT_MRT4530_99863C.1
aaaaaaccgttcattttggacaataatccaaatccagagcatcacaaatccataatatgggcatcaatccaaattcaacattgacttcttcaacagaacagattaacaacacacaggggctaataaacttttttccaaacaaaaccccccaaaaaaccccagtggggggaggggagggcagtgttgccgccgccgtttcccttatgttggggcgccgcccatcggcctcctttgtcaccgagcacggccggaagttttgtcgtcgtcgttgccaccggggccggggccgtcgttgaaaaatccgccgccgcccgggtgctccccggggggcatgcacatccgccgcccgccgccatggaaggcctcctttgtcaccgagcacggccggaagggtcgtcgtcgccggggtcatggccgtcgtcgtaaaattcgccgccgcccgggtgctacccgcgccgggtgcacatccgccgcccgccgcgggggaaggcctcctttgtcacctaccacggcctgaagggtcgtcgtcgtc

SEQ ID NO: 102331 - DNA, 454 bp, Oryza sativa
  Clone ID: PAT_MRT4530_99864C.1
ttctttatttctctccggcatttttttcgatttttactcgagactcgattaccgaattaccagccccttttgtgttaccctgaggaaagaaccgcgagaaaccacctgtcttacctgctaaggacatcccggagcatgtggagatctgagaccatgctgaaacaggcggtccgcgaggcgctgtttaacactctcctgcagcgcaggcagccaagaacgcgcgcctctggctcttgaaaccccagcacaactggctgcaagaaggttggcacaaaaccagacggggatcttataaggccccatactttgaaaaccctgttccgcagctcaaccattaggtaccttgcagggacgggtatcatgaacgggccggcaggattcacccaggggacacttaacgggtgaagaaattctggaagctgcattatacgaagacaatcaccgttcccaaaag

SEQ ID NO: 102332 - DNA, 452 bp, Oryza sativa
  Clone ID: PAT_MRT4530_99865C.1
gtatgttattttttttttttgttttatttttttttgttttttttttttttattttttttttttttttttttttttttttttaaaagaagaaaaaaaacttttttttttttttattcacccaagggtccacgtggaacatttggggttttggggcttttttttaaacttccgaacctttttttggttaaaacctattacaggacccccccagggggggtaaggggcctgggggccccataagccctggggaagatcccatatgagaggggggcgtaaaaatcaaaaagagcttggacttggcccgaattcctttaaaggtagaaaaccccaaactggtggagaggaattttgtggattacggcccaaacaatgtaaatgccctgatggggaaattgttggccacccagcacgagcttttcccaaatttggttttttttaaattgaaaaccaat

SEQ ID NO: 102333 - DNA, 867 bp, Oryza sativa
  Clone ID: PAT_MRT4530_99866C.1
atggctggctcattcattactggggctttaatgcttattcttggatatgcatacccagcctatgattgctacaagacggtggaactgaacaagcctgagatcgagaagttgcggttctggtgtcagtactggattttacttgctgttctaactgtttttgatagagttggggataattttgtatcatggttgccaatgtacagtgaagcaaagctggcatttgtcgtatttttgtggtatcccaaaacactggggactgcctatgtgtatgaatcattctttaaaccgtggattgcaaaatacgaagctgatatcgatcacaatctgcttgagttgaggactagagcttgcgacatggcggttctttacttccagaaggtttccaactatggtcagacaaggctttatgaaatcttgcaatatgttgcttcacagtcacaaacccaaacatctcgcccacaggcacgtgaacagcagcagcgcccaccaccagcacagactcggcaagtgaaccctgcacctcagcctgttcctgcaccttcggtgcctccactgccaccacaacccacccaagctccttctgctccaccaaggaaccaaacgcaggatacaactccagttcctgttcctcctcctggtgcagagtctcttgcccagccacaggcacatgctggtcctcctcaagctaacgccagcgacggccctcagaacactgaagctatgcagattgatccatctggtccatcaacaagcaacgcacgtcagtcatcaataccagacgaagatacgctcatccaggaggctattcggatgacgaggggccggcttaggaggcgcacggccgggtctggacctccaccaagttag

SEQ ID NO: 102334 - DNA, 250 bp, Oryza sativa
  unsure (1)..(250): unsure at all n locations
  Clone ID: PAT_MRT4530_99867C.1
aaacgaatcagctcgtctccttcctccgcctccgcctccgcgagctcccattccattcccggattgngccgccgccggtgttgcagcagccatggggatggggccactagagaacgccgtggtggacgcggcggcggaggccgtggcggngaaggccntagtcgnnggtgtaggcttnngaggttcgtacgngttactgcagtncggggaggactcggagtacgtaaggaaggcgtacggggtctacttc

SEQ ID NO: 102335 - DNA, 1377 bp, Oryza sativa
  Clone ID: PAT_MRT4530_99868C.1
atggctggctcattcattactggggctttaatgcttattcttggatatgcatacccagcctatgattgctacaagacggtggaactgaacaagcctgagatcgagaagttgcggttctggtgtcagtactggattttacttgctgttctaactgtttttgatagagttggggataattttgtatcatggttgccaatgtacagtgaagcaaagctggcatttgtcgtatttttgtggtatcccaaaacactggggactgcctatgtgtatgaatcattctttaaaccgtggattgcaaaatacgaagctgatatcgatcacaatctgcttgagttgaggactagagcttgcgacatggcggttctttacttccagaaggtttccaactatggtcagacaaggctttatgaaatcttgcaatatgttgcttcacagtcacaaacccaaacatctcgcccacaggtgctccagtggcttctgtttctatcagctgtccctcctgttcagctactgacggggtgcccgcattatgggcgttggcctcaacacgattttacgtcacttaaaaaactcaggccgcagtcggtaacctcgcgcatacagccgggcagtgacgtcatcgtctgcgcggaaatggacgaacagtggggctatgtcggggctaaatcgcgccagcgctggctgttttacgcgtatgacagtctccggaagacggttgttgcgcacgtattcggtgaacgcactatggcgacgctggggcgtcttatgagcctgctgtcaccctttgacgtggtgatatggatgacggatggctggccgctgtatgaatcccgcctgaagggaaagctgcacgtaatcagcaagcgatatacgcagcgaattgagcggcataacctgaatctgaggcagcacctggcacggctgggacggaagtcgctgtcgttctcaaaatcggtggagctgcatgacaaagcacgtgaacagcagcagcgcccaccaccagcacagactcggcaagtgaaccctgcacctcagcctgttcctgcaccttcggtgcctccactgccaccacaacccacccaagctccttctgctccaccaaggaaccaaacgcaggatacaactccagttcctgttcctcctcctggtgcagagtctcttgcccagccacaggcacatgctggtcctcctcaagctaacgccagcgacggccctcagaacactgaagctatgcagattgatccatctggtccatcaacaagcaacgcacgtcagtcatcaataccagacgaagatacgctcatccaggaggctattcggatgacgaggggccggcttaggaggcgcacggccgggtctggacctccaccaagttag

SEQ ID NO: 102336 - DNA, 347 bp, Oryza sativa
  unsure (1)..(347): unsure at all n locations
  Clone ID: PAT_MRT4530_99869C.1
gcatgaactcaaatgaaatttccaataagctccacatgtcgtgagancagagcaccggccggttgatcgagataacacagttggagagttttttctccttttctttttttctgtntaattcatccggcgagtcagatgaggtcttcgtcgtcaccttcgttggctaaatccatatttagcctcggaactcgtaagtngacacttgctatacatgtatagcatctttgaattcaacagttttatactggaagcttattataaaattctgccaatgtttaaactttttttaagtagcacatgcatgcatgaccccataataaatccatatttgtcaaaaaaaaaaaaaa

SEQ ID NO: 102337 - DNA, 2178 bp, Oryza sativa
  Clone ID: PAT_MRT4530_9986C.1
atggccgccgccgtcgtcgcgatgccggtggcgctggccctgccgtcggaggccgacctgccgtacgaggaggacgtcctgcgggacccgcacagcatccgcccgtggcgccgctacctcgctgcccgcgccgccgcgcccctccaggagcgcgccgtcatctacgagcgcgccgtgcgcgccctcccgggcagctacaagctctggcacgcctacctcctcgagcgcaccgccgccgccgcgcgcgccaagccgcattgcggggagcacccggcgaacgaggccctgaaccgcgccttcgagcgcgcgctcgccacgctgcaccgcatgccgcggatatgggagatgtacctcgccgcgctcctcgagcagcgcctcgtcacgcgcgcacgccgcgccttcgaccgcgcgctgcgcgcgctccccgtcacgcagcaccaccgcgtctggccgctctacctccgcctcgccgccctcccttcctgccccgccgagacctccatccgcatctaccgccggttcctccagttcgaaccctcccgcgccgacgagctcgtcgagctcctcgtctccgctgggcggtggcaggaggcagccgatcacattgtctcggtcctcaacggcggaagcgacgtcagtgacaacaaccgtgctctcctgctcaagctgtgcgaccttctcgccaagcacgccgacgaggtcgccgggctcaaggtggaggccgtgctccgcggcgccatgcgcgagtttccggacgaggccggaaggctgcgcgcgctgctcgccgagtgctacgcacgaagagggctttacgacaaagccagagacgtcttcgaggaaggggtgaccacggcggccaccgcagctgagttcgcgctggtgttcgaagcgtacgcgcagctcgagcagagcttggtcgcggcgaagatggagaagacggcggacgaggaaggcgacaagctcgtgaccggttgctggttggccgacggcgacgacggcgacatgtgcctggcgaggctggagcggctgctcgaccgccggcaggagcttctcaacggcgtcctcctgcgcggcgacctacgtcgaggccgtcaggaccgtcgacccggcgaaggcgacgggcaaaccaagcacgctgtgaagatgtacgaggcgcacggcaacctggacagcgccgacgaggtgttcgcgaaggccacgcaggcgagccacagatcggccgacgacctggccaccgtgtggtgcgagtgggcggagatgcagctccggcacaagcgctttgacaaggccatcgccctgatgcgacaagccaccgcggagccctcggccgaggtgaagctgcgagccgccgccgccgccgccggcgacgacgagcctgcccagctgaagcttcacaagtccgcaaagctgtggagcttctacgtcgacctggaggagagcctgggcgcgctggcgtcgacgcgcgccgcctacgagggcgccatggccgcgcgcgccgcgacgccgcagatggtgatcaactacgcctcgttcctcgaggagcgcggctacttcgaggactcgttcgcggcgtacgagacgggcgccaatctgttcggccacccgcacagcaagcccatctgggacacctacctcgagaggttcgtggcgaggcacggcgggagcaaggccgagcgcgcgcgggaactcttcgctgaggccacccgccgcgctcctccccacgacagggcgcgcctcttcctgcgccacgcccgggcgagcgtctacgaggcctacgcggggcgggcggccgagctccgcggcgtgccgaaggtgaggcgggtctacgagcaggcgatcgagtccggcggcctccctcgccgcgacgccctggcgctgtgcctccgcctcgccgcgctcgaggaagcgctgggagaggccgcccgcgctcgcgccgtgttcgtgcacgcgtcgggctacggcgatcccgacgccgacgaggagttctgggcgaagtggagcggcttcgaagtccggcacggcgacgagcgcaccttcacagacatgctccggataaggcgcacgcagaagcacgcgaagacgcctggggttcaggtgaatggcgaactgaaagatgagaagaagaagagatgtgctgatcagcttggcgccactcagagcaagaggcagcgagtgtaa

SEQ ID NO: 102338 - DNA, 432 bp, Oryza sativa
  Clone ID: PAT_MRT4530_99870C.1
atggtcacaaccatgttcgtgaaggaggctgagcacgaaacctgcaacaactcgcgcgcagaaattgccgtatgcgccaaccacttcgacaaccgagccggccgcatcttgcatccactcagaaaaatcgaacgccattccatcatcccccagagcaccctccgcacgtgccccgaggacatagagagccagccgaagagtgtagcaggcttgcttggcggactccgtcgctggcgccagagcttcggcagcagcgtcctcagccgcagcaacaagttggcattcccgtttggcggccctcttgtttgccacttccagggtgtccgccacgacgcggcgtttgtcctccttgtggtggaggtcctcttcggccttccgaaggcggagccgataacggtccagcctctccaaggcggatcgtttcgtgctcag

SEQ ID NO: 102339 - DNA, 150 bp, Oryza sativa
  Clone ID: PAT_MRT4530_99871C.1
atggcaacgcgggagctcgatgagggtcccggctacatgagacctcgacgaggcccgttgggcgagaaggtggacgaggaaggaggaatggagattgtcgccatcctttctgctctccccacccggcccttcactggcagatcggtttaa

SEQ ID NO: 102340 - DNA, 3855 bp, Oryza sativa
  Clone ID: PAT_MRT4530_99872C.1
atggccacggcgggctccccctctccgtaccccggtgattcgccggagccgtccttctccggcgagaaggtgtacgtggcggtgggggaggagtccagcaggggcacgctgctgtgggcgctgcacaagttcccccaaggcaccgccttcgtgctgctccatgtctactcccctcccaacttcctccccatcctcggagccaagattcccgccggccagctgcgagagcaggagctgattgcacacaagaagatgaacctgcaaagaatcagtgacaacttggatcaataccaactcatatgcgcgcagcagaaggtacaagctgagaaattggtggttgaatcagatgatgttgcatacggattggtggacgtcatctctgagcataatgtttccatgcttgaagatactaaagagcgtggtgagtctgacaatgagctccagcatatacccatgcagttagagagagtaagacaagaagcttatgaggagaaatgtaggcgtgagaaagcagagcaggagttatttgaggctctccagaaagttggggaaagtgtttatggaagtgtatataagggacttcttcggcaaacaaatgtggctgtaaagaagttgaatcctgaaagcacagagtcactgtcacagttcagtcatgaggtggaaatccttagcagggtgcgacatccgaatcttgtaactcttataggggcatgcaaggatgcccgagctcttgtctatgaatacatgcccaatggaagcttagatgaccgcttggcttgcaaggacaattcaaagcctcttagttggcagttgcgtacccgcatcgcttccaatatttgttctgcactgatttttctccattccaataaaccccacagcattgttcacagtgacttgaaagcatctaacattcttcttgatggaaataatgtggctaagcttagtggttttggtgtgtgccgaatgttaactgatgaattcaaggccacaaccactctataccgccatacccacccaaaaggaacttttgtgtacattgatcctgaatacgctatttctgtatctgaagactttggtaatgtgccatcctacttcatctgtccaatacaacaggatgtcatgagggaccctttaattgctgcagatggtttcacctacgaagcagaggctataagagagtggctgtccgtacaggttagggcacattacctttcacacgatgatgttcttgctggtgttgtgaatctgataaagaagctcaaaattaagagaattatcattggttcaaggagcatgtcaaaggaagcgatgctgcgcaaatgctgtcagcaatattggatcaaatctagcaacaagttcatggatgagatcattctaaaatgcagcaatgatcatctggaacataccgggagcattggatatggagggagcgctgaatctttggcatctgtacatgagctgagcgatgattcaaatggctacacaacaccaccaagtgattttgcagatgaaatcatgtatgatgatggggttattcaaatggatggtgctgatgaattggcaacggaagaaatagacaaactccaaaggaaactgaaagagctgcaagaagaggatgataggagcatcttgtcacctaggcaaaaggctgctgctgcttcactgaagaaggagaagaggctatcaacaggaagatacccagagctgcaacttccacaacatatctcacggttctccatgtcgatgatcagtaaagcaacgggcaacttctgctcaggaaacctgataggtgaaggaggctatgggccagtgtacaagggaaaactgggtggcgtggcagtggccatcaagctgctgagaccccatggcaggcaaggatttccagagtacaagcaggaggttgtggtgctgagtagaatggagcatccacacatagtgaggctcatgggcgtgtgcccggagtcatgcgggctggtgtacgagcacctgcccaatggcaccctcttggacatcctctccaactccaagagtctgtcatggaaggatcgcgtgaggatcctcggcgagcagcgttccgcgctggcctacctccattcctgccgcccccacgccatcatccacgccgacctcaagctcaccaacatcctcctcgacgccgccaactccagccgcctcggcgacttcggcacggcgcgcgcggtgcacgtcaagccgctgcaggaccaggcggacaccatctgccgccgcaccaaccccatgggcaccaccggctacatggaccccgtcttcttcgtcaccggcgagctcaccgccgagtccgacgtctacgccttcggcgtcgtcgtcctccaggtgctcaccggactgctcgacctcaacatcgccgaccaggtgcgcgaggccctcaagatggacgccgtccactccgtgctggacgcctccgccgggagctggccggaggtgcaggccgagaagctgctccgcctggcgctgcgctgctgcagcctggagaggaagcggcgaccggcaatcacgcgccatacccgtgttcaccgccgaactctccaaattgaaaaggatttcctgaagaacagagacaatattgctgcattctgggacaaacttacgttggatcaggccaaaacaattttgtccttggcagatgtggatatagagggtgtcactggtccttccattttagcagcactgtccacatggatgtgtaagccggggtatgcttcattaccgctgccatatgccagagctggcaatcaacttctgtggctgtacataaaacatcaggtcgaagcatggtctgctgataaggctgctgaagcattaagatgccagaagttgctcgtggaggaagaggaagctgctcagaaaaggcaagctgaactgatagaaaggaaacggatgaagaaactgaggcagaaagaacagagattgaaagacttgaaggatgaggatgtcacagaccgttttcctggatctgtggatgggacaacagattcttctggaatactaagtctgaaggaagccacttcggatcctggcctttatgagcaagaagatacacagttgccaacgccagtggcttcggaagataatagtagttttgctgacctacctgtagaacatgacattcatgatccaggccatgaagtgaatccaagtgttactttgaatcaacaagtcttttcaagacatcgtgtaggaagaacagaaaactttgcccaaaatagctttgcctctggtggttctgcaattggttcaaagcatccagcttcagtaaggcattcacattacaggggtgcaaatgccggtgcagtgtcaaatagaaacaaaacatggacatggaaagtgcgaactgagattgaagagcacagcccaaaagatgagttgaatatagatgatgggcaagagattgttctgaacaagaagtctcgtgtattaataggatccataagtgttgccattgaagacggcagcgaatgcttggaggataaccaatattccaaggaatacccgactcctgcttctcaattgaatattggcaaccatcctgtaacgaaggtgatgcagccatttaaccatggagaagagggaaacggatacaatgctcataatgatgttgaagttagtattactccaacagcacaggatcattcttcatccggcgttatgacagatggaaacaattgttcaagctgctgcaatgcagggttggcagagggtggaggcttacgaggcgccatcttttccagtaaagaagcagctgccttcctttctcaaagatggaaggaagcaataaacgcagatcatgtgaagcttgtcctgtgccctgaaggctga

SEQ ID NO: 102341 - DNA, 2225 bp, Oryza sativa
  Clone ID: PAT_MRT4530_99873C.1
gcacgaggtgcttctgtgcccgaccagacaagggaagctaagcaccatcaccagcagctactaggtggaggaggaggaggaggagaaaaaaaaatatagagttagtcacagctcaggcagggagagacagagagagagaaagagatttttgagagagagagacagacatggagaggaggaggtctcggaggcagcaagcctttcaccccgtctccgagataacgatgtactcctcatcttaggtagctgcggaggaggaagaagaagaggggttggttgttgttggccggaggagcaccgccgacgatggtgacagtggcgccgccggcatgggaatagcggcgccaccgtgtcagccagggcagaccaccacgttcgtcataagccaacccaccagcagcaagagctccccggcggcgatcgtcgtccggccgccggccacggcgagttcttcttctatgtcccactcccagggtttccaccagcccagcagcggcgccgtcttcggcttctcctccgatggcttcgacggccgccccggctccggccaagaccaccagcagcacgagcagcagcagcagcagcacgtggcgcagcagagccgctccgctcctggctcttcgaacacttcctccacccgtacccgagcgatgcagataagcacctgttggcgaggcagacccggggctgtccaggaaccaggtctcgaattggttcatcaacgcccgtgtccggctatggaagcccatgatcgaggagatgtaccagcaagaatgcaaggagctcgagggctcctccggcgccggcgacgacccctccggcgccgacgacacgcactccgccgacgaccaccgccgccgcgcatcatcagcacaggcacgggcagctaattgtagagcacggcggcgcgtccacgggcggcggcgccgctatgtggggccagcttgggttcgttaggtgagacgtcgtcgccgaagcagcaagcgagcggcatggcgggcctcgccgctgacccggccgcggcgatgcacctgttcctgatgaacccgcagcagcagcagcagcagcagtcacggtcgtcgacgtcgccgccgccgtcggacgcgcagtcggcaatccaccagcaccacgaagcgttccaggcgttcggcggcgccggtgcagcagcgttcggcggcggcgcggcggccggcgtggtggaaggccaggggctctccctctcgctgtcgccgtcgctgcagcagctggagatggcgaagcaggcggaggagctgcgcgtccgcgacggcgtgctctacttcaaccggcaacagcagcagcagcaggcggcggcggcggcggcgtcggtgcagcagcagctcccgatggcattgcacgggcaggtcggcgtgctggggcagcagctgcacggcggcgggtacggcggcccggcgggcgtcgccggcgtcctccgcaactccaagtacacccgcgcggcgcaggagctcctcgaggagttctgcagcgtcggccgcggccagatcaagggcggcggcggccgcggctccgcccccaataaccctaactccagcaaggccgccgcctccagctccggcgccgcccagtccccctcgtcggcgtccaaagaaccccctcaactctcccccgccgaccgcttcgagcaccagcgcaagaaggccaagctcatctccatgctcgacgaggcacgtgtgatacgtgttgcgtcactaccaggtgaaaaagtcttttatatgggagtggacaggaggtacaaccactactgcgaccagatgcagatggtggtgaacttcttcgactcggtgatggggttcggggcggcgacgccgtacacggcgctggcgcagaaggccatgtcgaggcacttccggtgcctcaaggacgcgatcgcggcgcagctgagggggacgtgcgaggcgctgggggagaaggacgccggcacggggtcggggctgaccaagggggagacgccgcggctgcgggccatcgaccagagcctccggcagcagcgcgccttccaccacatggggatcatggagcaggaggcgtggcgcccccagcgcggcctccccgagcgctccgtcaacatcctccgctcctggctcttcgaacacttcctccacccgtacccgagcgatgcagataagcacctgttggcgaggcagaccgggctgtccaggaaccagatgcatatatatgtgatctga

SEQ ID NO: 102342 - DNA, 4488 bp, Oryza sativa
  Clone ID: PAT_MRT4530_99874C.1
tcagccttcagggcacaggacaagcttcacatgatctgcgtttattgcttccttccatctttgagaaaggaaggcagctgcttctttactggaaaagatggcgcctcgtaagcctccaccctctgccaaccgtgtaatgcaccggccagacctctggtttccagctggcacaacgcctgatgcagaatgcacctgagctgttggattcatactaacttcaacatcattatgagcattgtaaccgtttacctcttgtacacagttaaatgggtgagtaaccttcgtcacatgctcgttgccaatattcaatagggaaaaaggattatggtattctttagaatatcgggaatctgctaagcaaacgatgtccactagattggcgacacttatggctcctattagcgcacgagacttctagttcagcacaatctcctgtccggcatgtatagccaaatcgtctggtggggtgtgctcttcaatctcagtacgtactttacataccaaagtttttttgctatgtgacactgtaccggtatttcagaatgtgtaatgtttatgccttactgtaactaaatcctttgaaccaattgcagaaccaccagaggcaaagctattttgggcaaagttttctgttcttcctacacgatgtcttgaaaagacttgttgattcaaagtaacacttggattcacttcatggcctggatcatgaatgtcatgttctacaggtaggtgagcaaaactactattatcttccgaagccactggcgttggcaactgtgtatcttcttgctcataaaggccaggatccgaagtggcttccttcagacttagtattccagaagaatctgttgtcccatccacagatccaggaaaacggtctgtgacatcctcatccttcaagtctttcaatctctgttctttctgcctcagtttcttcatccgtttcctttctatcagttcagcttgccttttctgagcagcttcctcttcctccacgagcaacttctggcatcttaatgcttcagcagccttatcagcagaccatgcttcgacctgatgttttatgtacagccacagaagttgattgccagctctggcatatggcagcggtaatgaagcataccccggcttacacatccatgtggacagtgctgctaaaatggaaggaccagtgacaccctctatatccacatctgccaaggacaaaattgttttggctttgtcccagaatgcagcaatattgtctctgttcttcaggaaatccttttcaatttggagagttcggcggtgaacacgggtatggcgcctccactcagcgtcgcacgtgattgccggtcgccgcttcctctccaggctgcagcagcgcagcgccaggcggagcagcttctcggcctgcacctccggccagctcccggcggaggcgtccagcacggagtggacggcgtccatcttgagggcctcgcgcacctggtcggcgatgttgaggtcgagcagtccggtgagcacctggaggacgacgacgccgaaggcgtagacgtcggactcggcggtgagctcgccggtgacgaagaagacggggtccatgtagccggtggtgcccatggggttggtgcggcggcagatggtgtccgcctggtcctgcagcggcttgacgtgcaccgcgcgcgccgtgccgaagtcgccgaggcggctggagttggcggcgtcgaggaggatgttggtgagcttgaggtcggcgtggatgatggcgtgggggcggcaggaatggaggtaggccagcgcggaacgctgctcgccgaggatcctcacgcgatccttccatgacagactcttggagttggagaggatgtccaagagggtgccattgggcaggtgctcgtacaccagcccgcatgactccgggcacacgcccatgagcctcactatgtgtggatgctccattctactcagcaccacaacctcctgcttgtactctggaaatccttgcctgccatggggtctcagcagcttgatggccactgccacgccacccagttttcccttgtacactggcccatagcctccttcacctatcaggtttcctgagcagaagttgcccgttgctttactgatcatcgacatggagaaccgtgagatatgttgtggaagttgcagctctgggtatcttcctgttgatagcctcttctccttcttcagtgaagcagcagcagccttttgcctaggtgacaagatgctcctatcatcctcttcttgcagctctttcagtttcctttggagtttgtctatttcttccatcagttcttcagctctttcagttgtacttctaaaactctgtatctcatcagttctatgagcagtctctccggaagagtgctccccctcctcctcataagaatttagttcccctgtttctatgctttcctcatcctttgtttcggtttccgttgccaattcatcagcaccatccatttgaataaccccatcatcatacatgatttcatctgcaaaatcacttggtggtgttgtgtagccatttgaatcatcgctcagctcatgtacagatgccaaagattcagcgctccctccatatccaatgctcccggtatgttccagatgatcattgctgcattttagaatgatctcatccatgaacttgttgctagatttgatccaatattgctgacagcatttgcgcagcatcgcttcctttgacatgctccttgaaccaatgataattctcttaattttgagcttctttatcagattcacaacaccagcaagaacatcatcgtgtgaaaggtaatgtgccctaacctgaatggttattcgacatttggccctcatccttctctttccctggacgttgctttcacagaattcttgctccccaggctgttgtattggacagatgaagtaggatggcacattaccaaagtcttcagatacagaaatagcgtattcaggatcaatgtacacaaaagttccttttgggtgggtatggcggtatagagtggttgtggccttgaattcatcagttaacattcggcacacaccaaaaccactaagcttagccacattatttccatcaagaagaatgttagatgctttcaagtcactgtgaacaatgctgtggggtttattggaatggagaaaaatcagtgcagaacaaatattggaagcgatgcgggtacgcaactgccaactaagaggctttgaattgtccttgcaagccaagcggtcatctaagcttccattgggcatgtattcatagacaagagctcgggcatccttgcatgcccctataagagttacaagattcggatgtcgcaccctgctaaggatttccacctcatgactgaactgtgacagtgactctgtgctttcaggattcaacttctttacagccacatttgtttgccgaagaagtcccttatatacacttccataaacactttccccaaccttcgatgagtgatcaaagttgctggttgcctccttaatctctgatatcgatagctctgtaatgggaattgttctatccgcaattgcagtagactctccattttttacacgtattgcttctgcctctcttactgctttgtcacgctgcaacataagatccttgataatacggtcagaatgggcgcttcgcttctctaggaccaatatcttctcacattgctcttgaaattttgcagcaagttcatcagctgttcttgcaagcctgtcaacttcctccattgttgttgccaattttacctctatttcattcttttgcttcagttctccaaagtacaaattctctgatacctgcactttctggagagcctcaaataactcctgctctgctttctcacgcctacatttctcctcataagcttcttgtcttactctctctaactgcatgggtatatgctggagctcattgtcagactcaccacgctctttagtatcttccagtgtgcctttgcaaatgaaccatattttgcagaaatgatctgcatgctgttctacaactcgtgctttcctggatttcagaaccttcattttctttgtatagtgcttatcatctgcggcccccattacaagcatggaaacattatgctcagagatgacgtccaccaatccgtatgcaacatcatctgattcaaccaccaatttctcagcttgtaccttctgctgcgcgcatatgagttggtattgatccaagttgtcactgattctttgcaggttcatcttcttgtgtgcaatcagctcctgctctcgcagctggccggcgggaatcttggctccgaggatggggaggaagttgggaggggagtagacatggagcagcacgaaggcggtgccttgggggaacttgtgcagcgcccacagcagcgtgcccctgctggactcctcccccaccgccacgtacaccttctcgccggagaaggacggctccggcgaatcaccggggtacggagagggggagcccgccgtggccat

SEQ ID NO: 102343 - DNA, 442 bp, Oryza sativa
  Clone ID: PAT_MRT4530_99875C.1
acaagtcagtcaatctctgttctttcagcctcagtttcttcatccgtatcctttctatcagttcagcttgccttttttgagcagcttcctcttcctccacgagcaacttctggcatcttaatgcttcagcagccttatcagcagaccatgcttcgaccagtgtttgttcaagcatataactagtgcatgcaacagcatttttcaactcaggtgcaactttgtcagcctccccgttaaatataaacttttgtatacaggcggttgggttagtagagagaaacgtattctcacttgcttcgtcaagcatgctaaatagttcattcgatgatacaggtaaccttgaagctgttgtttcaattaggtccagaagttgattgccagctctggcatatggcagcggtaatgaagcataccccggcttacacatccatgtggacagtgc

SEQ ID NO: 102344 - DNA, 571 bp, Oryza sativa
  Clone ID: PAT_MRT4530_99876C.1
gtggttgaatcagatgatgttgcatacggattggtggacgtcatctctgagcataatgtttccatgcttgtaatgggggccgcagatgataagcactatacaaagaaaatgaaggttctgaaatccaggaaagcacgagttgtagaacagcatgcagatcatttctgcaaaatatggttcatttgcaaaggcacactggtatactgtaggaaggctgctccctttggccatgatgtgatgcaggactgtaggcaaagtgctacttctgcacaatgttcagtggagagatcgagtagcttgtcagagatttggtgtgtttcaaacacatggctacacaaactaaacctcgaaccacatatcgagacaactagttcagacagatactctgataaggaaaaggaagatactaaagagcgtggtgagtctgacaatgagctccagcatatacccatgcagttagagagagtaagacacgaagcttatgaggagaaatgtaggcgtgagaaagcagagcaggagttatttgaggctctccagaaagtgcaggtatcagagaatttgtactttggag

SEQ ID NO: 102345 - DNA, 413 bp, Oryza sativa
  unsure (1)..(413): unsure at all n locations
  Clone ID: PAT_MRT4530_99877C.1
atcagcttgtcgtttcaaactgtagtaaacaaaccaagtctgtgcaacatcttctcgccctggtggcgcaacaatttgcgggggtggggggggtgaacatttgttcaaagccattacntcattcanctacaacctccagctagtttgtgtgattctctactcttgatcgtgaatctgtgctcaatgctcacagctctgnctggctttttaaccgtgcccatctaagatatgggtatctacccctaggtacctatggtgcatcccagtacccattaccatcccttggcgggtgtcttgtaatgagttttaacattatagtggttctgaagttaaaaataagctcatatatcatcatatgtgacatgtgaaactttgggtgatattaaaagaaaaaaagctttctttcttatttt

SEQ ID NO: 102346 - DNA, 207 bp, Oryza sativa
  Clone ID: PAT_MRT4530_99878C.1
atggacgatgacggtgatctggcggatgcaggtgactacggcggtctggcggacgcaagagacagtggttgtcgtgcaagacaaaggcggctgtgtgatgcgggagtcggcgccggccaagccgagggtgacagtccaatggacacgatggacaagggcgttagccatggagtatcgaggagcagcaccaacgcaaaccatggctga

SEQ ID NO: 102347 - DNA, 254 bp, Oryza sativa
  unsure (1)..(254): unsure at all n locations
  Clone ID: PAT_MRT4530_99879C.1
catgtgccagatgggaagaagaagaagctgccagggacagccagacagagtgtgcacctgaggcaacnaagatgggagcaggcagacaccagacagcacgagccagcaggctggcatgcagccaggtnggcaacactgggctggcaaacaaagcaaaagggntggagggtgcaggaaaggatgcacagccagagcagcancaggcatcagccaggggtttgcagcacaggagaaggtccaaggacatgnacacc

SEQ ID NO: 102348 - DNA, 2614 bp, Oryza sativa
  unsure (1)..(2614): unsure at all n locations
  Clone ID: PAT_MRT4530_9987C.1
atgcaggccaaggagcttctagcagagctggtgctggtggaggaggagattgcccgcctggagacccagatccgaagcatgaagaaggcggcggccaccacaactacccagaatgcaatcaacctcacccacgacgacactgtcaatgccaatgttaatagtggaggatctgcagcaggagatcatgccaacatcaagtccatgttcttcatcagtcaggccatcaacggcctcgacacaagccgccatcatcatcctctcatgaccatcgtcagcaataaacctcccactcccagtccaaagcttaattcactcgatgatactagtagtagtagtaacaaaaagaagaagatggtgcagcagcccaacaagctgtcggagaggatcgtcaagtgcctcatctgcatcttcatccgactgctcaggtcctcgagggtcgccgacctgcagctgcagcagcaggacaacaacaacaacaacgctagtagtaggtcctcttcctcatcgccttcactgaccaggcagcatcagggaggaggaggaggtggaagcttcagaatcgacaccagcctggtaatgaacaaacagcagcagcagcaggattgccggtcggggcagcaggatcactacggcatcttcgccatcccggattccatcgtcagagatataggcccctacaagaacctcgtcagcttcacttcctccgctttcgacctcagaggattctccacctctcccctgctcaccaagctcagggggatgctggaggcactgcagcatgtggatttgaggtttctcactcaccaccaaaagcttgccttctggctcaacatatacaacacctgcatcatgcacgggattttgcacaatggactaccctcaaaccctgaaaagctacttgcactgaagaacaaggccacgctgaatgtatcagggcaaaagttgaacgccttggtgatagagaatttcatcctcagacagccatccagtgtcaaagaagaattctggaaatgcgaggtggatgtggaagaacagcaggtgaggagtcgttacgggctcaacagctcagaacccaacattctgttcgcactctgctgtggcaacagatcatctcccgcgctacgaatatacaaggctgatcgtgtgatgatggatctggagaaggcgaagctggagtatctgcaggcatcgctggtggtgacatcgacgaggaggaggctgatgatcccaagcctcatacactccaacatgcacgacttcgcaaaggacctggactcgcttgttcgctggatttgcgaccagctgcccacgtcctggtctctcaggaaatccatggttgattgcctcaggtggtccggacaccgtctcaacatccatcacctcgtcgacgtcattccatacgactacgactttcatcactacaaacacgtccacggcggcggcggcatgcgcggcggcggcgggggaaggctccggaacccttgcctgacgatgcaccagccgtgggcgtcgctgctcgtccacggaatcaagcgcgtcgagggccgctcatggccatcgcccctcaccgggcggctttggatccacgcggcttccaaggtccccgaggcggacaccatcaaggccatggaggagttctacagggagatttacgccctcgacggaatcaccaacatcaccttcccgcaccactaccctgtctcccgcctcctcggatgcgtcgaggtggtaggctgtgtcacctctcaagagcttgcttcctgggaacatgtgccccaatctgtcaggctcgaagcattgaccgacttctgctggctttgtgaaaacccacagaaactggtggttccattcgacatgcgtggttaccagggtgtttacaatttagagagacggatctatgagggagcagtcaggggtctttcacctgttcaaggtccactgcctgtcaatttcccactccctgaccccaccaatcccctctctctcaaccctggatctcttcaacttcactcctcaaggtccgccgcactagacaaatctcccagtgtcactgccgccatagccggagctcgagctgccgccactcagtattcacgcaacaatactgctattactagtactccaaccgaagaaactcgacaaagattttctagggaaaaccatgcagataacacttcagggccatcaattgtccacgacagatcacccgttttgcaaaaccagaatctaccatctcttgccctgaccaatccaccctatttgaagaaccagaccatgccatcctttgtccagaacaatctacccaatttgcaaaatcacaatctgtcctatttgccgcaccagaatctgtcggctgatgtctcgaacaggaggngtatcgcttttgcaaaaccagagtccatcgtctcttctccaaagtggtcagtcctatttgcaaaaccagaatgcagagcctcgggagaagtcccagactacaaaatgaacctcccagtaggcttgtntgcagtggcactgagggggattgaagcgaatgaatgttagtgaggggaagaagagcaatcagctccgaaaagatggcctgagtaaatatctgtgaaattacaggaacttcctg

SEQ ID NO: 102349 - DNA, 282 bp, Oryza sativa
  Clone ID: PAT_MRT4530_99880C.1
atgacgatgacggcggcgacgacagtgctgggcgaccccgctgctctcatcgttcccgtccacggccgtcaccgggtgtgtccccacccgtgcaggcccggaaggtggatgacgacgaggcgctccttcgcgtgccccctcctcctcctctccgccccaaccccgtcgctgtcctttcgccgcgggcctagctccgcgtctctcatcgccgcgagcgccgacgctgcctcgtcgaatgcctcctccccccgcctacaccaccgaccgttacgacggccatga

SEQ ID NO: 102350 - DNA, 138 bp, Oryza sativa
  Clone ID: PAT_MRT4530_99881C.1
atggcgtggaggcgacggaggtcacgcggtgggctaaatccggtggctaccgacgatgtggaggacgatggcgacagtgcgaaggacggcggtggtcatagggcggacaactggtccgcctgtgaaaagagctcctag

SEQ ID NO: 102351 - DNA, 360 bp, Oryza sativa
  Clone ID: PAT_MRT4530_99882C.1
atgcggcgtacgcccagcctccatgctgtaccggccgaccgcgcgagatctcgtcggacgctagccgccgcccgcgagagccgacccacgcgcgccgtcacgttcgtgcggtacgtggtgattaagttgggagaaattatccccggcgggccgtccttcgcggtgaaaactcatgcgatgagcaatgtcatgcggcgcactggccacaaacacatcgcggactacctcgccatcaaccagaccatctccgacaacaagtcctacaccaccgccctacggcgaggagttcttcgtggctgcggcagcggcgaggaggagggcatgctgtcactcccaccagcgccacgctatatggcgtaa

SEQ ID NO: 102352 - DNA, 466 bp, Oryza sativa
  Clone ID: PAT_MRT4530_99883C.1
gcacgaggccagccagcacacactctcactctctcactactccactctgccaccgctcagcggcaagccggcaatggcggatgggcgaggtggcgtcggcggccagccgccgtcgtcggtggcggcggcggcggtggtggcgcggcggtgcggctgcggtctgggcaggctggtgcggcgcctccggcgtcaggcggcgctgtgcgcggcgcgtccggcgccggcgtcgagccggctccgcggtggccggtgccagtacgacccgctcagctacgcgcgcaacttcgaccgcggcggcgtcgacgtcgccggcgggctggacgacgactccgacgccgcgcagctctactacagctactccttctcctcccgctgcggcctccccgccgccgccgccgccgccgctcgcgcccacccgagcagcctcgccgccggccgcactgctccagccacggccacccattag

SEQ ID NO: 102353 - DNA, 293 bp, Oryza sativa
  Clone ID: PAT_MRT4530_99884C.1
cccacgcgtccgccggagttgatcaagctgttttcaaggctgagagaaatgaagaaggaaaatgctggcctctcggtaatggacaccactaggaggagtattattgctcggatgaagcaactgatgcctatatatacccaggttgctacactgtttgcttaattgcattacacctctccttgaatggctgacaataggtgtcatcggataggttcttgttttcgaagatctttgatcgttttgcatttgtaaacgcttttccgttttttcttcttctttcgctttatttctct

SEQ ID NO: 102354 - DNA, 1888 bp, Oryza sativa
  Clone ID: PAT_MRT4530_99885C.1
cggcacgaggaaattggcctcgccggcccgagcccggcctccacgttctgggcgccaggtttcaatacactggagtgagtcagtgaggttggtgaagcagagtgaggaaaggaggatgggaagggtggcgcctagcgtcgaggaggtcgggggcgagcagccgccgcccgcgcttgggcccggcgagaccgtgagcgggacggtggccgagctgagggcggcgtacgagagcggcaggacgcggagcctggagtggaggcagtcgcagctccgggggctcctccggctcttggcggaggaggaggccgccgcgttccgggcgctccgcgaggacctcggcaagcaccaagccgaggcctacagagacgagatcggcgtgcttgtcaagtcggcgaacgccgcgctgcgtgaggtcgggaaatggatggcgccggagaaggtctgggtgccgctaatcgcgttcccggcaagggcgcagctggagccgcagccgctcggggtcatcctcgtcttctcttgctggaatgtcccgttgggcctctctctggagcctctcgttggagcattggcggccggcaatgcggtcgcgctgaagccatcggagctggcgccggccaccgctaagttcctcggcgacaacgtcggcaaatacatggacgccacggccgtgaaggtcatccagggcgggccggaggttggcgagcagctcatggaacacagatgggacaaggtccttttcaccgggagcccgcgcatcgcgcgcgtcgtgatggccgcggccgcgaagcacctgacgcccgtggcgcttgagctcggcgggaagtgcccctgcatcttcgacacgatcggcggcagcgcgcgggacctgcagaccgcggtgaaccgcgtcgtcgggggcaagtggtcgtcctgcgccggccaggcctgcctggccatcgactacgtcctcgtcgaggagcgcttcgtgcccgtcctgatcaaggcgctcaagtcgacgctgaagaagttcttcgccgactcggaccacatggcgcggatcgtcaacgcgaggcacttccagcggctgagtgaccttctcaaggacaaatcggtcgcggcgtccgtcctccacgggggcacattggacgccaagaacctgtgcatcgagcccacgattctgctgaatcccccactcgactccgcgatcatgacagaggagattttcggccctctcctgcccatcatcacggtgaagaagatagaggacagcatcgccttcgtgagagcgcggccgaggccgctcgccgtctacgcgttcaccaaaaacgccgcactgaggcgccgaatcgtcgaggagacgtcgtcggggagcgttacgttcaacgacgcagttgtacaatacgggatcgattcgctgccgttcggcggcgtcggcgagagcggattcgggcagtaccacggcaagtactccttcgagatgttcagccacaagaaggcggttctgacgagaggataccttatcgagctgacggccaggtacccgccgtgggatgacagcaagatctccatgatgcgacagctctaccgttacaattacgtcggattcgtcttaaccttcctcggtctaaagaagtgaaaatttggtgggaaggaattggtgatggcttttgtggagttcaaagtgagtgcatttagcccaagagactactgatgagaataaatatagacttatatcgcttagtgaataagaacaagatttgcagttgctagtataaagcagcaaaaatgtactgcctgcattatataagaaaaatgcgctacctgtaatttacgtttcgtcaagaaaccaccttttaagtaaggtaaatgtaaggtactaaggtgcaatttcaaaaaaaaaaaaaaaaaa

SEQ ID NO: 102355 - DNA, 462 bp, Oryza sativa
  Clone ID: PAT_MRT4530_99886C.1
gagcgagaggctggcgcacggcggcggcgccctgcgcgtgccagagcaggttggattggcggcggaagatgcggcggctgcctctggccgtggttggtggcagtcgggctggggaggcggcggcggtaggcagcggccggcggggccgcgcgatcccggcggcgaccagcggggccagtatggaggggccggccaatggagccgcggcggcagcgaggcgagcgacgggagcgaaggaggcgaggcggcggcggagaggccagcgtggtggcggtgggggaggaggcgcggcggcgaggcgagcggtgggggcggaggaggcgaggcggcggcggcgaggcagggcggcgcaggggcgggtgcgagcggcggttgggtgccgagcggtggcagcggcttctctaccctctcccacccgggtgctgaggaggtcgtcctcctccgcatcaccgcatgctgcag

SEQ ID NO: 102356 - DNA, 336 bp, Oryza sativa
  Clone ID: PAT_MRT4530_99887C.1
atggacgacgctggcaacagcagcaaggaggcggaggcgcaggcgccggcgccggcgaaccaggcccctgccaccgccgccgccgccgcccgcggcgcgattcatcgcgggccgatgctgcgcctcgccgcgatgcagctgatgctgttcgcggcgtacgagatcgtcagctcatcggctatagatgaattggagcagtgtgagtgtgacagtttatccggctacgacgcagcgtcgcaggctcgcagcgctgagcagcagcagcagagcccagtgttttggccgagaccgagcgtccccggccaaaacagtacgagcaaagctgatgctaactag

SEQ ID NO: 102357 - DNA, 1167 bp, Oryza sativa
  Clone ID: PAT_MRT4530_99888C.1
cgatttcgagctcagcacccctcgcctccgtctcctttctgacttcgccatcgccgctcgcctcgcccacgtggtcgtcggacaggagcgaagcagcggcgagcacctgcagcatgcggtgatgcggaggaggacgacctcctcagcacccgggtgggagagggtagagaagccgctgccaccgctcggcacccaaccgccgctcgcacccgcccctgcgccgccctgcctcgccgccgccgcctcgcctcctccgcccccaccgctcgcctcgccgccgcgcctcctcccccaccgccaccacgctggcctctccgccgccgcctcgcctccttcgctcccgtcgctcgcctcgctgccgccgctgcctcgcctcctccgcccccgccgctcgcctcgccgccgccgcgctcgcctctccgccgccgcctcgcctcctccactcctgtcgctcgcctcgccgccgccgcactcgcctctccgctaccgcctcgcctcctccgctcccgtcgctcgcctcgccgccgcgcctcctccgccgccgcactgcctcgcctcgcctcgctgccgcattgtacaccaaaaacatcgcggattgggttgaggggggtaattcgtccggtttgcatagttgggggtgaagaatgtctggttttgtggttcaggggtgtaattcagacgaccgcgatacttcggggggcggggtaattcgtactttttcctaaggaagttgacaaagtgaatcaaagatatagcttgacgttacaccgagatgacctggtgaagtaggttgcaagctgcacggtatcatgcatgccggcccctccgcaccggctccattggccggcccctccatactggccccgctggtcgccgccgggatcgcgcggccccgccggccgctgcctaccgccgccgcctccccagcccgactgccaccaaccacggccagaggcagccgccgcatcttccgccgccaatccaacctgctctggcacgcgcagggcgccgccgccgtgcgccagcctctcgctccttgatttttaaagtttagggtgctacacggactttcatcctaagtttaggagggtaatttggactttttccttagaacttatatgtcaggttttcacttattcgatggttttcatcatctattccccgttt

SEQ ID NO: 102358 - DNA, 413 bp, Oryza sativa
  unsure (1)..(413): unsure at all n locations
  Clone ID: PAT_MRT4530_99889C.1
aagacttcacgctcatagctcgagctacggcctaacttttgcgttgcgcaggagagctcgatcgctgcaccaatacttcactggagaccgccgcagctgcagcagcagcagacgcaggccggcggcatggcgcacacgccgctcacgctgaacacggcggcggcggcggtcggcaacccggtgctgcagctggcgaacgtcatccngctcgacgcgtgcggcaaggcgaaggaggcgtcggcgtcggcgtcgnacgccgccgacgtggaggccatcaaggccaagatcatcttccacccccactactcctccctcctcgccgcctacctcgactgccagaaggttggggcgccgccggaggtggcggcgttcatggggggcgccggcgtcngcatcgccacccccgcgggggg

SEQ ID NO: 102359 - DNA, 348 bp, Oryza sativa
  Clone ID: PAT_MRT4530_9988C.1
atgaagccactgctactgctcatctcctccattgtagtgatgacattcttactcctcctgagcggcgccggcgctctcaccgccgatcacgccaccgtcggcgtcgccgtggccggcggcaagcgcacccgccacgcggaggaactaagtgagatggattcggtgccgtacccgcaaagaagggtgctacaaggtggcaacactgtctacagaccgcttggcagaggtgcggcttgcaaccctatttgccctggtcgcggagacaggtacactggccgtggctgcaaatcccgttaccagtgcaggggcattattgttacggtattccaggcatataaacactcatga

SEQ ID NO: 102360 - DNA, 429 bp, Oryza sativa
  Clone ID: PAT_MRT4530_99890C.1
ttcttcaaactagcaggctagagctcttcctgtctgctgccgcggcccgtggtccgggttccctacgcgggctgtcccgctgagaggcggacacgatgccaccgccgacggcgtccggcgtactctccgtcgcgtgcaggtgaaacagggcactctcagttcttaggaggctccgcttccttggttactgcacaccaactgttcgacagaatgcctcagaggaccttcctggggcaggcttacatgcacgctctcaccagagcgttctgccaattgactgcgctcttgggtctctacgggtttggcatcctaccgatctggatggttccaaggatggccatgtgagcgaaaacgtgaaaatcctcaagtctagagatggcgacagtgagctcgacgaagttctcaatcagtaatcagacgagatggatg

SEQ ID NO: 102361 - DNA, 2597 bp, Oryza sativa
  Clone ID: PAT_MRT4530_99891C.1
gcatgctcgcgaaaaacgaggaggggagttaggaaccttgacatacaaccaatgataccattttttttcaagcagctagaggtacagaggttcatattttttagatggctcattagtgatattttagtcaaaaatttcagaagtacggccacgggtgatggcctgaactaatattttattcgaggtgccgctacatcatcgtctaaagtacacgcaagattcaacggaaaaaagaaaccgatcgatcgagatcagttagttaatgaaataactagatcaactcatgtcgtcaaaaacaaaagatgctcatctatggacaacacacgctgatgattcgatcatcaaacaaaggtggtagtagtagtaaagcgtatcgtgtttctcatcagaaagaagaattaaagaaaaaactaatcccgtctcgcgagccagagaaaattccctacaaaagccactcctttgatttgacatgcaaaagcaaggctccactcctctactaccctacaactacacaacactgtctctctatctccaaaggcagtagctgtattggcttccagcttttcctctctacctctaatgatagcttggagcaagttcaatagtatagctaactactagctctaattcatctataatcaatctaatagcttattcatacaatagttatatactacattattaatatctggtcccatctatcatacacactgagtctgtgctatagctgactacaaatctgtagcccgctgctcttctctcttcatttatcttcttaaaatatatttgcagctggcttatggcttatagcttgatattgagagggagaggagtgagagctagctcagctcagctcaaggtaaacaacaaggcacactcttcctacctcttctccggttcttcctttttcctctttctcttcgtccaagaacttcacctcaatagctcgagctacggcctaacttttgcgttgcgcaggagagctcgatcgctgcaccaatacttcactggagatcgcctagctgcagctagctagcttatcctgcgtgtcttgagcttctctcatggaggagatctcccaccacttcggggtcgtcggagccagcggcgtccatggcggccaccagcatcagcatcaccaccacccgtggggttcttccctgagcgccatcgtcgcgccgccgccgccgccgcagctgcagcagcagcagacgcaggccggcggcatggcgcacacgccgctcacgctgaacacggcggcggcggcggtcggcaacccggtgctgcagctggcgaacggcagcctgctcgacgcgtgcggcaaggcgaaggaggcgtcggcgtcggcgtcgtacgccgccgacgtggaggccatcaaggccaagatcatctcccacccccactactcctccctcctcgccgcctacctcgactgccagaaggttggggcgccgccggaggtggcggcgaggctgacggcggtggcgcaggacctggagcttcgccagcgcacggcgctcggcgtcctcggcgccgccacggagccggagctggaccagttcatggaggcgtaccacgagatgctggtgaagtacagggaggagctgacgaggccgctgcaggaggccatggagttcttgaggagggtggagacgcagctcaacacgctctccatctccggcagatcgcttcgcaatatcctttcctccggctcttctgaggaggaccaagaaggtagcggaggagagacagagctacctgagattgatgcacatggtgtggatcaggagctcaagcaccatttgctgaagaagtacagtggatacctgagctccctgaagcaagaactgtcaaagaagaagaaaaaagggaagctccccaaggatgctcgtcaacagctcctcaactggtgggagctgcactacaaatggccttacccctcggagagtcagaaggtggcactggcggagtcgacggggctggacctgaagcagatcaacaactggttcatcaaccagaggaagcggcactggaagccctccgacgagatgcagttcgtgatgatggacggctaccacccgaccaacgccgccgccttctacatggacggccacttcatcaacgacggcggcctctacaggctcggctagctagctagcctactccttatccccagctaccatgacctagatcgatctcgaccccaaatcaatggtcgctaagctactgaaaagtttgtgatgagaattgaagaacctaggttagtcttcctggtaatttgatgctcgcgcgtacgcacgccatggatggctgcgtgcttattttgtttcttgccgcaatatgtaatgcaattgccttagctaatgcatcaactcgggtcggttttagctgctgctgctgcgccacaatgaggtggttgtggttatgcttttgtgtggtttaatacgccaagacgtacacattgcttcgaaatgtcgctactcttgctgctgctaattaagtgcgtgtttgaataattcggatctatatactacctggttaattcctatcttctgattatataatttgctgatcgttcgagtttgtgagattttttt

SEQ ID NO: 102362 - DNA, 490 bp, Oryza sativa
  unsure (1)..(490): unsure at all n locations
  Clone ID: PAT_MRT4530_99892C.1
aagaacagtgnctntangcnnnngtcggtccgngtcatgcgcgngggccccaacctgctgaagctgnccaggaaggagcagtgttggccttgggcacaggntcngctncnagtacaagntcanctancagttagcgcgagantccccaatggcaggtgcagtccctccgccccaaggacggngtnttcccggagaaggtcaaccccggcaggcagggcgtcggccagcanttcnncagcatcggcaannacgtcagccccntctnggtcnngttccccggcaaganngtntttgacatcnngacgtattnttnttgttcttgttctctcataanngnccnantnantacttgtgttttgggtggatggacatgtanttttaatcntcngncnggctgatnttcngttattgatgatggcgccancganaaanggtgggatataatattntntnataatattgtngtatatgtttggtnaaaaaaaaaaaa

SEQ ID NO: 102363 - DNA, 161 bp, Oryza sativa
  Clone ID: PAT_MRT4530_99893C.1
gtacttaaagcccgatatgatagaaggatctatttacttgtggactggggaagggcgaacacatctgctaataaaaaaccaagggcttcattgtcaaccacgaacaatttcatgtccaactatccatcgcccgagaagaaaaattcattaattgcgggaag

SEQ ID NO: 102364 - DNA, 1498 bp, Oryza sativa
  Clone ID: PAT_MRT4530_99894C.1
tttttttttttttttaaaaaaacccgtatatcataaattagtcatgaatgacaggaaaatattttttttatattttttttaatgcaaaagaaagagaattttccttatgcatctctgttccattgcatagaccattccatattattactacttacagattacaaagcatcatagtgaactagatagaagagcacaaaacaaatcctactctcttctttagagcaagatccagcagttcttaccctttatgcatcaaggttctccatctgaatattgctcttgagaggcacgtattcaccaaggtaccctccgagatgctcatacaatgcgcttcgatcaatctgctggttgtggaaggccttgcaagcgtagtaaaacacgctctgcacgagtagccccagcaaattgacgcagacaagaacagacaccagcacagcaccagcaagcacccgaccgggcaagctcaggccaaggctcccctcctcgccgcggcccttgactacggccgcgcggaacagcacagcggtaacgccgcaggcggcgaagtaggagacgacgagcacgccggccgtgcgggtgcgcccttgaagcagttgcttgctttttgtcatggcggcgagaccgcagagcggctcgagcacggagatgacgctggcgaggtgccacaatgcggagatgtagacatggatcgcgaggaagacgaacacgacgacgacaaggatgaggacgaaggggagggagggcggggaggaagatggggcgaagagcaggaggaggaggaggacggtgagggcgaagacgaggtggtaggcgagcatgaggagcgagacccagaggaaggtgcggaggaggcgcgggaggatgggcggcagcgcggcgagcgaggaggcgatggatgccggcttggcggcgtagagcgaggcgacggtgaagacggcggcggcggtggagaggagggagagggtgaagaggaggatgaggtagaggaactggtacgcgaagagcttgagccactgggcggagtcggaggaggagtagtcgccgttggcgccctggaggcggaggatgatggggtgggtgaagagggagtggacgagcaccgcggcggagagcgggaagacgaggcccgcggtgagcagcgcgaaggtgcgcggcgccgcgcgcgggatcgaggcggagacgcggacgaggtcggccgcgcccagcgccgcgaggtcgtgcgtcgcaagctccatcgcctcggcgcctcggcccgcggtgcggccgctttggggtttcacggggatttggcgattgcccgatttccttcggtcgtcttgtgggaggggggattcgggtggacgccgcggcggtgatgtggtaggggggaggcaggcacggtcggtgggctttggccgcggccgcgtgggcgaagaaggggaaagcaagactgcgaggagggacggcgaggcagggaactcgggcgagagggatggatggggggaatccaccctggtgc

SEQ ID NO: 102365 - DNA, 385 bp, Oryza sativa
  Clone ID: PAT_MRT4530_99895C.1
ggccgcccctttttttttttttttttgccgacaataaacatggggaatctcgttggaattatggagcaccatcccttttatagctggactttttttatgctccatgccagatcatacctgacccagcccaaacgcaaggctgaacgaagcaaccctagacaccaatgcaatggaatgattggttaagatacaaaaagaaactaactgccggtttaagcggaagaaaggcccttcttgagagcaccctggtactgtttcttgtcggcaggggtgtggaaagcaccgtgtccgaatttggacgaggagtcgatccacttgaggctggccttgtccagggccattcgggaggactgagggaacatggtctcacggagggccttgacac

SEQ ID NO: 102366 - DNA, 225 bp, Oryza sativa
  Clone ID: PAT_MRT4530_99896C.1
acgtaacaatacgctatgcccaagacgagagaatactacaacatttgaggcgagcacaaaattacaaaactcttgcaactgacgccctttcattaaagaccaatcttaaacactcacaagtgtttaacacgctacaaaaaacaatcttagaaatacctccttgtcgggtacaaccttaagagcttgttcttcccaaaacattcacattattatctagcatgagta

SEQ ID NO: 102367 - DNA, 672 bp, Oryza sativa
  unsure (1)..(672): unsure at all n locations
  Clone ID: PAT_MRT4530_99897C.1
aaaaaatttcaccggcattgtaccaagttccattggcaaactaaccaaattgtctttgttaaatactgaattcaatctactccaagcacacaaaaaggaagattgggagtttatgaacagtttagccaactgctctagactacaagttctttcgatgggacataaccgtctagaaggccatctaccaagttcgttagggaacttatccactcatctgtgacaacttattttctcaggaaatcagctcaggattttttccttccggcatagaacacctctccgacttgaattctttaggactagataataatgaattaacaggttcccttcctgaatggcttgagaatcttaaaaagttacaaaagttaaccttgcaaaacaaaaatttccctntcctgaattgcagttattccgtcatctgtttcgaatctgctccaactagcagttctcggactatattctaacaagttggaagggcacataccaagcttcgtaaacctgcaaatgcttcaactactagtcatttccagtaataatcttcatgtcagcataccaaaagaagatatttagtattccatcaataattgcaatttgatttatctttcaccaacctagatgggcaattccctactgagattggaatgctaacaactcgtatctttgggacttcat

SEQ ID NO: 102368 - DNA, 352 bp, Oryza sativa
  unsure (1)..(352): unsure at all n locations
  Clone ID: PAT_MRT4530_99898C.1
gaggatcacctgttcgcggcgttccgatacttcgacaaggacggcagcggctacatcacggagcgatgagctgcagctagcctgcgaggagatcggcttgtgagagacgttcagctcgaggagatgatcagagaagtcggcgaagacaacgagagtaaaaaaaaaaaagaacctacttttccattccattgggatcgaagctagctaatcacattagctgaaatgcttgatctgacggagctgtcgctgttctttttcgtgccttgtgtttgcaggatggtcgcatagattacaacgagttcgtggcgatgatgcagaagcagacnatggggctcccggcgaataagtccgg

SEQ ID NO: 102369 - DNA, 318 bp, Oryza sativa
  Clone ID: PAT_MRT4530_99899C.1
atggcgggacctctagattgcggcaacgctacaggaggtgcggtgacgaagtcagcgaccggtggtgtagagtttcctgaatgccctaattttgcgaaaagtagccataaccggaaggaaacaggggggaaaaagctgggaaactctaggattgcgccatgtgtacaggagcgtgccgacggatcaagtcggggcgatgggtcgagcagtgaggttagtctccctaattcgcagattcgttgtagtgttcgatttgaaagctcggaattgcatggtcgaattcgggagttgatcgggttctggaagcccatgagctga

SEQ ID NO: 102370 - DNA, 417 bp, Oryza sativa
  Clone ID: PAT_MRT4530_9989C.1
atggagatcattgccagcatcagtagcaccgaatttagtattcagtgcatcccacaactccttagcgtcagtcaaatgcatatacacctcgaccagacgatcgccaagaacgctaagaatgcatcccacaaagagagtagtggcttcctcgaattgcttctgctgatcagcagtaagaactccttcaggaagggattcgtagtgctgttccgggacaatgtaagtggtgaccggaaggccgccgccaccccgcaggtgatcaccggtgacctcttcgggatcaagccggccgaccggaaggccgccgccaccccgcaggtgatcaccggcgacctcttcgggattaagccgccgagggcgtggagctgcgttggttcagagacggtcgtggaagtggagcagctatcagcggagtag

SEQ ID NO: 102371 - DNA, 1097 bp, Oryza sativa
  Clone ID: PAT_MRT4530_998C.1
atctgaagagacacttaagattgaaatcttgtacattagtttctggtacacagccacagaaacctccttttggtttcacatgcagccattgtaaggtatgatgtaattctatgaacaaagtatacttgggccgaacactctgtcttcgcctccggtcttcggacattgtaaggtaaacatctctctacttatcttgtttcatagagtcttgatctcatgcttcaagccgtagtcaattctctaatgagtaaaattcttctgcatcttcatacacacaaggatgggtggacagtggaacaggatggaggtaactcttctctcctttctggcagaaaccaagaaaacacttcctttgccctctgtaccaaaggcctctcaacattcacacaccaggcgtaaaacatatcgagggcagcctcagtaatgacttttgagagtactttatcaccttctccaggtgccagcttcagcatcaggtatctattgaacgatatgatcttctctaacatttgccttctgccaatattatatgataacattgcgtcttggattatagagaccatcctgaggactgcctcatagactatagcatatgcatgactgaatatctcggttgctgtttcccacagttcttttctgtgccaatcattttttacagtttctgccccctgttctaagattggcgcaaatgttacagtcttcggtttggttgtgttgacacgcagctgcttcgattccctcagcatggcttccttcatttctgacttaaacctgctgctgatcttgaagtattgttgttcattgtgtgcagttgggctcgggagtggtgaattttgccttggtgatgcttccatgtatacctcaggtgcacatgctgattcacacgaggaatggggatggatgtcgagctgtgcttggggatccgtagtctgcattgttgtgctcattgctgctgctgccgtctgcactgggtcctgcatgtcctcttgcggcttcttcttgtgatgcagtaggtgcatccatttcttagccttgctcttcaccttgccgagaaccggcttcttctggctcccatttggggtccgcggtgatcccat

SEQ ID NO: 102372 - DNA, 404 bp, Oryza sativa
  Clone ID: PAT_MRT4530_99900C.1
atcgacagcgcaccacatattgttactgtaacattgcgtgagagagatgctaatgaactatagacgaaatgccatgcatcgggaacgtatgacagactcgaattagtcgctggctctcagaatgtgcaccagctgtacagagtggatacggttgacacacacatcgaccgatactactgaaagtgcatcacatcggaggatatggacagacatgaatatcgcaaatactacgaccactgcacacatagcgtacacaggggacgtccacaaactatgcgaaaaactaggaggagcatctggtgccaccatgggccatattctcctactacaatcagcctacatagcttagagcattactatctacaagatcgtcacagatgcagacttagaaatgactgtgggaa

SEQ ID NO: 102373 - DNA, 495 bp, Oryza sativa
  Clone ID: PAT_MRT4530_99901C.1
atgccgccgacgtctactcacattgctcatagattactggccgtgctagccatgggacatgtcgggaactcaaggttggccgcactcgagggcgaggaacgggtaatccgtgcgctagagccggcgccacacctaggtcatcctgcaaaaggaggggagcacaagcaccaagagaggagaagcaccaccgtccaaagaaatgggatgatcggtcgcaatccggagaggaagtggtcagaggcaccggtggtggtggcagaggaggagcggggtcctcctgtggcggaggaagaagacgaggaagaaggcgtcgacttcatcagcgacctcccagacgccatcctcggcgagatcattgtccgtctccccaccaaagaagccaacagcacccaagtcctcgccgctctgatgctccacaccgctcaacctcggctgttgtcgtccccgcgcgagaaaggatgccctcgctggctccgtttccgcatccctagctag

SEQ ID NO: 102374 - DNA, 187 bp, Oryza sativa
  Clone ID: PAT_MRT4530_99902C.1
ggggaataaaaaaaatcccgacgaaggggagcaacgaaccacctgataaaaatgcagatatctgggaagacccagacgggcacaaccaacaccgacaatgttgagggctcggacgccatagactgtgacaagggcaagaaccaaaacccggagggggaaaacccgctccaacaagggggcggggcta

SEQ ID NO: 102375 - DNA, 380 bp, Oryza sativa
  Clone ID: PAT_MRT4530_99903C.1
accaacattctcttttcaaccaataacaatcctttaccattcaattttcccaccaacctttatttcttaaccaattacaacctttcttcgtttaattttaaatactttcttaatacccatcactactagaaaaagcatttttgcagatgttgggagattaattttacaaggggattggacccttagagctaaatggccgcctaggaaaatgtaaaccggggggggggctcaacgttcgcctgtgaaaatcaattttttcagggggcccacttaagaggcctctcttcctctttcctcacattttccactctcctagttccccccatccttactccctctttcgtacaatccatcctttttctgtttattttttatttttt

SEQ ID NO: 102376 - DNA, 518 bp, Oryza sativa
  Clone ID: PAT_MRT4530_99904C.1
aatgtgtgaccggataacacagttgtcaacaccaaggaatacaagctatggcccatggattaccccaagctctgaatcacgactgcaactgatagggaaaacctgggtaccgcctggcagggaccaggtccaggaattcaccggggtcagacaccacgcgtgccgcagagaacctgtgtcaaacttgcatgcgcaagtgcagttctggcaggcgcacgatcagcgcaggcatagctaggtggtgcccccaggacatcctgcgaccagtgggttcccaagcaagttccaggagcagggccaagaaggatcacctcgttatgctgcaagacattcagacttttcgagacgaaggttatgtttcaagtggcattggcaaactggcatgtcgcaagaaagggttgggttaagtgagagtgttgtgtgatgttgtagaccatctatcaggtctgtatttctagacaagaaattaacttgtcattcagggactggattcaaatcaaaaaaaaaaaaaaaaaaaa

SEQ ID NO: 102377 - DNA, 822 bp, Oryza sativa
  Clone ID: PAT_MRT4530_99905C.1
aaaaggcgcagatgattaggtgacactatagaagagctatgacgtcgcatgcacgcgtacgtaagcttggatcctctagagcggcgcgctccagcggcttcctcgccgtgatcacctccagcagcagcacgccgaagctgtacacgtcgctccggtccgtcagctgctgcgtcatgtagtactccgggtccaggtaccccattgtgcccttgacttgggtggtgatctggccacgaccgtcttcgccgagaagcttggacaggccgaagtcggagaccttggcgttgagccgctcatcgaggagaacattgctcgacttgatgtcacggtggatgatcggagggtcagcgagctcatgcaggtaggcgatacccttcgccgcaccgaggacaacccggagccgccgcttccagtccagcctcacaccagatttcccagtgaggctctccttgagggtgccattggggacatactcgtagacaagcatctgctcgccctggtcgaagcagaatccgactaggctgacgacattcttgtgatgaaccctggacaggagctcgatctcagtcctgaactcgaggttgccctgcagggagccttgctgggatctcttcacggccaacacgctgaccacgtaggaagtgttcccctgtaaacttccgtagctcggggcgatgtctgggctccgagaagtgtgggacctcctagtcgtcgagaatctcgactgacgggggaaggtatggggggcttgaagccgaaataaggccatctcgctggtgctctcttaaggatgggaaacggggaccatccgcccaaaccaag

SEQ ID NO: 102378 - DNA, 387 bp, Oryza sativa
  Clone ID: PAT_MRT4530_99906C.1
ggccgcttttttttttttttttttctgtaatgcaataattgtacatgaaattcgtctaatttcgatgaattaaacgacctactatatatcgatgggccgtaattttgattcaggtcgccttggtcctcgatcggagacaaactaattgtccattcctgtacggcccaggactcacactagctagtcagttgtcgccgccggcgccgccgcgtcggactggccggtcaaggaagcagcagcgaggtggcggtggtgcccctgaagagagcgatcacctcggcctcctccagcccgaggcggccgtgcggcgccaccacggccggtgccccggcgatcgagtagccgccgggcggccgcagctgcggcctgaggtgcaccggccccggg

SEQ ID NO: 102379 - DNA, 1224 bp, Oryza sativa
  Clone ID: PAT_MRT4530_99907C.1
atggagcataaattgggttgctggcaagacttgaacaaaaagggcattggttctaaaaaatgcagaagggatctgtatggagccaaactgagagattggagaaaaattacacacgggtgggaagagttgaatttgaaagaaaattataaagacaaactgtggtggaacttgtccaaagatgggaaattcactgtgaaatctttctataatgcacttaaaatgaagcaggaactgtttggtttctggattaagaatgctgacaaattcacaaaaaatctcattgtggttgggatagctgccgtgatatggtctatatggaaatgtagaaataaagcttgcttggagaaaaaacttcaaaatgatcccactaatttaattcacatggcctgcaattgggtggatgcatgggcggtgaaccgcaaacgatcggcgctggagcaagacgacgcgaccatcggtggcgacaagaagcggctacggctaggctccatctacgactacaggaagctcgccgtgctgggcgaaggcagggacggcgtcgtgttcaaggccgagcacctccgcaccggcgacatggtcgccatcaagtgggtgcgcgccgccgccgaccaccgcgccttcatccgcgaggtcggctgcctcgccgcctgccgcagccaccgcaacatcgtcgaggtccgcgacgtggtcgaggacgccaacaccagggacatgttcatcgtcatggacttcgtcggcggccgcaccctccacctcgacctctggatgacccatcccgaccctgaggagaaagcccgcttggtgatgcgcgacctcgtcgccgccgccggggcgctgcgcgctgccggcgtcatgcaccgcaacatcaagcccgacaacgtcctcgtcacgtacggcggcgggctcaagctctgcgacttcgtccgctcctcccaacgtcctcgtacactttttttttgctccaaagaagattttgctggcaggtctcataacaatgctgccaacgaaaaccaattttcgttgatggctgtcttagcttgcaacaagagaaaatcattttcgttggcacgcacctggctgtctagcacaaaacgcactctggctgtatcgtcggccaccagcgaaaacccattttctgttaacaaattaaaatcattttttatagtatatcattccactaaatgtgattatcatatctatatttatgttatcgtacttaattga

SEQ ID NO: 102380 - DNA, 1989 bp, Oryza sativa
  Clone ID: PAT_MRT4530_99908C.1
atgcgccagcggcgcctacgcggcgaacagcacgtacgaggcgaacctcgccgtcctcgcggcggcgctcccgggcaacgcgtccaccgcgcggcggccggctacgccacggccaccgtcggcgcggtgcccgaccaggtgtccgcgctggcgctgtgccgcggcgacgcgaacgccacggcgtgccgcgcgtgcgtcgcggcgtcgttccgcgtcgcgcggcgggactgccccagcagcaaggacgccaccacctaccaggacggctgcatcgtccgcttctccgaccagcggttcctcgacttcgtcggcgtgaactcgccggtcagcgagctctactccgacgccgacagcaacatcacggccgtcccggtggcctggttcaacgccgccgtcgtcgcgctgatgaacgcgacggtggacacggccgtggccgccggcagcggcagcaacaacaccaagaagtacttcgccacggcggtggaggacttcgacccgaagcactacccgaagatttacgggatggcgcagtgcgcgccggtgatgacggcggcgcagtgccggagctgcctcggcggcttcgtctcgtcgatcccatggttcttgaacgggaagcccggagggagagttcttgggatttggtgcaacctgaggtacagcgtgaagccgttctatcagggccagccaatgctgcagatttctgcgccgccggagccaccgccgccggccatgccttcacttgctgctccgccgactagaacagcgaggagaaggagagttgcagggatctctgcaggcgtcgcttgcttcgttgtcttgatgttgatactgtcagcttatgctttcattcgtttcaagagaaagaaggctgcaaagaaagacaacttattgaagaaaatggcaagaggaaaatgcacgatctttgatttggctacactgaaagaggcaactgagaacttctcagagaagcataagcttggagaaggcggatttggtactgtatataaggtcctttttcttatgagaaagagtctgtttcagggaaaattaccagacggccaagaaatagcagtaaagaagctcatagaaagttgtgggcatggactgaatcagctacacaatgaagtgctggtgttggcagagcttcagcacaagaaccttgttaggctacaggggttttgcgtccataaggatgagatgttgcttgtttatgaatacataaaaaatgggagcctcgacaactttttatttgcacatgctagtagaggaaatgcactaagttgggaccaacagtacaacatcatttttggaattgccaagggaataatgtaccttcacgaggactcaagcataaggatcatccacagagaccttaaagctaacaatattctgcttgatgaggatatggatccaaaaattgcagactttggactagcaagactgataggaggaggtcatactcacacaaagacaactagaattgttggaacatacggatatatggcaccagagtatgcaatacatggaaatgtgtcaccaaagattgacattttcagctttggcgtgctggtacttgaaattgtaaccaagagaaagaactgcagctatggcgatggcaccactgacacagtgaatctcctaagtgatgtatggagttactggaccgaaggtgtgatttcacaggtaattgaccaatcacttgaagggcactttcgaaaccaggcgctaagatgcatccacattgggctgctgtgtgtccaatcagatcctgacgacaggccggacattccatcagtcattttcatgctgaccagggataacatggagcttcagccaccaacagagcctgcattcttcttcaacggaaactcgaactcagcttctcaaacatctgaccagcgcgtctatgtgtacgatcggtctggtaagatctatgaagaggatatctctgcgaatgggatcacacttactgacatatatcctagataa

SEQ ID NO: 102381 - DNA, 918 bp, Oryza sativa
  Clone ID: PAT_MRT4530_99909C.1
atggcggcgacccgcaaccgcaagcgatcggcgccggagcaagacgacgcgaccaccggtggcgtcaagaagcggctacggctaggctccatctacgactacaggaagctcaccgtgctgggcgaaggccgggacggcgtcgtgttcaaggccgagcacctccgcaccggcgacatggtcgccatcaagtgggtgcgcgccgccgccgaccagcgcgccttcatccgcgaggtcggctgcctcgccacgtgccgcggccaccgcaacatcgtcgtggtccgcgacgtggtcgaggacgccagcaccggggacatgttcatcgtcacggacttcgtcggcggccgcaccctccgcctcgacctctggatggcccatcccgaccccgaggagagagcccgctcggtgatgcgcgacctcgtcgccgccgccggggcgctgcacgccgccggcgtcatgcaccgcgacatcaagccggacaacatcctcgtcgtgaacggcggcgggctcaagctgtgcgacttcgggtcggccacgccggtgaagccgccggggaagccgtacgaggagtcgcgggtcggcacgctgctctacacctcgccggagcagctcgccgacagcgagttctacgacccagcggtggacatgtgggcgcttgggtgcatcatggccgagatcctcaccggcgggccgctgttcgacgactcgtcggaggagaggatgctcaaggagatggccgacatgcgacaccggctcgagtccacggggacatgcaagctgttcgacgagctgccggagttgtcggcggccgggcgtgaggtcctcgctgggatgctggccttcaaccccgacgagaggatgacggcggcggaggcgctggaccaccggtggttcaccggcaagccggagaggcgatcataa

SEQ ID NO: 102382 - DNA, 174 bp, Oryza sativa
  Clone ID: PAT_MRT4530_9990C.1
agaaaaaagactccccagcagctctggtctcgttaaaaacagcgcagcatacatctaacagggaaaacccgaaccgaaccatgctgaaaccttgaagaacacgcgacatagacagctctaccacctaataaatagctcgggcacttacccccaacatcatggggggggggccgg

SEQ ID NO: 102383 - DNA, 495 bp, Oryza sativa
  Clone ID: PAT_MRT4530_99910C.1
gactagagctattgcaggtttgccttatcttgcatctcatcatacaagagataatagttacaggcttacagtcaatactcaatagaaaccaagtccaaaaggaaacactccaagagaggataacagtagcctgagttcaaaagcaccatggtactcccatacaaagcttcaccggtgcagtaatacagtagacgttgcacaccatagataacagctactacaagcaattcagtccaaaagaacaaacaggaaacataacagagcaagatccaaatacacagatacatctcggtaatagtccataggcatatagaccatagccagcagccagcgaaatgcaaccacacaagaataagaagaagaagctcagaccgatcagtcaatacgaaccggtccctctcgttcatagccaaacagctgtgtgagactctggaggtctgcaatgcagggggcgaaggaacagcactttctgttcctttgttcttgtgaatctga

SEQ ID NO: 102384 - DNA, 909 bp, Oryza sativa
  Clone ID: PAT_MRT4530_99911C.1
gccaacgctttggctgttgagcttgagaagcagattgacaagctcaagaaggatgttgaagcacaaagtgtcaagaaagctactttggagaacagagctaatgatgcagagaagagggtgcaagagttgaatgcaaagattgacgcactccaaaagacaaatgatgagcaaaagcgcaagcttcaaagcacagaacgtgctctgaaagttgccgaggaggaactgatgaggctgcatttggaagcaacaactaagtcaaaacagctgacagaggttcatggagcatggttgccaccttggttagctgcgcactctgctcattatatggaggtgatctctggtcactggaatgaacatggaaaacctgctatcaacagttttctgcagaaggcatcagaaaaatcagcacaggcaaaaaaatgggctgagccacatgtggagactgctaaaatgaaatgggttccagtgaaggaaaaattggttgtcctcaagaaaaacacagaaccttatgtacaaaaggtctcatcaaaatccgtggaggtctatgaggcatcaagggatgctgttaaacctcatgttgcaaaggttaaagagtttgctgatccctacttccaggaagccaagaagttctccaaaccctacattgatcaagttgctgaggttacaaagccacatgttgagaaagttagaactactcttaagccgtatactaaaagagcagttcgtgtgtatgggtcatttcttgaatcagcaaccacataccatcggcaggcgcaatcaaccatcttagattacctacaccaacatgaggtatccaaatcacttgcgacgaaggagttggttaggttcctggcttctgctttgctggctatccctgtctatattatatacagggcttctatggaagca

SEQ ID NO: 102385 - DNA, 275 bp, Oryza sativa
  Clone ID: PAT_MRT4530_99912C.1
cccacgcgtacgtggacgcgatggaggacgcgtggtataactcgtcaacactgaaccacatgctgtatgcaatgcagaaggagctagagccactcgttaaagggcaacccatggacaaggtgttccctgattgccgaagaggacaaatgaaacgcgtggcgacgagcctacggacattttgcaatgtagacattccaataggcagtgtatggtatagctactggctgagatatactatgaaccctgcgagtggctactaagaaatagtaccatgg

SEQ ID NO: 102386 - DNA, 1445 bp, Oryza sativa
  Clone ID: PAT_MRT4530_99913C.1
atggggaggatctggaggctgctcctgctgctggcggcggcggtggtgttggtgatcccgacgggagtggcggcgcaggaggaggcggcgcaggcggtgatggaggtggaggagtggatcgtggagagggccaaggagcaggcgcaggcggtggcgctcagggcggagctgaagcagctgagcgacaagatctccggccttgcaatctcagaaccatccaaggaactgagggcgatgcatgacatcatatcaactgggtagaaccgcctataggagatacatcagtcgattggaagccttctgcagtaagaagccgaagagaccacctcatggcggtaaccacggccataggagacacaagcgccggcatgctgataagtaggcacttgtgggatacattgggactcacccgctatttagggttgcagatcttggagcagaatcagcaatggtggaaggatatatttgggtcatgggcaaccctgaaaagtgctgtataccaccatagttttcttctcttttttagttttcttatttctcccccggtgtatctttgctatgaacttgtgtcgcagcggccttttatatctgcattttgctgaggtttacggggaaacctctgcatttcagcgtttgttttgttggtattttatttgttattgtttcctgtaactttgttacatcatatggagaatatctctttttgctggtaagaaaagagaaaatcgggtataaacagttttctgcagaacgcctcagaaaaatcagcacaggcaaaaaaatgggctgagccacatgtggagactgctaaaatgaaatgggttccagtgaaggaaaaattggttgtcctcaagaaaaacacagaaccttatgtacaaaaggtctcatcaaaatccgtggaggtctatgaggcatcaagggatgctgttaaacctcatgttgcaaaggttaaagagtttgctgatccctacttccaggtacttcgcactagtactttcatgaatctagaatatcttcctctgatggctgcactggaagccaagaagttctccaaaccctacattgatcaagttgctgaggttacaaagccacatgttgagaaagttagaactactcttaagccgtatactaaaagagcagttcgtgtgtatgggtcatttcttgaatcagcaaccacataccatcggcaggcgcaatcaaccatcttagattacctacaccaacatgaggtatccaaatcacttgcgacgaaggagttggtttggttcctggcttctgctttgctggctatccctgtctatattatatacaggcttctaatggaagcattctgcagtaagaagccgaagagaccacctcatggcgatcttggagcagaatcagcaatggtggaaggatatatttgggtcatgggcaaccctgaaaagtgctgtataccaccatag

SEQ ID NO: 102387 - DNA, 427 bp, Oryza sativa
  Clone ID: PAT_MRT4530_99914C.1
gcggggacgcgtgggtttttttttttttttttatcgatgaattgttcgtctcatcgctatcgagcaccgatacacactggcgtacgcacaagagaagactgaggaacagatcatcgcttcgtactatattggctatggacaaatcgatatatatatatatgggatcgagccgaaggaggcatatttagattgataggaaagaatgcttattggagggtgaccttgccagaccatcccagttccggggtgcggctcgcagtaaaagcctgatgtgccagggacggtgagcgtgaccgacaacgtctcgccgggggcgttgaggtactccttctgcgatatattggagacctagacgccgcttggaaccgggtcctcgtcgaacaccacgttgtgagggaagcccgcgctgaccttgaacgagatggtc

SEQ ID NO: 102388 - DNA, 1683 bp, Oryza sativa
  Clone ID: PAT_MRT4530_99915C.1
atgtgggctgtgcggagtctccgccgtaacctcctgcgagcggcctcctcgccgctccaccccaggtgccctctcccccccgggagcttcgcggcgggatgcggcggcgaggctgcggctgcggcgtcggcgcggtccgcgttgctgccgccgccgggggcggggggcgggtggtggcggcggcggatgatgtcgacgacgaaggggaggagcatgcggagcaaggtggagaagcggatggcgagggagaccgggcgcacgcagcgggagctgcggcgcgccgtcaagctcaggaagaagctcatgaccgacgatgagaggctcatctacagcctcaggagggccaagaaaaaagttgctttgcttctacaaaagctcaagaagtatgagctaccagacttgccagctcctcgacatgatcccgagctgttgacagccgagcaactacaggcttacaagaagattggattcagaaatagaaactacgtgcctgtaggagttcgtggagtttttggaggtgttgttcaaaacatgcatatgcactggaaattccatgaaactgtgcaagtttgctgtgacaacttcccaaaggaaaaaatcaaggaaatggcagcgatgctgacaagattgagtggtggcatagtgatcaacattcataataccaagacgattatcatgtttcgaggaagaaactatcgtcaaccaaagaacctcatacctttgaacacactaaccaaaaggaaggctttattcaaggctagatttgagcaggctctagagtcacagaaactaaacatcaagaagatagagacacaactccgtcgtaagggtatcaatccggaggacccagttgccatggccagcatacagcgagttgcatcaacattcttccgagccatagatgagcagcagggtactccctacgtcttccgtggtgatacacaaccaactgctgggaccactgaaataaaggaaccacatgatcagcaatctgaggatagcgaccaggaagagcttgatcgctttatagcagaaatagagaccgcagctgagcagcaatgggaggaagaagaggcagcggagaaagaagaatcttctcgactgcgatactgggacagagaagaggggagtgagaggaggggtttcaataggagctacgacaacccaggcaatgaatatagagaccagggaagatacacgagagacaacaacagaaggacagcggattcaaggaggtgggacgatgatagcgagatagatgtgtcaggtgaggaatgggactctgatgacgataaggataatgtatttgacaatgacgtagatgctcctgatgaacaccctcgacgatttgaaagcatgagaagcgagaagagcagatccgatcgcagtcggaattatacatctaggggttccagaagttccattgagaaaccaaggaattcagctactgcttctggtagaagcgtgttcagggaaagtgaggatgatgagttagatactgaagatgatgagttgtggggaccagatttgaaggaagagagaaacttgagagcccctaaggtgaatttcgctaactatcacagtggcaccagcagcgaggaggacactgatgacaactggaaacaagactccaggactggcaatacgaggaagaatactgatgagagctgggacagtgactaa

SEQ ID NO: 102389 - DNA, 591 bp, Oryza sativa
  Clone ID: PAT_MRT4530_99916C.1
atggggcccatatgtcaatacatcctctccttccctgtctctatgtttctctcccttcctctcagcttcgacgacgcatttttcttggcatcggcggcacgggagcaggcactgcggatggcggtgactggtggtggcgtggaggaggacgccgccacgccgcttctaccgcccccgacgccacctcgctcggcgttaccggctccgacatgggctcaggcttcacctccacgacacacgcagtcggagagccacccgcaagagaacgcaacctgcatcgcgcagaacaccaccatgtcgtcggtgtcggtgtcgcggaacggcagtgaatccctccgtccccacatagggaatggcaccaaacgcaaagtttggattttggttgaaattggagatgatgtgactgaaaaattgtcggggagaggtggacgccgccctcaccgcgtcgtttccccatccgccacgctgtgccgcttccccatccgtcactccgctgcgcggcaccgcccatccgctcctgcttggccgcacggtgtctcctcgccctcaacctccaagaacaatgccctctccttcaagctcgtctcctaa

SEQ ID NO: 102390 - DNA, 3654 bp, Oryza sativa
  Clone ID: PAT_MRT4530_99917C.1
atgccgtggctccgccgcgcgttcggggcgctgggcgtctgcgtcgtcttgcgcggcgcggcgcctgcgccggcgccgatgccgccgagcaccgggggccgcggcggcgtgctctttgcctccaaccaccgcaccctcctcgacgccgtcttcctctccgtcgcgctcggccgccccgtggtgaccatcacctactcggtctcccgcctctccgagctcctctcgccaatccgcaccgtgcgcctcgcccgcgaccgcgccacggacggcgccacgatcaggggcatgctcgacggcggcgacctcgccatctgccccgaggggatgtcaggatgtctgcagatgtgtgattccgcaaaagctctcggggctcccttgatctggttggctggattcggggtggaccatgagaacatcctggagcgacctcgttacatcaccaaacaggcggctcaaatcatggctcaagacggtaaactcgatcaattgttgaagatgatggaggaggcagaaaagaagagggaggagatggagaggagacgggaagaatcggaagctttgagtttagctgaacttcagtcactgaaggtggcggtagaatcacggattctgttggtggaaaagaaggtgagcgagttgggaggatctgtgagcgatctggagaagaaggtgagcttaattcaggctgggttggagaagtgtcaacgtgaggttcagcaacggactatgttcaagggagaatcaagccagggagcgaaccacgtcctcaccgaggaagacctcaatggtaatttcccaaatcccttcctgtacactcctaaccaaggttggagaaatcctcagttcaattctgtgagcccgttcatccccgatagctcaaattatcagacgtttgatgctggaatggtcagtattggtggcaatgttccacccatgtcctgtccgcagtttgatggagagaacccgcaaatgtggagggataattgtgaaatctattttgatgtctatggtgtgcatgtggctaattgggtcaaggttgccctgcttaatttcactggtaacgcttcgttttggctacagccagttagaaaccagttggttggtatctcttggatggaattatgtgataaggtgtgtcgtaagttcacgagggacaggcaggagcacctaattaggcagtggtttcatgtggggcagactggaagtgtagcagagtacgtggaacggttcgatgggttgatgcaccagttgctttcttatgacaatgcattaacacctctctacttcttaaccaagtttgtcgatggactgaaagaagagatcagggaagcagtcatgcttcagaagccgattgatctagatgctacttgttcagtggccttattacatgaggagattcttgaaggcagcaaaaagacaaattataagaagggggaagggactggtttgcacagggttttctctcgacctaccctgaacactgcttttcctaaaagtcctgtaacaagccctgtggaagacaaaaagggggttgattctgtgagaaccaatttcagagatgataaggtttcagctctgaaatcatacagaagggttaaggggttatgcttcacttgcggagagcgctggggtaaggatcataaatgtgcacagactgttcaattacaggtggtagaagagttacttgaggccttccaaattgatgaaactgataacactatggtcacatcccctgagcctgtgttagaaaacaaccaattgatggcaatatcactcaatgcttacaatggaactgactcaactcgttcattgaggattgttcatcacttgcaaggagtagtgaagcttcctgttcctgttaaggttacgattgctgatggggggcttttacagtgtgaaaaacaacttcctgattgtgcttggtggctgcaaggaagatgttacaagtctaattttaagttgctgcctttatctggttatgatgccatcttgggcatggattggctggttgggttgggagttatgaagattgactgggagcagaaatggctggagtatctggacaatggttttcctgttaaaattcaaggggtacagtccaaggtggatgagtgccatctcatttctggggatcaactgaaaggattatataaggctgggggattgatgcatctgtttcaggttgctcgggaccatagtaactctgttcctgttattccagattctgtgcagcatgtcttgacagaatttgcttcagtttttgaaactccacaaggattacctccaagaaggcagtgtgaccattatattcctttgcttccgggctcaaaaccagttaacatcagaccttacaggtataatccaacacaaaaaaatgaaatagagcaacaagttcaagaaatgttaagatctggagtcattcagcaaagtatgagcccttactcttccccagcattgcttgttaagaaaaaagattgtacttggagactttgtgtggattacaggcaacttaatgctattaccattaagagcaaataccccctgccagtaattgatgagttattggatgaattggttggagcagcctggttttctaagttggacttgagggctgggtaccaccaaattaggttggttgctggagaggaacctaaaactgcattccaaacccattttgggcggtttgaatttaaggtcatgtcgtttgggttcactggtgcacctgcaaccttccagggggctatgaatgacactttagcacccgttttgaggaaatgtgctctaacccatgttcaagatcttaagaaggtgttgcaactcctacaaaatcatcagtggaaggtcaagatgagtaaatgctcttttgctcagcaggagcttaattacttgggtcataccattggagtgcatggtgtatccactgatgctagcaaggtacaggacattattaattgggttgttccaaccaacctgaagaagttgaggggatttctgggcattgctgggtattaccgcaagtttgtgagaaactttggtgttcctagcaagccactcacaaatctgttaaggaagggagttgaatttaaatggactccagaggatgagagaactgctcaactattggctgagttgtctattcacactaaagaaggatctctctatcagttaagagatggcctcattagatacaagggaaggatttgggttggacataatcctgaacttcagcacagaatatttcttgccttgcatgatagctccattggaggtcactcaggatttcctgtaacctacagaagaatcaaggctctttttgcctggccgggaatgaaaaagcaaattaaaacaaaggtgcaagaatgttccatatgccaacaagctaaacctgataggtccagatatcttggcctattgcagccattgcctgtcccaactggcgcatggcaaacggtgaccatggattttgttgaaggactcccggtctccaagaggtataattgcattatggtggttgttgataagctgtccaagtatgctcattttttggcactatcccacccctttactgcagctgatgtagctcacttatatatggaagatcatgacttgggtgttacgtttccttgtatattacggaacggcctaaagtcctga

SEQ ID NO: 102391 - DNA, 128 bp, Oryza sativa
  Clone ID: PAT_MRT4530_99918C.1
atgtggggcctacggtatcagggtcccacgtcccagcgactgttagagtgtcggccggttctggtgcccggtcgttttctcctccgattttcgagcggctcacgttttttcgcggacgtcggggaagg

SEQ ID NO: 102392 - DNA, 933 bp, Oryza sativa
  Clone ID: PAT_MRT4530_99919C.1
gctttttttcttagttgtgtcctgaagattaaaaaggacaacttcgtttgggagatagtttgtgtctatggtcctgttgataacaccttgaaaaatggtttccttgatgagttgtcctggcatatccagttcagactacatcctgtcctgctgggtggagatttcaacatgtattaatttgctagtgagaaatccaatggcaatttagatctcagatgcatgaatatgttcattaattttattactggtttggatttgagagaattacacagaattggtcctagatttacttggactaacaaacaagataaccccacccaggaagtgttagatagaattttagtaactgatgactaggacaataagtatcccaactctgttctttcctctattctgagagtgggttctgaccatattcccattttgctagatacctgtgagggtaacattgagagatctagatattttaaatttgagtctgcttggctagctgcagaaaattttaaagagatggttacccaaaaaatgccaacaagagatgattcctacattttggagttttggaacaagaaacaagctgagttaaggagatttctgaagggttgggggattaatgcacactgtgagagagtcagagggaaacaggttctgcagaagaaattagaaatgatagaggctaaagctttggaaaatgagttatcacctgatgaatggcaggagagatatgctttggaaaataacctagaacaactttatgagatggaagagctttactggcataatagaagtggaggacaatggattctagagggagacagaaacactgactattatcataggatagctaatgagaggaagaagagatgtagtatcacttctttgatggatggtgacactgaactaacatcaaaggaaaatctgaaaaaccacatt

SEQ ID NO: 102393 - DNA, 554 bp, Oryza sativa
  Clone ID: PAT_MRT4530_9991C.1
ggttagaagtggacgttgcactgtgccttgatactcccatgcaggcccaagtacatacagttcagaattcagaaacatagcccacatgaaaaatcagctgtacaacgcgaaatacccagatgggtaacagctcacagattaacccagcttacaagctgtatagctcaggccaataacatctgttataacaagcaaactacacttacttccatgagtgggcatgactatgttactaacacggcaaatgcaaagttccagtccactacaagtctgaaaccagaagatcagtccaggcgacttcgactggtgcacaaatagcctataacagtatatatccatgtccatcgttttaggtcattgattgtaatagctgattgccgacagaattgataatattaagtaatggttcaagttctcccattgcccaagatactagcatatcagcatcacaagtgacacagacagtaatacacagtaccagaaaagataagaacaaggttatatgtcatccattgtcaaggagaggaccgttcagaaggagtaccaagtccttt

SEQ ID NO: 102394 - DNA, 344 bp, Oryza sativa
  Clone ID: PAT_MRT4530_99920C.1
cgaaacaaacccggaagagaatccgtgcggaatccacacaggggacgatcgcaacggcgcggactctgaaaatgcggagcgtcgccatcgcgccacgggccgacaaacgcgtgaccgggcggcgcgggcgatacacggccatccaacaagatagggtgacagcaggtgggtacaccgcccgaggcggcacaccaaagcgactacggtcggacgaagaccagcggcgaaggaacgagcgcgcgaaagagaggcaaaagacagaagacgggggaaaaggagaaattcggatctttagcacggagtgtcgcgcaagccggccgcacagcggggcagaccatacctag

SEQ ID NO: 102395 - DNA, 252 bp, Oryza sativa
  Clone ID: PAT_MRT4530_99921C.1
atggagaagatagagggagaaggaagccaatgtgacaagaagaacgcccagccaatgtcacacgagagccgcctggatcccatgttttggccaaaggatagaatctcataccgatatgtccttagcctcatcaatcacccttctttccttcgcagtaccgatatgatacacatggctgacctgacccttgtgaagaaccacctcaaaagcttcagcaacatcatcacaatacaaatagtttctgacatttga

SEQ ID NO: 102396 - DNA, 2331 bp, Oryza sativa
  unsure (1)..(2331): unsure at all n locations
  Clone ID: PAT_MRT4530_99922C.1
cggacggtngngncaacagtagtagtagtacctgattatccatccctaacaaatcccacttccccacacacgccaaaagcctctcctctcctttccgtccgctccagtcctcctcactgtccgtcccaagaaccactcggtgcagccgccgccgccgccgcagccagtgccattgcaagaatcgcgagggggtattgaggttgggcggcgagatgagcatgtacgggagggacccgtggggcgggccgctggagatatgccacgactcggcgacggacgacgaccggagccggaacctggacctggacaggggggcgctgtcgcggacgctggacgagacgcagcagagctggctgctggccgggccgggggaccagggccggaagaagaagaagtacgtcgacctcggctgcctcgtcgtcagccgcaagctcttcgtgtggacggtcggggtgctcctcgccgccgccgtcttcgccgggctcgtcgccggcatcgccaaggccatccccaggcaccaccgcccgccgccgccgccggacgacttcaccgtcgcgctgcgcaaggcgctcatgttcttcaatgcccagaaatctggaaagcttccgaagaacaacaatgtgcattggcgtggtaactcgtgcatgaaggacggactctcggatccggcagtcgggcgcagcctcgtcggagggtactacgacgccggcgacgccgtcaagttcaactttccagctgccttctccatgaccctcctcagctggagcgtcatcgagtacagtgctaaatacgaggcagttggggaacttggccatatccgtgataccatcaagtggggggccgattacttcttgaagaccttcaactcaacggcggataccattgatcgtgtcgttatgcaggtggggagcggtgcaacatcacccggttcgactcaaccgaacgatcactattgttggatgagaccagaggacattgactaccctcgcccagtagttgagtgccatgcttgttcagatcttgcggctgagatggctgcatcattggcagcagcatcaattgtgttcaaggacaataaggcgtactcgcagaagctggtacatggtgctaccaccctcttcaagtttgcaaggcaaaaccgtggaagatatagtgcaggtggttccgatgctgcaaaattctataactcaaccagctactgggatgagtttgtatggggtggttcatggatgtatctcgcaaccggcaattcatcgtacctgcagttggcaacacaccccaagcttgcaaagcatgctggtgcttactggggtggtccagactacggtgtattcagctgggacaataagcttactggtgcacaggttcttttgagccggttaaggctcttcttaagtcctggttatccatatgaagagatcctcaggacattccacaatcaaacaagcattattatgtgctcttatcttccaattttcaagtctttcaacaggacaaaaggtggtttgatccagttgaatcacgggaggccacaacctcttcagtatgtggtgaacgctgcattccttgcttctttgtacggtgactatcttgaggctgcagatacccctggctggtattgtgggccccatttctacccaattgaaactctgcgcaattttgcaagaactcaaatcgaatacatcttaggaaaaaatcctttgaagatgagctatgtggttggttacggaaaccgttaccctaaacgtgttcatcatcggggtgcctcgatcccaaagaatggtgtccactacggttgcaaaggaggttggaagtggagagaaaccaagaaaccaaaccctaacatcatcgtcggagcgatggtagctggccctgatcgccacgacggcttcaaggatgttcgcaagaattacaactacacggaagcaactctagctggcaatgccggtctagttgcagcattagtagcattgtcaggtgaaggccatggcgtggataagaacactatgttttctgccgtgccgccgatgttcccttcgcccccaccgcctccggcaccatggaaaccatgattggctgccactatctgattctgattcattttgtatacggcttatttagattagtgtttttctcccttgttctggaaatgctgggggaaacctaacagaaaagaaggcgtcaggtttttatctttgtttctcccattgttgtatacttgtataatccccatgttatgtaacactattgctgttctggtatgaacctagtaattaatactatctttcctcgtggatttgtgggagttagatttttaaaaaaaaaaaaaaa

SEQ ID NO: 102397 - DNA, 3105 bp, Oryza sativa
  Clone ID: PAT_MRT4530_99923C.1
atggccctcgccaccttcccgtggctcgacttgatggcgtggagaatggacgagtacctgtcgtggatccgccggaggctactccgcgtcgccacgtcactgaacgggttgctccgcacggcggcgagcggcgccgccgccgtcatcgccgcggcaccaccggtagcggcgacgctgtcggagttggtggcgaggaagctgtccatggacagagctactcggttcgtgggatttctcatcatggaggtcttaggaaggcagcggtgcaaggtggaggaagaattgggcaaggggggtgttcaagaatctagcacacacaacctgttcgacagaatgccaagccaacataaggtgttcaaggatgatgaaaggatagcagagcccgttcccatcaagtccaccatgaacaaggagggaatatccatggacgaagctttagatcggattcttgagagggcaaccaccgctgtcctcaaggctaaatcacctacagcacccatggcaccacctactccagcgcctaccaagtgtttgactgaatgccccaacaacaacctcacttgggcgacggcgagttcaagtcacattactgaggatactgctccaacagctgcctgggagctaggaaacaacaagcacaagggccacgcctcatgcgtcgtcaccaaggactcacccgaggtcacacccaccatgtgttcaacgaaatgctccggtcctaccgtcgagcctgatctcactgtggctgcagtggttacgtccgccaccactgtcgtggcctctatggagttggtagctgctgggaacgcaatcggtgccacttacatcaacaatcttgaccaccccaaggtgacgcatgctaagtgttcgatgtctggctccggcgtcaaacggggcactgaacaagttgtgcttgcattcccactcatggctagccctgtggagttcacgacatcattggtggaaccatctccacccacggggctgaagcttggtgctgccatctgcgtgggagatcaggtgcctatgaagtgttcgatgaaatgtactgagagtgacaacaagccactgatggaacaccccaagagaaacccatggccacctgcttggttaggatggaagaagtggtatgtgtcctggactgtagtcaattattctgatatgagattttatttcattccaccgtggccaccgccacttaaagtaggttggcttgcattggtattttctaaatttggagcagctcatactgacatgatggatataatgttgcattggactgatatgaaaccatggcctccaccaaatcaaaatttgagaagtatcatggtgcatctatttgcttggaagcattggaaagttagtgtagaagtgagtctctttgcttggaacactaaacaatacatgaatagtgtgctacttattacagttggcaccaaatggttgattcactctgcagtcaaggactgttttctccaaggcaagccattcaaacttgtggacccattggaactcatgcaagtaatttttgtgctattagtgcgggatccagatgttgagatgtttcagattggcagctactctctacaaccagaaaattatcaattaactaactacttggtggcaagactattgaagcaaggtaatctgaaaaaggtactcgatggtgtggatcatagcaaaaacattaagaagagtgatgttgatgttggcgaggacaatcctggtaatattagtactgcagcaaaaatgttcattgatggtcttggtatcaaggaagattcagacatgctatgtccatcagcccagtacattgataattggtctactaagctgctggatgagataagaaacgggtgcaatatatatctgttagtagcactaatagatgatgagcttaatccatggtgtttcctcatagataagatatggtatgatattttggtgcttctattttttactggggctacatggaaggttgaaagctatgcacttccaattaaagatgttatccatatggttgtttattttgtgcaacctttgcaaggtattctgctccaaacaaggcaaggaaaaatagagaatcctgtcattttggacataacttcagcaactcaaactgtcaagtttttgctctgttacaagtcaactattaagatctacccaagttgttcttccatggtacaaatttctgccagtaaattcagagcttgtgggaaggagaacatatgctacatgcttctattgcttgtattgaatattggtgactgcacttttctgaggtccacttcctatatgctacatgcttctattgcttgtgctgaatattggtgcctgcacttctctgaggttgtccaacatgcaatttgtattggatggattatcaattgggctattcttttttggatggagcaagctgtatgttcaccaaggattattttgcaaatgccatgggatccaggtggtggtaaacttttcatagcttcaggctgccggcttggggacaagccggattcaaaggaaggggtattgttaggaattgggccggctgcactacgacccaacacaatgtggctttgggaggcagtcggcgcagatgggtggctctggctgcgttggcgggagcagcgacgacgctggcggcggcagctaggcatcggctccgaggtggtcacgcggtgcctcgtcgggcttcttgggtcgctgccccatcctgcccgccagcgagaggctgtcctgggagaggctcaagaaggcgatatgcgacggcgaggcgctgtcattgccggcgagcgcggaggcatcggcagagttgtgcgggttcatgaaggtgacgacggcggcggcggcagtcgcaaggccggcgaggcggtgacggtccatgacgaggtcgttgctgcggctgcaggagcagctcgatacggcggccaaggggacgtatgtgctggagcgtgacctcgacacggtgagccacccgccacccctctgttccactcgccgctcgccgccgccccttccagcttcgaactgctgttgcatcaatccatgccgcgtcaaaacatctcgcattgagttgatcttgatacgcaggctgaactcctgcat

SEQ ID NO: 102398 - DNA, 331 bp, Oryza sativa
  Clone ID: PAT_MRT4530_99924C.1
gatgatcgtattccgtggtcggtggctggatatcatcatcgccatcaacatcggtggtccctctagtacctgcggtcacgtcggtagtaaatgcagtcctctcctcctccccctccgcttactccaagccccaccccacctcgccaacctcagcaacctcctcctcctcctcaactgccaccacctcaagcagcaagcagcaaaccccaccgagatctcccccccgaagcacctcctgcagcaccggcaacgcagccgcgaccacgagcaggaggcggcggcggcggcgggtgatgcggaggcgggatggcgaagcaagcgtggtcgaaaa

SEQ ID NO: 102399 - DNA, 3309 bp, Oryza sativa
  Clone ID: PAT_MRT4530_99925C.1
atgtcgcggcgcgcggcgccgatgatgctagcgctgccggcgccgccgcggctggggtggggagggaggacggtggtggtggtcggtgtacgggacgacgcggaggggagggagctgctcacctgggcgctcgccatggtcgcctccgccggcgaccgcgtcgtcgcgctgcacgtcgccacaccccctgccgccgccgatcaagaaggcgccatgagaatggcggcgaggaggatcagagccacggaatcgctcgccgcattgctccgcgcgtaccatgacttctgcgatctcaaccaggttccagctcatcgcccacacatcagcctggagctcagaatctgccatggatcatccatcaagaaggctctcgtgaacgaggcgagctcctatggcgcggcgcacctcatccttggcgtcacaaacaactcccgtagccatctccggccatcgtcgtcgtcctccgccaccatcgcgaagtactgcgcgaagagagtgcctccgagctgctcggtcctcgccgtcggcaatggcagggtcgtgtacaggcgagacgccgcgcagcagcaactcaaccagtgcatcagcccactggtggagacgccgaggaggatttaccggaagatttaccggaagctcgtcagagcggcgacgacgatcacccgcgagaaatcccaggacgacgcggcgatcgccggcggcggccggcaccttcgccggaacatctcgacgccgacgagcgcccccgtctcgccggtcgtagcgttcacgccacgtcaggcggaggtcgccgccggctggccgctcctctcgccggacctgaagtccgccttgccagagtggacggagatgtcggtggcgcggtgggcaatgcagctgccgagccggtgtccggcgccatcgccgctaaatccacgcaataactccggcgaccaagcgacctcaccggccatcaccgcatcggaaactccatctccggcgaccgatgaagcggcggagcaagttgcacaagagcttgcctcgctgagaaacaagtactcatccaaagctgctcggttcgtgggatttctcgtcattgaggtcttgggaaggcagcagtgcaaggtggaagaagaattgggcaagggaggtgttcaagaatctagcgcacacaacctgttcgacagaatgacaagccaacataaggtgtttaaggatgatgaaaggatagcagagcccgttcccatcaagtccaccatgaacaaggagggaatatccatggatgaagctttagatcggattcttgagaagtttgagttgatggaggccaaccgtagacaagaggagaagttcaatcaaatactacagaagttggaggaggtagaagctcgtaggagcaaggctgccgaggagacaattgcatccatcagggcaaccactgctattctcaaggctacatcacctacagcacccatggcaccacctactctagcgcctaccaagtgtttgacagaatgccccaacaacaacctcacttgggcgacggctagttcaagtcacattagtgaggatactgctacaacagttccctgggagctaggagacaacaaggacaagggccacgccccctgcgtcatcaccaaggactcacccgaggtcacgcccaccatgtgttcgacgaaatgctccggtcctaccgtcgagcctgatctcactgtggctgcagtggttacgtccgccaccactgccgcggcctctatggagttggtagctgctgggaacacaatcggtgccacttacatcaacaatcttgaccaccccaaggtgacgcacgccaagtgtttgatgttggaccttagctccaatagtggcgccgaccaaactgtggtcacgttcgagaccttagtggacatgactaaaggcgtttttgcacctgatgcaacaattgaaggcagctcaccaaggaagatcgttgaaatagacttggtcatagtgatgcctacagggtgttcaatgctattctttgacaaaggtgccagtgagttgttgcctgtaaggggacacgttatgtggcaattgttattggagcagtgcaagcgaaacccttggtcgcctcctaactcagtttatcaagttaatggaatatgggagttgtggcatgtgccctggctggacttcaactattttaggacaagattatctttgatgccaccttggccaccatcgactcaaattggaaccataatgctttggctggtggcaaactcatggctgagggtggtagagctgaaaccgtggcctgacccacaatcaagtcaatgtagcacaggcgggaggtggactgaactgaaagtcccatggtcagcaccagattgtgaatgttctatgggagatgatttttgcagtgccaattgcataagaaacgaagcactttctgttgcattatcttgtgcacctaaaggagatttaaatcatgaaaaaattgatggatcacagaaggataccttggtggcattacttatcttggaacatttccattatgtgggtgatgaagaaaaagttacacagggaatgctaaatggtctaattgcagtgggctgcaactacttgatcctgatcatgtgtgctgctataatcacaacaacatttcatcttgctatgattacaactcagggcaacaacgtatatgggccaaatcaattgcatgagaagctcattcccagattgattcctttgaccatgagaggattgcccctgccaattcatgcttttgaggtggttcttcacaagggtcaggtcggccatgtgtatcatatcggtactgcgaaggaaagaagggtgattgatgaggctacggacatatcggtacgggattctatcctttggccaaaactgaagcatgttgatgtactggaggatggaaacaacaggtggactagagatttttcaagtagaagcattgtattgaaagggcgacaagattgtggactttgttggtgtgcactggatgttatcagggatgtgaaagttgatctggtcctgcaacttttgaagcaatatggttcagcaaaattggtgatcattaattccttgagtataccatgggatccaggcggctctcgtgtgacactggctgggcattcttcttgtcacattggctacattacaagagaagcattaacagaggaaatcaagtataaatcattgcatcaaacatatccgttggtgaagtttccacatttaaggtcatcggcttggggacaaaccaaatttcaagaaatggggattgttaggaaatcttgtgggctgcaatgtgggccagttcagtga

SEQ ID NO: 102400 - DNA, 726 bp, Oryza sativa
  Clone ID: PAT_MRT4530_99926C.1
cggacgcgtgggctttaataccctcctgcccatccacccctcttcccggcccctcgccgcgccattagcggaaggttttgctttgcgtcatccaggatgggcaatctgatctcgtcgggcgcggtggtgggcgcgagcggcggagggaaggtggtgatggcggacgggagcgtgcgggcgctcagcgagccggtgtcggtggcggagctgatgatggaccacccgcgccacttcgtcatcgacgcgcgcgacctgcagcagcagcggcggcacaaggggaaagctggggctcctcctcctccagggggcaaggtcgcgccgctgccggccgaccacgtgctgggcgccggcggggtgtacgtcctgctgccggccaccacccgcggcaaggtgtcggccgaggaggcgcgccgcgcgctgacggcgtcccggtcgctcgagcggtcgcggtcaatgccgggccggctgaggaggaagctgtcgtccaagaagatgacccaggaggctgacaacgacggcaatgcgtccgagaaccacgcggcggcggcggaggcggagaggagggaggagacggcggcggcggcgaggccgccgccggcggacgggttcgaggagcaccggccggagttcctgagcagggagctgtcgagcagagggtggaagccgagcctgatcaccatcgaggagcgcgtagcgccgaagaaggtgtcccattggctcttctga

SEQ ID NO: 102401 - DNA, 1882 bp, Oryza sativa
  unsure (1)..(1882): unsure at all n locations
  Clone ID: PAT_MRT4530_99927C.1
gattcagaaactaatgccagtaatcggcagctcacttataccacgtacagaatccactataattaagcgtcaagggagaggggaaaaaaaatcaaagcaacaaaatcgtctaagaaacgtacatgaaggagaaaagaaaagaaaatcgtctaagtagcataaagggaaaagaaaagaatcacaaattaattaagctcagtgcacgacacattaatcggagctagctaagctagtgtctttgttgcttgctaggtgcatgcttgccaagacagcatgcaaaaaattaacgatctcgtcacagatcgtcgtcatggggctacgggcacggcttggggttctggaagccggcgtacttggccctgacgttctcgcacttggacgacgagacgccgttccccttgtaccgcaggtcgacgtcctgcagcacgacgccctggcacggcaccccgcacttgagcagcaccgccacctgcgtcgtcgccgtccccttgatgttcttgaactgcacgtccttgatcgtcaccccggacacgaacttgtgctcgcagttgtagtaggggcagtacttctggtcgatgatgatggggttctggacgtcgttcatgacgaggttctcgaacagcatgtgggcggcgttgctcttggtgggggagttctcccacgtcttgatgcggacgccgttcatggtgccgtggaaggtcatgtcgcggacgtggatccgcgtgacgtccccctcgccgacgtaccggccgaggctgcccacgcccgtgccgtgccccggcccgcagtggacgcgcgccacgtcgatgttgtcgttcccctgcccgatggagatgcagtcgtcgcccgtcgcgatggtggtgtccgcgatggacaccccgttgctccgctcgatgtggatgccgtccgtgttcgggctgctctccggcgcgctgatcttcaccccgctgatcttcgccccgctgcactgcagcagcgccatgtggaagaacttgctgttcaccgacgccacgttctgcaccaccatgtttttgttgttcacgaacagcacgctggtggggaggactttgcagtccttgcggatggggcacttgttgaagggccaggaggcggcgccctggccgtcgaaggcggcgccgttctggccggagacgatgaggtggttcacccacccgaactcgacccagtcgttgccgaacctcttcaggtcggtcgccgccttgagcgtccccggcccgatgtagtaggtccccggcgggagcaccagcgtcaccgccccggtcgccgcgcacgccgccttccacgccgtcatcagcgcctgcatgtcgcggacgaacacctcgcagttagccaagaagctaggggataattcaaccaaggagctagcttgatcgatcgattgttcctcagctaccttgctgtcgtcggtttggccgttccccttagcgccgtagttcctgacgttgaacgtcgggtccccgtggtaccccaccaccgacgagttaccggcggcggacgcgacggcggcgcagtgcccggcaacaacgacgacgacgacgagcagccgcagccgcgcctccatctccacagctagatagcgcacaggcacaggcacaggcacagcactgcggcgcggggaccgagcacacgcagagctagagagctagctatacagctttacaccgccggccgccgtctccttcgtcttcttcctcggtcacttgatctcagccacagtgagaggcatacactagttgatttcactcggcggcggcggcagggagatgatcctgatgatgagatcttgatgggggcaacgggaatggaggctcaaatcgatcgatcgatcgatagagagagttgaggggggtgaaangagatc

SEQ ID NO: 102402 - DNA, 1371 bp, Oryza sativa
  Clone ID: PAT_MRT4530_99928C.1
aaggctctcgtgaacgaggcgagctcctatggcgcggcgcacctcatccttggcgtcacaaacaactcccgtagccatctccggccatcgtcgtcgtcctccgccaccatcgcgaagtactgcgcgaagagagtgcctccgagctgctcggtcctcgccgtcggcaatggcagggtcgtgtacaggcgagacgccgcgcagcagcaactcaaccagtgcatcagcccactggtggagacgccgaggaggatttaccggaagatttaccggaagctcgtcagagcggcgacgacgatcacccgcgagaaatcccaggacgacgcggcgatcgccggcggcggccggcaccttcgccggaacatctcgacgccgacgagcgcccccgtctcgccggtcgtagcgttcacgccacgtcaggcggaggtcgccgccggctggccgctcctctcgccggacctgaagtccgccttgccagagtggacggagatgtcggtggcgcgagctgctcggttcgtgggatttctcgtcattgaggtcttgggaaggcagcagtgcaaggtggaagaagaattgggcaagggaggtgttcaagaatctagcgcacacaacctgttcgacagaatgacaagccaacataaggtgtttaaggatgatgaaaggatagcagagcccgttcccatcaagtccaccatgaacaaggagggaatatccatggatgaagctttagatcggattcttgagaagtttgagttgatggaggccaaccgtagacaagaggagaagttcaatcaaatactacagaagttggaggaggtagaagctcgtaggagcaaggctgccgaggagacaattgcatccatcagggcaaccactgctattctcaaggctacatcacctacagcacccatggcaccacctactctagcgcctaccaagtgtttgacagaatgccccaacaacaacctcacttgggcgacggctagttcaagtcacattagtgaggatactgctacaacagttccctgggagctaggagacaacaaggacaagggccacgccccctgcgtcatcaccaaggactcacccgaggtcacgcccaccatgtgttcgacgaaatgctccggtcctaccgtcgagcctgatctcactgtggctgcagtggttacgtccgccaccactgccgcggcctctatggagttggtagctgctgggaacacaatcggtgccacttacatcaacaatcttgaccaccccaaggacaagattatctttgatgccaccttggccaccatcgactcaaattggaaccataatgctttggctggtggcaaactcatggctgagggtggtagagctgaaaccgtggcctga

SEQ ID NO: 102403 - DNA, 250 bp, Oryza sativa
  Clone ID: PAT_MRT4530_99929C.1
tcgcactcgtacaattcgccaacaaccaaatcaactactactacctgaatgtggagctcactaatcaacaggatattaacagcgtggcgggtactatcagggagacgaacacagctcttgaggcagcaacttttcctggaggctatcccagacgattttacaccgattgcaactctgatcacaggttacctggcaaggatggtgtcataaccgatggagctagcggcatcgatccagcaacagccaagga

SEQ ID NO: 102404 - DNA, 302 bp, Oryza sativa
  Clone ID: PAT_MRT4530_9992C.1
atgtcaaaaagaacactactcacgtattattctagttcaagcaacacagatccttcacctagcaccgagaatttaagtcagccgaagaggcctagggcagagtttagtcaatcagatataattggtgatccagggcttcgcaaaccaattgaagtttatccacctgaaattagagatcaagtaaagagggcatatgcattgagtggcccaactcaacctaatattactatatttcctcgtaaatggcaaggtggtgagtggagatcctttcaaaaaacttggttcaatgagtttgattggct

SEQ ID NO: 102405 - DNA, 825 bp, Oryza sativa
  Clone ID: PAT_MRT4530_99930C.1
tgttgttcacgaacaagcacgctggttgggaggactttgcagtccttgcggatggggcacttgttgaagggccaggaggcggcgccctgaccgtcgaagacggcgccgttctgaccggagacgatgaggtggttcacccacccgaactcgacccagtcgttgccgaacctcttcaggtcggtcgccgccttgagcgtcccctgcatgaggaaggtcatggtggtggccttgctgcaggggccatggaactgcaccggcccgatgtagtaggtccccggcgggagcaccagcgtcaccgccccggtcgccgcgcacgccgccttccacgccgtcatcagcgccttgctgtcgtcggtttggccgttccccttagcgccgtagttcctgacgttgaacgtcgggtccccgtggtaccccaccaccgacgagttaccggcggcggacgcgacggcggcgcagtgcccggcaacaacgacgacgacgacgagcagccgcagccgcgcctccatctccacagctagatagcgcacaggcacaggcacaggcacagcactgcggcgcggggaccgagcacacgcagagctagagagctagctatacagctttacaccgccggccgccgtctccttcgtcttcttcctcggtcacttgatctcagccacagtgagaggcatacactagttgatttcactcggcggcggcggcagggagatgatcctgatgatgagatcttgatgggggcatcggggatggaggcacagatcgatcgatcgatcgatagagagagttgagggggcggacgcgtgggtcgacccgggaattccg

SEQ ID NO: 102406 - DNA, 1245 bp, Oryza sativa
  Clone ID: PAT_MRT4530_99931C.1
atggcttcctgcgagcttcttgagctcgcggagaaggagcgaaggcgcgaggggaggtgggggaggagcgcgaggcgtccccggcgtgccgccacggcgtgggaggcaaggaggcgcggcggcggaccgggaggaggagcggcgtgggaggcgagacgaaggaggcatggcggtagaaggagagaaggaggaggagcggtgaggagagaaggagctactcggttcgtgggatttcttgtcattgaggtcttgggaaggcagcagtgcaaggtggaagaagaattgggcaagggaggtgttcaagaatctagcgcacacaacctgttcgacagactgacaagccaacataaggtgttcaaggatgatgaaaggatagcagagcctgttcccatcaagtccaccatgaacaaggagggaatatccatggacgaagctttagatcggattcttgagaggtttgagttgatggaggccaaccgtagacaagaggagaagttcaatcaaatactacaaaagctggaggaggtagaggctcgtaggagcaaggctgccgaggagacaattgcatccatcagggcaaccaccgctgtcctcaaggctacatcacctatagcacccatggcaccacctactccagcgtgtaccaagtgtttgacagaatgccccaacaacaacctcacttgggcgacggtgagctcaagtcacattagtgaggatactgctccaacagttgcctgggagctaggagacaacaaggacaagggccacgccccctgcgtcgtcacaaaggactcactcgaggtcacgcccaccatgtgttcgacgaaatgctccggtcctaccgttgagcctgatctcactgtggctgtagtggttacgtccgccaccactgccgcggcctctatggagttggtagctactgggaacacaatcggtgccacttacatcaacaatcttgaccaccccaaggtgacgcacgccaagtgtttgatgttggaccttggctccaatagtggcgacaaccaaaccatggtcacgttccagaccttagtggacatgactaaaggcgtttttgcacctgatgcaacaattgaagtcagctcaccaaggaagatcgctgaaatggacttggtcatagtgatgcctacagggtgttcaatgctattctttgacaaaggtgccagtgagttgctgcctgtaaggagacatgttatgtggcaattgttattggagcagtgcaagtga

SEQ ID NO: 102407 - DNA, 314 bp, Oryza sativa
  Clone ID: PAT_MRT4530_99932C.1
aacatttcatcttgctatgattacaactcaaggcaacaacgtatatgggacaaatcaattgcatgagaagctcattgccagattgattcctttgaccacgagaggattgcccctgccaattcatggtaatggctcaaatgtcagaaactatttgtattgtgatgatgttgctgaagcttttgaggtggttcttcacaagggtcaggtcagccatgtgtatcatatcggtactgcgaaggaaagaagggtgattgatgaggctaaggacatatcgagtataacgtctattttcccctgagccaaaatacagatga

SEQ ID NO: 102408 - DNA, 755 bp, Oryza sativa
  Clone ID: PAT_MRT4530_99933C.1
atggaatccatgagcattgaggagtacatcagcacgctgcaccgaagacgtcgtccccatggaattgcagcgaatgatgcaccggaggacgtcgtcggagatcgagctggcgatggcgggctacttcaatgccagcgacgaggcgtcggagatctgcaagtagctgctgacaaacatcaagaacgcgcagagcaactacctgtccatggacagcttcctcgccaccaactccgacagcgtcgccgctaccggtggtgccgcggcgatgacggcggcggcgccgctcgccgccgtgcggagcaacccgttcagtgacgtggcgacgcggagtagcctccggcggatccacgacaggtactcgtccattctccacgccatcaagtcgagccacgggaaggtggcgagggccatcaggaaggtctcccgggcgtgctcgtcgtggcgtgcgacgccgcggcggccacctctgtcgccgtggccgcgcacctcctgttcttcggcctcatcgtcggggtgcccggcccgctctttcccgcaccactccggccgccgcctctccttccccgccgcttcgccgccggcaccgcttggcccgccggtccggcgggagagagaagagggagagagaggatagagggagggggatagagagaagggtagtgaggatgacagggttttactatttttggatcaaattaccacgtaagcgccacgtcaatgccacgtcagatgaataccgagtcaaattagccacg

SEQ ID NO: 102409 - DNA, 616 bp, Oryza sativa
  Clone ID: PAT_MRT4530_99934C.1
atagagcaacctctctttgagctgtctgcttctaggggcgaattctataagccacctccttcatcggagcgcatttatacaactggctatgaaattcgctctgaactaatcagcatggatagggaaaatcctttttctggttttgatttagaaaatccctaccatcatctgcgagactttgagcaagtctgctcatgccttaagattcgtggcatgagacaagaaactttacggtggaaattgtttccgttctcccttcaagagagagcgaagcaatggtacacctctacagtcagatgtgtaaacgctagctgggaaaagttgcgagagagattctgtcttgcatttttcctagatactcgtattactacctttcgagtagaaatccttagtttccagcagatcaaaaacaaatcaatcggtgcggcttggtcaagattcgctaatttagtacagtccggacaaaccctgtttatgtgctattgcaacatttccatacgggcctggataaggagtctgcattctatctggattcattgatttcaaaatcatgtgctcacaacccaccattatcaggttttagttggcacattaattaattaaccaatcacgattg

SEQ ID NO: 102410 - DNA, 220 bp, Oryza sativa
  Clone ID: PAT_MRT4530_99935C.1
atggcttctgatcacatgctgtgtggatttgctggtggaatatgcgaacggaagggcgtgtgcagatggacgctggagatcgatcgctcggctgcattgcatctggctgcgcagggtgccgtattgcggacgtcgaaggcgaagattccggtgacctactctcccgatggccgagatattacaacgcttgatcagggcgccttcaagatctacaccccac

SEQ ID NO: 102411 - DNA, 1995 bp, Oryza sativa
  Clone ID: PAT_MRT4530_99936C.1
atgccttcccgccttctccagcaactgccgcctccgccgccgcctcctcccctcaaccgccgccaccatcacctcctcctcgccgcctccgccgccgccgccacagccacagcgctgctgctgctcctgctcctgctgctcgtcgcgctctacctccggagccgccgcgcccgccgccgcagccccacgctgccgttctcgccgccgccggcccccgcgcgcccgctccgccgctactcccgccgcgcgctccgccgcgccaccggcgggttccacccgtcccgcctcctcgggcgcggcgccgcctccccggtgtacctcgccaccttccccgacgccgtcgcttcgcccgaccgtggaaagaccgatgcctcggttccccccggcaaacggaaggccttgccaaacccccttttcccctttcgggcccgggttttccggggcccattttgggtccccccccccccgggaaaaggaggttttctcccgggccccccgcggctcgtctccctgctcgggtactccggccccggcggcggcgctgacgaccgcccgctccttctcgtcttcgaatacctgccgcacggctcgctccaggccgcgctgttcggcgacgcccgcgacgggaggttcctcgactggccccggcggctcgccgtcatccgcgacgtggcgcgcgcgctcgcgttcctccacgccgaatgccagccgccggtcgtgcacggcgacctcaagcccagcaacgtgctcctcgatgccgacttccgcgccaagctcgccgacttcggcctcgcgcgcttcaagacccccgacgccatcgccgcctccggcgctggcgcggatgacttcatgagccaagaactcggcgaggccggggaactcttctccaccgcctgtgccgccgccgccggcggcggcgtcaaggcggacgcgaaggacgagtccggcccggccgccgcgtgggggaaggagtggtggtggaagcaggacggcagcggcgagctcgactcccgggactacgtcgccgagtggatcggcagccaaatctgtccggccagaaacccggactgggccgacgacaacgacggtgacgccaacgataacaacaagaactcaccctccggcacggacgagcacgccgtggcagcctcgccggaggacaagaaggacgccgactgcaacggcaatgctggcggcggcggcgacaagaaaccagaggcgaccaagatgagggagtggtggaaggaggagttcttcgaggagatgagcaagaagggcggcagcttcgacaagcgtcgcggcggcggcggtggcgggggcgggaagccgtggctccggtcgatcagcatgaacaccggcaacggcaatgccaacggcgacggcggcaacaacatcgaggcgacgagcggcctggacatcagcagcttcaggaggaaccggaagcggagccggcggcgtgggcggtccgtgggcagcggcgacatgcacagcggcgacttcctcagccgggagctgagcacgacgacgagcatgcgcggcacggtgtgctacgtggcgccggagtgcggcggcgggccgtgcgagcacggcgccgagctgctcgagaaggccgacatctacagcttcggcgtgctcgccctggtcatcctgtccggcaggcggccgctgcacatcctctcgtcgccgatgaagctggagaaggccaacctggtgagctggtgccggcagctcgcgcgcgccggcaacgtgctcgagctaatggacgagaggctggacggcggctacgacaaggaccaggccacgctctgcgtgcagctcgcgctgctctgcctgcagcggcagccggagcaacggccggacagcacggacatcgtcaagatcctcgccggcgagatggacctgccgccgccgccggtggactactcgccgtcgccgcgcgtccggccgttcccgcggtcgtcgcgtcgcgcgcagccgcccgatgccaccgagtga

SEQ ID NO: 102412 - DNA, 218 bp, Oryza sativa
  Clone ID: PAT_MRT4530_99937C.1
gtccgctctaacaaaatacagtatcgtgggcttgtgtcgcgcgggtctctcatctacgatgagatcggaacctcgcgttgccgattaccttctccgtgctatgggcaaaggcgcggatcaacctgcacaaggcctccgttacttcaacgccatccgctaatgaggcgtatcagtagtcccgtcctaacaaggaccagtatattggacggttttctaga

SEQ ID NO: 102413 - DNA, 2253 bp, Oryza sativa
  Clone ID: PAT_MRT4530_99938C.1
ctagtggatcccccgggcggccgcccttttttttttttttttttttttttgtcctaaaatgtaaatccagccgcgccacggctgtctgtgccaaaccaggacgaggaagaagaaactgacagtaagctcaggtttatacaagccatcaatgtctctctttctaggtcgagttggcaacccatctcgtcctccagattactactacaatacatatattgacatagatacacaggcctagactagattacatcacaaactaacactgctagctagtacacagcatacaatggggggacatgtacacagatgcagacgagagatctgtcatatgcaagctccaagggagtagaaatcgccgcaccccaggtcgtcgctgaaggtaacatcatccttctccactttgactatggaattgagaaggccgtcgaagctgcagctgctagagctaagttcgctctgaagtttcgggatgctcaaatcggaggcgttcttcggcatcgccatatctcccgaaacgaggaaatctgtcttcatttgtgggataactgttgaaccacttgaggttgcttgcccaatcattctggcaccaatattgctactgttactactgctattgttccatctttggctcatagcatgatgagccccaatgttgcttgccaattgagagctcggtacagaactccatacgaacttgagatcaaacagactgtctgcagtcctatcatcgaacttctgtttcaaaccgtttccacctccaaaattcaagtacttttgctctgtatctggaggtaaaagcatcgcgccaccaaaagagctagctccaccttttgtgtctcttgctaccataaggtcatttgaagagcgagcaggtgcacacgatgaagatgtaccacccaatttgtttgcacaggtattgttaaacgaaccatggattagcaacccgttggcggaaaatcctgataaaggaatagtactctgctgggatacacgagattcaagcagaccagatgaaactccaacggcgccttcaatatgttctgaacttacagaggaagttcgaattgatggctgactgacaattttggcttgtgtgcactcggctagttcttgaggcagcaaaggactgcttgtgacactttggagtgtgccagacataccattagataggccattcccagaaaggatggtggacagatcatcggtttcttcatggatccacttctgttgcatttgggtctgcccaagcgatgttgccaaaccttgtcccaagtttcctttctggtttcctggtaagctaaggtggtacttatttgcatcattaatggaatggctcaatgtatggcttccgctcatagtctgaatcgattttgaagcaggtaccccctgagttccaagagctgctggattgtttctaggacagtacatgctaataaatagaagatagtgaaatgagttccttgcctgtaggtgacttgcaacattttcccttgtgagtttctcaacattcatgagctcaagtatcctttttggcacagccttgtcaattccaagctggttgacagcagcgacaaatttccggtgtagttcaactgaccaaacaactctcggcttctttggagccgagggatcatcaatatcttgagtattgacctcaccctcatcctcctcttcactacagtactccttcctcttcttgctgggcctcccactttgatcaggtgatccacatgtaacatggccatgcacatggtctgaatccgcatttggtggcttgttgcactcttcatagaaatcgagattagcacggtcgcgagtactgaatttcctcctgataacatgctgccagatattcctgagctcttcgattcgaacaggttttaggagatagtcgcaggcaccatgggttatccccttcaatacagttttggtctctccattcacagataacatgatgacagggaggtccatttcaagccccacaagctcaagaagcttaaagccgtccatgtctggcatatggacgtcgctgataactagatcaaacatgtccctgttttcccgcagcattttcagcgcgatagcagcctgatttgttgtcgtcacatgatactggcagcgcagcagcagggtctcgagcaccttgagacacaccgggtcgtcgtcgacggcgaggacacgcataccgacggggaactggtccctcctcctcgccgccggcaccacacccttcctctcctccgccgccctcat

SEQ ID NO: 102414 - DNA, 222 bp, Oryza sativa
  Clone ID: PAT_MRT4530_99939C.1
ctcaagctctgttgacttccaacgtgccatctatatatggtatctaccctatgtactatggtgcacccaataccattgggatccttggcggtgtctggtaacgcactttaacagaatagtggatcagaagttaaaaataagcgcaaatttcatcgtatgtgacatgtgaatctttgagagatataaatttaaaaaatgttttatttgatatttgcaaaacat

SEQ ID NO: 102415 - DNA, 507 bp, Oryza sativa
  Clone ID: PAT_MRT4530_9993C.1
acggcgagcttgctgctcggacagctgctttattgagaccacatacatctgatggcagttggtgaatagaaggcacaatagagaaggatggtgctgtgacattggcattcaagacccatgcctgaactgctatggtaagccacatgtgcaggaaagatgtgtgccatgcttgccgtggctctgcccgaaagtgagtgtgtctagccaagtgcagtagtcgcagtcgtcaagagaagaggcgtcagaggcgtcaagcattaaccagaggagatgaggtgtcgggtgcagttcacgtccgaagtccgaagtacccagaggttacccacagacgtgtgtagtaagtgcggccagaagtccgtcttgtaggtcggctttgctcggagtaaagaagtataccgtaaataaagtaaattgcaagcatggttttgctgctagtgtacgtgtccagtctttcgactaatgagtgataaaccctcgctttagccttaaaaaaaaaaaaaaaaaaaa

SEQ ID NO: 102416 - DNA, 754 bp, Oryza sativa
  unsure (1)..(754): unsure at all n locations
  Clone ID: PAT_MRT4530_99940C.1
attcggctcgagctcgagccgaattcggctcgagactgtatcctcttgtgtttgcgaattgagcaattttcaagatctgaatcagagaatagataataatggctacaccggaccacctgttcaacctccgcaacaacttgtatctcggggcgtaccaagccgccatcaacagcggcgacgtcaccaacctctcccaagaagactccctcgagcgcgacaccctcgtccaccgctgctacatcgccctcggccagcttcagttcgtcatctccgagatccatgacgacgctcccacacctctccaagccgtcaaactcctcgctctctatttctcctcccccgacaccaaggattccgccatcgcgagtctcaaggagtggcttgccgatcccgccattgcaaacaacgccacgctgaggctcgtcgccggtctcgtcttcctccatgaaaatgatttcaacgaagccctcaaacacaccaatgctggtggaaccatggacctgcacgcgttgaatgttcagatctttattaagatgcataggtcggattatgctgagaggcagcttcggatcatgcagcagattgatgaagatcacactctcactcaactcgccaatgcctggctcaatttggctgtgggtgggtcaaagatccaggaggcgtatctgatcttncaggatttgtcggagaggtatcagtccaccagcttgcttttgaatggcaggctgtttgctgcatgcacatgggcaacttc

SEQ ID NO: 102417 - DNA, 3120 bp, Oryza sativa
  Clone ID: PAT_MRT4530_99941C.1
gttgtcgcttttttttttttttttacgatcagatttcaaattttcaatacaacaaagtacatacattttctacatgtatttgtcaattactatatgacgaaagttatgtgaaccctacagcagtgtaacacctgtagcatcaagggtagagatttactgtacattcacgcaatcataatcttccttatttgcggaagttgcttcgtagtaacaacaaagaaaacaattgcatacctacagactacagtgatatgtacagctaaagtacagactaaaagccagcatatatcaaaatgcaaggcgtaataatgtgtaacagatcagcaatttcgcggtctgttataattcggaggcagagaaggacacctttcattcatgtgagggtacggctgcactggtgttggtatccagagcaactccattccatacctgccctttattttgcaagatggggagcttgacactgttaacttgttctgcaccggtggagaagctctcgacgtattctatgtcataaaagtggtccacgagctgcatcggctatggccactgcttgtaacttttatagtgcaggggcaacgacgcgttggcaatctgcagcggcatgcgcatcctcacgggcacgacccagctcaagaacggcaccgcgaacccgggggtcacacagaagcttcccggcgatgggctcgaagtagtcgaggtaggtccggtggtacgggaagaagagccaggagaagtgcacctggacggccagctccgggtggccgacctgccggtacgcgccggtgcagtaggcgcagtggatgtgcgcctgctggtagaagctgcgcgggtcgctccgcggcagcgccttcatcagcgcgatcgcgcgctcgtacttggccatgtactccgcgccggctacgtgcgccggccgccgcgtccggagcggctcgctcgggtcggggagcgtgaaatcgattggttcggacgtgggcatcggcgggcagcattggaggtcctccgggaaatctggaccctccggttttcggcactgcaggaggtcagtgacaataggcccgcccacgcggccggcgttgatcttgtcgtgaccgccgtcggagagcaggggggtcgagacgccgtcgtcggcggcgcaggagacgacgtacgggtctagcccggtgacggcgaggagggcccttgtcagagtttgggcgcatgggttcacggagactgcaggcgaggaggtgtagacagcggcgtaggcgaaggcgcaaacgatgaggacgaagagcgcaacacgacatcgctcgttggccatggttattgcacgagcgttgatgcagacggcctgggatggcgtcgaccacgccgtttggctgccaacaaaatccgtcggacgcaggccacggcgcgggttgcgcgagggtttcaggtgataccccgacacgtgcggtcgccccctgcagccgtcccttgtagacgaggacggcgacgacggcggtagaggacgggcgtggcaacggcggcggtagcgggggacgggcgcggcggtggcggcggcgtcgacgggggacagacgccgcggcggcgggggacagcgacagcggcagtgggggatgggcggcggcggcggcgacgggggacgggcgcggcggtggcggcggcgtcgacgggggacagtgatggcggcggtgggggatgggcgtggcggcggcagcggcgtcgatgggcgcggcggcggaggcgacgggggacgggcgcggcagcggcgggggacacgaattgtgttgtggagaggagctatcccgttgagggacggtatcccgtccctttcattcatgtgagggtacggctgcatggtgttgtatccaggcaactccattcgatacctgccctttatttggcagaaggggagcttgacactgtcatctttgttgcaccacacgggaagccgtgtcatattgttctcaaaaaagttgaggctgtaagcatcttttatggtgaattcagtaacttctatagagctggcaattgggtcaaagagtccagcctccttgtacatcataaggacgtaagccacacaagaagcagactggccatcagtatagacccacttatcttgctcaggaactgttagcaatttgtcaaatgtcatcccacgcttctctgattccactatgatttcaggtagatcaagacccttagttccaagccgtttgttaagggcttctttccacatgttggcagcatactctggttgaagtttgttccacatagtcatcacagaggcaaccacatgagcatctaatggcggtggatagttgtcgcttatggtatcaatccaactaaaaatcatattgtggtacccataaggttttccatccatgctttttgcatattcccaagctgctgtctcattaaattttgcacgcaaatctggatgcaaaggtagtaatgcaatctgaggattggaatcatccttttttacttcaaagtcccaccattcttcccatggcaagatagcaataatatcttctccctgttcattctcatgaccagattccccaacccaaagctttccttcagaatccctgaggcaaactgcggtatggccagcataagctccagtaacccacttctgatcaagtccagggttgaaactagcagactcgagatggagcgtaccacctccaaggcccccatcagtcccgttgtggaactccatccacgcccggttatcgtagaagcaggcgcccttccactcggcggcgcgggcgccgccatcatctggctcccgcgcgacgccgacgaaggacgggaggaggtcggcggcgccgcgcagcgcgaggcggcggagcagcggctgggccaccggccagggcaggagagggaggaggtcgcgcgggaggacgggggcgcggagggccgcctccaggagccccgggaggaaggggcgcgaggcggcgaggaggaggacgagcgcggagagggcggcgaggagcttgaggttgtaggctcctcccatggccgccgccaccgccgccggttaggtctgggagccctccgcgagtttcgcgttgccccgcgctggtcttcttcccgtgacggagttctttctagtcgatgaccctcgtc

SEQ ID NO: 102418 - DNA, 1848 bp, Oryza sativa
  Clone ID: PAT_MRT4530_99942C.1
tcagataacaggagctttgcctttcttgccaccatcatcattgttcttcgacggtgcggtacggtagaaagaactcaagtctgtttttctccttgaagattgagagcctccatcgacaggagctggcctcttctggcttgcttgttgagagtgctccttgtcagaaatttcgataagttcatctgattcatgagtatcttgttcctcatttgatgagcacttcaattcctgaaacgcgctgagcgcgttcgttggcaggctctgagagcacggcatgatttctgatcctcccttggagaggaggggatcttcattcatgcgctcctgcatacactgatccagttgaagtactatatcttcttcagctttcaaatcctttgttgcaaacgtcaactttttttttgctgcatcaatatttttgtccagacaagaatgaaacgccatattctcgtccttgttgacaaaatcatgcagtgcactgtctaggtcatttttgtcaagaatctgcatattcaagttactctctgcaattaattcttcaatactttgctgatctagctcatttggttcacattcttcagaactaccagtgtgttctcgtgttcgattctgttgagctgatcttgagaagagaataatgtcgtttgggtttgcgacctttccgacatacttctgaccaaaccgctgtggagttattgtcgaaaacccagagtagtccacctttactctgactaggggaagtttgggctctgatccactaattgctgttttatcgataagattgctcacctgaaataactctgtattcaatagtactgctgaaaaaatgttatccaaatgctcataaagagctgcttcgttattgagctcaacacccaattgatcttttaattgaacttcggcatattggaaaggtctaactgattttaatggtatattagtttgcttgtattgcattcccttgatttccaacaaaacaacattctttggctttgcttcagcattgctcagtgaggtagcaactgaagaacctggatggataatgtgaaaatcttttccagaaacctcctggtgatcaattaggcattcatgctcatggccccatattaccaagtcaagaaaacttggcaagagctgttcattgatgccatttgttgagcttccctttctccttttctgatggaaaacaaaaagattgaaccagtcatcttcactgtctgctttcatccactgtattttgtaatgtgtctgtaacatcctgctcaatttctcatcccgaatgttaccaagtccatatagagcaacagaagttgcacctttttttataaatactggacaaactgatatttgatcaacatcagaactgccaggatcaaccttcccaaaatagttcacaaaattgcaagcagaaaggatgtcagtggcagacaggccatccactcctgctgggccatcatgagtcccatgtacggtgaaaacaggcaagccaatgttgaaatttgggtcttcaaaattcactcgaccaaacctgttctgcagacaggctgcctggtcactgaccacctgaaactgcacctgatggtcattcaggcagtagcttcttatgatctccatgctcttcaccagcgtagaaatcgaaggtttgttctcgtggaacaaattcccaccaagaaggatgaaatcaaccttgtttataactgctaatgagcagatctcctcaaaagtatcaaatgagtcgaatcttcggatctcgtccttctctaggtagccgagatggcagtcagtcgccaccaatatgcgcagcatgctattttcttcttcatcccatgatgcaaagctagcatgcat

SEQ ID NO: 102419 - DNA, 192 bp, Oryza sativa
  Clone ID: PAT_MRT4530_99943C.1
atgaagaagaaccagattcatgaatttcttccgaagacatatgtgcatgcgcaatcaggtggaaagtggcagagcctccaagaaggaggctttttacagtccagtggaggaggtaccaaattggagcggaacaccatctgtccgatgcaggcgtctactcatcgactcctcaaatcgaacggaaacaagtga

SEQ ID NO: 102420 - DNA, 525 bp, Oryza sativa
  Clone ID: PAT_MRT4530_99944C.1
atgggggtggggaagacgtcggctccgacgggggtagtggtggaaagcggcggcgaaaggggaagacctcggctcccgcggcggcttgagaactcagcaccggcgaggctaggcggcggcggtggcggcggcgaggcgaggcagcggcggcggcatgcggctaggtcgaagcggcatgggctatgccgagttcatgggagacggtgtcggaggtttcaagtgagctcactacggaagcgtcaaggtagcggctcctgtccgagccagagaagaagggagcacgaaggtggagatcgaggtctgtatggccaaatcgccgattccacgagcaccgtcatcgcctctgccactgtcggggactacgctagccgaagcgctgactccccgaggcttgccaacgaatgcccccgtgccatggggaaagacaacgtcagcgggaggcatgacttgccacacaacgggatgaagacaccatcgccaggacacggcgagatgccgctggacgcgattgccaagaaccgctag

SEQ ID NO: 102421 - DNA, 216 bp, Oryza sativa
  Clone ID: PAT_MRT4530_99945C.1
atggcggcgtcggccggacttgacaggagagagagaggaagagcttcaattcaagctctgataataggagaaggcgagaggagacacggctgcggcggcacagaaacaggagcacggcgtcgactctatccgctgattggccatcgaaggcggttcggctcggcggttgatgtcagcggcgtgaggtggcggctgacgtcggcggcagttgcttag

SEQ ID NO: 102422 - DNA, 1041 bp, Oryza sativa
  Clone ID: PAT_MRT4530_99946C.1
atgaactggccggcctctcctctgtgccccccggtgatggctccctccattgtagggtttgcgcctccaagtcctacccatccgcctcgtcaacccagtgagcagatcgacgaagaagtgcaggaggtgaccatcccagacgccgatgggacggatcctgtcgaggtcgactcggccagtgttgatttgggccacggattatctgctagtgaagaggagttcaaccgtggaagctactttggtgtgcccgtgactaattttgtcagtgctcaaggaagcatggaggatgggtattttacaaacttgatgaatgagggtggcaatactttcaattggagtgctgaaggtagccaacccgattacccgaagatccagtgcatcaaggtggggaaggggaagcatctgcgagacctaaccaaaaaagcatgggtcaatgttagtatggatgctattcaaggtgccgatcaatctcggagtgcgtactggaaccgtatttgtgatttttttcatgcaaacaaatactttagttcagatcgctcccaaaattcgctcatgcatcgttggtccactatacaagagtgtctcaatacgtttgctggttgtgtaagtcgtatcgagaatagacctcaaagtggtgccaatgctgaggacaaggtcctcagaactgtgtccctcaagagaaagaggaccctattgcagttgatgctgtgcagccttcgggaagacctgcagggaggaagaaagagagaaaaacagcgtcaacgctcagatcaatccaaaattgatgctttggatcatttatgggctaagaagaaagaggccgatgctgagaaggagcgccaaagagaggagaggtacagagctgcacttgcacttgaacaacaacggattaatttggagaaagaaaagttggattttaagaggatgatagaagaagatagacttctgaggctagatacaagtgcgatgtcaatcgaggagcaagagtactataaaagtgtcaagactagtattttaagtcgtcgttcggcttcaacataa

SEQ ID NO: 102423 - DNA, 1577 bp, Oryza sativa
  Clone ID: PAT_MRT4530_99947C.1
tttttctacttatatttttttctatgtggctgacacgtgtcctgcatattattcccacctttgcaatggggtgttttgagttgacaaaggatttgtgcgatcagattagcaagatgatagcgaagtactggtggagcaaccaggagaaggacaataagatgcattggttaagttggaataaattgacattgccaaaaaatatggggggcttaggtttcagggacatttacatcttcaacctagcgatgctagccaagcaaggatggagattgattcaggaccctgactctctgtgctcaagggttcttagagctaaatacttccctctgggggactgtttccggccaaagcagacatcaaatgtttcctatacttggagaagcatacagaagggtctcagagtgttgcaaaatgggatgatatggaggatgggagatggatcgaagattaacatctgggcggatccctggatcccgaggggatggtcaaggaaacctatgacacccagaggcgctaaccttgtgacaaaagtggaggaactgattgacccttatactggaacttgggatgaagatttgctgtcacaaactttttgggaagaggacgtcgcagctattaaatccattcctgtgcatgttgaaatggaggatgttttggcgtggcactttgatgcgagaggatgcttcacggtcaaatcagcttacaaggtgcaaagggagatggagagaagagctagcagaaacggatgccctggggtctcaaattgggagagtggggatgatgatttttggaagaagctctggaaactgggtgttccaggaaagatcaaacacttcttgtggagaatgtgccacaacacgctggcgttgcgtgctaacctgcagcatcgaggtatggatgtcgatactagatgtgtgatgtgtggccggtataatgaagatgctggacatcttttctttaagtgcaagccagtgaagaaagtttggcaagctttaaacctagaagagttgagatccatgctagagcagcaaacgtcaggaaagaatgtgttacaatcaatttactgtcgcccggaaattgaacgaacaagtgccatagtttgcctttggcagtggtggaaagagaggaatgaagaaaaaagccccagaacaggagagtgtgcagtttggagacggccacccctgaactttgtgaaaatcaacaccgacggagcatacagtagtaacatgaagcagggaggatggggttttgtgatcagggatcagactggcgcagtccttcaggcaggagctggtccggcagcttatctacaagacgccttccatgctgaagttgttgcctgtgctgctgcaatcaagactgcgagtgaaaggggtatgtccagaattgagctagaaacagactcaatgatgcttcgctactcgccccggagttgtaataaggtggcacatgagcttgccgcgtatggttgtaatctccagaccgtgtcttcctgggcaggctgcccgcctggtctggaacggctggtatccagcgattctgctggtttggtaatataaatctctcggtttccctca

SEQ ID NO: 102424 - DNA, 447 bp, Oryza sativa
  Clone ID: PAT_MRT4530_99948C.1
atggcacggcattttggtctggcctaagcacggcacggcccgacagaggtcgggcccgtgccggcccggcccaaccaccgggccgtgcctgggcccctccaccggcacgttgggccggcccggcacgaccggccgacatatgaaatagcccaaagaggagggacgaaaaatagacttattttaaaaaagttccaatgggccacccatgactttgggccggcacggcacggcccgacagctggtgtgccatgcctgggcgggagatgtagcccatgggccgggcacggcccggcacgaagctgctgggccgtgcccagccgtgcttgggccgggccgtgccgggcgggccctttggccatctatacttgaagggacgaggcttctctgtttccttcgtccatacacattattttcctcgattttgcatatatgtatacgcgtttgaaa

SEQ ID NO: 102425 - DNA, 1362 bp, Oryza sativa
  Clone ID: PAT_MRT4530_99949C.1
cttatcaagaaggaacttcagaaaaagcaccacgagttaatggactgtttccattcaaagcagatgtcaaatgtatcctatacttggagaagcatacaaaagggtctcacagttttgcaaaatgggatgatatggagggtgggaaatggatcgaagattaacatctgggcggatccttggataccgaggggctggtcaaggaaacctataacacccagaggcgctaatctcgtgacaaaagtggaggaactgattgacccttatactggaacttgggatgataatatgctgtcacaaactttctgggaagaggatgtcgcagctatcaaatccattcctgtgcatgttgaaatggaggatgttttggcgtggcactttgatgcgagaggatgtttctcggtcaaatcagcttacaaggtgcaaagggagatggagagaagagctagcagaaacggatgccctggggtctcaaatggggagagtggggatgatgatttttggaagaagctttggaaactgggtgttccgggaaagatcaaacacttcttgtggagaatgtgccacaacacgttggcgttgcgagccaacctgcatcaccgagggatggatgtcgataccagatgtgtgatgtgtggccagtataatgaagatgcgggacatcttttgttcaagtgcaagccagtgaagaagtggtggaaagagaggaatgaagtaagagaaggaggaacaccaagaagcccagctaagctctcacacccgatcatgtcacgagctggagaattcgtcaggatgaacgcaaaggacaaaaatcccagaacaggagagtgtgcagtttggagatggccacctctgaactttgtgaaaatcaatactgacggaacgtacagaggtaacacaaagcagggaggatggggctttgtgatcagggatcgggctggctcaatccttcaggcaggagctggtccggcagctcatctacaagacgccttccatgctgaagttatcgcctgtgctgctgcaatcaaggctgcaagcgaaagggttacaacgctctcaatcacacgcactgatggtactatgaaccgatctaaccctgctaggaatttcaacaaacggttggcacgcaggtcagacgacgagcgattcagaggaggaaccagagacgatacctggaaggggatgggcttgtcgaactggagctggaacggcgtggccgccgcccccgccgtcgacgcctcctccatctgctcttccgccatgctcggtgtcaatcagggaggtcgggatttgggggagaacttttttgagcgggcaggcgggaatgaggagcagacggcggcagcggcggcgtgtgacgcatag

SEQ ID NO: 102426 - DNA, 1187 bp, Oryza sativa
  Clone ID: PAT_MRT4530_9994C.1
tttttttttttttttttttttgatgagaagtgaatggtatttgaagttcggagatgaacaatgaccagccctttaggtgagtatgcaacaactaacaaatctcgctcgaatgatggataaacaacagccaacaaacacagactggccacaaactacatattcagaactcttccggcgagtcgtcagaccagcgcgatgctgctcccgccgccaggaggcttcctgacgcctccgaagtagtcccgggaggccaccttcccatcggcgaagatgttgctgccactcatctccttgagcttcgccgtgctcagggacttctcggccgagcctgggggagcttcttccttgaagatgttgttgcccgtcaactcatggaacttctggttatggattttcttggcggtcttgaccgccggctcctccccaaacatgatattgctcggacctccggcaggattggatactttaactgaagtgtgaatgcttcttggttgtggaagcgcaaaatctaaatttccctgcagctccaggttacgagcagctaagggtctagaaggaatctcaggaggtgggccaaatatatcactcccgctgagctccttgctttttgcttccgagttctgcttcttcaatttagcatcagcttcactctccagtgtaccactcaactctcgctgcttcgccacctcaggcaatgaggaaggcttcttcggagacacgctcccctcagcactaaatgatatctgacttatgccagttacagtttgctgatacatccttaatgatgtcttgctgggaggattagagtcaccggagccagtttcagaatctccatttgcaccctgtgcagaaaatattccactcccggtcatttccttcatctttgagcccgagcacattttcctcttggtcagatcctcggcctccaggtcggtcaccggcgctccgaacatcgccggcgtgatcccaccggccggcttgaggctgggccgcgaggaaggcggcgcggcggcgcccgccgccgccgcggcattgtcggggcccggcgactccgaccagctgagcaggccggccgtcgaggcgtgcgtcttccgcaccggcaccgccctctccatctctctctcacttcgtctccctcgtttcaagttttgaaatgcggctggggcccgggggctgcagcgtggcca

SEQ ID NO: 102427 - DNA, 441 bp, Oryza sativa
  Clone ID: PAT_MRT4530_99950C.1
ttcttgctcgtcgccaagacccccttcctgggtgattccctgccgtacagtgccctcctacgggacatagacgccgacgtcaccggacgaatcaccatgagcaaggagctggggtacgggcctgacagggtgaaggacctggggccattctcggagcagacgccgtctgacctgaggggcgagtttcgggacgactacgggtgggacacggcggggctctacggggacccggaggcgttcgcgaggcacagggccctggaggcgatccacggccggtgggggatgctcggcgcgctgggctgcatcacgccggaggcgctcagagaagggggtgcgcgtcgacttaaaggagcccgtgcggcctaaggtcagggcccagatattctccgactgaggactcgactacgttggcaaccccaacctggtgcacgcgcagagcat

SEQ ID NO: 102428 - DNA, 1341 bp, Oryza sativa
  Clone ID: PAT_MRT4530_99951C.1
atgtcgtatccagcaacaatacgaggatctcactcggtgcctcaacgagcttcaacagcgcagccatctcgccgaagacgctatccttcaagtgaagctggggagcacgacatcttcaccacgccgcagaacaagatgatcgctgccaaggccctcctcgacaacatgccggtcccagtcaacctggccgtgaacaccaccatcgcccaagtgaaggccatggtggaagccgccgtcgttgttaacgaccaaatttcgatcaaatcaactggcacgcctttgaacccaagagcaagatttaggacctgcacagaagttaagcagagctcccaggccagttccgtggtcaatggtacaattgctgagcatcaagctaatgggccggtttttcttcctgaaggtggatttccaccatatagagagttggtgaccggcacgcagcagcctgtttctggtgtggctctagggcagccgatggcgtcagcttcggcccttggaagaccaggtgcatcgtcatcggcacagaggcaactgttagagccttaccttttgagcagacaccaacctgggcacacatggcataatatccctcggttgactccagaacaaattgcggctatgttcaaaaacaatcagcaaactatagagccaattcagccgataccaatgggacagcaaacacctaccattccacagcctcagcccgttggaaatcagtttgttcccgggcaggataatgtgtcaacttatgagcatgtcagccgatttttggctcagtgtggcgaagcattggctgttgatgctttgaggagttgggccgatctagagaagcagtttcacagctatttttatagtagaaatcatgagatgaagctttctgatttaacagcagttaggcagaggcatgatgaaactgtacatgactacattcagaggttcagagatatgaggaacagatgctatagcttggctttgacagattctcagttagccgatcttgctttccaagaggccaggaagaattttaagaaagtcaatcatgtatatccctatatgtatgagtctgaagaagatgattctgaagtagcagcagccgagtgggcaagaagcaaggaggttgtcacttgtcaatgggtgaaaagttctaggaaagaggagaaatatgattttgatatcactaaagctgacaaaatttttgaattgctacttcgggaaaaacaaattcaacttcccgctggtcatataattccatcggctgaggagttggggaagatgaaatattgcaaatggcataattctggatctcatactactaatgattgcaaagtcttcaggcaatag

SEQ ID NO: 102429 - DNA, 4393 bp, Oryza sativa
  Clone ID: PAT_MRT4530_99952C.1
atggccagcgagaatgcgaccgctccccaaggcggcgcgactggggagaaggaggcagccgcactgggcggcgccatggcgtgtacaacgacgaccggcgcgaggacccggtggcgccggcctcgagtctgcatcctcttcggccgttcacatcaccatcaccacagacgcccaaaatctccagtacatgtatgggctatagtcgacgccgattgttcaagacaagatgctgccggtgctggacgccaccttcctgtccaaggcgcatgtcctcgacaaagtgttcagatcaaccatccttcggtgctcctcgtagcaagcgctgccggcacagggatggaagcctggtccgtggaggagatgaggcgccgtggcaaggaacggctcgtcgacgcgtcaaggcgcggcgaggtcgtcccaatccaccaggtattcgaccgcatccgtcaagagacacaagtcaccgcgccggcaagtgtcgtcgacgagatcgacaaggcgttcaagaagctggagctcgcggccgcgacgacctccctcgagcgttggtcggagctgccatctccgctctccccgctggccaacaccacgccatccgagctccagctggacttcatgacgggccacaagaacccgcttcaggttggatcgcaggccgtggcgatccagccaggacctggcgagctcgtgtccggcctggcaagcaaagccgccccgggcggcctgtcgggggcctcgatcctcgcggcccaggacggcgggacgtcgccggcactgccagccatgtcatcgccatcgaggcagggcgctcctgtctacgtcgccttcgttgccggcgctggaactggcgccttcatacgccggcgccagcacgcattcgccatcactacttgcagtttgcggctcgttccccgccaacgccgtccccgccgccaccgcggccgacaccgaacaagctggatgcactcttcacggaggttcggccgcaagactcgcaaaaccaaggagagtgagttcagtctcactaatcctcgtcgcagctccagacttgcagggaaaccggccatgccgacgatgcagaagtgcagccgtgtgttgatgaagcggctcggactgttgcgcacggacacctccctggacgaggtgctcgcggagtacgttgcaatgtttgatggtccgttgccgccacagaccgttgcggctctcacctccatcttcgacctcgacatcgatgatgatggagatcaagagcagccaccggaggaagccctgctcgcggtgcgccactgcccctgggatttatgttgcatcgtgttgcaagccgggcaacatctgagagcaagccaccccttcatgattaatcaaaatatcgaactcctcagctggaacgtccgcggcctaaattcccctgccaaatgcacggtgctacacgaactaatggtggacacggcctgtagtatcgcttgttttcaagaaactaaactgagagcaatagacgatgttttggcgagatacctgggaggatataaattggatagttatgccatcaagccggcgaggggaactcgaggggggatcctcctactttggaactccaactcgatcaacatcacagaagtgaggctgcgtcgctactcgatgacggcaaaagtcagcctccttcatacggcggacagcttcaccatttccgcggtctacgggccaacgagacatagagaaaaagagattttccttcggcaaatcagacgcttaaagccggctaacaacgaaccttggctcctatttggtgacttcaacatgatctacagggcatgtgacaagagcaacagcaatattaacttaaggcgtatgaggcggttccgcgcagccattaatcattgtgagttgaaggaaatccatctccaaaatagaaaattcacctggaccaatgagagacgccatccaaccatggtcagactagacagattcttctgtaacgagaattgggacctcgcctttggtcaccacatccttcatactctctcttcgggaacatcggatcactgcccactgcttctctcaaacccccaagggccgcaacgcccaaggaccttcaaatttgaaaacttctggacaaagcttccgggattcaggactgaggtccaattggcttgggaacgaacatcgacgcatcatgagcctctccaccgtctggcagacaaactgagtcacactgccctggccctaaagaaatgggcacgaggaatctgctcagaagttaaactcaagttccacttggcattggatgtgattcaacgcctagacgtggctcaggaaaatagagatctcacacaagcagagtttaggctacggctgggcctaaaaagaaggctgctcgggtatgcggccattgaaagggcaaggaagaagcaggcatcgcgcataaccaacattaaagagggggacgccaacacgaagtacttccatcgcaaagtaaatgcaaggaaaagaagaaaccacattttccgtttaaggaggcaaaatggatgggccgttacacacgcagaaaaggaaggggtcattgccgaccatttccgacaagtgatggggcgaccagaacctagaactagtgacctgaactggccctccttagaccttgccccgacagacttgacacggctagaggagcctttctccgaggcagagatacgcaaggcgataaatgaaatgccgggggacaaggctccaggccccgatggcttcaccggcaaattcttcaagtcatgctgggacatcatccaagttgacgtaattgcggcgttcaatgctcttcataacatgagaagtgtgcaccttaaccttctaaattccgccaacgtggttctcatccccaaaaaggatggcgccgaaggaatcaatgattttaggccaataagcttaattcatggcttcgccaagctctcctccaaagtgctcgccattagactaaggccactaatgcaatcactgatctcgccaaatcaaagtgccttcattcgcgggcgaagtatacacgacaacttcatgtatgtgaggaatatggtgagaagatatcacaagactcggcgcccgatcctccttttcaagttagacatctccaaggcttttgactcggtcagatgggccgacctacttgcgcccctccagaattccaagcggtctcccgcaaaaatggcgcgactggatatccgggctgctgtccacttccacctcaaagatcaccctgaatggaatcccgggcgaaacaatcagacacgggaagggtttgcggcagggtgaccccctatcccccctcctcttcatcttggctatagaccccctccagcgcctgttagacaaggctaccgacataggagttctaagtaagctgcgaggcagagctgtgcgcttccgcacatctatgtacgcggatgatgcggccgtcttcattaatccgaccaaagaggacgtgagcgccttcgccgatctgctaaatcgttttgggaaggtatcaggattatgcacgaacctgcaaaaatcgcaagtggcgccggtcagatgcgataatctggacctcgacgacatcctgcatgacacgcctgcaactagggcaagcttcccgatgaagtatctggggttgcctctgtccactggccgtctgcgcaaagtagaccttcaacctctctacgacaaatcgatgagtagagtagcaagctggcgaggaagacatattggcctggcagggcgatcaacgctggttaaatcggtgctcacttcacaacctgtttttcttctgacgggcctgaaagcttcaaatgagtccctagaggtcatcgacaagcagagaaggaaattcctatgggcaggcggtgaagctctgacggggggcaagtgcaaaataaattgggcacggacctgcctccctacagcctcaggaggactgggcatcctgaacctggaggaatttgcaagagctttacgactgcggtggctttggaacgagtggagatcaccggaaaaagcatgggtggggtcgggaacaccctgtgacgacacggatagcttggctggaagggagaagactaaaggatgtagctcccctgatctacgtggcctccaagaaaaagaacagcacgctacaacaggcctcagccacagaccagtggctgctcgatctggaccttcctccagcctcaggctggacaatggagctgagaatgaggaggacaagatagtgtggaagctcactagccacggtgaatatacggcgacgtcggcctacaaagcgcagctcctagacacacccaagaaactgctctccacctcctcgcagaatgcaaatacaccaggaaaatttgggcggcgttatctgattggactgggtgtggttaactga

SEQ ID NO: 102430 - DNA, 372 bp, Oryza sativa
  Clone ID: PAT_MRT4530_99953C.1
atggcaaggctgttcgccgtgtgcttcgttatcctcagtttcgccatggccgcggcggcagcgaggccggcaacgtcgtcgacggcggacgctccagcgacgagcggcgactgcagcagcgacgtgcaggacctgatggccaactgccaggactacgtgatgttcccggccgacccgaagatcgacccgtcgcaggcttgctgcgcggcggtccagagggcaaacatgccgtgcgtgtgcaacaaggtcatcccggaggtcgagcagctgatttgcatggacaaggttgtgtacgtcgtcgccttctgcaagaagccctttcagcctggctccaactgtggaagctaccgtgttcctgcttccctcgcttaa

SEQ ID NO: 102431 - DNA, 306 bp, Oryza sativa
  Clone ID: PAT_MRT4530_99954C.1
atggccgcatacccgagcagccttctttttaggcccagccgtagcctaaactctgcttgtggccagggcagtgtgactcagtttgtctgccagacggtggagaggctcatgatgcgtcgatgttcgttcccaagccaattggacctcagtcctgaatcccggaagctttgtccagaagttttcaaatttgaagaccgcggaaatggtgaagctgtccgccgtatgaaggaggctgacttttgccgtcatcgagtagcgacgcagcctcacttctgtgatgttgatcgagttggagttccaaagtag

SEQ ID NO: 102432 - DNA, 416 bp, Oryza sativa
  Clone ID: PAT_MRT4530_99955C.1
atcaactctataatctcttaaatatagcttaccctcaaaaacatagtatccctccctatttatactaaaaatcttacttattataagtgtacaactctagttccactaggattctatccataattaccaaatcattttttctattttttctttcccccgtgtcgctctaggggcaggggcgatacgggaggcgaccgccgccgtggcgccaccacccccaccccctccctccggcttgccgttacccgagcgggccgccggcaaccacacggttgcaaggacggcggcggcaaggcctctttctctctccatgggcacagggtcggggccaacgacctcggtcagtttcgagccggggacagccgtagtggcgacaggcggatgcaaggaggagtgactgcgcgacggcctggccg

SEQ ID NO: 102433 - DNA, 4262 bp, Oryza sativa
  Clone ID: PAT_MRT4530_99956C.1
aagacacacccacaagtgcagaataaatgcaagggaaattatcaagtttaagatttaatctacatgtttgggagtttagaattatcaaccaatcagctcagtttcgacgagttcgacaacaacatctacattcttacaagtggagcatctgcaacagctataacaccaagttctactaacatctttataaatcaaggagctttgcatcaatctttcatgtatgtgaggaatatggtgagaagatatcacaggactcggcgcccgatcctccttttcaagttggacatctccaaggcttttgactcgatcagatgagactacctacttgcgctcctccaaaataggggtttcccgtaaaaatggcgcgactggatattcgggctgctgtccacttccacctcaaagatcaccctgaatggaatcccgggcgaaacaatcagacacaggaagggtttgcggcagggtggccccctatcccccctcctcttcatcttggctatagaccccctctagcgcctattagacaaggctaccgacataggagttctaagtaagctgtgaggcagagctgtgcgcttccacacatctatgtacgcggatgatgcggccgtcttcattaatccgaccaaagaggacgtgagtgccttcgccgctctgctaaatcgttttgggaaggtatcaggatcatgcacgaacctgcaaaaatcgcaagtggcgccgatcagatgcaataatctggacctcgacgacatcctgcatggcacgcctgcaactagggcaagcttcccgatgaagtatctggggttgcctctgtccactggctgtctacgcaaagtagaccttctacctctctacgacaaatcgatgagtagagtagctagctggcgaggaagacatattggcctggcagggcgatcaacgctggttaaatcggtgctcacttcacaacctttttttcttctgatgggcctgaaagcttcaaaagagtccctagaggtcatcgacaagcagagaagaaagttcctatggacaagcggtgaagctctgacagggggcaagtgcaaaataaattggacacggacctgcctccctacagcctcaggaggactaggcattctgaacttggaggaatttgcaagagctttatgactgtggtggctttggaacgagtggagatcaccggaaaaagcatgggtggggtcgggaacaccctgtgatgacacggataggttactttttgcagcagcaacaaccataacaataggggatggagcgaaagcaagcttttgggactcagcttggctggaagggagaagactaaaggatgtaactcccctgatcaacgcggcctccaagaaaaagaacaccacgctacaacaggcctcaactacagaccagtggctgctcaatctagaccttcctccaacctcaggttggacaacagagctggtcagccagctaatcaatgtctgagtgcggtacacaacgtacatttcacagaaaatgaggaggataagatagtgtggaagctcactagccacggtgaatatacgatgacgtcggcctacaaagcgcagctcctaggtactacagccaccaacttcaacatcctaatatggaagccgtgggcaccacgcaagtgcaagacctttgcctggttgatcatccaaaatagagtttggacctccgacagactgactctgcaaattgattataggcagataactagtgtactgggcatcaatatgtctaagaggaaagtacttgaacagggaactagcaatgtctttgaccgtcctcagtatccatttgctaatcctgaaatttctgatggttcagatgaaaattttagagaagatgacacagaatcagatgatgattttgacatggattatgtcatgcttgagttgtacaggaagacgattgtgcaaagcatgaaaagaaagatgaagaagaattctaatgttcttctagagaatcaaaagatgaagaaacaaacttgtcttactaaggccaactcttcattctcaagattttcagcaaagtatttttctgaagttattgcagatttatctggtcctcagaggtttatcattgagaaatatgggtttgcaaatttgcttctgtttgatgttaaatctgcacctaagaagcttgcgtcatgggttgccaagagatttgatttgagctcatctgaaatcattcttagagacaaagttattccagtcacagagcatagtgttactgtcgtgcttggtttgccaactggacgaagagattttgggaagaatttcgatattgggaaagaaataattctctcaagatttggtttgtctgtacttccttctgtgaaattttttggtgatcttttgaagcataataaagacatggctgaagacaaagtgattacttgtttcttgattgttgcgcttgcttgtttcttgtgtcccaattcatcattagtcccaagtgtgaagtatcttaccatctttgaagatattaaagctttggattcttataattggtcaaagtttgtgtatgagtggctcttgattcatatcaaaaagttccaaaagtcaaagaacttgggtggttgcttacatatttgggctattttgtacctcgattttgttgattttgacaaaattgatgacaccacttatggacttaggccactgaagatgttgcatgactctagttcatctgaaacagttcaacttgacagtcataatattgcacacacagctacagccaatgcttcatttcaaactgataagcaacatgttggatttaacaatcactcatttcaatttaatgaaaagcgaactcctcacagtaaatcttatgctgaacattctgttggaaaccacccattgtcaactgaagattttgctcctagcacttttggctgtggacaagctagtgctagtctaagtgctcaagctcagatgtatcatactcctgaagttggattaattaaaaacaagaaagtttgcctggatgaatcattcaatgcttcagctgctacagcagctattgatgctgttaaagatgttgcaaagaaaattaggtcaagaatggcttatcttaaatctaaagagaagatgaataggatttttgatggcactaaatctctttccttgagattcttgattccgaagattctggagattgtgacaattgctctcaattctaactctttccacccaaatgtgagaacatataacaatttgaagactctgagcaataacaaggataaaggaaaatttgatgctgaatttgtcaggaaaagggcattccaagatctcacaaattcacctgatgttgtttgtcttgggtccaatacatgttctaacaagacgaaaaatatgtccattaaatctgagcatatttacaacaagagcaatcaatttgattccaattacaaagtatttggctctggtttcaataattctgaagcaagctcttcaggtggcagattgcccccacatggtccaagaagacctcttaagccatctagacatgcaagtgatccttttgtaccagttagacggcgctttctagtttctgaacaagaaaacaagtacttcactgcaatttgttgtctcgctcatactagatggcaaagcttgtttgcagtaaatattgacaatgttcgtatcacattttccaattttggaaattctttgaggattggtggtgatgtttcaaactatgtgatatctgccttttgtcgactgatgttccacaacaaccatccatctaaatcaaagaagaattatttcttttcttccattgggtatcaacttttgaagaagattgaatgcattgaaatggtcaaaataaagaaatgttttgatggtgctgctagtgctagaaaattacatctttgcgatatggaccgaatgcttgttttccttgattcattgcatcataaaagtgatccatactttgatccaattattcctatgatgatcaagaatattcagacattgtgggataaatttgagggcactgccatagatttcagcaactgtgattctggcatttttgtaatgaagtgcatcgaactttggtctccgagggttgtattgccaaacgagttcagcaaagatgatatcaataacatccgtgttcaatacacaaacaagatattcttccaccacaagaatattatgcttcaatctgaaagtgaacaattggttgttaactgggttgaaaatgaagaattccaatatgaagatgaagttgccacggactaa

SEQ ID NO: 102434 - DNA, 302 bp, Oryza sativa
  Clone ID: PAT_MRT4530_99957C.1
gcacgaggcggaggcggaggcggcggaggttacactgcgggagtacaccgaggctgacgcggaggcgctcttcgcatgggcgtccgacccgcgcgtcgtccggttccagcgccgcgacgcctactcgcacgtcgacgaggcacgccgctacatcgttaactaggtacctgccgcacccgtggtaccgcgccatctgcgtcgcctgcgccgaccgccccgttgggatccatctccgtcaagccggcggacgacctcccgctcccggagcctgagtccgagaccggccgcctccgctccggctg

SEQ ID NO: 102435 - DNA, 1929 bp, Oryza sativa
  Clone ID: PAT_MRT4530_99958C.1
atggccattgttgttgtaggaggaggaagaaagggtgagagctctcatggttgctgggcttctccatgtccatggcgtgtttcaatagctagggataaagatcaagaaaggcttcttcttgctagctccttttgcattgcatcccttttgtttttcctgcactctttgtttcatgtctcgttgtttatttggtttgaggaaagtaaggtgagctcagaaggatttggtaagggatctcattatgcagacttcaaaaaccagcaggaatgggccttcagatgccccacagaaggcttctccggcaacaccacgaagcgcccaagtaggctgtccgagttggagtccagggtcagccagctgcaagatgagctgaagaaggccaaggagcagctgagcttatcggagtcacgaagacgccacacacaacaggaagcagaggaagcaaaaaagcaggagcaggctgcaacctcaaagctcgaggacctacagcgccagcttgccgagttctcagctgcggaggagtcccgactccaggaactgcggaaggtctcacaggagcgtgaccgtgcttgggagtctgagctcgaggctgtgaagaagcagcagtcagtggattcagctgctctgagctcagccttgtctgaaattcagaggttgaagcagcagctgggggccaccacagagtctgatgcagctcgtgccaagcaatgcgagtttgcggagtctgagctcgagggcttgaagcaggagatggagctccggcttgcgaccatcgagggcctgaaggtaaacgttggcgagagcgacaaggctgtagctgaggcgaacgcggtggcagctgagaccaagaagcagcttgagatggcacaagctactattgactcgctgcttgctgagggtgcccggttgcaagaatgcctgaggtcgaaggacgcagagctcggccagtccatggctcgattagccacactggaggaagatctgaagaaggcacataacaaggatgatgttgatggcagctttggcagccctgatcatggtgaagctgtggagaaggtggtggtaactatccccaatggcaatggcagctgtggtggttctggcgcagagattgagcagctgcggacggcgctcgaggtggctgagattaggtaccaggaagaacaaactcgcacgacgatcgagacgaagaccgcctacgaaatgctggagaatgccaagtcagagtacgaccgcagagtgcgcgatcttgagctggagctgaagagcaagaacgatgagctcactgaagcgaaggccactttggctgtcaggtgtgacgggaagagcgatgtgatgcagccagagcttgaggcgaagctgatgaagtcgatcaccgatgcgacggagctgaaggcgagcctgatggacaaggagacggcgctgcagagcgtgatggaggagaacgagacgctcaagtcggaggcggggaagaaggcggcggaggtgcagcggaggtacgaggcggcggtggcggagctggagctggccaaggcggcggagcaggacgtccggatgcggctcgggtacgtgacggaggaggccgacaagagcagccggcgcgccgccagggcgtcggagcagctggacgcggcgcaggcggccagcgtcgagatggaggccgagctgcggcgcctccgggtgcagtctgaccagtggcgcaaggcggccgaggcagcggcggcggcgctgggaggaggcggtggcggcattggcaggaacgtggagcggacggggtctctggagccggcggagtacaccaactccatgatcggcgggaagctggcgagctcgccgttctccgacgagccggaggaggagtcgccgaagcggcgcaacagcggcgtgctccggcggatgagcgggctgtggaagaagagccccaagtga

SEQ ID NO: 102436 - DNA, 711 bp, Oryza sativa
  unsure (1)..(711): unsure at all n locations
  Clone ID: PAT_MRT4530_99959C.1
cacgcagcagcagctgcagcaaggcagtaggagaggagttggagggaggagagggagctccaagaatcaccagagagcgagcaagagagaggtgagaagtaaggtgacgctcagaaggatttggtaagggatctcattatgcagacttcaaaaaccaggaatgggccttcagatgccccacagaaggcttctccggcaacaccacggtcatctcgggtggcgaaaactggagggaatgaaactgactctgcagggatcacaccaacaagaaccactccagagaggagccctaaggtcaccgagcgtcggtcaccacgaagcccaattactgagaagcgcccaagtaggctgtccgagttggagtccagggtcagccagctgcaagatgagctgaagaaggccaaggagcagctgagcttatcggagtcacgaagacgccacacacaacaggaagcagaggaagcaaaaaagcaggagcaggctgcaacctcaaagctcgaggacctacagcgccagcttgccgagttctcagctgcggaggagtcccgactccaggaactgcggaaggtctcaagggagcgtgaccgtgcttggngagtctgagctcgaggctgtgaagaagcagcagtcagtggattcagctgctctgagctcagccttgtctgaaatccagaggttgaagcagcagctgggggccaccacagagtctga

SEQ ID NO: 102437 - DNA, 443 bp, Oryza sativa
  Clone ID: PAT_MRT4530_9995C.1
agaggacgaggtctttgctcgcagttcttgtaggtctacgctatgtgagccatacatacctcaagtggtgattggatgcaatgctgagggcaaggtgatttataagccaatccaatgtgatgagttgagggcacttgatctgtaggaagcgatataccaggcgacaagagatcggctaatgaacttgtgcactctaaaaccatgcataccttccacatgcctaggcgatccgaagcttcttcacatgcgcgaatcttcaactgaaactgttctatctgctgacaagtttgacatgggtctttcatcttctgtagatggacattcactatcacagtggtctggattcattgtcgattgggatgacaagagcaagacgggaattatcatgacatcagcactttttatttgcaaaaagtcttcacacacagacgattggaaatatg

SEQ ID NO: 102438 - DNA, 346 bp, Oryza sativa
  Clone ID: PAT_MRT4530_99960C.1
aacgggaaaccatccattttttttattggcgacaaatttataaaaaatgctctaaaaacatattttggggggatatagccggggctttgttttaaaatatcctcacccaacgataattggagtacttttacaaaaaaacccgccggggggggggggaagagattattacatttgggttaaaagcaaaggccattgaaatgggtcataaccaaactggaaaaaaaaaatttttagcattttttattttggtttattatcaacctagcccaaaaaaaagggggttactattattttagggagccggacccttgggcggacccctggggggacccgtgggcggaccctg

SEQ ID NO: 102439 - DNA, 296 bp, Oryza sativa
  Clone ID: PAT_MRT4530_99961C.1
gcgcccacgcgtccgaacattcaaacacactgatacaaataaaaagcctatcgactgccctattttacccctacccacccatctcctgctcgagctccacctcctgatgggccctgttcatcactacgcaccggctatagctgctacttccgacgatatgacctacaacgccttttcacaccactgatatagagcacctgtagggtaaacagatcaaactcacgtatacttcaaacatccaaatacgctataaacttgaccgatgatacataaagacaatgtatactgataaacct

SEQ ID NO: 102440 - DNA, 1887 bp, Oryza sativa
  Clone ID: PAT_MRT4530_99962C.1
atggcggaagccccagtccacccttcatcttcaaagaatcatgaaaaagaagacgtgggagacacgaatataagcagtactgatgatgcttgtgtgcaaaagttagagccagtaattggcatggaatttgatgatgaagatatagcatatgagttctacaatcggtatgctggagatgttggctttagcattagaaagttttggcatgataaatcttcaacaaatgtgattcgcacaaaaaaatttgtgtgctcaagggaggggttcaataagaggaatacttcagatgcatgccaacggaagcgagctgatacaagagttggttgtatggcagagatgaccattaagatcactcctactggaaaatatgctatagctagcttttctaacacgcataaccatgaactcataactcctagcaaggcccatttgttacgttctcagagaagaatgacagaagctcaaaaagctcaaattgacatcttgaatgattcaggtgttagatccaaagaaggccatgaggtgatgagtaggcaagcaggtgggcggcaaagtcttacatttaccagaaaagattataaaaattatctccgatcaaagcgcatgaaatctatccaagaaggggatacgggtgccattcttcagtacctacaggacaagcaaatggaaaacccttcattcttctatgcaatacaagtagatgaagatgagatgatgactaatatattttgggcagatgcaagatcagtattggattttgattattttggtgatgtcatatgctttgacacaacatacaggacaaataattatggtaggccatttgctctttttgttggtgtaaaccatcacaagcaaacagttgtttttggagcagcgttactgtatgatgaaacaacatcaacatttgaatggttatttgaaactttcaaaagagccatgtcaggcaaagaaccaaggacaatattaactgatcaatgtgcagccatcattaatgctattgggactgtctttcccaactcaactcatcgtctctgcgtttggcatatgtaccaaaatgctgcggtacatttgagtcacattttccaaggttcaaaaacatttaagaatgattttggcaagtgtgtttttgattttgaagaagttgatgagttcatatcagcatggaacaagatgatagaggagtacaatttgaatgataaccaatggttacatcatttatttgagatcaaggagaagtgggctttagtttatggtcggcaaacattctgtgcagatatgaaatccacacagagaagtgagagtctcaatgccctgctgaaaagatacttgcatgttattgattcagctaagcatggagagcatggtttcttggtgaagtttgatcccaatgaaattaaagtttcttgctcatgcaaaaagtttgaatttgttggcatactatgccgccacgcattgaaggtgttggaccataacaatatcaaggagttaccatcagagtacatcttgaagagatggacaaaatatgcaaagataggatcatcacaggctaatcgaaaatgtgctaatgatgaagatgctagagttgttctagctaggaggtatggatcattatgtcggtcttacaacaatatattaagcaaagctgcagaaaatgaggaagcttatgcactactagaaagaacttcattggaattgatggaacaagttgaccaaatcatgcaagcaaacaagtcagaaggtaaatctaaagtggacaggaatgctggtggaacttctacaacatctgaagtaattcctaatttcaccgtatcgaatgagaatgatcagatgccaagtgaggtccccaatgacccatcagaaaatctgcaagacaagcatttctag

SEQ ID NO: 102441 - DNA, 249 bp, Oryza sativa
  Clone ID: PAT_MRT4530_99964C.1
atggcgctagatccctttgctggtccccgtaggtaccggatgggaggaatcggtgcaaatgctgcgcctgggctggggagctgcgaagccacaagccgaagccttgcgttcgaggagtcggcgccccgcgcgttgcctcgtccagtcccccgtgccgtggtcgtcgtcgcctcgccagatccaccacagccaccatggtcgtcgtcgctgctccccgccaccgccaccgctactccccgccttcgctag

SEQ ID NO: 102442 - DNA, 532 bp, Oryza sativa
  Clone ID: PAT_MRT4530_99965C.1
ggttttgtttgggtttttttttttttttttttttttttttttttttttttttttttttttttttttttttttgagcaaaacaccaccttcacaaaagggcttcatcggaaaaaaccccatttttcacagtttattcaacggaaaccccccacgggggggggggcgggtttatcggcccccccctttgcctttgcccgggggcccaaaacccacaaaccccctttactactaactacttttggcccatcccgcccccgccccccaaaaacctaatttttttaaccccctgcccggggtccctcccggggggggcccccttggccccctggataaggatgtcccacttttcccccgtttgggggttcaccaaccccccggggttgcccaccctgaaggccaactcgtccttgggcggcccccggttaattaccaccgggcaattctcggcaatcccctcctggaaaaaaattttgaacaggtgggacaccacccttttttcgacccacctcctgatcggcccccccccataaac

SEQ ID NO: 102443 - DNA, 492 bp, Oryza sativa
  Clone ID: PAT_MRT4530_99966C.1
aaattctaaacgtggatctaataatttctacatacatcatcatacccaaatactaacacattcaaaacttatcaactttaaaaactccattcatattccctcacacaaacaaattttaacatccttaattttacaattatccccaacaaataccattccaccaccaccatatcccctaactcacctcatgcttatacaacaaaccatttctaacccccaaactcttatattaaattccaaaaagattatcatccttttaaactacacactcccttcttttcagccccagaacttgctgataacacccttcttcttcttcttcattctgatctcaatgtttgtcaacttgatctcattgcacgccatattaagaacaatactataacacctaacttattgcaatgcaggcgggaattctccaatgccacattgctttttgcactcttacttacccattgctaattcatacctctttatcatctcaataaccaa

SEQ ID NO: 102444 - DNA, 779 bp, Oryza sativa
  Clone ID: PAT_MRT4530_99967C.1
atcccgagaacgcaagccgccataacaagttttacctctagttgaagatcgaaaccgatgcagctcaacccgaaagcaagaactcgtcgaaacaaaacgaaagactctatccatgcgtggcaatcctcatgaagcacattaactcaacccgacaacgtatgccgtgtcatattgtcggattcggctcaatcggctaaccctgtccaactcggactctgccgatcctggtcgcagccgattcggacttcagccgatcccactctgtttccggaacgatctccatctcgaactccacttcaattccttctccacctccgatacttggattaccaaatttggtcgttaacacataggtggcggagggacgctggcgtggtgctggtggcaccaaggggttggtttgggtgatggtcgggaggccggcacggccgatggtgcggaaggctgacacgacgacgatagtgaggccggtgaggttgtttggcgggggatgtcggtacaacaatgaccatgtgccgatggaggatggtcggtggtggagcattggagcgttatctatgagtcggcagggagcgggcggcagcgcgctgggaaaacgtccaaacgaacacagccttggtgttgtaggacgagccgagtatgatgttgcttggcttgatgtcgccgtggacgacgcactgctcccactcttgctgaaggtagcggagtgcagagcccaggccaatgatgatcttgtacttgatgacgcaaggcccgcgacgatctcccccttcgcacat

SEQ ID NO: 102445 - DNA, 2096 bp, Oryza sativa
  unsure (1)..(2096): unsure at all n locations
  Clone ID: PAT_MRT4530_99968C.1
ggaaacccacgacccacacgcgcgccgcgcgcaacaacaacagacgccgcaaacacgaccccacacgcgggccgcgcccacacacagcagagagaaccgaaaaaagctttacaaaaacaaaaaaaaccaaaacccgtttgggagggcgggaagcggccgcccaaaaccaaggggagagccccccgcgagccgtcttcgccacagaaaccccagcaaaccgccgcgcgcaacacgcacccccgaaaccaccacccgacagcaaacaaccaaagcacgacccaaccccgcaggaaacacggggcacgcgccgcccagagggacaggaaaggcgcgaaaaaggacaagacggacaaacacccagacgccaagcacgaggacacaaacgccacgcgccgacgcacgcgcagccgacagggaaacggccccagccgcgcagagacgccaccgccaaagacggccccagggcaaagacaagagcgcacaaggcacggcaaggggaccgaagaccagcgaccgagaggcccccacgcacaccggaaaacacgagcccacacgcagacaccaggcgggcaacacgcaacgaagacagacagaggacggcgcagcgcgaggacgccacgaagccgacaaccacagcaacgcgaacgacgacacgaacacacgacgagaagcgcgagaaagcgagaacagagacggaggcagaagagccacacaccgcgagtggatgcacacggcgcccgaacacgccagcgaggcgaacaaagacgaatgaagacaagacaggaagaggagggacacaaaggacgcggaggatacgagacgacagcacaacgccgcacagcgagccgagcggccagcagcgacgcgcgaacagggatgacagcaagcagcaggacgacagcaacctcgcgagcgcgacgagagcgcancgccacaagcagcgatcgagcgcagacgcgcgcagcgccagacggggaacaatataggggaggcgcgcacgacggcaccancagccacgcgcacacggaaccgactcacgcgcgcgacggacggagaacccggacgcacacgagcgacgagacatgcgccagacgcgcggcaccgccagaagagagaatagacaagcgcgacccgacgnacaacgcgtccgcatgcgcggacgaagcacgaaggacggcgccgagcacgcaacccacgacacagcgcagacacagcagcgcgcatcagcaacacncagagatcngccccaatgacagcgagcagagacgagacaggacagacgcagacgttgatgagaggaggtagacgcaatacagtgcgnagcgacgagcacaacactacggcgacgagacgcgcagaagcgcagcgacgcagccgcgcgcgcgcagcagctcgacggacncnggcaggaagagacgacgcggcgccgggcaggagagacaagacangcgcacgcgatagcaacgacgatagcacagagagacgcagagcacctaagagcgcggcgatgcacgagacgcagacgagcagacggacgcagacacagcggcaccgagcacagtgnagaagagacacaccgagacagacagacacaggcggacgcagacccgacgcggagacgcgagaggcgcggacgcacgcgcgcgcgacagacngcagcagcgcacgcgcaagcggcacgaggaagaacgagcatgcgacacanacanacangcgagcacagagagagcgaacagcccagccgccacacaggagcgcacacgccgctcgccgcgaccacgagacacagcgaatgngatgcacacatcagacgctacaccaccacacgagaggcagagacaagggcgacgcgctgccaacgcgcagcggcgacacgctccgcagtcagcgagagagagcgtgaggacganggcacgcgatgccaacaanacagagagaagagaccagaagcgagcaagagagcgcaggcaacgcggcgacagcgcgccgacacgcgaacaacagaagtagaagtagacagcagacggagcgagacgtgagcaagagaatgcagagcatacagccgcgcaggcacgacgctagaacgagacacctcn

SEQ ID NO: 102446 - DNA, 1398 bp, Oryza sativa
  Clone ID: PAT_MRT4530_99969C.1
atggagcggctcaagtcggcggtgccggcggagctccggcgagccgtcggcgagggcacggcggccgacctcccctccaccacctcccgcttgctcgccttcctcgaagctctccctctcttccgccaggtgattggtgagctgaccgacccggagctcgcgctgtgccgcaaggacaaggggagggcggccgagctgaaggggaaggggaatgcgtgcttctccaagagagagttcgagcaagcgcttggattctactcgcaggcgttacggtacttcccgattagtcctgatggaacggatgcaagcttgatagccacattatatgtcaaccgtgcctctaccatgcatgatgtatctaagtttgatgaggatatagtgaaggttggaaaactatttttcaagagtgataccatgttcaacatagatcctggattctgtatgagttgcagatcccaacttgacttgtcttctgctgttgctatgtcagatagagcaacatcaaagataaacagattgaaggagcttccatctctagacaatgtccctgaagtcctcattgcagaagcactacaatccttagaacgcattgagaagttaaggcacccatatagcaagactcttgctcagattcttgagaagctttaccaccccaggcacatcatcatcgcgcacgagttgatcaagctcgtctccatcgagctttccatgggagatggcgcaagcgcggctgctgcattcgcccgggcagatgcgatattctcgctgtattatgggcctgatgtagagaggattttgccctacgttgatgtgctcagaagaactggggctgctatataccggaatcccgttgggatactgtcccaacgggatcgctccctctccacctccctcagacgcgagagcgcgggcctccgtgggagtagcgcagacgaggctgacaccggcggcgcggacgcggccgccggcgagctccggcgtggggcatggtcgcatggacggcaaaggatcctgttggtgataaagatggcgccggcgacgagctctgacgtggggcgtggacggtggaggatcctgtgtggtgatggcaacggcaccggcgacgagcttcggcgtggaggacgcggccgccggctaaggcgtggacgacggacgcggccgccggtgacgagctcccgacggaggatgcggtcgccggcgatgagctccgatgtggaccgtggacgggggaggatgcggctgccggcgacgaggttcgggttcggtgtggagcgtggacaggggaggacgcggccgccggcaacgacgcctcgatgcccagctcctaatatctaccactgccgccgctccctttctcggctccggctaccgccgtcgccctaccccttcctcccgtaa

SEQ ID NO: 102447 - DNA, 470 bp, Oryza sativa
  Clone ID: PAT_MRT4530_9996C.1
atcctccttcctccccatccccaagcgcccgcatcccgctccccctgccgacggctgctccacatcggcgcccaaaccctaacctcgccaccagccgatctgccacatacgccgccacaaatcgccactgccaccgattcctccagatcaggcaccgccgctatcatcgccctaccgccgtcgtcgccgtcccgctggccgctgctcgcgcccctccgctcatcctttcccctccccccaccaccggcgaaaccctagaaccacgccagtcaggacggaatcgaatccgatccccatctcgcgagtcgtgagcagagcaagggaggtgaggggcatcgtcgttccatcgcgtcgcatcgccccattcgacgccgccgagatcgccgtcacccgaatcctgcgacgccgccgagatcgccgtcacccgaatcctgcgacgccgccggacccttctcacgtcatcgtcccct

SEQ ID NO: 102448 - DNA, 1110 bp, Oryza sativa
  unsure (1)..(1110): unsure at all n locations
  Clone ID: PAT_MRT4530_99970C.1
caagattttcaccatttttcccacttcaactgaccaaaataccccttctctctcctcctcctccggcagtttttctccttcaacctgcagcgggcgtcgcgccgcactcgacctcttccgccgcagagcaccatggcctccagcggtgctagatccatgccacagggagctcaagcagcagctgcaacctgcaggcagcaggcgccgggtgtccccgatgtcgccgcggtcgcggcctggccggggcgcgacacgccgccgccgccgcttgcagttgtggccattgtgtgcaagcgcgccgggcagacagatggcacagtcatagccgcggaccgaggagagcacgantaccgcctcgctcgcgcgctgtgttgcccagctcgacatcgagttgtgcgtggacggagacgtactcgccgatggccatgctgcaagcgccggcgacgaggccagctagcccggacaggaggacgatacgctcgtcggcggtgtgcgccgcgcgatgccgagcatgagcgacacggtggagatgaggccgtcactggtgcccagcaccacggcgcgcagccactaggagtgcacgccgccgccgttgttggtggcttcctcttcctccttggcctccgccacggtgagctcggcgtcgtcattggtggcagccatgcttgtgctcgtcaaggagagagcagatcgcggcacaccgccgccggcacttgccactgcgacgatggcaaccaccacaatgggcagcccgagtggcattttaacgacggcattccgcggaatgacattgtggcgaaatccacttttggcagtggcaggatgtccaatttctcattgaaaagtatctttaaaaagtcaattgctccatatattaaaacaaacggagggggcattatatcaccgctacaactcagctggacaaaaaagaaaaggcaacagtggaattcgtgcattttaaaatatttgggatgcaaaatattttacgaaaatataccgttgatatcacacaacatttacgtgaaaagcgaaaacgacatgggcgcaggcggtatcgcgcggtcaaagcgcgaggccgcgcggcatggtggaaacggtctcgctgattga

SEQ ID NO: 102449 - DNA, 2159 bp, Oryza sativa
  Clone ID: PAT_MRT4530_99971C.1
atgctcacctcctcgctcccgccgcccaccgtcccgggctccaagcccaggcccgcggcggccacctccgtctccaccgctgccaccgccgacgccgcggtcgctggtggccggagcgggagcgggagcgggagcgggatcggccgcctctccgcgctcatccgctccctctgctccgcaggccgcaccgccgaggccgcgcgcgccctggccgacgcgggggacgctgcgggcgtcgtcgcctacaacgccatggtcgcggggtactgccgcgcaggccagctcgccgccgcgcgccgcctcgcggccgccgtcccggtcccgcccaacgcctacaccttcttccccgtcgtgcgggggctctgcacgcggggcaggatagccgacgcgctcgaggtgctcgacgaaatgtcgttcaaggggtgcgcgcccatcccgccaatgtaccacgtcatcctcgaggccgcgtgcaggagcggcggtttccggaactcggtgagggtcctcgaggcgatgcacgcgaagggatgcactctggacaccggcaactgcaatctcgtcctcaatgcaatctgcgagcaagggtgtgtggacgaggctgtggggctgctcaggaagttggcattcttcgggtgcgaggccgacatcgttagctacaacgcggtgttgaagggattgtgtatggccaagcggtggggagatgtggaggagctcatggatgagatggttagggtggactgcgcgcccaatatcgtgacgttcaacaccctgattggttatttgtgccggaatgggttgtttgagcgggtgcacgaggtccttgcacagatgtcggaacacggatgcacacctgacatcagaatgtacgcgactatcatcgatgggatctgcaaggaagggcatctggaggttgcgaatgagattttgaataggatgccttcgtatggtctcaagcctaatgttgtttgctacaacaccgtgttgaaaggcctgtgcagtgctgagcggtggaaggaagctgaggaattactgtctgagatgtttcagaaggactgcccccttgatgatgtgacattcaatattcttgttgatttcttttgccaaaatgggttggtcgacagggtgattgaacttcttgagcaaatgttgagccatggatgcatgccggatgtcatcacatacacaactgtaatcaatggattttgcaaagaagggcttatcgatgaagctgtcatgttgcttaaaagcatgtcatcatgtggatgcaagccaaatactgtcagttatactattgtactaaaaggtttgtgcagcgccgggagatgggtagatgctgaggaactgatgtctcaaatgattcaacaaggttgtcctccaaatcctgttacatttaatacactaatcaatttcttgtgcaaaaaagggttggttgagcaggccattgaacttcttaagcagatgctagtgaatggatgcagtcctgacttgattagttatagtacggtgattgatggacttggcaaagctggcaagacggaggaagcactcgagctactaaatgtgatggtcaataaagggatcagcccaaatacaataatttattcatcaatagcttgtgctctatctagagaaggcagagttaacaaggttattcagatgtttgacaacattaaagataccacaataaggtctgatgcagtgctctacaatgctgttatttcttcgctttgtaaaagatgggaaactgatcgtgctatcgatttctttgcttatatggtgtcaaatggatgcatgcccaatgaatctacctacactatgcttattaagggtttagctagcgagggattagcaaaggaggctcaagagttgctgagcgagttgtgctctaggggagctctaaggaagcacttgatgaggcattttggaattgtatgagctgatagtattactggcttactgccaaatgccagtgcctaatggttttggcattgccagcacaaacttgcctacttgaagctacgacagctcatgatggttcgtaggtgaaagcctataagagagttccttttttttaccacatcgtatagcataccttacggctttcatgcagtttattacagtggcatacgtaagttgacaatccaacattgtctcaagac

SEQ ID NO: 102450 - DNA, 2586 bp, Oryza sativa
  Clone ID: PAT_MRT4530_99972C.1
atggccagcgaggaggccgcccgctcgcacctctccccgcgcaagcaccgccgctcgccgcacgacgacgacgacgcggaggacggcgcctcctccccgaagcgccacaagcgcggccaccatcgccaccgccatagggtctcgccggctgcggcggatccggcggagggcgaggccgaggacggtgagatactagaccaggccaccgcggccgtgggtgtgggtgtggggagggggctggatgctgatgccgagcacaggcaagaccaccctaggaaatagcctgctccggagcatggtgataactccgatgcagacttgaatatacatgtaaatgagttgcatacctcccagctagctagaaacccatctcaagagcatgattatccagcaaagtcagatcatgctgctcatgaagccattgtggaatatcattctagaagatctcctggctcaagaaaccataatgaagctcattccaaggactgcttacgatcctgtcatgctagcagagaaactggctttcaaactgatggctcaagaaacagtgtgaggcttgattatgaacatgggattgatgacagacatggtgagccggataggtattcaaacaggaggtgggagactgaagaaagagggtgctataagaaaaggaaaaagagtggctgtcacattggtaggcacactgacatctgtaatagcgaggaaaaacacctggacgagagaaaacatggcagtttggtagaaaagaaagttgatttgcatggccttgcttatcatgagagacgaagtggcgatggtagatttgatcaaaaggcgagtgcacatcatgggcatggagaaggtagggagatggatagatggaatagtagcacaaggaagaaagacgaagaatggagaaatcggaaaaatgatacggctaggaacagttacaaagaaacagatagagttggcagtagatatggagaggagaaactcaatgatagtatagataagagagataagagaggctttaggggtaaggaaatggatgcttgttggtctagagcagtaaatgggaacgaagggagtatcagctacacgcatgcaaactatggtatgtctggcatttacaaagatggatcaagctttggtggggatgatacaaaggccaaatgcaaaaggagacctgaagaagagaagaaagaaccttacagtaaatcatcttcaaactatgtcagggaggaagatgaagagaactacctggagaacatcgaggatcggaagcaacaggaaaaatctgctcattacattgacaataaagaaataaacaatgatcctgctgctacaaaacagagatcgaacaatttaagagccaaggaagatattacaaatgatcatgaattatcaaatgtatttgtcggtgcaaaattctacaatgtgaggaagtctcctactttgcctaaaatttcaatcagcttagggacatcagataataaaagggcgacaagtgcttcaggtcttcaggagggaagctcgaggatatcacataataaaaggacgacaagtgcttcaggtcttcaggagggtattcccatgagaggtaaacaagttattcttggcaacgttattgatggagaacaacctattgatcgcaagctgggcaatgaaaacagtatgcttgccaagaaaaacactcttcatgacaactgggaagatgaagagggatattacatttatcattttggagaagtgctacagggccgttatgaaattacagcacgccgtgggaaaggagttttctcgactgttgttcatgcgaaggatcttaaagctcaaaaggatggatgtagagaagtagctatcaaaattatatgcaacaatattgaaaagtacaggtctggtaagagggaaatttctatattggaaaaattgggaactgcagatcgtgaagacaaacaacactttcttgaatctcttcatatgaatcttcgtgaggttataaagaaatttggtcatggcactgggcttaaactgactgctgtaagggcgtacacaaagcatatttttatcgcgttgaagcatctaagacactgtggtgttctccactgtgacattaaaccagacaatatactggtaaataaagataacaatttgctgaagctgtgtgacttcggtagtgctatgtctgctggaaataatgagatcacaccgtatcttgtgagccgcttctaccgggcacctgaaataagaaaaatcttatttgatggttcaacgaacaatgacatgcttcgccttcacatggaattgaagggccccttccctaagaagatgcttcgaaagggtgccttcacaatgcaacacttcgaccagaacttgaactttcttgctagaaagaaggatcctatcacgaaaacggttgtgaataggttgcttttgaacattaaaccaaagggtgttggttctgcaatttcaagctgccccggcgatgatccaaaaatgatttccagcttcaaagatctcctggaaaaaatatttgtgctagatccaaagaagaggattactgtgccagaagcactcagccatccattcatcactggcaagtga

SEQ ID NO: 102451 - DNA, 641 bp, Oryza sativa
  unsure (1)..(641): unsure at all n locations
  Clone ID: PAT_MRT4530_99973C.1
ctgactaagccattgatcagactcctggttccagcaagacacctcaaccgggaatcgagtgcgctttctgatccacctagcccgaaatccttccttgatccactgatcctgaacggttccgatgccgatcttgagattggtgtgggcattcgccgaccgacaagcctccgacttctcctagcaagcccgacgcggtcggtccaccattactggcgcaagttcgacnacgccttcatgaggccggtgtttgggggccgaggattcgtccccttcgtccccggctcgccaactgaaaggagtgtgcccttactccagggaaatgagaactagaaaacttgaaactgaatctcaaaggagcgtgccattactccagggaaatgtgagctagaaaacataaccaaaggttgtgtaaatctgaggtagaagaacaatcagcaaacacagtttctgtaaatttatctgaggtagtaacagtgttcttggtagctgtggtacgtgctgatgtgttatgtacctaatattgtagatagcatggatgtatatatgtataaacgcctctgtagtttagcaagaaatggtgctgaaaattttgccacaatttatacaatacggtatcctgcagcccggggatccactagttc

SEQ ID NO: 102452 - DNA, 1639 bp, Oryza sativa
  Clone ID: PAT_MRT4530_99974C.1
tcattttccggcgacaagtggcgggatgctctgctcgttcctgaagtagtcgtcggcgtcgatctgcgccttggccatggcgagccgctggtagttccccctgaagtacttctccccccacaccttgccggcgtcgtagctgctgacgccgccggcgccgaccacgttctcgccgaggtccaggtccctgtagttggcgtacgcctccctcgggtccttgctcacgaacggcgccatgaacgcgtagaagtccctgatccacgccctctgcgccgcgccgccgccgcctccgcccgccgcgctccagaagttcatgtactggatgttgtagagcacgccgccgcggtgcgggaacggcgtcgccgcctccgccacgctgccgatctgcccgccgtacgggtccaggatcatcagcccggcgttgggccgcgcgagccacccgaagatggcgctccacgtgtccctgccgatggcttgccggacgtagtcggaggtggccttgttggaggtgtccatggcgatggtccggttcaggatgtcctccacggtggcgctgctgccgaggtagatgtaggggacggactggatccaagtcatctccctgcagtccgaccggttcatgccgagctccgggaagcggctgcgcatcaccggcagcagcgcgtcgcaggtgccgaggtagagggactggaagctggccctctggccctggacgagcacgcggatgaacaggtcgtcggggagcgacggcgcgacggcctgccacctcgtgacgacgtcgatggcgccctggctcacggtcaccgggacgttgaacaccgtgacggtcggcggcacggccacgagcttcaccttccaggagagcacgatcccgaagctctcgccggcgccgccgcggagcgcccagaagacgtcgctgcccatggagttcttgtcgaggagcctgcccttggcgtccacgaggacggcgtcgacgacgttgtcggcggcgaggccgtacttgcggagcagcatgccgaagccgccgccgctgaagtggccgccgacgccgacggtcggacacaggccggccgggaacgcgatccggccgccggccttcccgatggcgtagtacatctccccgagcgtcgcgccggagtccacccacgcggtggcggacgccgcgtcgacgcggacggcgcggatgttgacgaggtcgagcacggcgaacgtctccggccgctccgacctgtacgagaggccctcgtagtcgtgcccgccgctgcggatgcggaggcggacgccgttccggcggccgcagagcacggcggcctggacgtgggaggcgttcgtcggcgtgatgatccagaccggccgcgtggtgttcgtcaggaacttagggttccggatgccggcgtccagcaccgacgtgtacgacggcgagctctgcgtgtacaggagctggctgggtatgctcgccgagaggcattggaggaagctgtccgtggcggccatggaggacgacatggaggcagctgagcagaggaagacgaaggcggctagggcgcctaagcttcgcgacgacatggccatgtttgcgtcgtgcatgccaccatcgaacacgtactagctgctgtttgcaacgaacgaaccctcgtgc

SEQ ID NO: 102453 - DNA, 912 bp, Oryza sativa
  Clone ID: PAT_MRT4530_99975C.1
atgaatgatatcttcctttttaatgctatgataagtgacctgagcttggttgagttacctcttaaaggtagggctttcacatggagtaatatgcagcgaagccctttgttagagcagttagactggttttttttcttccactgcttggactctcaagtttcctaatactctggtaaaacctcttgctcgctccacctcggaccacaccccttgtgtagtacagatagggactgatatcccaaaggctaacatttttagatttgagaatttttgtattaagcatgagggtttttttgagcttgttcagtccatctggcaaaatcatggtcatgatagtaattctgccaaaaaaacatctcagttaaggtgaaggccttaaggaagggtttgaaaagatggagtaaatctttatctaagctttagttgcttatacaaaattgtaatgctgttatatcctttttggattcaattgaaaacctgagagatctcactctactcgaatggaatttcaaagttcttatcagaaataagttgctgatgtacttgaagtacaaacaaatttattggcaaaagagatgcaccattcggtgggctaaatttggaggagaaaatactaagtttttccatgctatggcaactgaatcctttagaagaaattccatcccctccctagtggacttatctggtgaaatttgtacttgtcatgatgaaaaagtctcaattgtttggattgctttctttgcaaggatgggttgcacttattttgaatccatgccttttcaattgcatcagctttttcactctcaagattttttgagctgtctggataagccttttggcacctctgagctggataacattgtgatgaatttacccattgatacggctcccggcgcagaaggccatcgtcgt

SEQ ID NO: 102454 - DNA, 1291 bp, Oryza sativa
  Clone ID: PAT_MRT4530_99976C.1
aaccggccgggacagttgtagatgcacccctggaaaacccaggtaattacgaactagtccttctccagcccggcgacgcgggggaattttacagataagccctcggattccttccccctattctccgctcctcgcgtcgtcgtcctccgagagggggaggagaaggcgagaaggggctccggtggtgggagagggagaccgccattgccgctacttccgagttcagattggggaagatggttgtccaggagttcaccgttgatctgaacaagcctctcgttttccaggttggccatcttgaggaacgttatcaggaatgggttcatcaacctatcgtgagcaaggaaggtccacgctttttcggaaatgatgtcctggagttcttgacgcgcacaaagtggtttgctgtgccaaccatatggctgcctgtcgtctgctggttgcttgtgaaatctattcggatgggtcatactattcaggaagtaggtctaatggccctatttggaatattcatttggacattgatcgagtatactttgcaccgcttcctattccacattgagaccaaaacctattgggcaaacacagcacattaccttcttcatggatgccaccataagcatcctatggactcactcaggcttgtattcccccctactgcaacagcaattttgtgtgtgccgttctggaagctggtagcgttcttcgcaactccaactatcactcctgcgctatttggtggtggcctgttgggatatgtgatgtatgactgcactcactattacttgcaccatggacaaccatccaaagagccagcgaaaaatctcaagcggtatcacctcaaccaccacttcagaatccaaaacaaaggctttggcatcacctcatcactctgggattacgtttttgggacattgcctccgtcgaagaccaccggaaagaacaactgagccactgacagaaatgtattgttttgcatgagaaattttagaggatatgtaatatatatattaagtctaggcacaactgcttgttttgtctttctgggacaacaggttcacatgcccattcagttcgaattcctgtggtttactgatgactgccttgatgtgggtgaagaagacatttcattgccttgacatccaatgttctgaattcagataataggcagttcttgatgtgatccatatgccatgttaagcttagcaattctattggcatgtccaattacacaatgtttgtcttttcttaggattttttcccctcaatcatcaaagagtatcagatactc

SEQ ID NO: 102455 - DNA, 1440 bp, Oryza sativa
  Clone ID: PAT_MRT4530_99977C.1
atgggaagcgccggtgcggcgccggtggcgacggcggccggcggcggcggtggagacggagacctgcacgtggtgatgttcccgttcctggcgttcggccacatcagcccgttcgcgcagctggcgcggaagatggccggcgtcggcgccggggtgcgcgtcacgttcctgtcggcggcggccaacgtgccccgcgtcgaggccatgctgggcggcaccggcggcacgtccaccgtggcggcgctcgagctgccgcgcgtgccggggctccccgagggcgcggagagcacggcggaggtgtcggcggacggtgccgagctgctcaagctcgccgtcgacggcacgcggccgcaggtggaggcgctgctggcgaggctccacccggacgtcgtgctgttcgacttcgccacgccgtgggtcgtcgacgtcgccaggccgctcggcgtcaaggcagcgctcttctccgtgttcgccgcggtctccggcgcgtacgtcatggcccccgcgcgccgccgcctccccgggccggggcgcccgaccgtcgacgacctcgcgtcggcgccggaggggttcccgccgtcgtcgccgctcgccaccgtgccggcctaccaggccgccgacttcagctacgtgttcgagagcttccacggcatgccgtgcgtgtacgaccgcgtcgccgcatgccacaacgcctgcgacgccctggtcatcaagacctgcgccgagatggaaggcccctacatcgactacatcgcggcggagcacggcaagccggtgctcgtgacggggcccatcgtgccggagccgccgcgaggcgagctggaggagcggtgggcgacgtggctctcctccttcccggacaactccgtcgtgttcgcctccttcggcagcgagaccttcctgctgcacgccgccgcgacggagctcctcctcggactagaggccaccgccctgccgttcctcgcagtgctcaacttccccaagggcacggacgccgaggcggagctgaggaagctcacgccgccggggttggaggagagggtgaaggggagagggatcctgcacaccgggtgggtgcagcagcagcacatcctgcgccaccgcagcgtgggctgcttcgtcaaccactccgggctcagctccgtcgtggaggggctcgtcgccggctgccgcctcgtgctgctgccgatgaagggcgaccagtacctcaacgccgcgctgttcgcgcgcgagctccgcgtgggcaccgaggtcgcgcgccgcgcccgcgacgggtggttcgggcgtgaggacgtgcgcgacgcgctggcggcggcgttcgccggaggagaagacggcggcggcgaggagaagaaatggcgggagttcttgatggacgacgccgtgcagaggaggttcgtgcgggagttcgtggcggagctgagaaggctcaagggctga

SEQ ID NO: 102456 - DNA, 831 bp, Oryza sativa
  Clone ID: PAT_MRT4530_99978C.1
atggaggacctcggcggccggaggcgctcgacggtagcaagatacacgcgcaagtcattgccggtcggcggcgagcgctgggaggacctcgccggctggctcaatcaacaggggcaccaacgccaccgtggccagtgcgttgattcttcctcctgccatgcgcggttggtggccagcgcacggcggcgtggcggccggcacaaggcagcgctgcggctgacggcgagcgcacggtgtcaccgtggggcggtgcgccgcaacccagcggctcggcggcgcaatgatggcggctcagcgaggacgtgcgacgacaaacatcaacaagacggcgtgttacctcgtggatttgatcggtcgattgcccagccagacatggtacttcatgctggcttccgatgtgaggccaatgagctgcagcctgcagcagcgggcgtgacgtgccacgccgccggatttggccaccgcatcgcccgatttggccgccgccaggccagtgggagcaagaggtcggaggtgggaggcgggatgaggcagtgggctcgacgtggccaacctcgctgccatggtttggagaaggcagaggttgaatacgggggagaaagccggcggctagggtgggagcctacgaggcatggcgccggggacgcgggagaagccgagtggggaaggaatcgggccgcctccacgtgcatcgtcttcgtattctggaagagcgctaccatgaccacacgacgagatcgacaggtttccaattctaaagatgccgcaactgataggtgtatcctgctccaaccattgcttctcctgttcgagttcagggcaaatctctag

SEQ ID NO: 102457 - DNA, 282 bp, Oryza sativa
  Clone ID: PAT_MRT4530_99979C.1
atggtcggtggggccggggtgacacgtgggaggacaggtaggacttctggatccacgggagaggaggcgtggcggtgcgggtcgcgtcgcgtcgcgccgatcgacggttcgctgccgctgcggtgcggcgcggtgcggtgcgcgcgggtgggcgggcggcgcggcttcaggccaggcaagtttgctccagggcagcaaccaaacacgctctacgtgcgtgacatgagtcgcgtggtcgaggttgaaaatgacatcaaagtgaacaagcccctcatctggtaa

SEQ ID NO: 102458 - DNA, 482 bp, Oryza sativa
  unsure (1)..(482): unsure at all n locations
  Clone ID: PAT_MRT4530_9997C.1
accacacgtacgatgagatcaaagatgatctgacaaaagaggctcctataggatctgatttcatatatgaatcaatgggtggctaaaggttggactcacgctcgaacgctcttgccctcaatggactcgttatgatcatcgatatgaactgcgagcatgaatgggagcctggatgctacacacggctctgcactgggctatgtgataagagtcttgctgaaagtgaaactgtggttggccattatctaaactagtatgctgactagcggcacgatcatcttgacctacttgccgacctgtatgcctatggaaagctagacgcttaccttgacccgaataaatctgtgggtgctgctgctgcgcctgatgcggatgattatctgaatgctggcaagagtgttgncaaggttgatgcgtgcttcgatccgacattcagtcagaccttggctgagctctatgcagtcgtcatgagatacatcata

SEQ ID NO: 102459 - DNA, 243 bp, Oryza sativa
  Clone ID: PAT_MRT4530_99980C.1
atggtgaaccaacctcagaacgacagcgccagcggtagcggtggtggtggcgccggcggcgtcctgagctttagaatcggcggcgacagaggagacggtggcgagccgagatttacatcgacggcgaccaaggcggcggcgacatggatttcctattatgcccccgtccctctggacaggtctaactccgttaggagtgtaggcacgttgctcaaccagagcatgagggcaggcatggcctag

SEQ ID NO: 102460 - DNA, 558 bp, Oryza sativa
  Clone ID: PAT_MRT4530_99981C.1
atgggtatgagcttgcgggcttcacaggtatttggctgcccctttgatgtatctggctggggaggtggcacatcggcagcgaggcagggggcgggcgcgagcggcggctgggtggcgagcggcagcggaagaggcgagcgcgacggggtgcggtggaggaggcgagtgcggcggccgaggacaagctcctcctcccctcgccaccgtccccactccaccgccaccgcttgcagcgttgccgccaccccttgcagcgttgccgccacccctcagccacctcccgcctttgtccttgacgccctgagtgtcctccgctaccgcccgttccacgcgcgcccatcccaccgctctccgttccacgcgtgctgtcgcctcttcgccatggccgtcgccgtgcgtgccaacgcttccgcctctccgcctctacgtcgtcctcaacgacactcctccatcgccatcctcatccatatcaccctcatcccccgccgccgctgcctccgcgtcaccctcatcccccgccgccgccgttgcctccgcatcaccagccgccgccgctga

SEQ ID NO: 102461 - DNA, 203 bp, Oryza sativa
  Clone ID: PAT_MRT4530_99982C.1
gttggagcgagggagggggactaacacggggctctgtttttcttgctccgtgattaacactcatgtgatgctatcctctattgcctgaatctctcgcacctagactgtctgaatggtttgtcggccagaaatcatccgagtctgacaataaatctcgctgcagctatggtcgctgtggtgattgaggcgatgtgcttgagaag

SEQ ID NO: 102462 - DNA, 399 bp, Oryza sativa
  Clone ID: PAT_MRT4530_99983C.1
atggcggcgaggggcaacgggcggcggcgatgccttctcgagaagacggcgggggcggcctcgggcaacgaccagtggtgcggaaaggatggccgaggcgcgggacgacctagggagggtggtagagaggttaggatggggacaagtggcccgagacggtgtgaatcgccggccggaggaggaggtgagaggtggagcttaccggcgcgcgaggaggacggagctccggtgggttcccgacgacgagaagcgaacgccggacctcccctcgtcgctgcgaagctgatggaggaaggtgcgacggccggggatgtctcggagtggcggcaagcggcagctggaggtggcaaatggcagtggcgtctcgggttcacggtgggagcagtgcttcgggggtga

SEQ ID NO: 102463 - DNA, 2207 bp, Oryza sativa
  Clone ID: PAT_MRT4530_99984C.1
ttcttcttcttcttcttcttcttcttcttcttcttctgttcacaagcaatcagaaaagaagaggacacgccatgtcccttctcgtcgtcttgttcttcttcttcctctcgccgccgctcgccgccgccgccgcctacacggagtactcgtgcaatggcacccggggcaacttcacggaggggagcgcgttcgggctcaacctggagctcctcgcggcggagctccccgccaacgcgtcgtcgtcgcggtcgctgttcgcgtcggcggccgtgggcgccgccgcggcgccggaggacagggtgttcggcctggcgctgtgccgcggcgacatgagggacgccgccgcgtgcgcggggtgcgtctccggcgcgttccagcgcctccgcgcgctctgcggccgggaccgcgacgcgacgtactaccacgacctgtgcgtggtgcgctactccggcgacgacttcctgtcgcggccggacgacaactcgccggtgatcaacgcgctggacgcgaacgcgtccacctactacgggtgggacgggcggaacgcgacgacgcggagcttcttcctgtcgctggtggggacgctgttcggggagatggccatgtacgggtcgtacaactcgtcggcgcggcggtacgcgagcgccgtgatgtatgtgaacccgcagctgccgacggtgtacgggctggcgcagtgcacgccggacctgtcgccggcgcagtgctggcactgcttccaggggctccaggagcagaaccggcagtggtacgacggccggcagggcggccggatcctcggcgtccggtgcaacttccggtacgagagctaccagttctacgccggcacgccggacgtcaggatcggcctgcaagacgtcgcaccctcaccaaccgcaaacaatggaaccaaccacaggaagaccttagttatcgttctatccgtgtcaatcacggtcttctgtttcatgctggtcggctgcctcctactgataaaaaaactacggaaaggagacgggaggaagtcgaatcggcagctggaagcacattccaggaacagctccaagacagaggaggcactgaagctgtggaggaccgaggagagcagcaccgatttcacgctctacgacttcggcgatcttgccgctgccacggacaacttctctgaagatcacaggctcggcacaggcggatttggacctgtctacagggcaacagtcaatgttgacgaaaatgcggatgacttgggtgagttgtctgatggagccgagattgcggtgaagaggctggcagcgcagtccgggcaggggctgaaggaattcaagaacgagatccagctcattgccaagctgcagcacaccaacctcgtcaggctcgttggctgctgtgttcaggaggaggagaagatgctggtctacgagtacatgcccaacagaagcctggacttcttcatcttcgaccaggagcaagggccattgctggactggaagaaacggctgcacataatcgagggcgtcgtgcaggggctcctctaccttcacaagcactcacgtgtacgcatcatccaccgcgatctcaaggccagcaacatactcctcgacaaggacctcaatcctaagatctccgacttcggcatggccaggatcttcggctccaacatgactgaagccaacaccaacagagtcgtcggcacctatggatacatggctcctgagtacgcatcggagggcattttctcggtcaagtccgacgtgttcagcttcggcgtgctgctgctggagatcgtcagcggcaagaggaacagcggccaccagcactacggcgaattcgtcaacctcctcggatacgcgtggcagctgtggagagaagagagagggtgcgagctgatcgacccgacgctgggcgagtgcagcggcagcgaggcggcggccataatccggtgcgtgaaggtggcgttgctgtgcgtgcaggacaacgcgacggaccggccgacgatgacggacgtggcggcgatgctcggcagcgacggcgtccccctgccggacccgctgccgccgccgcactaccagctgagggtctccggcgacgactacgacgacggcggccgcgggtcgccggccggcggcggcttccggccgtcgcggtggcgcttcaccgactcgtgcagcaccaacgacgtcaccatcaccaccatcgaggaagggagataa

SEQ ID NO: 102464 - DNA, 1224 bp, Oryza sativa
  Clone ID: PAT_MRT4530_99985C.1
atggaaccctccgcctccgcgtcggctgatccgcccaggaggtctccatggaggcacccctccaacgggggcaaccccaaccccaacggagacgccgtcatcgacacaactagctggcccgcgctctccgaggccgccaggaacccccccaagcctcctccttgcatcgactctccatccgaggggcagggcaagcagtcgtctcgccacaagccggccaggcgcgggggtgccggtgccgaccactccccctccccacgggatgaccgcgccaccagctgggaccatggccgccaccaccaccaccacaacagtggtggtaggaggggctcttttggcggccgcaggagaggaggaggaggcgggggtttcgacgccttgtaccgtgcccctattggcccctatgtgcgtggtgccactgcgcccccgccctcgcccccaagcaccaaggcctttaatacgcccctggtacgttctagctatgatggtacacattggctccaatctggcccatgctatgactacaagggttttgtccgagcgcgagtgacaaatgttttgcaattttttgatggcggtatgcttgcggggcgcactgactagtgagttcgtttctgggggggttccagacaaggttctttttgtctaccctgttattgacgtaccgtgaacgattcagcctttcatgtggttcgtaaaaaaaaaaatggaagtgctgtaactgaaactaaagtcagcaaacagaaggcttattttagaggcgtcgaaagaagatgaagagagatggggggacccatttggacataatgtaatcaaataccgatggtccgctaaggttaaaaggcccccgatgtgctgaatattgcaactgctgaatggcctttgtcctctgcgtgactatgggcctgaagtgtgctgtgaaccatgtcggttttgtccccctgtttggatgtaaccctccaattttttaaggaggagctgaactttaacatcaacaatctgacagcacatcttggaagcgtgggtctgcaggaatcagcagctagctcaagtagcatggtggatgaaaaccatcatgagattcttaccaatggaccaacttccggtaacaaccaagcaccagtagttgaagacggtgctggtaaggttctttttgtctaccctgttattgaggtaccgtgaaataatttattgcctaaaaaaaaaaaaaaaaaaaaaaaaaaa

SEQ ID NO: 102465 - DNA, 226 bp, Oryza sativa
  unsure (1)..(226): unsure at all n locations
  Clone ID: PAT_MRT4530_99986C.1
cctttgctggctgttttttggtggtcncntntgccatnttttaggggtgaaatcatgtgatntttctcgngccntttntggctgtgtctgtgtaagatttntttgcgncaatttgctgatactntgngatcncgttgaatgggnaattaattgtntngcttttttnaaaaanaaaaaaaaaaaaaaaaaaaaaaaaaaaaaaaaaaaaaaaaaaaaaaaaaaaaaa

SEQ ID NO: 102466 - DNA, 1621 bp, Oryza sativa
  Clone ID: PAT_MRT4530_99987C.1
acgcgagtcgtcttcttcttcttcttcttctcgccccccacttgttgcatggattccaaccacagggtccatatgacgtcgtcgtcttcctagttcctcctcgtgttaatttttccatgcaattgtagctgtctttatcaaagctaatttgagctctctctcactgggattaaaagtgtctccaattagtagagttcttggtcttttttttcggatgctactctccaaagatttggttcttggtgtttttaatcagcaaggaggcctcctctcaggtttaatttgctagcccatcagatatggggtgcttcgcgttcaagagcaaggccaagaaccagcgggcggcggcgtcgggggccaggtcgccggcgccgacgtcggacgggcagaagagcaaggcatcatcggcgtcgacgccgacgaggagcatccaggagctgtcggacgagaggggcgcgcagcggctgcgggtgttcgacctcgacgagctcagcagcgccaccaacggcttcagccgcgcgctcaagatcggcgagggcggcttcggctccgtctaccgcgccttcttccgctccgccgccggcggcggcggcggccgggtcgtcctcgccgtcaagcgcctcaaccagcgcagcctgcaggggcacaagcaatggctggctgaggtccaattcctaggtgttcttgagcacccgaatctagtgaggcttgttggctattgtgcagtggattcagaaacaagcaagcacaggctgctggtctacgagttcatgcccaacaagagcctagatgatcatctgttcaaccgagctcatcctcccctctcgtggagattgaggctgcagatcatgatcggcgccgcgcggggcctagactacctccatgaaggcctgcaagaagttcaggtgatatacagggatttcaaggcagccaatgttcttcttgatgccgatttcaagccaaaactttcagactttgggctagcaagagaggggccaactgaaggaaagacacacgtctccaccgcggtggtggggacgcacgggtacgcggcgccggactacatcgagacggggcacctgacgaccaagagcgacgtgtggagcttcggcgtggtgctgtacgagatcctgacggggcggcggtcgctggagcggagccggccggcggaggagcagaagctgctggggtgggtgcgccgccacccgccggagagccagagcttccggtcgatcatggacccgcggctgggcggccggtacccggcggcggcggcgcggcaggtggcgcggctggccgaccgctgcctcgtcaagaaccccaaggagcggccggcgatgagggaggtcgtcgaggagctcgagagggtgctccagatggagccaccgacgacgacggcggccgacaaggacggcgaccgccgcctgccgccggcgaagaggtgacgtcagatcagtcaccggaggaggctgcggtcaacgacggtcaaccagtgcgtgaggaacaaattgtggagagatcgatccttgattcatttgtattgtagagagagatgatgatcaatgcgaataatttggagcatgcaaagtgtttcgattgcacccaaaaaaaaaaaaaaaaa

SEQ ID NO: 102467 - DNA, 149 bp, Oryza sativa
  unsure (1)..(149): unsure at all n locations
  Clone ID: PAT_MRT4530_99988C.1
ctccagagggggtttctattgatngagttgttgaatctagtctgaggttngggttggttgctttgatctcaccttcagctttgcatatcgtagttctacgtttatgagttcatctgttaggtttagataagtggatttgtagaaaaaaa

SEQ ID NO: 102468 - DNA, 1092 bp, Oryza sativa
  Clone ID: PAT_MRT4530_99989C.1
atggctagggtggtcgtcttcgtcgtcggcggttcgtgcgctgcctcctcagttcgcattctccactacggtgccccatctccctcctcggagcgttgctcccgctacgtccgccgcgatcgttcccaccgttcgttcaagccccccttcgaggatacagccgcttatctgcacgcgctggatccaacagtacagtatagggataaacattctctagaaacatgctatgagcccttgttcttcttcagaaagcatcccgcagtggagtttcatcatccaatagatgcgcccgactccatgtttgatagagtgatattaacagaatgggctaaaccagctatgagaggggtgctggagaccatcagcagtcatcattctgcgaatctggaacttacagagttcagtctgaaagatctgaaaatattctgcaattaccagaccccggaattcaaaccaaggttcaagttagtttgcggcacaaggaatgctacatgtgaaggaatgagaatgaattatatccaagcaggacagattttcaaggagatagttaatgcatcgctgggaacaccaagttcgtgggatatcttaattgaggattttcaggacttactgcagatgttagaaaatcccatccttgaggaggcttatctgatgagaaaccaccctgctttgcttgcactgaaactgcactcacagtttttcatggcatgctatgaaacattgatgagggcatcacttcaatctgtgttcgaagtgttcaagatgctaccctatgggatgaatgattcaagtggtcactggaaggtacgtctagagcaacacccgtacctttggtggatgctccacagtcagtttacatcctatggagacagaaactctgagcagtgcagataccgtcggaactactcatgccacaagattcatcatctcacaaaaaggactgaacgattcaaatggtattctgcaaatgatgttgacatgctgctttaccaatatctacccatgtcgcttcctggcttaatgagagcaatgtgggacgaaggactgcttgcccttttctgcttgcgtctagatgagcttttcaccaagtga

SEQ ID NO: 102469 - DNA, 360 bp, Oryza sativa
  Clone ID: PAT_MRT4530_9998C.1
atgacgtcggcggtgacgtcatcaccggcgacagctcgggtgcgcatgctcgccggcgaacgacagcgcgacggcacaaacggaggacacctacgcaatgcgggcgacacagcaaaccttaccgaggcacgaacggcggcggacggtgaccggacgacgacggtgacgaggatgagcggcgatgacgatcgggtcgacgacgacagcgatattccggcggtcctcggcgttgtcggaggggtggacaaggtcagcggccactcggcgaacacggcggtggccttcccgagcgacgaggacgaccggagcggcggcggcgcatggctggacgaactacggcgacggcggcgcacgggctaa

SEQ ID NO: 102470 - DNA, 223 bp, Oryza sativa
  Clone ID: PAT_MRT4530_99990C.1
tgaccttttaccggccgccaactacaatccgtgcaagtgcagacttaacccctctcacaagaaaaagaggcgcaatgatttgggtagcacacagacatcactggggacaaaaagacggacaccgtcaagcccgacaccaaccagaaaccaacgagggagggcgcgaagaagcccgccaccaagggcacgaaggggaaggccggcaaggaccccaacaagccca

SEQ ID NO: 102471 - DNA, 187 bp, Oryza sativa
  Clone ID: PAT_MRT4530_99991C.1
acaagactaccaagacatatctgtgagtccatacccaagaaatccaatcatagccttggattctaaggatgtttccaaataaatcataacataaaagagccattttccacctattaatatgatgttgaagaataataataattgtgcccttaagtaactatataattccgcgaaaaaaaaaaaaaaa

SEQ ID NO: 102472 - DNA, 215 bp, Oryza sativa
  Clone ID: PAT_MRT4530_99992C.1
tatatgaagacaatgatggagacagaatgttagctggggacataccatggaaggtatttgtttcgactgttaagaggttgagggttatgaggaggtcagaacttccccatgacatgacttgggtcaaatggattcacttcctcaagttaaggtctgccctcaatttgttttcctcttatgtccttccacagattggagctgaccctgtgaagtag

SEQ ID NO: 102473 - DNA, 648 bp, Oryza sativa
  unsure (1)..(648): unsure at all n locations
  Clone ID: PAT_MRT4530_99993C.1
gggcgcccttggttttggggtgggggcacaagaaatcactattatgatctgaggattgccctgcagttcagtacaatcatggcatcgtactgtacacacttttggcacctttgtcaagaaatctataacttatagaattacaccaatctgttatatctgaaaaagagtaggtcatttacaaaatatgcagtttgtccactgcacctgcaagatgctattttcccattatcataatcatctgtacaagccaaaaacaggtcatcccccagaaaggtgatggactatggtttgcacaattgatatgtctggaccctaatatcaacgatttgctacttcacagggtcagctccaatcatgtcatggggaagttctgacctcctcataaccctcaacctcttaacagtcgaaacaaataccttccatggtatgtccccagctaacattctgtctccatcattgtcttcatatactaaagtgtatacaccagttccatccaacaaccctgaaaatattttgtcttctgccccttgctctccactttcagcaaagaatagatctttttgagcttcaagaaaaccacggaacaactcttcaacagcagatgacagcttctgnnnagctgtcgtatattttgaaaggtctactttc

SEQ ID NO: 102474 - DNA, 148 bp, Oryza sativa
  Clone ID: PAT_MRT4530_99994C.1
atcacaatgttagccgatgacaatggaaagagtaagcgaggtacaagctgatcagtgacggtggagacaagacattgtctgcaccacaacacccaccagtggctgccatcaaggagctctatccgttataggactagaggaaaagttc

SEQ ID NO: 102475 - DNA, 932 bp, Oryza sativa
  Clone ID: PAT_MRT4530_99995C.1
ctggggttggttttttcctatgctgctgctgctgtgttattgatgagccaccagcattctgtagctgttttcttgctctcttaatttgcaacagaaatcactattatgatctgaggattgccctgcagttcagtacaatcatggcatcgtactggacacgcttggggcacctttttctttaaatctataacttatagaattacaccaatctgttatatctgaaaaagagtaggtcatttacaaaatatgcagtttgtccactgcacctgcaagatgctattttcccattatcataatcatctgtacaagccaaaaacaggtcatcccccagaaaggtgatggactatggtttgcacaattgatatgtctggaccctaatatcaacgatttgctacttcacagggtcagctccaatctgtggaaggacataagaggaaaacaaattgagggcagaccttaacttgaggaagtgaatccatttgacccaagtctatagaattattttatataactaatataagtgcaatactatagcatggtgttatataacacaaaagtgcatccatttgatccaagtttaaccagagatacagcactgctatttatgaggaaaatggcgcctgttgaagttgccctatgcttaccatagtcatggggaagttctgacctcctcataaccctcaacctcttaacagtcgaaacaaataccttccatggtatgtccccagctaacattctgtctccatcattgtcttcatatactaaagtgtatacaccagttccatccaacaaccctgaaaatattttgtcttctgccccttgctctccactttcagcacaagatagatctttttgagcttcaagaaaaccacggaacaactcttcaacagcagatgacagcttctggtagctgtcgtatttttgaaggtcta

SEQ ID NO: 102476 - DNA, 474 bp, Oryza sativa
  Clone ID: PAT_MRT4530_99996C.1
ctcagtcagatttgagtggtagcagaggagcgccggcgagctccatctctccccggtggctgccatcctcggcgccgtgaggtggccgccactgaggtggaggccgaagctgcggtccgccggcgcgcgccggccgtcgttggccaaagacaaccctcgtcggtcgacttcctccacgacgccgaccccatctcaccgagcgctgcctcgccattgtcgactcctccactccggggaccgccgctccagctagctcctacgtcagctcccgccgccgcccgccaccaccactccggcctatgcccgccgccggctgaaggggacagtgagaaagaaagagagaagggaggaagaggggaggaaaaagaaagagagaggatgacatgtggggcccacaagtcagtgggacccacaattttttatatacatatgggctctcggccatcaccatgtagaaagaattgtcgagggagg

SEQ ID NO: 102477 - DNA, 258 bp, Oryza sativa
  Clone ID: PAT_MRT4530_99997C.1
atgtcatcttctctccttcccttcctcctcggcggcggtgggggcaactggaaggccgccgttctgcagagcctgctgagcttcgtggtagagcaggagaagagcgttgttgtgctgctcagcaacctggtgaggttcgccatggacaaggtcacagggacgtctacggtggcgactggcgaggcggaggcgcgggaggaccaagatgcgggtggaaagcagcagcagtcagtgattgagctagcgcgcggcttttga

SEQ ID NO: 102478 - DNA, 2241 bp, Oryza sativa
  Clone ID: PAT_MRT4530_99998C.1
ccccacttcgcctcggcctagacacggtcgaaaatcgtgcaggaacggcgcgccgtgcagcaccgcgtcccgaaccgcgcagcgctgccggcggcgcggtcgaggtccgccacgacctcgccacacgcgagccagagcaggagcgactggtccgtagacgtgatgcgcgcaacgccctcggcgcgcagcgtgtccacgcggagcctcctgatctccacgtcagacaacgagcagtgttaattgcaatatcggagataaagatgggatcgaagcggaatccacaggataaatcgtatcgaaaacagagtgggaatcggttggagtccgaatcggctatggacaggatcggcagagtttgggtcggacaaggttagcagattgagccgattcttacaacacgatatgtttgggcaaaagtctgccgcaaagacttatggtatcttagagtttgttagtgataagtgtcgtgtccggcaaggacatgttttgatcaaatcaactggcacactcacgaacctaaaggcaagattttggacttgcactgaagttaagcagatcttctaggccagtgtgtgtttttcgcatcaacacgcttttggcacgcccagtgggaccgagtttcaacgacttcttcctatggctgagaaaccaccgcagtcaccggggacaggagtcaaacctcccgcgaccaaacccccgggagctaagcatccatcacctgaggtggaagctagtaacgttattccagtcacacttgataagctgacgtccgaacagaggcaggagcttgaacagatgatgagtagcgtgaaggacaagttcatgaattcgtttaaggagacccgccaagggacaattattcagaaatacaagctgaaagtggttgctgccgatgaagctagaacaagttcatcccaaggtggtaaaggtgctgtagatgcctcgggcgacaaaggtgacgggcttcaggatggtgtggttgaagatcttggcgaagatggtgctgaagtgcaagaagaacctcctaggtgcaccaatttccaggaccaagttgattatgcggtacagcatgccttgttcaaccaatctggagtgcttgttaatacattgacaaatatgatcaagtctgtgattgatggtacgatagctgagcatcagaccacggggccaatctacttgtcgggtggcgtcttcccaaattacagaaacagggaacagtttggacttaagccaaatgataccggaaatttgtatcggcaaccataccctgagtggtttgagagggttccactgccaaacagatacaaagttcccaatttttcgaaattctcaggacaagacaatatttcgacatatgagcatgtcagccgattcttggctcaatgtggagaagcatcagctgttgacgctttaagggttcggttgtttcctttgtctttgtccgggacaacatttacatggttttcttcattgccttacaattctgttcaagggtttaatagctctgatcaaggagaaattctcatcacaggagttcgaaagcttgtctcatctcgcacagaagaggatgatttcgaagtagcagcagctgaatgggttagaagcaaaaaggtcgtacaatgccaatgggtgaagaattccggaaaggaagaaagattttgctggaatgaggggatgaggctaccatcgatcggagattgccttggatgcagtaataatgcagggtgttcaagccaatcttacagcagaagcaatcggctgagtcaaaagagagttcctgttcatcaaaggttgggcccggtcaatcaagatcgttatcaagatgacgatgaggacaggaagatacagtggtgcccttctggtatttttacaaagaatcagaagaggagggttcaacggatgagaaacagggaacgttttcaagaagtagagcaagaaatcaatcatcggctgaagaagacaaaacccaggcaggagtggcgtgtcaagagcaagattgcaacagctgatgagactgaggccgacaaagcaaagaggttggctaaaggaaagagtgttgcatctgcatcggtaaacatggtgttcgtgttacctgcggaatatgaagccaaacaagccgatgttgatgatgttgaggaggcctcggctaggttgattttgttgccagagcaagctattttagaaaagcaagattttggacctgcactgaagttaaacagatcttccaggccaagctcctga

SEQ ID NO: 102479 - DNA, 548 bp, Oryza sativa
  Clone ID: PAT_MRT4530_99999C.1
caacttcccatggcgagcggctaggtgctcggtcgttgttgtcgatgaaggtgaaggccgtgctggtgggacgaggaccacgccggagggagagggaggagaggggctgcgtacgccgccgtcgggagggaggccgccgcgcgccagatcccgcgcgagggagggtggtcggccgccggatcggtgtgggggttggccgtcgcctgctagatcccgcgtctcgaccgccggagggggccgccgtgcgcgggggagcaaggaggaggccaccgcgcgccgtcgcccacacctgccggtgccctctcctgccgtcgccgtcgcatatgcccgccactgctagtatggccggaatagaagaataaagaggtggattttgttggggatttttagtgatgttgcatcatatttgtatttttttattgccttttattgctttaaggtgctctatttttattttgactccctgttgcctccattgttttcctggtgtttctctccgcttgttctgtatgctgctcctgttgcaacatttttgctcttttttttct

SEQ ID NO: 102480 - DNA, 1612 bp, Oryza sativa
  Clone ID: PAT_MRT4530_9999C.1
ttttttttttttttttttttttttttttttttttttttttaataacactataaattatttgatatctcatatctggattatgaaaatacaagtggtttgcatgctttacatgcacgtactagctagtactacaacacaaaacacaagtccatctcttacgaattaactcgatcatcgtctcggatttgtccaccgcattattcctcgtatcattcgtatacattcattcattcagactataaacacaaattataactagtactatctaggaatatataatacatgctagttttttaatgacactgactagctagcttgccggctggttcaaaccttgcaaacggtacgcgccattatttgaactcaccgcatgctcgtactactgtccacctccgatgccacctccagcgcctccgccaaatcctccgccgccaccggcgccgcctccgcctgcaccatggccgccgccgacgcctccaccgaaaccacctcccttgcctccgccgaaaccgcctcctgctccagcgccaccgccgccaccgaatcctccgcccgcaccgccgccaactcctccgcctttgcctcctccgaagccaccaccgaagcctccacccttgcctcctccgaagccaccgcctgcacctgcgccgccgccaccgccgccaccaccaccgaagcctccacctttgcctcctccgaaaccaccgcctgctccagcgccaccaccagcaccgccaccgattccgccccctccacctgcaccaccgccagcgccaaggccaccccctgcaccggcacctcctcccgctccaccacccacaccggcgcctccacctgcaccacctccgagaccgccgcctccgccatggccgccaccagcaccacctccgagaccaccgcctccacctgcaccacctcctgctccgcctccgagaccaccgcctccaccggcacctcctcccgctccaccaccaacaccggcgccgccaccagcaccacctccgagaccgccgcctccacctgaaccacctccaagaccaccgcctgcacctcctcctgctccacctccgagaccaccgcctccaccagcaccgcctcccgctcccgctccaccaccaacaccggcaccggcgccgcctcctgctccaccgccaagaccgcctccggcaccgcctccccctcctccaccaagaccaccaccaccacctaggcctccaccttttccgccaccaaaccctcctccaacgccaccgccatgtccgatccctccaccaacaccaacaccaccacctaagccgccacctttcccaccaccaaacccgcctccaatgccgcctccatggccaagaccaccaccagcgccccctccaaatccaccacctcccccaaccccaacaccaccacccttaccacctccaaacccgatcccaacaccgccgccatggccaacgccaccacctccaccaaagccgccaccgccgcctaagccgtccttgtccaagcggcgcgcctcggcggccactactccgagagctaacaacgacacaagggccaatgccgcggctcgcctacccattcccattaccatatatatttccgacgtccagtagtc

SEQ ID NO: 102481 - DNA, 3344 bp, Oryza sativa
  Clone ID: PAT_MRT4530_999C.1
atctgaagagacacttaagattgaaatcttgtacattagtttctggtacacagccacagaaacctccttttggtttcacatgcagccagtgtaaggtatgatgtaattctatgaacaaagtatacttggggcgaacactctgtcttcgcctccagtcttcggacattgtaaggtaaacatctctctacttatcttgtttcatagagtcttgatctacatgctggaatccgtggtcactgattgtgaatctaatgactaatactgttctttatcttcatacacacaaggatgggtggacagtggaacaggaggtaactcttctctcctttctggcagaaaccaagaatacacttcctttgccctctgtaccaaaggcctctcaacattctcacaccaggcgtcaaacatatcgaggacagcctcagtaatgacttctgagagtactttatcaccttctccaggtgccagcttcagcatcatgtatctcttgaacgatacgatcttctctaacatttgccttctgtcaatattatatgatgacatcgcgccttggattatagagaccatcctgaggactgcctccacagactatagcatatgcatgactgaatatctcggttgctgtttctgacagttctttgctgtgccaatcattttttacaggttctggcccctgttctaagattggcgcaaatgttacagtcttcggtttggttgtgttgacacggaagctgctttgattccctcagcatttcattggcttccttcatttctgactcaaacctgctgctgaccttgaagtatggttgctccttgtgtgcagttgggctcgggagtggggaattctgccttgatgatgcttccaagaaaacctcaggtgcacatgctgattcacacgaggaatggggatgtcgagctgtgcttggggatccgtagtctgcatcgttgtgctccttgctgtcgtctgcactgggtcctgctcggggggtccacatcatgtcttcttgcggcttcttcttgtgatgcagcaggtgcatccatttcttagccttgctcttcaccttgccgagaaccggcttcttctggctcccatttggggtccgcggcgatcccatcggactcaccggcggtgcccgtggcgaaggccagtatcgttgttgctcctcccattcatcgactggattttggccattttggacggggtgatcacctcgtttggtgctgatcccgcgcttcaattttcgatgaaacaagttttctccatgctctctgtaatctgctaagctgaaggtgtgcctcccaaacttgctggaagctgcaaaggcagcagcgcccctccatgcatctataagggggtcggctgctctaacaagcttcaggggtgagaggtagggccgaaactgccggattccggattccagccgagggatcatgcctgggatcaaagaacagcctccagtgacaaggatggactggcaaaggcgctccttgacagcctcgtcttccattagtcgcctaagtgagatgctgaccatctcatcgataccagcctggtcaattcctatcataccaggctggaacaatatttcagggcaccggaaccgctcgatccctatggaaatcctgtaatcttctgctgtaagagtccggaccttaggaggctcaggagtctgttggacagcttcagctttgttcacaaatgtagggtccatatcctggatcttagaagcaattcgagcaagttctgattcatcatcatcgttcccatcgtcgtcgtcgtcattatctttgctcatctttttgtagactaaccaatcttcatctctcgtaccaaaagtgtcctcgcccttcccccgatcaaatgcagcagatgtgagcaaccgcatcctttctttctgggcggcattaagacgttccccacggcctactccaccagatgaattatgattaccattggtcttaccaccattgagtttctgtcgcttcctctgatcaaccctatcagaaagttccgagtatcgagcacggagctcttcaaggtataactctgggttctccaaacgcctctcttcttcttgcttctccctcaatgcttcctcctcagcacgtctctgcttggcacgcattcgaccttctgttgtggttttaagtagtatctgtttcttcttctcttttaactgttctggtgtcaatgtttcatcagggacagacacaagtggatacttatcaaccccagaagcatctgctttctcttcgttaccattggactccccctttgccttccttaaggattgtgttgctttcaaaatagcagatttgatttcctgctgggaaagatacccagatctacctaaaatggctgttgcttcttcttcctcagctccatcaagttgctccattagttcctccaaataagaaagctgtttttcaagttctgctatcttctgcgacctttttgcagcagccatatctcgcaaacgttgaccagccttttccttcaaagctgcttttcttgcaagttcttcctcagatggtggttcttctacaggaggcgggacccatggtagctgccaatacctagttttttcttcagcttcttccttattgttcttaaatatctgcaactctgacatataatcaagagctacgtaacaatgttccttcttcagctcttcagccttttcccatgtaatgcttgcactgtgatagggatactttagagagaggagctgcctcagaaaatctgtgatgtgaaagccaccaacgttggttctgcagcatgcccccaacacaggttctccctttaaaaaataggaagaaacatctttagcatcgacaattcttacttcaaaactaccatgcacaattgataacaatggcacaaaaagataagtatcattaccaatggatggcacgccatatgtctcaaaaagtagttctgacattctggctcgagaaaaggatggattgcattcacactctgtcataagaatgggatggcccacctctgaagtggcacctagtcgatcaaaaccaaagtcaagaatatattccatgtactcgaactggtagacaacatcatcatcaaatggtgagcgaattgctgatcgtgtgcaatcgaaatacttcatcaaagctggatcagtgtccccaacaactgtgacagtttcaccagagctgcggtggcgcggccgctgcacgatgttgcggaaggcgacgcggggctccgcctcgccggcccacccgatgcggaaggtggaggcgccgttgtcgatgacgatgggggtggtgctcgggaagccggcgaagtcggtctcccggtccgggcggtaccccgacggcat

SEQ ID NO: 102482 - DNA, 1149 bp, Oryza sativa
  Clone ID: PAT_MRT4530_99C.1
atggagatcctcgataggttttgtttggttgcttttttgcctgcgacgcccacgcagcttgttgtagcagaggcgaagcagactgactcccaagacaaaagcgtcatctccgccgtccccaccgtgtctgccgctgcttcggcttttcgagctcggctctcgcttcggcggcgtcatggtggcctggcgggtggtgacttttcggcacaaatccagccgaccttgtcatccacccggccgaatccccaacctaccacctccgcatcagtccagtccctgctcccacttgggcacgatactgacgagattgtagtcgagggttttgacgagatctcccggcgacttggttccacgtactccggcttcgtaaactatgggatgatccgtgtacgcgaagaaataaaagacgatgaagagagaggagaggggacgaagaagaccgttcggagagaggagagagaagaggagggagtgagaatgacatacaggctccactgggaatcacggcccatccaaggcccagaagatacggcccattactctacacccacaagtcgagcaccaccccgtcggcctccacgacgcaggtcccaaccgcttctggtggatagcaagctaggctcgggggaatctcgccgtcgcatcaccgccgccgccgccgcccgccggttcgatctgagaagccgccacctcgccgcccggatcccgatggcgcggcttcactggctggaggcgatgctgccgctgggaatcatcggcggcatgctctgcatcatggggaacgcgcagtactacatccacagggccgcgcatggcaggccgaagcacatcgggaacgacaattgggacatggccatggcccgccgggacaaggtgctcctccatcaggcctcctccgagaacaactaggatattgatcaacaatatctagcctggatgttgatgaagttatttcaaatgcccagaattactcctgttagtttccgtgtataatgggaagctgggcttatgtttttgtttacaacttttgaatattggatgaataatgtgtatctggaatctgtttaattacacaaagtgggtgtcgcttgtccaaaaaaaaaaaaaaaaaaaaaaaaaaaaaaaaaaaaaaaaaccccaccacccagc

SEQ ID NO: 102483 - DNA, 315 bp, Oryza sativa
  Clone ID: PAT_MRT4530_9C.1
acagacctagatattatgttaattaacaatgtggtacctctgtacagtggttcttatgtaagtcctcgcgaaggaggcaaatatatgctgagcagggcaaatgtgatatttaccgaggcgcacttctctctaaaaacctcgggaactccagaactcctctcgctgctgataacgttacgttcagagcgcatggggactagagttcatggaacgcttgatacaattaaacatctcggtttctgaatcgttagttttgggatctgacagcggcggaggaggtggactgggcaaactaagtggcagccggtcttgcgc

SEQ ID NO: 102484 - protein, 80 aa, Oryza sativa
  unsure (1)..(80): unsure at all Xaa locations
  Clone ID: PAT_MRT4530_100000C.1.pep
MMSGSGYFRLEXTLCLQTLPAATGPDTTSIKFADCKLQIFPXARSRARSXGGYRSATEAEDTFSYSNFNRRKDMLQKLGI

SEQ ID NO: 102485 - protein, 98 aa, Oryza sativa
  Clone ID: PAT_MRT4530_100001C.1.pep
EKSVRERKKVEEKRRREVEEEKERWNNEKKERKGKEGKEREREREEKGKKERKEREERRREEKRKKREGKEKGKKRKEKIKDGKRKKREKEEEKKRER

SEQ ID NO: 102486 - protein, 416 aa, Oryza sativa
  Clone ID: PAT_MRT4530_100002C.1.pep
MQAVVANGGGGDVVQKPQQVVAAPPPPQAALPPPPHWVAMPFAPPGAAAMVMQHQMAPAPPQFAPHFVPFHAVGPPPPPQPRAAPPPVAVAMGSPAPHAQGGGGGQEENKTIWVGDLHYWMDENYLHSCFGYTGEVVAIKVIRNKQTGQSEGYGFVEFYSHAAAEKVLEGFAGHIMPNTDQPFRINWASFSMGDRRSDIASDHSIFVGDLASDVNDTTLLETFSKRYSSVKGAKVVIDANTGRSKGYGFVRFGDDNEKTHAMTEMNGTSGPTGSAARSDGDLTNTTVFVGGLDPNVSEDDLRQTFSQYGEISSVKIPVGKQCGFVQFVQRKNAEDALQGLNGSTIGKQTVRLSWGRNPANKQLRSDNGSQWNNGMYYAASPFYSGYGYPAPFPADPGMYAAAYGAYPFYGNQQQVS

SEQ ID NO: 102487 - protein, 69 aa, Oryza sativa
  Clone ID: PAT_MRT4530_100003C.1.pep
LRILSYLFTITFLFFIRYNLKLPFNYLYVSFSLILHLCILTIVLRNFLLHMFKFFCQLLICSSNYVIEY

SEQ ID NO: 102488 - protein, 142 aa, Oryza sativa
  unsure (1)..(142): unsure at all Xaa locations
  Clone ID: PAT_MRT4530_100004C.1.pep
RWPRLGRWPADGSSADSVEGFSASSALASGXPPGPPPAPRSRRVQTPATWRSSLRLLLPPLGWWLPAAPPLPHQPASRFLHSRHLLCRGSLLXRPPPAAPAFFAGRRRSSTLHNAVGVREHVEDATFPPTFSWDEWLKARPP

SEQ ID NO: 102489 - protein, 68 aa, Oryza sativa
  Clone ID: PAT_MRT4530_100005C.1.pep
ERCMDYMYIILAKNACIYCGFSHLFSLLFHAFKRASGHLVLCGCSAHDYFYKYVNHVCVSLHLMLDVD

SEQ ID NO: 102490 - protein, 79 aa, Oryza sativa
  Clone ID: PAT_MRT4530_100006C.1.pep
MAVDVASVTVSADRGGDGGFSRHDRAWAEVSRAGMAQRTSRAMPCQPTGYDHSPGTTQEASGRAGLARRPGQPIVPMPA

SEQ ID NO: 102491 - protein, 609 aa, Oryza sativa
  Clone ID: PAT_MRT4530_100007C.1.pep
MSTSIPLPFFFSHGVVHARTGHPPIWPPVGLLSAGAPAKVSFRRQSNAHRHAAQVVSTQSITPAKEVSSFEPSVWGDFFINYDPKPLQKSEDWMMEKADKLKQDVRILFETHNDTAKKMHLVDAVQRLGIDHLFQDEINNAISDIKESEFTSSSLHEVALHFRLLREHGIWVSPDVFEKFKGEDGRFINTIADEPRALLSLYNAAHLLVHDEPELEEAMSFARHHLESMRDGSRLKAPLDNQINRALHLPLPRTYKRVEMLHYMLEYGQEEECIVVLLDLAKLEFNLLQHVHLKELKAFSQWWKDLYGYVELSHVRDRAVESYLWSYALFYEENLTLTRMILAKIIVFIVLMDDTYDDHATIEECRKLNEAIQRWDESAISLLPEYMKKFYRALLNYFRETEAQVEASDKYRVTCMKKEFQNLSTYYLQEFEWLHQNYKPAFKERVALSTLSSTVPLLCVTAAVGQGDAVTKESFELTTVRSSAVIACAKIMRFMNDIAAFKSGRKNKGDAANTVECYINEHKVTSEVALDKIESMIESEWRTLNQVAILMRILYVYVAQLESKPKFFSFLIIFLQLRFGVYYKRPLWAYLRHFTVQCPTMNHTIQKHS

SEQ ID NO: 102492 - protein, 131 aa, Oryza sativa
  unsure (1)..(131): unsure at all Xaa locations
  Clone ID: PAT_MRT4530_100008C.1.pep
TPMLPTKFPYLKYLSISLIGLTNSPAYDYLSLVSFLAAXPLLETFFLAISQQQAEQESTWGSSSLMRQIPEHRYEYLKSVTINGFCSAKSMVELTCHILENAASLEHLTLNTNLGLANRSEQSPGILKGSA

SEQ ID NO: 102493 - protein, 76 aa, Oryza sativa
  Clone ID: PAT_MRT4530_100009C.1.pep
MPIDVVWGRGKRMWDVIVLGMMAIGPPAKGGGIDWSEGGIDWSEGVGRSKVDDGENESERKKEEKQIWRIRNKSRV

SEQ ID NO: 102494 - protein, 63 aa, Oryza sativa
  Clone ID: PAT_MRT4530_10000C.1.pep
TDQFIYHHQQNRATTGGGDVRARSDAARRPFVIEGPIQPKRGWVAFFSPGWDSSGALVLVLLS

SEQ ID NO: 102495 - protein, 304 aa, Oryza sativa
  Clone ID: PAT_MRT4530_100010C.1.pep
MMLLKLDISKAFDTISWGFLLSTLELRGFGPNWRRWFSAVLLTEETSILINGVLSDPIKPARGLRQGDPLSPLLFVLVMDALQAMVNRAKQAGLLSPLNARRQMPPISVYADDAVLFFRPTAGEASTIKRLLTLFGEATGLKTNFCKSTITPIQCNDQQRAMVEAIISCHVEDLPITYLGLPLGTRKPTKAEVHPILDKLAKKVADWKPKMLSIDGRLCLIKSVLMALPVHYMSVLQFPRWAIKYIERKCRGLLWKGQEEVSGGHCLVSWRKVCSLVEKGGLGVKDMNFFGQALRLKWHAKSLE

SEQ ID NO: 102496 - protein, 55 aa, Oryza sativa
  unsure (1)..(55): unsure at all Xaa locations
  Clone ID: PAT_MRT4530_100011C.1.pep
TNNGFYSAXXCCLTIRMLLFILLKMEVMEVKIPGFKYCFRIYSNSAECYLCIIHP

SEQ ID NO: 102497 - protein, 376 aa, Oryza sativa
  Clone ID: PAT_MRT4530_100012C.1.pep
HTERVVYRTEVAEDPGHCGPVLPTKTPLTQSFPCCRCSYPILRLLLGCFSSFLSVFCLLFFFLTKVVELVSCSWTDKGVYPKEIHPEICFSCAHTGTVRIAESCWWWWWWWWWWCTAMSTAVADVPPAAAYGFPGSAKRGKPEEVVVLMGKRRNEGFFIEEEEEEEEVLTESSSIGAPSPASSSIGENSGEEEGGDDEEEVESKLKAEDEQVGLGCLDALEESLPIKRGLSNFYAGKSKSFTSLAEATASPAAAANELAKPENPFNKRRRILATWSRRASCSSLATATYLPPLLAPDHAVAEGDEGEEEDDDSDDDERQHRGKNGGRRESAAPPLPLPPPRLTLHTQMGGMVRRNGTFRSPRSLSLSDLQNSGGSC

SEQ ID NO: 102498 - protein, 113 aa, Oryza sativa
  Clone ID: PAT_MRT4530_100013C.1.pep
LYSNIYIYMYVCIYIYVCMYIYIYMYVCMYVYIYVCMYVYIYIYIYIYIYIYIYIYIYIYMYVCIYIYICMYIYMYVCMYVCMYVCMYVCMYVCMYVCMYVCMYVVNYFLLYM

SEQ ID NO: 102499 - protein, 110 aa, Oryza sativa
  unsure (1)..(110): unsure at all Xaa locations
  Clone ID: PAT_MRT4530_100014C.1.pep
MTCSLLCSWTLGHGVLASWLENRSTVKNIVKVFLPNDPLPRQHLELKPILMSLYAALARPLRNLSELRLGTPRAEKALSDYAGTNDHVRSGQGXRALSPENNSPTTRLGD

SEQ ID NO: 102500 - protein, 103 aa, Oryza sativa
  Clone ID: PAT_MRT4530_100015C.1.pep
MGWKIHFWAESTKILAETPESRAPSLGGPRREERVAIRSYTDSTEAQKSHRFSVLGPQKTLMPPPSCRSCILAAVPSSAPRFCVLPHYDSPAAAAVPGASVGR

SEQ ID NO: 102501 - protein, 87 aa, Oryza sativa
  unsure (1)..(87): unsure at all Xaa locations
  Clone ID: PAT_MRT4530_100016C.1.pep
RCKEHRQSVPSQRSLTTTTPRVETYPHVPLRRPGKASEEPKXTSAGDAQSGEGLVRLCRDKRPCKIWSRVEEPYPPRTILRRQGWGI

SEQ ID NO: 102502 - protein, 119 aa, Oryza sativa
  unsure (1)..(119): unsure at all Xaa locations
  Clone ID: PAT_MRT4530_100017C.1.pep
GRVGALSFLVGGIGGFLYLLLLQKSVDGLRRXNSPSEAGSAQPSVKGFSGIRRPWLILSLLMVAGAVALKYGAGGDKLEMTPVELFVGTAGFLANKVAILLAAFKPLQSNLKAEDRSGD

SEQ ID NO: 102503 - protein, 73 aa, Oryza sativa
  Clone ID: PAT_MRT4530_100018C.1.pep
FPKTLGNGLDKNWKRPPGVPPKLFNSRAANGFFYIKDPLQNPGEKGRPIVSAIGMGFNGWANRLYPGTGQYIY

SEQ ID NO: 102504 - protein, 85 aa, Oryza sativa
  unsure (1)..(85): unsure at all Xaa locations
  Clone ID: PAT_MRT4530_100019C.1.pep
QINRSSSAVGTRRPVEGILLSLHYFTSGEKDLLYNEVFNSSQNNLRXSIIFFLYKLQYFLIGALLEFFFLGEWIHEIYRLPTSPY

SEQ ID NO: 102505 - protein, 150 aa, Oryza sativa
  Clone ID: PAT_MRT4530_10001C.1.pep
IQSTEQLKKNGWKGSEFCVLCGMLETTDHILFQCPMASLVWCICRDAFDSSIIPRSFEDFYLINGSLGGDDLRVLLSLLAAVCWVLWSTRNNMIFREKLVYSPLSLMFQINSFLQLGRILSSKDAENFDKITRKLMDATSTLRQPRSGVG

SEQ ID NO: 102506 - protein, 174 aa, Oryza sativa
  Clone ID: PAT_MRT4530_100021C.1.pep
MPLPLSSLASAASPPSPPPSLPPPQAPRATTTDGSGAGDHGSDSGGNSGKGSGGGGGSDDDDCEEAEFGPLLRFDEVLRLAMARGVSLPADMEAAKDAGIWEVLLLRYFDLQAAPWPLAAMIRAFSMLHNRMLADPSFLFKVGTEGFMDTAITPSFHSLILHSSSDDIFVIPKE

SEQ ID NO: 102507 - protein, 86 aa, Oryza sativa
  unsure (1)..(86): unsure at all Xaa locations
  Clone ID: PAT_MRT4530_100022C.1.pep
FRXFRFPPSVDYKYFFYISTTSCMYMSYRTHYQYSPFKPLITCYANISTLYPLQLSEFYSEARHNNCRSRDQLALSHISPYHAPDE

SEQ ID NO: 102508 - protein, 444 aa, Oryza sativa
  Clone ID: PAT_MRT4530_100023C.1.pep
GRERHAPSPLLSRLRRLPSLASAVAAAVISSSSPSNPSHELRPLHQLSSRLFSPLPPKPHSLSCSRPQAPRATTTDGSGAGDHGSDSGGNSGKGSGGGGGSDDDDCEEAEFGPLLRFDEVLRLAMARGVSLPADMEAAKDAGIWEVLLLRYFDLQAAPWPLAAMIRAFSMLHNRMLADPSFLFKVGTEVVIDSRCATFAEVQKRGEDFWAEFELYAADLLVGVVVDIALVGLLAPYVRFGKASAWTGGRTRGNRMAGSLPSSVFEAERPGCRFTVQQRIGTFFYKGVLYGSVGFVCGIIGQGIANMIMTAKRSVKKSDEDIPVPPLIKSAALWGVFLAVSSNTRYQIINGLERVVETSPIDSWIQPSPPVSILLSCDDHRMTYLGFWMTFRMLLNVKSWHSVDSKQIKATFQLHVSTPHDPTLDATLLQWMPDFLCCIVHPPSH

SEQ ID NO: 102509 - protein, 366 aa, Oryza sativa
  Clone ID: PAT_MRT4530_100024C.1.pep
LLPINPSRELSPRLFSPLPPKPHSLSCSGPQAPRATTGDGSGAAGDRGSGSGGNSGKGGGGGSGSGGGDDDDDYEEAEFGPLLGFDEVLRLAAARGVSLPADMMEAAKDAGIREVLLLRYFDLQAGPWPLAAMIRAFSMLRNRMLADPSFLFKVGTEVVIDSCCATFAEVQKRGEDFWAEFELYAADLLVGVVVDIALVGLLAPYVRFGKASASTGPFGRFNRMAGSLPSSVFEAERPGCRFTVQQRIGTFFYKGVLYGSVGFVCGIIGQGIANMIMTAKRSVKKSDEDIPVPPLIKSAALWGVFLAVSSNTRYQIINGLERVVETSPIAKRVPPVAMAFTVGVRFANNIYGGMQFVDWARWSGVQ

SEQ ID NO: 102510 - protein, 155 aa, Oryza sativa
  Clone ID: PAT_MRT4530_100025C.1.pep
MVQTLYNPTVGANIMSTTFALNCFGGELFAPTNKNFWSPSSPIIEGYGILRRVSIQHNDVEAILDFNVLKVSYFDLFVGHPIEKLLLDVPHTGVLDIKLGKMVFFILILRLKNSMMEPIPDSEPIEEVMAISPFEAPESLLENDANAFVEELGRS

SEQ ID NO: 102511 - protein, 233 aa, Oryza sativa
  unsure (1)..(233): unsure at all Xaa locations
  Clone ID: PAT_MRT4530_100026C.1.pep
MAVLLSIRSSSSGRVLAASSSSTPRASACERCVRNGKAAYSPSLSPLPPGGGGGCGYGAMAMEMELNGGFLAAGGPRQHGGGLGCGRCFQMRCRNAEVCSNAGVRVVLTDFHRSNSTDFLLGGPAFAGLAKPGMAHKLKKLDALSVEYRRIPCDYKDKNLSILVEEQSKRPNNLVIKFLYQGGQTDILAVDVAQVGSSDWRXMTRVYGPVWSIDRAPNGPLQFRAVVTGGYDG

SEQ ID NO: 102512 - protein, 51 aa, Oryza sativa
  unsure (1)..(51): unsure at all Xaa locations
  Clone ID: PAT_MRT4530_100027C.1.pep
LSLKIASKIXGDGLISMCGGLPMWPEGIPTPGPIHQILFWQSPTMSMMYKI

SEQ ID NO: 102513 - protein, 389 aa, Oryza sativa
  Clone ID: PAT_MRT4530_100028C.1.pep
MGDGHAADKPTPPPPPRPVLLAGASGDAKLCRAAALSREEVIRRRRRGLLQLHSLYRAQLWALADELSARHAEYWWEHGSSPDAGNAVGGGAPPPPHPAVNGGGAAVEIAAARAGCSAANCGAKAMPFAAYCFDHILFDPKQLLYKPCAFVTNRRSYLVFYICEKRYLKNDVLCTPVVNADAHSMPILNYSFFHQEVGCPLLPLFLLVEHIDLQLLALKPSSPSRLPCPFASQLLHFTNKESGGVPNVPCSSYQVAAHQCEIHRFQSRHDDAKWARGFCSLTCSNSIPLSGSALSHDGPEAPRGMQNGVETCGKPVLTGITPSRCSDHDPKSQRLVIEALKKVGIDLHLTSNGVPKLNLLICETVRQIQRKRKMQLNGAKNAPFHRSSD

SEQ ID NO: 102514 - protein, 118 aa, Oryza sativa
  Clone ID: PAT_MRT4530_100029C.1.pep
FGSFCSLRKLLSIYIKQIYLVHLQIKKMSKDIHHQILVLTSQNYYLLQIYSHKQGVDSKFLTHFRYNEVHRPCCEIENFSAFVELISIVGWIWRPDAWADAWADAWAHAWADAWADAW

SEQ ID NO: 102515 - protein, 89 aa, Oryza sativa
  Clone ID: PAT_MRT4530_10002C.1.pep
MKPRRIPMPTTRREMKTMALSARRGYPSPSPSSATLPRAPRAVRPLRLPTAAAAAPHAVTTPYVAPVARSREILYPWGAFPLDPRRRAP

SEQ ID NO: 102516 - protein, 44 aa, Oryza sativa
  Clone ID: PAT_MRT4530_100030C.1.pep
FPQRGLTLYISQSKGRSIAYMNYRKNILSCSLIYRKVRKEKKKK

SEQ ID NO: 102517 - protein, 69 aa, Oryza sativa
  Clone ID: PAT_MRT4530_100031C.1.pep
MMMNCVVWAVANGCVLHVDFELGLQPDGPTYRLIKRTCIDGSIHARRGDWQMVILMRDTAGRTAQVYRV

SEQ ID NO: 102518 - protein, 269 aa, Oryza sativa
  unsure (1)..(269): unsure at all Xaa locations
  Clone ID: PAT_MRT4530_100032C.1.pep
PAEKRLLLPVALTMTXKHGGGERVWARPWRPSSRAGDASFVEAIVVQARVFDFRSSLVDLLTVSSARTLLIHCEQSTPAPLRAAPTPPASVATPPAAMDDDGGLLALPVAPPVGSSSSVLCEDGVSGAADEAAAPRCSPLLLDLNLPASSPSSSDNRWSSVSQHQSISSTSAAAAADGDEAGRFRSNSSGKQRGAAASSAARETPSSRSTKDEEPMGSATGRARRPPSSSMGAGGEATEAGGIGGGPPIPTSSSSPPPPRPPLPHRPSP

SEQ ID NO: 102519 - protein, 998 aa, Oryza sativa
  unsure (1)..(998): unsure at all Xaa locations
  Clone ID: PAT_MRT4530_100033C.1.pep
MEFATGAMSTLLPKLVELLKEQYDLQKSVKEGITFLMAELKSIQAALEKVSKVPLDQLDEQTKIWAWDIRELSYDIEDNIDTFMLRVDGLEPAKKHNFTWLIDKCQKSLSKIKIRHKIANEIKDIKSQVREVMERRDRYKIDDVATIPPTFVDPRILTLYENVTKLVGVDKASDDLMKRLSVGDEAPKKLKMVSVVGIGGLGKTTLSKVVFDKLKLQFDCAAFVPVGQNPEIKKVLKDILVELNKDKYMSFDVTTVNERHMINELREYLDNRRYLIVIDDVWETSKWNIIKCALIDSNRGSRVIITTRIYQVAKVKLXEEFGGVYMMKXLSDDNSKKLFSRIFGGDXCLTSSTGNQSAKXLNKCGGIPLSIITISXLVDKPXDWSAIYDSIGXGLEIKMRRLKQNTRKILSFSYYHLPSYLKTCMLYLSIYPEDHLIKKDTLIWKWVAEGFVQEEQDKPLFEVGERYFIELINRSMIQPMENDGKISGCHIHDMVLDLIRNIIAEENFVKVFDKLHEVHRLSSQRSTVRRIALHESWNQGKNNDLAVGMTQLRSFNAIKCTISMMPSLLSFQVLRVLELQGCNVTGGLYLKHIGKLRQLRYLGMRGTRVAELPVEIGNLMHLQTLDVRYTGLKELPSTICKLSKLMRLCVAGGTGVLMGGWNLSSLQYLKMGYGCIKSNKDFAIEVGKLMELRILKIYVENKFDKGTKNALLQSLCCLRRLQNLMIDFPLPFQNTMSIWDGWDLWEPSPQLRVFRICGIELPRLPEWVNSMCVPYLSELRLDVVAMEARDLDMLARMPALRTLCLRTQARFSWTVGGAGLFPNLRFCRMDIALTFLQGAMPMLMKLQLWLWASEYCAATDVGLGHLPLLNRVEVILHCCDATTRQVEEAEAAWRHMVNSHPNRPAIRVSRLEEFISLSHFVFQYRMKGDEDNDDEEISAKDHVDGNCDDGNSAYTDQEELCLLSWRLVSEEQETESFLPLTCCTDRLNILEIETCSVS

SEQ ID NO: 102520 - protein, 35 aa, Oryza sativa
  Clone ID: PAT_MRT4530_100034C.1.pep
SRCALEEINTGRLSRSRAYAWVFRGRSGPVLTFVP

SEQ ID NO: 102521 - protein, 355 aa, Oryza sativa
  Clone ID: PAT_MRT4530_100035C.1.pep
MEHTSSTSAHAGERPPAPAPFGPLPVLVYDHGLDPVSRRHTVVRIAAAGGGAGNTIALETTHVVVPELTSNDYHVTPHGWVFLSEPAAAGTTRRTRLWNPTTGESVELPRMEQLLPANWKCYLSDDPTAASCVVLVLAMSEPSLLYCHVGATAGGGWVAHDYDIGDVGLPPSYAPPRRQFISQIAAVNGRFYFADTGKLGVLEFTPSPEFSYLDYPHIEFPEGSNFAKSFLVASHGELFDVYVFFKGFTPEILAVRVCAIDLGGAGDERPAFREVGDLGDRALLLGDANAALLCSASAHGVKGNRVYFMHNILEEPDGGPLRVYDLGDGSMETVRPCPGVSELMCKPFWVMPSAP

SEQ ID NO: 102522 - protein, 85 aa, Oryza sativa
  Clone ID: PAT_MRT4530_100036C.1.pep
MARLLHRLEERAWLGQCLHVSAGYPAKTPRVLAAPWCTTTTREIEEPPGDAWCDRAAQDGDNDDRRSRQPRYAQTGSKTGKLQLI

SEQ ID NO: 102523 - protein, 251 aa, Oryza sativa
  Clone ID: PAT_MRT4530_100037C.1.pep
MLFGVAAAGAEAEAVEDKAAAEHHHHQQRQQHGALNLNVEAKDMKLDYLFSDLDPYLNVEFARFPHADSVVPNGAGAGAAIELDFTCGLGVGVGGAKQSYSSYTATDLAHSGSSSEVGVVPEAMCGGGGAIDLDFTRPKPQPYMPYTATPPPSHSVVSAQMSSSVVDVGVVPERAAAMGEGREARLMRYREKRKNRRFEKTIRYASLQHSKKHSNFNTCNYTVLWMYHSTELTFPVAVSSASELPLGEVKP

SEQ ID NO: 102524 - protein, 238 aa, Oryza sativa
  Clone ID: PAT_MRT4530_100038C.1.pep
MVGLVGGGGWRVGDDAAGGGGGGAVAAGAAAAAEAEHMRRLHSHAPGEHQCSSALVKHIKAPVHLVWSLVRSFDQPQRYKPFVSRCVVRGGDLEIGSVREVNVKTGLPATTSTERLELLDDDEHILSVKFVGGDHRLRNYSSIVTVHPESIDGRPGTLVIESFVVDVPDGNTKDETCYFVEAVIKCNLTSLAEVSERIAVQSPFMLVDRMSGITCERHLETTLVSCEEYAVLSHGFKF

SEQ ID NO: 102525 - protein, 69 aa, Oryza sativa
  Clone ID: PAT_MRT4530_100039C.1.pep
ATPCNHILPSRRHAVHTFICPTAEIPCNGRCKQMSTGSLDVVRHLNSTRASGLASIQHHCMVSGIGQKA

SEQ ID NO: 102526 - protein, 103 aa, Oryza sativa
  unsure (1)..(103): unsure at all Xaa locations
  Clone ID: PAT_MRT4530_10003C.1.pep
MADALTRPVAGTGHCFWRKKTAVAVSYCKPGRVLIKVKGVLIELIRPDMLRLKAFEPILLGGRSRFTDMDMRIPVRGGGKTFXIYAIRLAIAKAXLVAYYHKY

SEQ ID NO: 102527 - protein, 120 aa, Oryza sativa
  Clone ID: PAT_MRT4530_100040C.1.pep
GGDLEIGSVREVNVKTGLPATTSTERLELLDDDEHILSVKFVGGDHRLRNYSSIVTVHPESIDGRPGTLVIESFVVDVPDGNTKDETCYFVEAVIKCNLTSLAEVSERLAVQSPTSPLEQ

SEQ ID NO: 102528 - protein, 60 aa, Oryza sativa
  Clone ID: PAT_MRT4530_100041C.1.pep
FFFFFFLKINTDHAKAITIQVCDGEGYMHILEKTPGKLSSLNQFPARSGTLTKFQIIAKR

SEQ ID NO: 102529 - protein, 115 aa, Oryza sativa
  unsure (1)..(115): unsure at all Xaa locations
  Clone ID: PAT_MRT4530_100042C.1.pep
LGFVTTDSCNDPPLPGRARLHLAAFIGHRVPSQTNTSLFCTLCPHSCAPGXNFPVGHPFQIAPGQARLTLEFFGDRLPEKKLQLVNMSILLILLSPRPGCHILTPSRLELSTIEA

SEQ ID NO: 102530 - protein, 183 aa, Oryza sativa
  unsure (1)..(183): unsure at all Xaa locations
  Clone ID: PAT_MRT4530_100043C.1.pep
FIXLGVLILPNPPTHAKSPINPPTQLSSISSSXSTHKRMTSPFSITLPARSSSQTLNTAXARTRTTQRHRIPFCTLAARTSSFQHSHDRHAGTHSVSAQTWWCGSGSLQVGGPRFVAVGPRTRGSAPGHIPAPVTCRRTSFPISAVVIXXAWRNPWVISWFLCRNWLSAHQFPHKYEPEAXKV

SEQ ID NO: 102531 - protein, 171 aa, Oryza sativa
  Clone ID: PAT_MRT4530_100044C.1.pep
MAQPWRPFVADISPVAVADDDDPPAACAACAHLGRACPTGCPLARCFPAAGDQPADGRLFRNAFRLFGVGNVVGFLLAAGGDPGKRRDAAVSVAYEADARADDPVRGAHGVVMDLERELDCLKAELATAQSALARHRQYAQPPPPPPDALDRARALNYFCHGCCGDVDGAA

SEQ ID NO: 102532 - protein, 101 aa, Oryza sativa
  Clone ID: PAT_MRT4530_100045C.1.pep
PESRFCLACSHFAGPHLQDLEHLWSLRDTLSFGFCICWQEGCCWMQACPFNLTVWHHANMCYVHLFCIAVCWAVCYGGQYVMCSMVSSVVWLCAGFCIDQI

SEQ ID NO: 102533 - protein, 51 aa, Oryza sativa
  Clone ID: PAT_MRT4530_100046C.1.pep
CVCFFCYSGEPSLTWWVHIIRETNTGASSGRQEVVDVHIGYTKNKFLHAGR

SEQ ID NO: 102534 - protein, 80 aa, Oryza sativa
  Clone ID: PAT_MRT4530_100047C.1.pep
FAITEKLQKVLFPVVVLHFNKTIEDYIGIMSSLGSSFNNHMIIHSAKLVLGVHAPLVPDHPKRMNKTLPRAEEFTKIKRP

SEQ ID NO: 102535 - protein, 99 aa, Oryza sativa
  Clone ID: PAT_MRT4530_100048C.1.pep
MRVAVVDKSGAAQRHQQGWWSCALRDVTLALRRSCSDRGLQGRATVMQTGSHGCAVKWAMGRGDPLFPLTLSLSNPTMWMEVECTRCLPPARWPLGVEA

SEQ ID NO: 102536 - protein, 326 aa, Oryza sativa
  Clone ID: PAT_MRT4530_100049C.1.pep
MADASRLLASEIEMIMILVQGGMGMVAASLMIPPYPNNNLHHHHHHCSSNQEPHLPLHPPAFLMSAPSSSSSPSTLDEYDARFFFPGADAYTAGHRQDEETLEAVLRQPVTTTAAAAAAVEGGGGGGGGGAGGSPAAAAAATRRRPFRTDRHSKIRTAQGVRDRRMRLSVGVARDFFALQDKLGFDKASRTVEWLLTQSKHAINRLTLPDSADAAAAPAFAAAPPPADQHSSAMAAAAASAAKEKGEASSSSTTNASSARARNRDHDGSSPVAPMDERGRRGVELDWTAAAAASTEQPMDGLEYYFQYYNHLEEIMSCDPTTTTDE

SEQ ID NO: 102537 - protein, 178 aa, Oryza sativa
  unsure (1)..(178): unsure at all Xaa locations
  Clone ID: PAT_MRT4530_10004C.1.pep
YLTTXPCLYFSAPLFLWLSANQCCSYDDTRASDRASVXMNRHYASAPRWKLPGPSXDRPAYWKPSLGGAAHHXMLLCQRILLLGSAQDGMTCXILIICQLLLLVAEHTTNDIKXIINSPVGLLPLSLCSYVAMMICQADIXTWQLSTVDMTCFACLLAHVTTYYRFCMPTARCMIHQP

SEQ ID NO: 102538 - protein, 517 aa, Oryza sativa
  unsure (1)..(517): unsure at all Xaa locations
  Clone ID: PAT_MRT4530_100050C.1.pep
MVTTDTTVAHIMDKQDDIKIKFSKCWNPIRPPATLLTSNFRRICIRHPFSAQLREQGAASPVMGLWACNFIWDPGPRIKLICTGKISNPRRGVSIAKAQHNVLYGCSQIVNVSLKFHRRRRMFALIGIYENGISSLPRFYFCSFXKFLSPYNNCLPRHRYIQPPLRCLVESVYITIPLALGVQNIQQKENGVLEKKEDVAPAESEESLQRQLIGAEINEGEQPLVEPIAXLPLSQVDLFVVPCDKEELCDNASLISMPQLVNEHAISTVSLCADFKHVVHITNDVEERNLITYLNTLGYVQFDDFCELNNLEEKLFAKTDFPCPTNVIFHIFGEYNERGIYLVHRVFISSDLERYVIANHTTSSFSSFDWMKHDILNGPCDEHHMEKPRTVFCEEGEDDVTIFTTDTTVAHIMDEQDDIKIKSSKCWNPIRPPATLLTSNGCXICIQHPFSAQLREQGDASPVMGLWACNFVXDPGPRIRLICTGKISNPRRGVSIAKAQHNVLYGCSRIVNISLKL

SEQ ID NO: 102539 - protein, 380 aa, Oryza sativa
  Clone ID: PAT_MRT4530_100051C.1.pep
MAAAGWPLSSSVADLLPASLSLTLLLASLVHPLPPSAPFLLRLLALLIPSPRPSRAQVVVVVLAAAAFFFEHIRKIGCTHSLERTEVSAAFFEDPNSLNKVRCPSIYDPAEKYISLIIPAYNEEHRLPEALTETLNYLKQRSAVEKSFTYEVLIVDDGSTDHTSKVAFEFVRKHKIDNVRVLLLGRNHGKGEAVRKGMLHSRGELLLMLDADGATKVTDLEKLEAQVRALAKKAESSLAPSSSPSQRLSDAEIAVFGSRAHLEKQALATRKWYRNFLMKGFHLVVLLTAGPGIRDTQCGFKMFTRAAARKLFTNIRLKRWCFDVELVYLCKHLRIPMAEVSVNWTEIPGSKVRMTSILHMVFELLLIKVGYGLSIWKIYS

SEQ ID NO: 102540 - protein, 65 aa, Oryza sativa
  unsure (1)..(65): unsure at all Xaa locations
  Clone ID: PAT_MRT4530_100052C.1.pep
TNFIRFIRLDDSIRHHKSIRGIKRIQXFHHXITHPSITDQMNSPNFXXANDXDASXIQTPVDPNP

SEQ ID NO: 102541 - protein, 136 aa, Oryza sativa
  unsure (1)..(136): unsure at all Xaa locations
  Clone ID: PAT_MRT4530_100053C.1.pep
TFATLAYXSRSTYLASAACAGRAGCGRLVPAMRRGLSVHLVQASMNAGELLLPATSPRAWSADGGADAPGQHRRGGRRSPEHLIEGDCGWLPGPGGSVGKLGAYEDRCCEELETTRQVLRREQLSSARGDAGGSLA

SEQ ID NO: 102542 - protein, 222 aa, Oryza sativa
  unsure (1)..(222): unsure at all Xaa locations
  Clone ID: PAT_MRT4530_100054C.1.pep
GEKWGGESKNQQPQPPPPSVYTSHILDDDVFLYRERLLPCMVPHVGMEFKCSDEAGMFWHRYGGQKGFEVRKRYTXRKSDGEVTSYRFVCGNEGHRGNDKRDHLTKCPRAETKTNCQVRMSVAMDKKKGNYKVSELVLEHNHPLHLHETLHLMASXRKISDLQAFEIETANDSGIGPKTAYELASRQVGGSHNLSYNIRDHKNYLRSKRQREMAYGQEGRTI

SEQ ID NO: 102543 - protein, 47 aa, Oryza sativa
  Clone ID: PAT_MRT4530_100055C.1.pep
QADPVFSLSGDLLDAQGDFQTIPLPARSPPATMTTSTSPTATSLNLS

SEQ ID NO: 102544 - protein, 196 aa, Oryza sativa
  unsure (1)..(196): unsure at all Xaa locations
  Clone ID: PAT_MRT4530_100056C.1.pep
MDAKQSVAAAKPSLAKKTASASFRLRNGSLNAVRLRRVFDLFDRNGDGEITVDELAQALDALGLVADRDGLAATVSAYVPEGAAGLRFEDFDALHRALGDALFGSLDXPPPPASPXXAAGHEEEEMREAFKVFDVDGDGFISASELQEVLKKLGLPEAGSLATVREMICNVDRNSDGRVDFGEFKSMMQGITVWGP

SEQ ID NO: 102545 - protein, 42 aa, Oryza sativa
  unsure (1)..(42): unsure at all Xaa locations
  Clone ID: PAT_MRT4530_100057C.1.pep
GPPKPWGPXQSHLLPGGPGYGGHPQFMPPRPKDNNNPPPDVP

SEQ ID NO: 102546 - protein, 115 aa, Oryza sativa
  Clone ID: PAT_MRT4530_100058C.1.pep
TSLQGSGERISWRVCFIIFYFFPFCVFFLFYCVKGACLYIILMCIVALLVLQQVKNLTCTTSPFCVYGEKWRGTRIVELSIAAMILTKASGLLYWSYCTFYTIFFSSRLKKKGGG

SEQ ID NO: 102547 - protein, 359 aa, Oryza sativa
  Clone ID: PAT_MRT4530_100059C.1.pep
MASVDLTPRQARKAYGGDGGTYYEWSPADLPMLELANIGGAKLSLNAGGLALPSFSDSGKVAYVLQGKGTCGIVLPEASKEKVIAVKEGDSLALPFGVVTWWHNLPESPIELVILFLGDTSKAHKAGQFTNMQLTGATGIFTGFSTEFVGRAWDLAESDAVKLVSSQPASGIVKIKSGQKLPEPSAADREGMALNCLEAPLDVDIKNGGRVVVLNTANLPMVKEVGLGADLVRIDGHSMCSPGFSCDSAYQVTYFIRGSGRVQVVGADGKRVLDTHVEGGNLFIVPRFCVVSKIADASGLQWFSIITTPNPIFSHLAGKTSVWKAISPEVLEASFNATPEMEKLFRSKRIDSEIFFAPN

SEQ ID NO: 102548 - protein, 231 aa, Oryza sativa
  unsure (1)..(231): unsure at all Xaa locations
  Clone ID: PAT_MRT4530_10005C.1.pep
MTVVAASTRALVFQRVPGRIVVASILXTAAASVPSPPPTGFTXALSRSIAPFSHLLLPATRASFSCGCHRGLHERRPPLPPAAPLHTPVFAVASPPPVAASHALASFTSCRQPPDAAAFASRRRCPRAACSGQIXRSTHGEAGSSRGGAESAASTPCLQPLLRAPARLPCTXRRRRLALPPPSQLAARFSGSXRGEGEEERVAAAVLGFPPSRPRVGDLGLGVSFLPLEHS

SEQ ID NO: 102549 - protein, 64 aa, Oryza sativa
  Clone ID: PAT_MRT4530_100060C.1.pep
RVGVVRAAYVHIALVVPSCPIAAAYPPRRRGDNRRRAISRVRGPSAFVVPGATFRATFIGRTSR

SEQ ID NO: 102550 - protein, 73 aa, Oryza sativa
  Clone ID: PAT_MRT4530_100061C.1.pep
GVGPDGDARRLHRETVVDGAGDPEGAGQPQRAERRRYADGPGYKPPTPDRRLRRRLRRRMRTLTLGVWKLPSC

SEQ ID NO: 102551 - protein, 113 aa, Oryza sativa
  Clone ID: PAT_MRT4530_100062C.1.pep
MERQRRRVTLRRRQREQGRRRWRSLRRTLAGEGRKRYDSLSAMATAVRAATRLRLRLRCRLHERVAGAQASPASPAGHSRYLPLRSTDSRSSNLRLHRQRQRPSVVLHSCAGG

SEQ ID NO: 102552 - protein, 196 aa, Oryza sativa
  Clone ID: PAT_MRT4530_100063C.1.pep
MAATVKQMSLIVSLLGVVSFILGVVAENKKPVAGTPVPGSDGISVTCKYPADPTVALGYLSTAFLVASTVIGYMSLFYPYKGKSIPQGILFKHTTFTVFFNISLFTAGLAAAMLLWPTITEHIHLTRNVHQNLSYECPTAKTGLLGGGAFLSLDSSLLWLIALMLAGNAREDFFGEEEDGDKGEFGAASSDAYDAD

SEQ ID NO: 102553 - protein, 42 aa, Oryza sativa
  Clone ID: PAT_MRT4530_100064C.1.pep
MADLAGSSTAFAAKPRLARAPSSPAARISESRSESGNNGGAG

SEQ ID NO: 102554 - protein, 65 aa, Oryza sativa
  unsure (1)..(65): unsure at all Xaa locations
  Clone ID: PAT_MRT4530_100066C.1.pep
NLQAHGRYRCSTSPGSIPRYXGQPAALKYRSTAYPDRENFSVIEGYHYLYTHLKPTVGYETTTDN

SEQ ID NO: 102555 - protein, 123 aa, Oryza sativa
  Clone ID: PAT_MRT4530_100067C.1.pep
RTTQSNVAQRHNTQYPRQCSHAQVSTTRPSHSTVSTWGVATEHEPSHVQTGGPVGHTHSTAHRTHTHSRSAHRTHSGEATCAGGGRQQGQRGSGEGARWVGRWRCREHLATREGKAAAASIFP

SEQ ID NO: 102556 - protein, 50 aa, Oryza sativa
  Clone ID: PAT_MRT4530_100068C.1.pep
MAEEARVGRLTGVGHGAGLPTCISAQQAVAGGRVAHRPTHEIYKKGFMGG

SEQ ID NO: 102557 - protein, 200 aa, Oryza sativa
  Clone ID: PAT_MRT4530_100069C.1.pep
MASSAVVAACVVVVAAALLLVTAPGAAAQPGGASSGSGCNAGLIRLLPCLGFVGGNNAAPSNTCCANLGSMVHDEPLCLCQALSQSGGGGAIPVPVNRTRAVQLPLLCRLDLPPAATACPGFDLGGAAPSPPVSVPRSTPNSTAPSTPTPVTVTRAPPQQMTPSPKTSSQTPEYSSGLKLIADCVPVALGFMALVSALTF

SEQ ID NO: 102558 - protein, 1145 aa, Oryza sativa
  unsure (1)..(1145): unsure at all Xaa locations
  Clone ID: PAT_MRT4530_10006C.1.pep
MLEVCCCSGVLGGSPPSSRTAGVSSPGLSPSRPSKRRIGRARVQPRAPPPCDERRAAEDVIHALRSADGPAEALERFRSAARKPRVAHTTASCNYMLELMPRAXGRVGDMAEVFDVMQRQIVKANVGTFAAIFGGLGVEGGLRSAPVALPVMKEAGIVLNAYTYNGLVYFLVKSGFDREALEVYRVMMVDGVVPSVRTYSVLMVAFGKRRDVETVLWLLREMEAHGVKPNVYSYTICIRVLGQAKRFDEAYRILAKMENEGCKPDVITHTVLIQVLCDAGRISDAKDVFWKMKKSDQKPDRVTYITLLDKFGDNGDSQSVMEIWNAMKADGYNDNVVAYTAVIDALCQVGRVFEALEMFDEMKQKGIVPEQYSYNSLISGFLKADRFGDALELFKHMDIHGPKPNGYTHVLFINYYGKSGESIKAIQRYELMKSKGIVPDVVAGNAVLFGLAKSGRLGMAKRVFHELKAMGVSPDTITYTMMIKCCSKASKFDEAVKIFYDMIENNCVPDVLAVNSLIDTLYKAGRGDEAWRIFYQLKEMNLEPTDGTYNTLLAGLGREGKVKEVMHLLEEMYHSNYPPNLITYNTILDCLCKNGAVNDALDMLYSMTTKGCIPDLSSYNTVIYGLVKEERYNEAFSIFCQMKKVLIPDYATLCTILPSFVKIGLMKEALHIIKDYFLQPGSKTDRSSCHSLMEGILKKAGIEKSIEFAEIIASSGITLDDFFLCPLIKHLCKQKKALEAHELVKKFKSFGVSLKTGLYNSLICGLVDENLIDIAEGLFAEMKELGCGPDEFTYNLLLDAMGKSMRIEEMLKVQEEMHRKGYESTYVTYNTIISGLVKSRRLEQAIDLYYNLMSQGFSPTPCTYGPLLDGLLKAGRIEDAENLFNEMLEYGCKANCTIYNILLNGHRIAGNTEKVCHLFQDMVDQGINPDIKSYTIIIDTLCKAGQLNDGLTYFRQLLEMGLEPDLITYNLLIDGLGKSKRLEEAVSLFNEMQKKGIVPNLYTYNSLILHLGKAGKAAEAGKMYEELLTKGWKPNVFTYNALIRGYSVSGSTDSAYAAYGRMIVGGCLPNSSTDSSNCSSPEAVGTVRKQITSHRSYHNAKEPTTKNVLISQAWRWLSKGCLRRAAAGNAQQIADGWRMHNHSVW

SEQ ID NO: 102559 - protein, 118 aa, Oryza sativa
  Clone ID: PAT_MRT4530_100070C.1.pep
MTEIVTGGVDCVMAANRHDEPRRAMTALLRAPPASLLAPSAVGDDDGSPPPPPSSLLAASAGRFPSSPLSPPATTMARLLRRRPRRVTTTAHIRPPALLVDATTTPTPTQRLGSTWGQ

SEQ ID NO: 102560 - protein, 167 aa, Oryza sativa
  Clone ID: PAT_MRT4530_100071C.1.pep
LSQRFIALSKIVPGLKKMDKASVLGDAIKYVKQLQDQVKGLEEEARRRPVEAAVLVKKSQLSADDDDGSSCDENFDGGEATAGLPEIEARVSERTVLVKIHCENRKGALITALSEVETIGLTIMNTNVLPFTSSSLDITIMATAGENFSLSVKDIVKKLNQAFKLSL

SEQ ID NO: 102561 - protein, 41 aa, Oryza sativa
  Clone ID: PAT_MRT4530_100072C.1.pep
WGCTKSISIIPHDHQKIRIIIAPTTYNLTILLDSSICTSSQ

SEQ ID NO: 102562 - protein, 439 aa, Oryza sativa
  Clone ID: PAT_MRT4530_100073C.1.pep
MAVEYHCCGAAFFEHVVIIVVLVLFAGLMSGLTLGLMSLSLVDLEVLAKSGTDQDRKHAAKILPVVKNQHLLLCTLLICNAAAMEALPIFLDSLVTAWGAILISVTLILLFGEILPQSICSRYGLAIGASVAPLVRVLVWVCFPVAYPISKLLDHLLGKGHTALFRRAELKTLVTLHGNEAGKGGELTHDETTIIAGALELTEKKAKDAMTPLCQTFAIDINAKLDRDLMQKVLDKGHSRVPVYYEKKTNIIGLILVKNLLSINPDDEIPIKSVTIRKIPRVSEDMPLYDILNEFQKGHSHMAVVIRQTNANYAAEPPANDGGTLAFYLTIFSLFSFFLSMWNKEVAISIDDKHGEKVVKNLPPLRRWKSCPNSQNSNRGNRNRKWSKDQSDVLQIHEEPLPTLNEDEEAVGIITMEDVIEELLQEEIYDETDVHVEEQ

SEQ ID NO: 102563 - protein, 306 aa, Oryza sativa
  Clone ID: PAT_MRT4530_100074C.1.pep
MLRRLPPCLRRALPASSSSTSAPRRGVRLAEHGQSPPQSAPPPPSPATQKDGAVRTPGGGSAASSLNPAEVAHFASFAETWWDTEGPFKHLLVMNPTRVSFIRSILCKHFRRDPNSSKPLEGLKIIDVGCAAGMLSEPLARMGATVTGIDAADESIKIARVHAVIEHVDNPSEFCGSLSALTVPNGAFVISTINRSIRAFATMIFSTGIQVSRIVNAILFHNMWSSRKHRQEITIPKGTHHWSKLVTPDELVQMLEKASIYVQEMAGIGYNPWRGDFSMSKDTSVDYFAYGIKKVETPSVVSQTQA

SEQ ID NO: 102564 - protein, 103 aa, Oryza sativa
  Clone ID: PAT_MRT4530_100075C.1.pep
MHLGASMVPRALVDATEKTTSLASPPPEKVAMLYYSDEATLYSASDKEFLDGGEEGEGGDLGGNGKGRGEGGPCHNTLGGGKCHRCVVRGELIEVALGLKADD

SEQ ID NO: 102565 - protein, 491 aa, Oryza sativa
  Clone ID: PAT_MRT4530_100076C.1.pep
MGDGRGDEEECRVALLNGGGAAKEGWQVVSGGDGKLRRRVWEESRKLWVIVAPAIFSRVVTYSMNVITQAFAGHLGDLELAAISIANTVVVGFNFGLMLGMASALETLCGQAFGAKKYHMMGVYMQRSWIVLLACAVLLLPMYIYAEDVLLLTGQPPELSAMAGRVSVWFIPLHLSFAFLFPLQRFLQCQMKNFASAAASGVALCVHVAISWLLVSRFRFGLVGIALTLNFSWWATAAMLFAYVACGGCPETWNGLSLEAFAGFVRFLQLLTEFVCLICSLENWYYRILILLTGNLKNAAIAVDALSICMTINAWELMIPLAFFAGTGVRVANELGAGNGKGARFATIVSSVTSLVIGLFFWVLIVGLHDKFALIFTSSDVVLDAVDNLSVLLAFTILLNSIQPVLSGVAVGSGWQSMVAYVNIGTYYLIGIPMGILLGWLFKLGVLGIWAGMIGGTAVQTLILAIITIRCDWDKEAMIASTRMDKWSQVR

SEQ ID NO: 102566 - protein, 134 aa, Oryza sativa
  Clone ID: PAT_MRT4530_100077C.1.pep
MRVTIEILTQIGYQIINRDNPDDPLFCSFGYPVTHGAFPPDVSVPALMLEPCAGQKLGLFVSAPEVAIRMLRDQGRPSPFEPNFGRPEPRKIRSVTPDGMTGDVRTGDGDSEYVLEMEEADSSGIQSVEGGIIL

SEQ ID NO: 102567 - protein, 59 aa, Oryza sativa
  Clone ID: PAT_MRT4530_100078C.1.pep
MDCSSCHLHLLYGSSPPNFQGFLQQASWLQSNQVVGSASSHGSKSASQCPAPSPLGDQP

SEQ ID NO: 102568 - protein, 86 aa, Oryza sativa
  Clone ID: PAT_MRT4530_100079C.1.pep
MVAAAAAATAPDPAHPARPPLTPALDKPNSAAETLAQPPAFRRARGGDLRAAAAMGIVFTRLFSSVFGNREARILVLGLDNAGKTT

SEQ ID NO: 102569 - protein, 114 aa, Oryza sativa
  Clone ID: PAT_MRT4530_10007C.1.pep
MEIIYLTGDEKKAAPLRELPGAAERLYKNTAEAAVDAMRIILKQCERSKTVKRVIHTASVTAASPLREDGGEGYKDFINESCWTPLGQSHPYSSDMSAINQFLRLQIHVGRMCA

SEQ ID NO: 102570 - protein, 361 aa, Oryza sativa
  unsure (1)..(361): unsure at all Xaa locations
  Clone ID: PAT_MRT4530_100080C.1.pep
ICSFTAIKNSDGVLHSLXKTRRKFLWVGGEEISGGKKCRVSWDKVCRPKDLGGLGVFDLDRFARALRIIWLWYEWTDPDXPWSGTTVPCDQEDRDLFAAATTITLGDGNMARFRHSHWLEDKTRNKLAPAIFAASKRKNISVHNSPSMPICXLWTMIQCMAPLNAQRDTITWKFMANGVYSSNLAYRMQFMGAAXTIFNQSIRKCWEPPKCKVFSWLVIKNRVSTVDRLXKRGWTNHHFFPLCCASLESALYLLANRRISKRIWSTLQSWTKIDLRINKWKAYANEEDWWYKVSNTPYVMRKALKLVIILVTWELWCERNARIFRRLATTPAMIVAKIKEEARTWIMTRAVRLTETIPCGE

SEQ ID NO: 102571 - protein, 220 aa, Oryza sativa
  Clone ID: PAT_MRT4530_100081C.1.pep
MLSKLLVVTAVALSIAVAVDGRNHGLKRDLAFRAGPRAKFLSEPEPWEYLNPEDIPSDWDWRNVNGKNYCSTSRNQHIPQYCGSCWAFGSTSALADRINIKRGGAWPSAYLSTQNVIDCGNAGSCDGGDDIPVYAYAHDNGIPDETCNNYQAQNQDCTPFNQCGTCSPDGGCNPIQNYTVFKVGDYNSISGVDQMKAEIYARGPISCGIDATDQLQAFSG

SEQ ID NO: 102572 - protein, 67 aa, Oryza sativa
  Clone ID: PAT_MRT4530_100082C.1.pep
AGLGLTGHLASWLDGHVLGIQSHQSRWQSDRAGASQIGATNSLTGNRVVITFGGCRLLDDVGICYGH

SEQ ID NO: 102573 - protein, 451 aa, Oryza sativa
  Clone ID: PAT_MRT4530_100083C.1.pep
HASAHASAHASGPHLPCLLAFLSRYPSRALASLASALLSRFPFASSCSPSPSSDDDHGVEHEESGRVDGVEEVDEHPADDGEVRREAVVVEEERDARAALQRELEKERSAAASAAEEAMAMILRLQKEKSALEIEARQQRRTADERCAFYEDEVEELRDIVLVRERESRALQKEVDAYRRLLGLAAEDGDDDDDEDDMMTPPSTMVEGEPSTSRSVYKDSRNGAMPQLGNDYGFSLKTPFSPQELLSPIKVGHIKGINEDKLSAGPSEKIPMVGLKPEVDSSKDDRVETIEILPLSARSLDQVGYGEVVAAVDTKAPEQLPHEFQEECGGVDKIGGDSTGSENDANIYDVHVVDDICFPTEVKGLICRSFSDATMQAEKLQNRVAADDLLGKSLNAIKGAQDKIKHAASERKQSLQLQLLEDIANQLQEIKVAAEAGRQLHCASPRNLKKS

SEQ ID NO: 102574 - protein, 79 aa, Oryza sativa
  Clone ID: PAT_MRT4530_100084C.1.pep
MDGDVGPRMSGRRAAGIPATPLPDSRASRASPAGDVHALAAGPRHHGRATRRTPGKKRCYRKPGIRKILRVSGKKAKLS

SEQ ID NO: 102575 - protein, 121 aa, Oryza sativa
  Clone ID: PAT_MRT4530_100085C.1.pep
MELLRRRAWCRMQSLSSSPLDMVIYGASASTVDARGWGGHRRISRVGRALLLQLAGGKGESGSAERAQRRKEGGSGNKAGKGASMVLDGRAAGHGAARWGSGASGPCELHGKGGDKERIRC

SEQ ID NO: 102576 - protein, 349 aa, Oryza sativa
  Clone ID: PAT_MRT4530_100086C.1.pep
MGHASTDPSASDHDAPARRRRHRRRGLLRFRRHRSPTPPSADPPTPELTPSPSAPPSYFSYPDIAATASYVVVATLPVFRGDPGECPDAHLARFDRVVNSATSPDAAARTFPASLDGDAALWYDLAAPGADDSPPPWDAVRAAFLDFFRPPGAADRARGDLLSMRQRPGEPVNRYYLRMQGILRRFPGRGGGGADVPESFLKSAFVDGLLPEFHDWVAPQRPEALDVAVALALSWERAESVREARRAAKAARMTKCEFCDTEGHEEAQCETRRRMRALCLRRSSSSRRGGASATMVVEEAAEEEGGGSMRFARLGSTVSTRSAQCQCRKHQCWKKAVVVSELAGDGEGR

SEQ ID NO: 102577 - protein, 73 aa, Oryza sativa
  unsure (1)..(73): unsure at all Xaa locations
  Clone ID: PAT_MRT4530_100087C.1.pep
ERGGNLPAANDDAAAAAAARSQLLPSIHPQVFGSRTSTATNCRRRRPQRHPWRXSRQKHQLRTNPNYRKHLTT

SEQ ID NO: 102578 - protein, 142 aa, Oryza sativa
  Clone ID: PAT_MRT4530_100088C.1.pep
ESPEAVEGSRKEIQRCFTLEEATDTILLCSSIVHDLAYKAATIALDHEQERVHAEPTRPSVTIVGKSIPKEDGLLKLTHRRTPNRKVKRKRLEGETTITENAEKKDDISTDHSPVRSSSGITRTSESMKPPKLESKCNCIIM

SEQ ID NO: 102579 - protein, 547 aa, Oryza sativa
  unsure (1)..(547): unsure at all Xaa locations
  Clone ID: PAT_MRT4530_100089C.1.pep
RSPPSSSPYPSRIHRSIAPACPHPPAPSPYPNRPVPPSPSXSPPPSPSSSTASPTAPSPSPNRPVPPPPSXPPRRPPPXPPPLLASPPPPPPSNHRWRREDSLRRTPKPXTLPPTPVTPSCPPPRPPPPHHPPPTPTPPPPPPTPTPPSXPPPTPNPPPXPQPMPNPPPSSPLQIPPPXPTPTPPPXPPTPTPPPRLPPPLMPTPPXSPSAPGCRHQVAPPAAPPLPAPPPPTPHPPPQSPXTPPPPTPPSPPSPPASSRRRTLDRSLPPEVLTTPLPHPAQPPRRLAPLPSPIPRPQITVESTPHKPTTSQVYKPDSSSTSPPQAGCINPPHPXPPTRPPPPSPPFSPPPLTAAXPPRLPQPPPSPPKPPPSPPSSPSPATAPPKPKRTSPPPDLPHTPSTPPVIPSPPSDAKRPRPFPRGPDPSPRSLPLPIGPIPPPPASPPSAPPHSPTPIPPPPPIPPPXPPPPPPPLPSPWVAPSPPPEVEEMGAPXAVEPLRPPPPPDHPARQPPPQLLPPPGHRAAHLRRVSPRQGQYTVRLHFQVLVV

SEQ ID NO: 102580 - protein, 75 aa, Oryza sativa
  Clone ID: PAT_MRT4530_10008C.1.pep
PVCIKKTNMRPSHLCCTPQQASLLRPLLLQKGTGRRGLSSYQAPLPRQRGGGQSLRTPLPAYLISWSLEREKFAD

SEQ ID NO: 102581 - protein, 207 aa, Oryza sativa
  unsure (1)..(207): unsure at all Xaa locations
  Clone ID: PAT_MRT4530_100090C.1.pep
NRPVPPPPSLLPAVLHQLPPPLLASPPPPPPSNHRPVTPSCPPPRPPPPHHPPPTPPPPPPTPTPPSXPPPTPNPPPXPQPMPNPPPSSPLQIPPPXPTPTPPPXPLPTPTPPPRLPPPSMPTPPXSPSAPDCRHQVAPPAAPPLPAPPPPTPHPPPQSPXTPPPPTPPSPPSPPPTPIPPPPPIPPPXPPPPPPPPPSPWVAPSPP

SEQ ID NO: 102582 - protein, 182 aa, Oryza sativa
  Clone ID: PAT_MRT4530_100091C.1.pep
MGFLGLLSFRCSATAVASFGHAQDDELHVLHTLQAHVANRLAAGRNRLKSRSAMTRSAGSESAVSHQPPLLSLAFLSKLLDVAACLTGDLLDHTVKTLDILKAVSLMLASLRGSHRTVLTAMSCLLAPSLHHAHFGRACQAISRQFPDAAKLAAAPGCPSASLGTGCGLGLALYTMSSVLVR

SEQ ID NO: 102583 - protein, 350 aa, Oryza sativa
  unsure (1)..(350): unsure at all Xaa locations
  Clone ID: PAT_MRT4530_100092C.1.pep
AVGSLNPTAHRSPPSSSPYPSRIHRLHRCTLTVLCHRRLRSSPPPSPSSSTASPTAPSPSPNRPMPPPPSLLPAILHQLPSPLVASPPPPPSSXPPLAPGRTPRGGLRNPXTLPPTPVTPSCPPPRPPPPHHPPPTPPPPTPTPSXPPPTPNPPPXPQLTPNPPPSSPXPDPPARPTPTPPPPRLPPPPMPTPXASPSAPGCRHQVAPPAAPPPPPPAPPPAPPPPTPHPPPQSPXTPPPATPPSPPSPPASSHRRALDRSPPLEALLAMPLPHPAQPPRRLAPLPSPIPPSTSPPQAGYINPPHPGLPLDHHPXPRRPPSSTPLPRAQPTSTPTVRRLRHISRLDPLLS

SEQ ID NO: 102584 - protein, 93 aa, Oryza sativa
  Clone ID: PAT_MRT4530_100093C.1.pep
FRSSFAFAASPLSHTCIAIAVIVRTKLCSASAPPPSCSPNKKTSISSHLICRSIDSLQGELNNGVRVDHLAAAPHPDHNRRGGSLHHLPLAEW

SEQ ID NO: 102585 - protein, 367 aa, Oryza sativa
  unsure (1)..(367): unsure at all Xaa locations
  Clone ID: PAT_MRT4530_100094C.1.pep
DSNAALCQLACSSNLXGYIHAEEFNPRDWIIPCLDYDERDNKKISFLAPNGMYSQRKMSIKSKRIADSVEALIGAYLSTAGEKAAFLLMKSLGMNIEFHTEIPVERKISMKAEEFINVRSLEGMLGYKFNDSLLLLEALTHGSYQTSGPTSCYQRLEFLGDAILDHLFTEYYYSKYPDCTPELLTDLRSASVNNNCYAHAAVKSGLNKHILHSSSELHRKMSYYLEEFGQSFTGPSYGWEAGIGLPKVLGDVIESIAGAIYLDSKCDKEVVWRSMKRLLEPLATPETIEPDPVKGLQEFCDRRSFKITYEKNHVDGVSSVIARVKAGETTYSATKSGPCKLVAKKLASKAVLKDLIAGHKDTEAAAV

SEQ ID NO: 102586 - protein, 1064 aa, Oryza sativa
  Clone ID: PAT_MRT4530_100095C.1.pep
MQLVVLRVVKGGDGGGAAAEAEEAEEAHPADYTAGTQHCLGAFEVVAVTPALTDTRNVDAVLARLPSITEGHSHLQKRARERYAALSAGDKEARLQKMREYYQRKKSIDPVPTHVILPDEKQLKVLNPCKFVLNVLTKRARGKRWVFSLNVTGTNTDNEKSYELDTTYYCKGIYNPRWRTTSGAGTGAVAEGSSARGRRAVSVTGSSPVVVANSVSSQRNPKARFRTCTGVKQTSQASVCFFINTWASQRRGQGWKEKNQVREPCPQATTSPNVSPSSVARRKATEERRKTRPSARDGKLMDWRRLYQLEALERAVRGNTLAFLETGSGKTLIAVMLLRAYAHRVRRPDSRRFAVFLVPTVVLVGQQARVVEQHTDLVVKQFCGEMGVDFWDAATWRSQLEDGEVLVMTPQILLDNLRHSFFRLQDIALLIFDECHHARGNTPYACIFKEFYHPQLNSSASDPLPRIFGMSASLIYSKDLNPHNYSKQISEIENLMNSKVYTVDSESALSEYIPFASTKIVDFDDSNISSELHANILSCLNRLNKKAAEVQSYEENSLSFWGETLDKNVEGFIRNYSEEVHRELSCFLKNGHIGEKFPADSQDGILTPKVHCLIRTLLQYRHMQDLRCIVFVERVITSIVLEHLLSSIHQMSGWNVKHMAGSRPGLLSQSRKNHTEIVESFRKGKVHIIIATQILEEGLDVPSCNLVIRFDPSATNQRGDVEAQTNAEKFLASGQIMREESLRLGSISCQPLENTLCEDTYYRVESTPAFDIDKASGTCTLHLPKSSPVQTVNVEGEGSILKETVCLKACQELHAIGALTDSLLPELDVPCDEEPDIGGQDNASVTMKYVGIIHLNQEQVIIARRFQTTILSFLIGDDHLEVSNGIKYFHEMQVPIGVVYLLLPLVSGRIDWCSMKFSSSPIYEANNKHMTHCHSCKDIDLLQTKDGPFCRHGLTLTFENQPLLAGSKHVKVRNFLHNCYSKKEKEPGDRYSVELPPELCRIIMSPVSANNLHIFSYVPSIMFRIQCMLLSVKLKVQLGPTVQQFDVPVLKVDFLINSFLFMNY

SEQ ID NO: 102587 - protein, 165 aa, Oryza sativa
  unsure (1)..(165): unsure at all Xaa locations
  Clone ID: PAT_MRT4530_100096C.1.pep
EESRKRRRGGSAVGGGGEGGVDGVGSREXGGGAGGGGGVGGGRLARAEAEARLEVSPTEAAEVETDAAVGPRPPPFPPWARYRATAPDPSLVNVPPLPPLTNLAXXAGAAAAPPLPPLPDLVAGPALXPRPSRLCRIWRPGQRRRASPPSPAXRKRGEIEKKWKR

SEQ ID NO: 102588 - protein, 103 aa, Oryza sativa
  unsure (1)..(103): unsure at all Xaa locations
  Clone ID: PAT_MRT4530_100097C.1.pep
QKTGGGGFFYWGGPQKKNLKAWFGKGENIXKAGGAFLTRGKGKSGGTPGKKKGNPVLGKGASKSLSVKGYKIFFPLGGGGNQWKNLGGGVKGGLKIKGQFRGI

SEQ ID NO: 102589 - protein, 115 aa, Oryza sativa
  unsure (1)..(115): unsure at all Xaa locations
  Clone ID: PAT_MRT4530_100098C.1.pep
SVTEAAWGPFXXXXXLXXRXXGSPGAPRGAFLVLGPFALGAGGLAPRGGGGVWALPRWGRLPRGLLAGFLAXGXXXXLXXVGGFXXPPXXFXGRFXXPAXXXXPXPGXGGLWAAG

SEQ ID NO: 102590 - protein, 566 aa, Oryza sativa
  Clone ID: PAT_MRT4530_100099C.1.pep
MSKGAIIGASTVLVVAVVAAVCVVSFKNGGGGKEDGELSTSVKSVKAFCQPTDYQQTCEEELGKAAGNGASSPTDLAKAMFAVTSEKISKAISESSTLEELKNDKRTSGALQNCKELLEYAVDDLKTSFEKLGGFEMTNFHKAVDDLRTWLSAALTYQGTCLDGFLNTTTDAADKMKSALNSSQELTEDILAVVDQFSATLGSLNIGRRRLLADDGMPVWMSEGGRRQLLEAAGPEAGPVEFKPDVTVAADGSGDVKTIGEAVAKVPPKNKERYTIYVKAGTYNEYVSVGRPATNVNMIGDGIGKTIITGNKNFKMNLTTKDTATMEAIGNGFFMRGITVENTAGPENHQAVALRAQSDMAVFYQCEFDGYQDTLYPHAQRQFFRDCTVSGTIDFIFGNSQVVLQNCLLQPRKPMDNQVNIITAQGRREKRSAGGTVIHNCTVAPHPDLEKFTDKVKTYLARPWKEYSRTIFVQNEIGAVVDPVGWLEWNGNFALDTLYYAEVDNHGPGADMSKRAKWKGVQSLTYQDVQKEFTVEAFIQGQEFIPKFGVPYIPGLLPQTQQGRMH

SEQ ID NO: 102591 - protein, 350 aa, Oryza sativa
  Clone ID: PAT_MRT4530_10009C.1.pep
TAEVAAGNGADDGGGCRVCVTGASGYIATCLVKKLLERGCIVHGTLRNLGDEKKAAPLRELPGAAERLVLFEADMYDADTFEPAIAGCEFVFLLATPFQHEPSSKYKNTAEAAVDAMRIILKQCERSKTVKRVIHTASVTAASPLREDGGEGYKDFINESCWTPLGQSHPYSSDMSAVYASSKTLSEKALLRYNESESRAFEVVTLACALVGGDADTTRLYHLLSVPAIVAPLIGQESYHGGLKYLQALLGSVPLAHIDDVCDAHVFCMEQPSIAGRFLCAAGYPNMKDFVDHFSAKYPEITIKLREVVGEGVRVGGDTNKLTDLGFRYKYGVEETLEGSVECAKRMGLL

SEQ ID NO: 102592 - protein, 167 aa, Oryza sativa
  Clone ID: PAT_MRT4530_1000C.1.pep
NFTDLLSSFQSKGLDLADLRVWSGAHTIGIAHCNSFSKRLYNFTGKGGPGDADPSLDAEYAANLRRSKCAAPSDNTTIVEMDPGSFLTFDLGYYRGLLRRRGLFQSDAALVTDAAAEANIASVVSSPPEVFFQVFARSMAKLGMVGVKTGSEGEIRKHCALVNDIHY

SEQ ID NO: 102593 - protein, 79 aa, Oryza sativa
  Clone ID: PAT_MRT4530_100100C.1.pep
VVLTFDDPYPCFSSLLDVPLSPSTRLLYLILRLSALIIYCVCWICPTSIAHMLAIYNLNIQHLHKVLIMLMNHSFIHFP

SEQ ID NO: 102594 - protein, 78 aa, Oryza sativa
  unsure (1)..(78): unsure at all Xaa locations
  Clone ID: PAT_MRT4530_100101C.1.pep
DVAIRFYYHQPTIALSVKLNSPYRESXYNSLAXGLQRRDWENPGVTQLISLAAHPPFASWRNSEDSRTDQPXQQXRXX

SEQ ID NO: 102595 - protein, 869 aa, Oryza sativa
  Clone ID: PAT_MRT4530_100102C.1.pep
MASSLSLDDINDDSVDLSKAPVAEVFQKLKCDRKGLTGAEGESRLRLYGPNKLEEKKESKLLKFLGFMWNPLSWVMEIAAIMAIVLANGGGRPPDWQDFVGIVSLLIINSTISYIEEANAGDAAAALMAGLAPKTKLLRDGRWEEQEAAILVPGDIISIKLGDIIPADARLLEGDPLKIDQSALTGESLPVNKHPGQEVFSGSTVKQGEIEAVVIATGVRTFFGKAAHLVDSTNNVGHFQQVLTAIGNFCIISIGAGMAVEVLVMYPIQHRAYRDGIDNLLVLLIGGIPIAMPTVLSVTMAIGSHRLSQQGAITKRMTAIEEMAGMDVLCSDKTGTLTLNKLTVDKTLIEVCSKGVDKDMVLLYAARASRVENQDAIDTCIVNMLDDPKEARAGIQEVHFLPFNPVDKRTAITYIDGNGDWHRVSKGAPEQIIELCNMAADAEKKVHALIDSYADRGLRSLGVSYQQVPEKSKDSGGDPWQFIGLLPLFDPPRHDSAETIRRALHLGVNVKMITGDQLAIAKETGRRLGMGTNMYPSTTLLGDKNSQVNGLPIDELIERADGFAGVFPEHKYEIVKRLQEMSHICGMTGDGVNDAPALKKADIGIAVDDATDAARSASDIVLTEPGLSVIVSAVLTSRAIFQRMKNYTIYAVSITIRIVLGFLLIAIIWKFDFAPFMVLIIAILNDGTIMTISKDRVKPSPTPDSWKLKEIFATGIVLGTYMALITALFFYLAHDTDFFTETFGVRSIKTNEKEMMAALYLQVSIISQALIFVTRSRSWSFVERPGFLLLFAFFAAQMVATAIAVYARWDFCRIQGIGWRWGGAVWQFSVVTYLPLDVLKFIIRYALTGGKAGDSAQKKGGSPGCLSQP

SEQ ID NO: 102596 - protein, 99 aa, Oryza sativa
  Clone ID: PAT_MRT4530_100103C.1.pep
MGFGSGGGDKRRAVAGGAAETAAAAATSFLFVSQNESSGMLWLLLCLASLEMERDVALARVLGGHFHKHMKGVVGARPARLCRRRSGEALPVGRHEAAK

SEQ ID NO: 102597 - protein, 53 aa, Oryza sativa
  Clone ID: PAT_MRT4530_100104C.1.pep
MAMAAKQAPIAAVVTLHPLLWMRSAMTDRVAQREQIWRVAPMSNAEYGGCRWS

SEQ ID NO: 102598 - protein, 123 aa, Oryza sativa
  Clone ID: PAT_MRT4530_100105C.1.pep
MAMQLPNMCSMAPAYFQLSPYVGPGWCTVTDLRDVVLWAIILPLQAHDPAQVVAHLGRSDLAVACSDAGDDDDGGGGGGDEMTVFHFLNCAALTFGPHVVYYSATPLERSGQRFVASSAEGGA

SEQ ID NO: 102599 - protein, 146 aa, Oryza sativa
  Clone ID: PAT_MRT4530_100106C.1.pep
MVLSTTPCLYGSHTEIDQLRTTATSTSEVAIGYMSSFKQKSGATVRVTDKGPMSPSPTWRPPDLRYKRDPLGRPKASNLTANTTPTAYEVGACRSQVAGRSSRTNSITISPVSSSSIVPFVTCGFPSYNPISTELGLLPIKGPEPV

SEQ ID NO: 102600 - protein, 252 aa, Oryza sativa
  Clone ID: PAT_MRT4530_100107C.1.pep
MAEHKAAKSKSKSKSGGHGHDAAAASKKSKGGKAKANNAAAAAPATSLDALFRPCGDVKGLRFGAQLVTRALTVRRAAPLELPHLLRVADERQREAPLAFAPTTTAYIPTNFAILAHHAWHTLTLGLGTRNSKAAVFVFESAAMKAAADAAWPQVVPLGDAGRRLIRAAPGAPEMARFKFRKGCVTFYVYAARTAGARGFARADELRAVVEAVAKLKDFLDHTAMLALPGQRSIDVAAAADAAAAAPVGVVH

SEQ ID NO: 102601 - protein, 55 aa, Oryza sativa
  Clone ID: PAT_MRT4530_100108C.1.pep
RWVRKPSPKKRVWSSRGLRSFSPARFLGGIFTSCWRLLFMNFSQFINYRHVFYKL

SEQ ID NO: 102602 - protein, 105 aa, Oryza sativa
  Clone ID: PAT_MRT4530_100109C.1.pep
RPPHCSPSRPAAASPRQPPCPTAASPRQPPCPTAASPSRRLGPAAASPSRHHARPPPHAQPPASARWPPRPATTSAWPPPHLGRRRARAPPPRPSQLREWLREKR

SEQ ID NO: 102603 - protein, 76 aa, Oryza sativa
  Clone ID: PAT_MRT4530_10010C.1.pep
SHENILCGITSVDFSKSGRYLFAGYDDFSCNVWDTLTAEKKTTLQGHDNRVSCLGVSSDGLALATGSWDSYLKIWA

SEQ ID NO: 102604 - protein, 48 aa, Oryza sativa
  unsure (1)..(48): unsure at all Xaa locations
  Clone ID: PAT_MRT4530_100110C.1.pep
STQQHQQEQEEKPSSALILQQQHISSSSNMXKPNYPXXCTKSTTIRGN

SEQ ID NO: 102605 - protein, 107 aa, Oryza sativa
  unsure (1)..(107): unsure at all Xaa locations
  Clone ID: PAT_MRT4530_100111C.1.pep
GEGAHTPNNTTEHRERGSSDKTPGRQRSTDRNSQGAPPAQRRAGNQRKQKGRQAGQDTPADHSRARTSPQPQTQVQHGAAAXAXTNXXTXTSNPNVGSXQRTRGRPG

SEQ ID NO: 102606 - protein, 105 aa, Oryza sativa
  unsure (1)..(105): unsure at all Xaa locations
  Clone ID: PAT_MRT4530_100112C.1.pep
EAXNGXLXGFTVXRXASGXXRXXSXVTXGXVXDVXXPVXXXXXLVVGGGXNXPXDXLXRVEEDSPGRGSRWPXATTPXWTXVVERXYIPGXVXRRXXXXDXRVXL

SEQ ID NO: 102607 - protein, 730 aa, Oryza sativa
  Clone ID: PAT_MRT4530_100113C.1.pep
MSSSLLVAACAVSFVLLCSAATSPASAAVYGVGGGLLSIPSNDSLAHCPSRCGDVGIDYPFGIAPGCFREGFELICRNTAKTPKLFLGDGTTEITDLGYRYVLAQIYFNITVRPEGNLTVCELGEAQYHVTAVSLDDGTLTVGNMMNDTNYEKEAIIVQTTDTGRDYSFSGPVEDRFDLSMEYAIVIRWAVTNLTCEVAVQKNTTYACRSSHSYCLNVTHRKEFMGYRCKCSPGFEGNPYIEDGCTEEATNNFDGTRVLGRGGHGTVYKGILSDQRVVAIKKSKIVEQTEIDQFINEVVILSQIIHRNVVKIFGCCLESEVPLLVYEFISNGTLHDHLHTDLSVRCSLSWDDRIRIAVEAAGALSYLHSAAAIPIFHRDVKSSNILLDGSFTTKVSDFGASRSVSLDETHVVTIVQGTFGYLDPEYYHTGQLTEKSDVYSFGVILVELLIRKKPIFINEAGAKQSLSHYFVEGLQEGSLMEIIDPQVVEEANKEEIDGIASLTMACLKVKGVDRPTMKEVEMRLQFLKTKRLRKFQLLPGNDGEIEHLLSPNTSNSYAQNIYTNAGKGDDDGFLLFSPTPSLPSPPSRRGGGLGQWERAEEGCDSGDRSGGGEASGGGSDGGEEAYQYRFEKTTGGPEPPRSRRRVVLAVPSLGVGTGLTRWTTPPASPHAESPDTAIHRPSAAAKRGGNHFTVGSDNHAENGKGNKPCDGSEPSNIIMLLEEAVAASQA

SEQ ID NO: 102608 - protein, 88 aa, Oryza sativa
  Clone ID: PAT_MRT4530_100114C.1.pep
MARLPLRSRASRLRRRSQPRVVLAEQPVFPSPRNLRDKEFKRCDADEDYLLEDTSDTADDESEDTENDNTMNTIRTRIADALIRTRGG

SEQ ID NO: 102609 - protein, 628 aa, Oryza sativa
  Clone ID: PAT_MRT4530_100115C.1.pep
MNNTSYACSPGSNCRNVSSGGYHCYCSGYEQGNPYLLDGCTDYNPKYKEHCSTSCGDMKIPFPFGVEEGCFANERFRLNCTEGNLTVCELGEAQYHVTAVSLDDGTLTVGNMMNDTNYEKEAIIVQTTDTGRDYSFSGPVEDRFDLSMEYAIVIRWAVTNLTCEVAVQKNTTYACRSSHSYCLNVTHRKEFMGYRCKCSPGFEGNPYIEDGCTGIAIGIGCGLGSIVIVLGAMILANKWRKGIQKRIRRAYFKKNQGLLLEQLISNESATNKTKIFSLEELEEATNNFDGTRVLGRGGHGTVYKGILSDQRVVAIKKSKIVEQTEIDQFINEVVILSQIIHRNVVKIFGCCLESEVPLLVYEFISNGTLHDHLHTDLSVRCSLSWDDRIRIAVEAAGALSYLHSAAAIPIFHRDVKSSNILLDGSFTTKVSDFGASRSVSLDETHVVTIVQGTFGYLDPEYYHTGQLTEKSDVYSFGVILVELLIRKKPIFINEAGAKQSLSHYFVEGLQEGSLMEIIDPQVVEEANKEEIDGIASLTMACLKVKGVDRPTMKEVEMRLQFLKTKRLRKFQLLPGNDGEIEHLLSPNTSNSYAQNIYTNAGDLTSEGIPGSGCYSLEQELSSSISLPR

SEQ ID NO: 102610 - protein, 36 aa, Oryza sativa
  Clone ID: PAT_MRT4530_100116C.1.pep
GWNASKYIFISNIKKPDPVIDAPSGLASMSQITVPF

SEQ ID NO: 102611 - protein, 40 aa, Oryza sativa
  Clone ID: PAT_MRT4530_100117C.1.pep
MPDLPHPRNGTARTHHCTAGLAPRLYPIKVIGVAPYRLTL

SEQ ID NO: 102612 - protein, 1042 aa, Oryza sativa
  Clone ID: PAT_MRT4530_100118C.1.pep
MRLLVLLSLISVLTIAGGSTDEATLPAFKAGLSSRTLTSWNSSTSFCNWEGVKCSRHRPTRVVGLSLPSSNLAGTLPPAIGNLTFLRWFNLSSNGLHGEIPPSLGHLQHLRILDLGSNSFSGAFPDNLSSCISLINLTLGYNQLSGHIPVKLGNTLTWLQKLHLGNNSFTGPIPASLANLSSLEFLKLDFNHLKGLIPSSLGNIPNLQKIGLDGNSLSGEFPPSIWNLSKLTVLQVYENKLKGSIPANIGDKLPNMQHFVLSVNQFSGVIPSSLFNLSSLTDVYLDGNKFSGFVPPTVGRLKSLVRLSLSSNRLEANNMKGWEFITSLANCSQLQQLDIAENSFIGQLPISIVNLSTTLQKFFLRGNSVSGSIPTDIGNLIGLDTLDLGSTSLSGVIPESIGKLADLAIITLYSTRLSGLIPSVIGNLTNLNILAAYDAHLEGPIPATLGKLKKLFALDLSINHLNGSVPKEIFELPSLSWFLILSDNTLSGPIPSEVGTLVNLNSIELSGNQLSDQIPDSIGNCEVLEYLLLDSNSFEGSIPQSLTKLKGIAILNLTMNKFSGSIPNAIGSMGNLQQLCLAHNNLSGSIPETLQNLTQLWHLDVSFNNLQGKVPDEGAFRNLTYASVAGNDKLCGGIPRLHLAPCPIPAVRKDRKERMKYLKVAFITTGAILVLASAIVLIMLQHRKLKGRQNSQEISPVIEEQYQRISYYALSRGSNEFSEANLLGKGRYGSVYKCTLQDEGEPVAIKVFDLKQLGSSRSFQAECEALRRVRHRCLTKIITCCSSIDPQGQEFKALVFEYMPNGSLDSWLHPTSSNPTPSNTLSLSQRLSIVVDILDALDYLHNSCQPPIIHCDLKPSNILLAEDMSAKVGDFGISKILPKSTTRTLQYSKSSIGIRGSIGYIAPEYGEGSAVTRAGDTYSLGILLLEMFNGRSPTDDIFRDSMDLHKFVAASFLESAMNIADRTIWLHEEANDTDGTNASTKRRIIQQCLVSVLRLGLSCSKQQPRDRMLLPDAASEIHAIRDEYLRSWMVENEQSTLN

SEQ ID NO: 102613 - protein, 162 aa, Oryza sativa
  Clone ID: PAT_MRT4530_100119C.1.pep
PRRTLMVNLTATRPESVKRTASLDHSEKTAALNSARFRAMISGPSLQSYSGAYGQLDEVGIIEADDFVADEFCRAKCQSVSEKGIRNCMDDLLELKRVSRMRCGRSAPQLSCFHSDFSVGLRLMGKLLLEMRNLLSQEAATIHGLLGGGPLCCRRRASQWNR

SEQ ID NO: 102614 - protein, 91 aa, Oryza sativa
  Clone ID: PAT_MRT4530_10011C.1.pep
ITETREGIYYIFLRGWRNTPNERPSCWIADAQVTSKQFGVETAIFFTTAGECVQNILYLSKEQLEKTCRGKSSFHVRCPCRTCRKCNVKPL

SEQ ID NO: 102615 - protein, 105 aa, Oryza sativa
  Clone ID: PAT_MRT4530_100120C.1.pep
THNNVLPIVFSPNPKGKIAIYRPIALQEHATCTGAEACIPLEVDHVTSHVCNASCAMSSVGEPAVAADLAAGGRRLDADPAELGHGGDEVVEEGALVGGVAVDEA

SEQ ID NO: 102616 - protein, 430 aa, Oryza sativa
  Clone ID: PAT_MRT4530_100121C.1.pep
MASSSKNFQSSSKPGSDRKYQGALVASPAKAISPKTVKQIVPGKHLILSGESTSHLASFLVKVIALEVKLSTPLLFLSVTTTLCDRSSKRNDELGSNTEAPDVPSESDETASTSGIRDVADGTKDTEPDNWLISLFKELEKQGITLPERFNEDELRRFYIAANGDFSSLLSSVKKTIRWRETFHILTLHELEKWSHLVFWHGFDTMLRPCLIVRLGLACSSLAPSDRPRFGQAVVSQIDNGIVYLTNKEDPRITVLLDCHGISPFRFPMQMMRSFITIVQENYPNRLGVLFIVRLPPVVRVIAQTLIQVLKPSTKQKLRFEGESYKKTLAEFLQIVPTFLGGKCSCPQCEKPRNISVIQAGEGSKSQPRQITIDDGSPVASMNFDEAELPSPYSCENAIRAAIIGVLMLWVFIAFLAGMNDPESISSHAP

SEQ ID NO: 102617 - protein, 141 aa, Oryza sativa
  Clone ID: PAT_MRT4530_100122C.1.pep
MAGQANTIQVPTDAELLQAQADLWRHSFSYLTAMALRCAAKLGIPTAIHRLGGEEAAASLPDLMAALSLPASKQPFVRRLMQLLVAVGVFAADGVADERYRLTPLSRILVDGVAAADDHHHDVLQTPFVLTATSRQYVEAA

SEQ ID NO: 102618 - protein, 103 aa, Oryza sativa
  Clone ID: PAT_MRT4530_100123C.1.pep
APTRIRSRAPPPEPHRRAPAQSTTPLDVVKTQLQCQGVCGCERFSSSSIGDVFRTIIKRDGYAGLMRGWKPRMLFHAPAAAICWSTYEASKSFFERFNEKRRK

SEQ ID NO: 102619 - protein, 205 aa, Oryza sativa
  unsure (1)..(205): unsure at all Xaa locations
  Clone ID: PAT_MRT4530_100124C.1.pep
XKRRNMHAQTSKLNSASHHQAIXWDAGFPNPPITTHRRTWXQHVVMQIQATHAFHAFHSHTSFNFFPTGSQPHAQFRASWHTPVSQCIITPTSRAAAGPSCCTMGSLQVAHASLLSPAPSLTTTNQQLNXTRHRYTHQPGLASTVAPQAHVKPPPNVSFQVRGNHPVAVFRHVPQSTPFXRRHTVRSVSHGKVAPHQPHQQXGEH

SEQ ID NO: 102620 - protein, 91 aa, Oryza sativa
  unsure (1)..(91): unsure at all Xaa locations
  Clone ID: PAT_MRT4530_100125C.1.pep
FVVCSSAAKINGGRHGCRCSDSGGGCPKALEKKLLDLELPPFPGPAKKAAAKVVAAAPKKKLAGGRDXRSLEDVPHLTDYLXNLPSXPKPP

SEQ ID NO: 102621 - protein, 69 aa, Oryza sativa
  Clone ID: PAT_MRT4530_100126C.1.pep
MWARKIVGPPVGGRRAGVRVAWTGTGKGTEREHEIRGYLRWNRVARVCWVERSGFLLDLGVEDPARRGA

SEQ ID NO: 102622 - protein, 68 aa, Oryza sativa
  Clone ID: PAT_MRT4530_100127C.1.pep
LFMCAFVNTEVCIRAKVEKAILHFLKVFICLHLISGFRASPVFVFFFFFCNLAFGGKRTKVKRTKKTT

SEQ ID NO: 102623 - protein, 166 aa, Oryza sativa
  unsure (1)..(166): unsure at all Xaa locations
  Clone ID: PAT_MRT4530_100128C.1.pep
PFLLGPCIQVAPRXGTLTHRITWSGMAGCNDLLACPAHAMPPVLMHTPXPLMFLSGESMLTTEVAQRRMPLELFWHTCAGLLKPLAAAAGGWHGFGGPCVETMVRKWRCVCVVFWSVWCTTFCIGVESYXDLPKGELRCPPVNSVRYSPLTSHHFVGGXPRKEMCA

SEQ ID NO: 102624 - protein, 258 aa, Oryza sativa
  Clone ID: PAT_MRT4530_100129C.1.pep
MEVMKKKKFCSWTIRRICSPSSSFIQLGQNGSRVRRLGILRRKSGLSGLVVVCHHLPPILHIRSRLSLRSLYLWWYSAAFSDLEGASRGHACYAEEVTKLYKKNSKRGLLSPTTLGSRTNPFNNPINGGKKSGNVGFFHSAGKRAAPGSKDKHKLPGSIPASSGLNPLLVGEEDLKRYKAPAAEAYLTPATGGVELELSQTVSAPPKLGVELGGALSQNIRRLIPVEDFYLHVAGGLFDFLYHHIKKNGHARLPSGRR

SEQ ID NO: 102625 - protein, 72 aa, Oryza sativa
  Clone ID: PAT_MRT4530_10012C.1.pep
KKRDRRTRLQDVIKTLTSTTGKLSGRGREAQAFQAMSTGDYYSSYASDGLQEKRTNSSSRFQKNHVTPLYNF

SEQ ID NO: 102626 - protein, 260 aa, Oryza sativa
  Clone ID: PAT_MRT4530_100130C.1.pep
RVRLVHQIQPMGAAGIENQHQIQPRKRKASPGREEEKDAPPLEWNSSSIPGCHGAPTLRWAAAPARVASTLPFALALAPSCCAAAKHPRPAASLNSSPTLASEWIVMLLATARSEGGSFSVGAATYWERGKEMEEGREIKSILILYEEWKMKTEPEFWARLVQRLDVCTFTRESGSPPGVVFLNSGDRSDSGEGRNKRRVERVHGHQESAAAHLHRRPRARPRVWHNWHRCLLLRLASRSPSWPASASLRTLVVVYLKLP

SEQ ID NO: 102627 - protein, 41 aa, Oryza sativa
  Clone ID: PAT_MRT4530_100131C.1.pep
MQPNSKEKLVENNENYEGLNLTRRRLRVHLPRDGQRSADMQ

SEQ ID NO: 102628 - protein, 48 aa, Oryza sativa
  Clone ID: PAT_MRT4530_100132C.1.pep
AVSFPTGNMTKLDLPSSIMFYIEERNCGITTQTLLNDAWTSAYRHNKN

SEQ ID NO: 102629 - protein, 68 aa, Oryza sativa
  Clone ID: PAT_MRT4530_100133C.1.pep
KLSLHLLPESCIEQLSNYSRRWICRRNLMKPPKEERGKISLLAIWHCQCHCPFGSCGVNYWTPLSNMV

SEQ ID NO: 102630 - protein, 423 aa, Oryza sativa
  unsure (1)..(423): unsure at all Xaa locations
  Clone ID: PAT_MRT4530_100134C.1.pep
VCGNTGHSGNDCPETHEEAMYMGNNNNNGYHPQGGQGWNQPRPYFQEGNNQXTTDALNKKMVANDKILENINVKLDGFASAFQNQLSFNEMIETQLAQLAALVPTNESGRIPGQPEPSIENVKAITTRGGTSSNSRETPSDAAAEEEIQPEKTVPQHYCDTRLLPFPQRMRKPSVDEQFARFIETQKFDQALCDLGASVSVMPKDVFDKLNFTVLAPTPMRLQLADSSVRYLAGIAEDVPVKIRDCFIPVDFVVLDMDTVAYTSCFVEANRWVELLAILTPAELVHSYLCRTRRWLSRLFKKGSGSSSGTTTDISMEDTDIPTSLLTDTNLNLIGDQELQAYHMLKDRKFSHTRAYDPELLRKTGMDSDFHAIWNAVIWQRFAVVDEPGSHLLNIQFLCTLKESEDGISFLFSVKSIRFHGKD

SEQ ID NO: 102631 - protein, 69 aa, Oryza sativa
  Clone ID: PAT_MRT4530_100135C.1.pep
AAHCGEPSPPWEEVVAAAPAAIAPHHVLLLHLGCAPYRPPQTGAAIANFVPCIACCRRCSLHPLTALHL

SEQ ID NO: 102632 - protein, 199 aa, Oryza sativa
  unsure (1)..(199): unsure at all Xaa locations
  Clone ID: PAT_MRT4530_100136C.1.pep
VCGNTGHSGNDCPETHEEAMYMGNNNNNGYHPQGGQGWNQPRPYFQEGNNQXTTDALNKKMVANDKILENINVKLDGFASAFQNQLSFNEMIETQLAQLAALVPTNESGRIPGQPEPSIENVKAITTRGGKSTCDPPYPNNAGTSSNSRETPSDAAAEEEIQPEKTVPQHYCDTRLLPFPQRMRKPSVDEQFARFIEVI

SEQ ID NO: 102633 - protein, 54 aa, Oryza sativa
  Clone ID: PAT_MRT4530_100137C.1.pep
EDARSITSGDGTRRWLSRLFKKGSGSSSGTTTDISMEDTDIPTSLLTDTNLNLI

SEQ ID NO: 102634 - protein, 73 aa, Oryza sativa
  Clone ID: PAT_MRT4530_100138C.1.pep
RGSTSEYRRAHTGSDPPSGRFIKHMSMNWGIRSRRSSSSSDQKPDYKSIDTIECTHVFFCGAFPRVQGLLAYP

SEQ ID NO: 102635 - protein, 109 aa, Oryza sativa
  Clone ID: PAT_MRT4530_100139C.1.pep
APPSSSSGFPHRDPVALPLSIPAAAAAAAARPRRCGVRDRSVGNRTTPRRGAPRGLAGEVVGFLPRLLSCSIHYPRASERTSGGRSGRDLVACSFSILKRTGRVGGRVG

SEQ ID NO: 102636 - protein, 47 aa, Oryza sativa
  Clone ID: PAT_MRT4530_10013C.1.pep
LQAFPLWKLQLPPCVPQGPAKCQLSKAPVHGANASPVIVKGSLIWSA

SEQ ID NO: 102637 - protein, 155 aa, Oryza sativa
  unsure (1)..(155): unsure at all Xaa locations
  Clone ID: PAT_MRT4530_100140C.1.pep
WAVGSQAWGLGGPLAXVAFLSGLRLRLYNSTDXHGMMRWPRRARPRLTVSRAAMSCLAAIGPLGQPMLPGVLXALIPCHPGCWAYSVMRRCTVLWLMDQPGQHQHRAPGRRRWSPSSEPVIMIEAAVVSAASLATTVTVAARRRSLLCADQPWGS

SEQ ID NO: 102638 - protein, 49 aa, Oryza sativa
  Clone ID: PAT_MRT4530_100141C.1.pep
NTYSFLLTLHKPITGPILSYTYLWHYILFTLHLYYFISTLLLGLVIRLI

SEQ ID NO: 102639 - protein, 62 aa, Oryza sativa
  Clone ID: PAT_MRT4530_100142C.1.pep
KCGGVGGGDSEPPRVFEKGRLCLVVAGIEGKRCSFSGKTPSHHVYDGFLRAFGHVPGKPLGS

SEQ ID NO: 102640 - protein, 81 aa, Oryza sativa
  Clone ID: PAT_MRT4530_100143C.1.pep
QELRPQGPMTKPYLSPWHRCHTRQYQPTVPSPNAAHDMDEKSQANRTGALRWVGGGPRECSQNRWATLVYQRGHWDPKWQT

SEQ ID NO: 102641 - protein, 42 aa, Oryza sativa
  Clone ID: PAT_MRT4530_100144C.1.pep
MVHDPFTPSMIQVEKQASDGCNSPYVRISANAKLNQPKKHYM

SEQ ID NO: 102642 - protein, 128 aa, Oryza sativa
  Clone ID: PAT_MRT4530_100145C.1.pep
MPPSYTPTARLRLLVLFLASLSLLFAQTLASSSAEAEVSDPCAAPVSDGGSEAQLCPVRCFRPDPVCGADGVTYWCGCPEAACAGARVARRGYCEVGAGSAPVSGQALLLVHIVWLFVLGAAVLLGFL

SEQ ID NO: 102643 - protein, 105 aa, Oryza sativa
  unsure (1)..(105): unsure at all Xaa locations
  Clone ID: PAT_MRT4530_100146C.1.pep
MAAATMALSSSTLTRTASSECVNXEGRIIMRKSXTAKPKPAMSVSPGNEADRVLYLSPLSGEPTIYLTDEFPGDYCRHTAALSSDPETYAKNLKLKVIHYKWATL

SEQ ID NO: 102644 - protein, 45 aa, Oryza sativa
  Clone ID: PAT_MRT4530_100147C.1.pep
MEMYSLSILQHSIPQGKDEEKCPGVFRLAPQGGGLDDLGSKPHPS

SEQ ID NO: 102645 - protein, 128 aa, Oryza sativa
  Clone ID: PAT_MRT4530_100148C.1.pep
MARNVSSGATAAAAERELGGDYGGDRTRARAWQQWRNGMRARRQWQTSSGTAAMGREHGNNAERAWGWEWWRWRLGTAVATVLNELGDGDGGGGGMRGDDDRAWATTPPSSETVARMDGEAGGRSGSK

SEQ ID NO: 102646 - protein, 251 aa, Oryza sativa
  Clone ID: PAT_MRT4530_100149C.1.pep
MAMAVRVAAGLVVAAARAGEGAVATVALDAGGAEAALLLAGDGSAAALALYNRCAETVWPGTPPSAGKELLARGGFQLAPNRATSSRLPCATGDCGGALYCNGAGGAPPATLAEITLASTPAAQDFYDVSLVDGYNIPIAMTPSHGSGANCVPAGCISDLNRVCPAGLAVRGGGGDNRVVGCRSACAAYGAPQYCCTGQFGSPQQCKPTAYSRLFKTACPKAYSYAYDDPTSILTCSAGASYIVTFCPHRR

SEQ ID NO: 102647 - protein, 68 aa, Oryza sativa
  Clone ID: PAT_MRT4530_10014C.1.pep
IDLTGLMVKRTSPLSVRETHRTHTSSPLFCCPCPPLSIILFSICKKYFLSRNQQFDEFKIITIVFNIF

SEQ ID NO: 102648 - protein, 48 aa, Oryza sativa
  Clone ID: PAT_MRT4530_100150C.1.pep
SNRHVRSVVSFCPIPWSIDYMLQCEMILIIIDRPGMPYHANQGTWFCN

SEQ ID NO: 102649 - protein, 1041 aa, Oryza sativa
  Clone ID: PAT_MRT4530_100151C.1.pep
MAGSFDGRMPTRGVEQAIVALKKGAHLLKFGKRGKPKFCPFRLSSDEKTLVWYSKDREKHLSLNSVSTVVLGQKTICRDRDQAECWFLGLTALTSSPYSPLPLAGSKSGRQINSCAISPRSYLQRKCRLSAALDTPRHTQVYPSYGSPKIQKKIFGGNLDSSEALFYPRHPTSCDIDSYIEKLNPKIATPVKHGLKDIMVANRRAQNITHTPKLKTFEGPRVACRLDSLKDVFLWGSVLGSMLGSEDIPKSLPRLVGSAKMLDVQSIACGENHAAIITKQGEVYTWGSYSSGRLDQKVNVNASCPKMVESLASVHVKAVAFGSKHTCAITVSGELFEWGEGAHSLGLMNDWYGRNQWFPHKFLGPMDNISVSKIACGEWHTAIITSSGQLFTYGDGTFGVLGHGDTQGVARPKEVESLKGSRVKSVACGPWHTAAIVEVMSSFKGNAPSGKLFTWGDADRGKLGHADRKMKLLPTCVDSLTAYDLIQVSCGTAVTVVLTVTGMVFTIGSSRHGQLGNPKADGESICSVEGPLKTEFVREISSGSSHVAVLTMSGKVFTWGKGAEGQLGLGDYSNRSSPTLVEALEGRDVESVVCGFNFTAAICLHKTMSMKDQSVCSSCQMVFGFTRKEHNCYNCGSMFCSSCTSNKITMAALAPDTNRRYRVCDACFYQLQKVVDSSKDKSRLKISKGEMFKLELKAYTPKLSRLFKEANFFAEKMASVQGTNQRNEEPATAVQTKTERWGQVECPALFISAQDSFQTQPVSNSEGCAISFSQRMHDSAVLKSGVSLRFTDAQREEIEMMQTELQGQVKQLHSQVAVLTEQCQQKSVMVQLYKQKLDDTWLVVRDEAARCKAAKDIIKVLTDQCNALSEKLSIGQLSENSKITPNSIPMQPTKIELQGNTGRNLVTRKLGQLNNTQNHGSSIQTEKECVPLSNAVVPEDVPFSQQNGARKFSSDGYTTEAPLAAPPTDSVTEQIEHGVYVTFSTSSCGKKDIKRIRFSRKHFGEKEAQHWWEHNKTRVYDNYKVEQMATPSVTLSCSSTR

SEQ ID NO: 102650 - protein, 277 aa, Oryza sativa
  Clone ID: PAT_MRT4530_100152C.1.pep
MPLRAMLPLPLLLAALAVAAAAAGAPRPHPLDPLSAAELTAVRAAVLASPLVPARPLTFHYVGLDEPDKPDVLSYAYGGGGGASRHALPRRAFVIARAGGESHELRVDVANASSPSVLSHAVHRGAGFPTLTLEEQFAAVALPPKHPPFVESVRRRGVDMDDVLCAVFPVGWFGGDGEPRRSRVAKVLCFVAGATANFYARPLEGVTLVVDLDRMAIVGYRDRVAYPVPKAEGTDYRAGKAGPPYAGPAPAPGVVVQPEGRGFHIDGHVVSYICYSL

SEQ ID NO: 102651 - protein, 68 aa, Oryza sativa
  Clone ID: PAT_MRT4530_100153C.1.pep
MMRNCGLLVQSTVRIEVVRQLDIWIAEEADSDRIRGVHWGRRWVRETRQESGDAGRRLRKKAVSAQTN

SEQ ID NO: 102652 - protein, 374 aa, Oryza sativa
  unsure (1)..(374): unsure at all Xaa locations
  Clone ID: PAT_MRT4530_100154C.1.pep
MKLEHDFHMAIGEAEDNYANNSRLQRKALLKTKPVLDKAVRQVCMALHPRAMIVADLGFSVDANTLLFVSDVINTVADAQHHDELRCHPMELQFFLNDLSGNDFNQVFKSVKQFTKSIAASHPKGVALPPFYISGLPGSYYTRLFPCQSVHLFHSSYCLHWRSQMIKDMDQKMSDINGGNIYIAKSMPPSVVKMFQDQFQKDMSLFLKLRHQELVPGGQMLLTFLGRKKEGVLGXDLSHLCALLAEALQALVTEGLVEREKLESFNLPLYGPSIDEVKAVIALNKLFGIDHIQLFESNWDPYDDMENDGMCSSPQHGVNVAKSIRAVFEPLLASHFGECILDELFQRYARNVERHLAEDNTKYSVIVLLLNRKV

SEQ ID NO: 102653 - protein, 59 aa, Oryza sativa
  Clone ID: PAT_MRT4530_100155C.1.pep
AWTLFGAPLFFFWGIEKSGCLQTVGVFQVQHTHLEKYILKKRHSFSLFMKLQTEPSSAI

SEQ ID NO: 102654 - protein, 61 aa, Oryza sativa
  Clone ID: PAT_MRT4530_100156C.1.pep
TATRPRQLARRGQWCRPSSLNRRWRVPSPRCLPWVGGPAPSDPPPPVVVSLGERRTAWPEA

SEQ ID NO: 102655 - protein, 150 aa, Oryza sativa
  Clone ID: PAT_MRT4530_100157C.1.pep
LVFFFFFFFFFFFFRIISPLFYSTPYQTGQPKGITSSQHETLNGLGKEDLLGAHIIWGETSKLNGFERDPFGRYRRGAFGTPWTKTRPSSRAFGKRPLFSPALPLPFFPCPTRGSLGNLPGASASAPSRRCPPFCPCRAGRGRPGGRPGG

SEQ ID NO: 102656 - protein, 120 aa, Oryza sativa
  Clone ID: PAT_MRT4530_100158C.1.pep
MPNLIRDPGSPPPRPHRSAGAALMSPTLLLAVSRADHLLPRSLLDAAIGLLLPAAIPIDASVGTKCVRQETRKGSVLMVRRTQCMRKVVAVRRDPPAAATSLCRHHPDVAHPASRGEPRR

SEQ ID NO: 102657 - protein, 65 aa, Oryza sativa
  Clone ID: PAT_MRT4530_100159C.1.pep
MSVGIVLEGSTVRKRERGIIQVKGMPQAGSLPSQLGRRTPMAYIKKCPMPWAVSDPNGRPWVAPT

SEQ ID NO: 102658 - protein, 46 aa, Oryza sativa
  Clone ID: PAT_MRT4530_10015C.1.pep
GKNWASSWPCYPCQSDVVLNLLMNGGQKYINPFCKYEEAPSFGSKP

SEQ ID NO: 102659 - protein, 1136 aa, Oryza sativa
  Clone ID: PAT_MRT4530_100160C.1.pep
MGAEAEESLDHPGSLSGMSPATPDVAWKPAERRRRRSEADAEGSSCCSLSAATAAWVGAGNVESDDPSVRSVAAGEQSRSVSRPEEEEEECASCTQDSTVSPPVSECGDRTAQQEPSTQEYTVSPPPVSECGDKVVQQESSNQESTVSPPPVSECGDKIAQQGSSTRESTVLLPVSECCNKVAQQESSTQESTVSLPVIECGDKVAQQESSTQESTVSLPSSECGDKVAQQESSTQESTVSLPLSECGDKVAQQESSTQESTVSPPVSECGDKIARQEGAASAIPTPEKVEATPRRPRKRSTKGLTRFKIMKDHKAAQRTATPVEVKIKRKAKDNGRRPLGDKSVRRKLNFEGDAVDFEGNREFSRAKLMEDLRCLAKVHGLRDDLGAGKRSKKGKKRKKMTGEHQDNGESALVPYQKAPAATSSSALVPIQNSTQLAIVHHRNHLKNLRTKVLGLDEKTLQVYNVLRKWDETDSESFEGVDIGSGPEWNETRRHFEHYVDVFIATVHGLLGPRRFSEWGGSVTDSVVGTFLTQNVADNLSSNAFLNLVAKFPPTKRHINAEACSNLSLLIDDMRRKLNLNEQSNGTDSGSSDFTKPVDFEKENGYNEEVKGNYGRDYSTIIENFISIIEKHHKDMSTWDNARLENMVKDKSGTPVCSHRTLRKFMDTFEEKDTSHWDKLREEAYSKGYKIKGTGISDSADWEAVLHAPAVEIANSIAVRGQHYVIALRIQAFLKRVKKDHGNFDLDWLRYVPRESAKNYLISILGLGDKSVDCIRLLSLKHKGFPVDVNVARIVTRLGWVKLQPLPFSAEFHLVGLYPIMRDVQKYLWPRLCTISKEKLHINVYIVNIDCVLFPLHRQSAQKLSLPPAEGHGHEYGEEQASTATPGRLLLSNDSHIAGFQQVCQPQIKINMPAGRESIYKCEPIIEIPPSPEHEYEESPYEQELYEDDLCDIEDTIPELQYVLPDDHAILEEFEDRVPEDPCPYLLVVISCSDEHTVKGTILIPCRTATRGNFPLNGTYFQDHEVFADHSSSRSPITIPRECIWNLDRCIVYFGSSIQSIMKGQTRQDIEDCYKKGYICVRGFDRNTRYPKPICAKLHATNERNGTGENSRKKKKTSQEGKKIDDKSSFGKLEIN

SEQ ID NO: 102660 - protein, 199 aa, Oryza sativa
  Clone ID: PAT_MRT4530_100161C.1.pep
MARAEEDDNGSGGSTSCDGAKGAVTSAGDAVTTQLWCHIVISLRAIQPTTVVSLSRTHYSLATEPPSRPRSSLSNIVLSRRRATLSPSLWSCVDLAPSLLPCRHCLKRRRPLGHLAKCRVLLPSLLPRRATLAPSPLAAALCLGMVNLGVPGELCGRLLELGKQLLGRNPFELKKARPSCFWGTAPLKAWLSQASTATR

SEQ ID NO: 102661 - protein, 61 aa, Oryza sativa
  Clone ID: PAT_MRT4530_100162C.1.pep
MPKAEMTKDLQEIWPIHSERVVGKTARTASYETAISLRQPESTTDDADEETPTAAAAEPTV

SEQ ID NO: 102662 - protein, 65 aa, Oryza sativa
  Clone ID: PAT_MRT4530_100163C.1.pep
FFFFFFSRMEIYSGAHTEIVQWVQNKKLQLGNKITRERRERITGRTIELRTGIYILRKFYQAPRS

SEQ ID NO: 102663 - protein, 416 aa, Oryza sativa
  Clone ID: PAT_MRT4530_100164C.1.pep
MAAEICREEAAKSMPAAAAGATAIARRRRRVEGFRFAAGSLEPPQEDADAGVARCGKRQRVAGARAGAGAATAGPCRPSAGAEFGSRWWPRYGVTSVFGRRREMEDAVSIRPDFLRGSTSSGKHHFFGVFDGHGCSHVARMCQDRMHELVVDAYKKAVSGKEAAAAAPAWKDVMEKGFARMDDEATIWAKSRTGGEPACRCELQTPARCDHVGSTAVVAVVGPNRVVVANSGDSRAVLCRAGVPVPLSVDHKPDRPDELERIKAAGGRVIYWDGARVLGVLAMSRAIGDGYLKPYVTSEPEVTVTERADDDECLILASDGLWDVVTNEMACEVVRACFRSNGPPSPPGCSRPKAVLPPPAGASGGGGGDAVVKGVDKAESDKACADAALLLAKLAIARRSADNVSVVVVDLRRPVP

SEQ ID NO: 102664 - protein, 276 aa, Oryza sativa
  Clone ID: PAT_MRT4530_100165C.1.pep
MAAGGEAIPEERWKELVRSLGTEQLVDAIYVAIDDLSARERDTISPELWRRLGDRRAAYKNPFARDGLGSGCSAGEDEVEKIKTKLVAVVGEDGGNPRSDSSSSEAVVELLRALQAVPMTFETLEASKIGKAISGLRKHSSEQVRDLAAALYKSWKALVDEHLTRKPPAPPTKTASALGAADHANKANTAAPRKAACNKRKEAPALAPEMDEAKLEAARKKLRERYRDEETAKKQRKIQVIDAPGKARERPAVVERRGVVRRTVASHAPVAAFVRA

SEQ ID NO: 102665 - protein, 74 aa, Oryza sativa
  unsure (1)..(74): unsure at all Xaa locations
  Clone ID: PAT_MRT4530_100166C.1.pep
WRCSPANGAEWVPAAGSNGRGVDGVARTMANATASSAWXASGDEGEGDGSRALEGSGGLGEMGKKREGVAVVLK

SEQ ID NO: 102666 - protein, 318 aa, Oryza sativa
  unsure (1)..(318): unsure at all Xaa locations
  Clone ID: PAT_MRT4530_100167C.1.pep
MAKRGSHTSAAQGGGRTVDQVHPWPWARVHHVDGPDRPKRLRGAVAGHGHSRGWPDRPQRLAVRRRPDSRRRNAMLAREAADEGEKEEGGGSPRRAGDGGSGXEGDGGAPXWVDDAKGLPAVDGESEEADEVQHTTTKPTKVTASSDRGYGGDDCRPEAVNGYGGSVEVAARWWIGGVERWTACGVERVGGGGGVSAVVWGGEVEAEVQRATAKLLVAAAQCGDGGSGGGARLARGGRTVAERGGNGRGASGKAPDLTGRGWQPSAMAASAWKAGGRLLLVPLQCGCLSHSPNAYAPMQYQINTDDTFWIVWGNWKFD

SEQ ID NO: 102667 - protein, 86 aa, Oryza sativa
  Clone ID: PAT_MRT4530_100168C.1.pep
GGGGEELIHYDDGFKCKSKALRSDLSFHRYLLAAAMANKSKSGSVYPSFFFSPLVSLGLAGTTPTTFTLPLAPAAAGSFSNTNATP

SEQ ID NO: 102668 - protein, 56 aa, Oryza sativa
  Clone ID: PAT_MRT4530_100169C.1.pep
LADSCSCLLSLSGDPLGAQGNSKAISSPAKIPPAAMSTSASPSVAPSAEYAEVRAH

SEQ ID NO: 102669 - protein, 98 aa, Oryza sativa
  unsure (1)..(98): unsure at all Xaa locations
  Clone ID: PAT_MRT4530_10016C.1.pep
MAMXPPLFAAASHASLLLPSATIHSSTGSRRPFRXPLRSSRRPXXAAAAASGVPDEWGDRSPSAPXXPSQXDPPIDDDEWGRXDXSAFGXSRTVLVTK

SEQ ID NO: 102670 - protein, 148 aa, Oryza sativa
  unsure (1)..(148): unsure at all Xaa locations
  Clone ID: PAT_MRT4530_100170C.1.pep
RQQERGPAPTGGSHTSAAXRGRAHGGPSPPVALGARPPRGRPRSAQAAEGSGGRARAQPGLARPTTEVGGAQTAGQPAAQRDAGTGGGRRRGEGGGRRLTETCGDGGSXRRRETAALPWATTRRDSRQWMARARRQTRCSTRRRSRQR

SEQ ID NO: 102671 - protein, 90 aa, Oryza sativa
  unsure (1)..(90): unsure at all Xaa locations
  Clone ID: PAT_MRT4530_100171C.1.pep
GPDIAGPTHPFGYWLKKRMTPCLNERILSPLSXRCEAAHSCHDLEIGPGAAQGFNVGVEITTVRKVKAELCKNTAMIKADMMLLLFGAPR

SEQ ID NO: 102672 - protein, 67 aa, Oryza sativa
  unsure (1)..(67): unsure at all Xaa locations
  Clone ID: PAT_MRT4530_100172C.1.pep
RXPTHRLTRCXSSDSXLTRKLKHRRXKHTAPNSALRQIHTVTGXLXLGSALLSFCTMSFXXXVYITX

SEQ ID NO: 102673 - protein, 235 aa, Oryza sativa
  Clone ID: PAT_MRT4530_100173C.1.pep
MSTLETTRAELGLVVVYLNKAEARDKICRAIQYGSNFLSDGQPGTAQNVDKNTSLARKVFRLFKFVNDLHALISPVPKGTPLPLVLLGKSKNALLSTFLFLDQIVWLGRTGIYKDKERAEILGRISLFCWMGSSVCTSLVEVGELGRLSASIKKLEKEIGNKDKHQNEQYRAKVEKSNERSLALIKAGMDVVVAFGLLQLAPKKVTPRVTGAFGFASSLISCYQLLPSHPKSKMV

SEQ ID NO: 102674 - protein, 276 aa, Oryza sativa
  Clone ID: PAT_MRT4530_100174C.1.pep
RAEESARGFPPSSRTFRPPRCRHRRRRRIPPRSRLLPPVMGFTDEIVQVDVLERHLLAGLSHASAHASGEDEILYDASFEATEDKFVKYQITWWILLSVLLILAWGVGLLMLLYLPIWIYVCRKDFRSRKLCLTPHAIVYKVTRPATFPCFGVLRNEKHVVLHSVSDIVVEQGYLQSLFGIYSIRFENIGVRKPSSDDIKITGISHPHDFRKACFVQAVLVHLLNTSNLNLSRKAYVHDDQQSTSSKPITMSSVPPLGDLILEKLDEVEISVKKHG

SEQ ID NO: 102675 - protein, 127 aa, Oryza sativa
  Clone ID: PAT_MRT4530_100175C.1.pep
MGQLGTMSSVPQATRLHQFSLKAAILPQGSGRSMFWGKILGVSGLEYRCLRASVALLAPQENARELNKNKVDLHRQDQQPTERVHHGEHQTTHNHHRASSTIFTERSPGNYSKLLPPRLTSNNLAGR

SEQ ID NO: 102676 - protein, 143 aa, Oryza sativa
  unsure (1)..(143): unsure at all Xaa locations
  Clone ID: PAT_MRT4530_100176C.1.pep
RRNRGSRGPGRTRANGGRGRGRRRARRAPGRRAARTRPARAARGTTRRARRPRGXGGTAGPTPAGARRQPTASATTPTARAARGAWRAPATPGTAAPASATRARRRSTPARAAPPRAPPGGSAEEGXQRHPRHPRRAPQSRTP

SEQ ID NO: 102677 - protein, 74 aa, Oryza sativa
  Clone ID: PAT_MRT4530_100177C.1.pep
YRTHQMMCDALFIPLYIYEWYTQPRPPMTSSDFAWSAAVHRVDSTHGGRIETPPGPGPELGARQQSQHQTALDA

SEQ ID NO: 102678 - protein, 782 aa, Oryza sativa
  Clone ID: PAT_MRT4530_100178C.1.pep
MEAFAAAAAAAGVFAGAGAAARPVLLRRRGAPRSGRVRLLRAPPRAGGDRGGDLPPLDEWDRMELEFGRFLGEDPKLTLAKILLKKADPDASSLDVENLIANKKAKLDDILREFMDANRQEQTSESPEETSKPMVDKNSPSMSRPVQTNAKQDEPALTLLRPAGSKLKQDDPPLTLQRPAGSKPKQDGPSLAPLRPVGSKPKENNTSLTLVRPMGSRPIVRGKPVQDSWPSKGSLAARRESSDVGSTSRKNNVDVSLRKPTIHQSDDDELKSKLNLKPNIDLKMRKDMDEDLANISLLQKPELSVDNMNSNQEKSDAGPASVASGEDNGAVDPETNGLDERVVIDSINDRESSVLPDDLSAVSRMLAELPLIWQLLHCRKDLAVETFPSQVDAEKMNASENNMNYVDDGGNVLSSKLEDITESDWTRLENYASTGEKVEVELINCSSKGFVVSLDSLIGFLPYRNLATKWKFLAFETWLRQKGGDPSLFKQSVGIEESFEVNDRNIESVSSSDSELAVQDQGSMPSKEKFEDLLRTYNTEKSKFLSSFIGQRLRVSVVLADRKSKKIFFSMKPKESEELIQKKKSLMAKLNVGDIVECTIKRFVYFGIFVEVEGVPALIQQWEVSWDETLDPSVSYKIGQVVDAKVIQLDYNNNRIFLSLKDVKPNPSVGALEAVIGEELSLGGALEPAEADFEWPEVDALMEEMKNIEEVRDVYKGRFLRSPGLAPTFQVYMAPLVGQKYKLLARYGNNVQEVMVETSLDKEQLKEAVLACTNRLKIPGDM

SEQ ID NO: 102679 - protein, 100 aa, Oryza sativa
  Clone ID: PAT_MRT4530_100179C.1.pep
PRVRFMIGIGNRESRARQALSTMGASVFSGITLTKLVGVIVLRFAKSEVFVVYYFQMYLALVIIGFLHGLIFLPVVLSLCGPPSKVMKPLEQSQPSASSD

SEQ ID NO: 102680 - protein, 56 aa, Oryza sativa
  Clone ID: PAT_MRT4530_10017C.1.pep
PRVRPRVRQDRFLAFPAKHHASVLQIGGTNLNNLTNATELANAYSYHQINLDWGCP

SEQ ID NO: 102681 - protein, 55 aa, Oryza sativa
  Clone ID: PAT_MRT4530_100180C.1.pep
EKFDGTQLSPSDYMGCSKSYQLTKTLGSCFNNRIIGGGVLPEGYTNAIEEHAQYL

SEQ ID NO: 102682 - protein, 143 aa, Oryza sativa
  unsure (1)..(143): unsure at all Xaa locations
  Clone ID: PAT_MRT4530_100181C.1.pep
SKKGSHGGHSSHTHGTCNLTNQPTGVVQQVQQHLSTTLQPPTTTHKLSRGSLRYLTRRTAHHTHHRPSQHTHGHTVHTHPIQLWHIYXVGQSQTHTIXPTGAPVXGPLSLWPFXRDDGRVHPTYSWGASPGGTFPPLTEAVLX

SEQ ID NO: 102683 - protein, 165 aa, Oryza sativa
  unsure (1)..(165): unsure at all Xaa locations
  Clone ID: PAT_MRT4530_100182C.1.pep
FFFFFWXPKGPKIWNAPVININKAFLDAFITKHTCMLSXSNPIFTSPAXXSSSPGSGSRPQTHHTMPHRLCAQSPHASFCRATFSHTFTLSHSSQHIXTMGHHSASWXHAPTVHHTSCMQSVNHLTLPHLKSPNFPFHHTQQECQAHANHPNPHFPLAPYSVSQI

SEQ ID NO: 102684 - protein, 40 aa, Oryza sativa
  Clone ID: PAT_MRT4530_100183C.1.pep
MVASVINPALGQPPLLGCIVAGPRTFDGSHASWRVQHNAR

SEQ ID NO: 102685 - protein, 61 aa, Oryza sativa
  unsure (1)..(61): unsure at all Xaa locations
  Clone ID: PAT_MRT4530_100184C.1.pep
FSVRIPIQTPTLESGLHNREPXTKVATTTKASLHNSGVRKLVDTFIISNXKNCGTKVAAHG

SEQ ID NO: 102686 - protein, 106 aa, Oryza sativa
  Clone ID: PAT_MRT4530_100185C.1.pep
LACQIWQKGKMKREDVPEFLEQLEAAVERHEGVADVLLGVLDLLPVDERRGGVGAVLAEHVHELLPHLERRPPGARRRDVDPHRRWQMQHASASAAAAAPPFAAAV

SEQ ID NO: 102687 - protein, 88 aa, Oryza sativa
  Clone ID: PAT_MRT4530_100186C.1.pep
SCGFRGQARQERPRSSPTPSPPPRPPPPPRPPPQPPRPWRPPRRRPAPPPPAPRPPTPRAPRPRPPRPRAPRGAPTRRTPRRRGRRRP

SEQ ID NO: 102688 - protein, 426 aa, Oryza sativa
  Clone ID: PAT_MRT4530_100187C.1.pep
MLRVGRICSRSSTRAVSSFLVGPRHLIGHESPHFLGSKCCWTNRTGAIGFLNTKLNIGSYGPCLSTLTETILVQAHDPSLLALEIENAIDQQRFDDAWRAYEKHIHMDGVPRKSVLSKLITGFAETCDAHWLNQSYNVVNHAFEEKSKLLEKEPLIFLSLALARSSLPNLSINVVRKLIKMEAYPPVAAWSAIVAHMCQTATGAFLAADMVMEIGYLFQNNRVDPRKKSNRPLLLMKPNSLTFNIILTASLLFGTTKKAEQLLELMPRIGLKPDVSSLIVMARIYEQNGHRDEIQKLRRHVNEACGLSESELRQFYDCLLSCHLKFGDLDSAVDMILDMLKKGKNTKRSLEAAKAVLEAVENNKIYLPYEKTKPVNSGSSNKSVCTDSQMLNYISFFKDKSFARLELDARELLKLLSDKLQEQVGL

SEQ ID NO: 102689 - protein, 183 aa, Oryza sativa
  Clone ID: PAT_MRT4530_100188C.1.pep
MPSAPSTTRDRAARVLATGSRWSIATMRIVDDILDVTMSSDELGKTAGKDLASDKTIYPKLLGLEKSRGFAEKLLSDAREQLFSGFDQEKAAPLLHLANYITYIDRTEVMVTPLIIVDLIVDDIIDVTKSSEEVGKTAGEDLASDKTTYPKLLGLEKSRGFAEKLLSDAREQLFSGFDQEKAA

SEQ ID NO: 102690 - protein, 37 aa, Oryza sativa
  Clone ID: PAT_MRT4530_100189C.1.pep
MNTGPEDNSKDKVSVVIVAHSHCRKSGNYDLDTNGSN

SEQ ID NO: 102691 - protein, 250 aa, Oryza sativa
  Clone ID: PAT_MRT4530_10018C.1.pep
MPIRNIAVGSHQEVYHPGALKAALAEFISTLIFVFAGQGSGMAFSKLTGGGATTPAGLIAAAVAHAFALFVAVSVGANISGGHVNPAVTFGAFVGGNITLFRGLLYWIAQLLGSTVACFLLRFSTGGLATGTFGLTGVSVWEALVLEIVMTFGLVYTVYATAVDPKKGSLGTIAPIAIGFIVGANILVGGAFDGASMNPAVSFGPALVSWSWESQWVYWVGPLIGGGLAGVIYEVLFISHTHEQLPTTDY

SEQ ID NO: 102692 - protein, 95 aa, Oryza sativa
  Clone ID: PAT_MRT4530_100190C.1.pep
MTKLSPGFDSTLSPHHHAACVLLAFLVSPTLSGGESAHAHNLRSHDDRRLGACPPPVNRRTPLTYGLHSHYGRRINERRDNWRLNACPPRHCQCW

SEQ ID NO: 102693 - protein, 105 aa, Oryza sativa
  Clone ID: PAT_MRT4530_100191C.1.pep
MTKLSPGFDSTLSPHHHAACVLLAFLVSPTLSGDANCARHATTGESAHAHNLRSHDDRRLGACPPPVNRRTPLTYGLHSHYGRRINERRDNWRLNACPPRHCQCW

SEQ ID NO: 102694 - protein, 214 aa, Oryza sativa
  Clone ID: PAT_MRT4530_100192C.1.pep
MVPLENLRDMCGDIIEKATLARDLMVPIASQLISEDRDRYNDLHRHCVLAQDFTNFLQKLNKVSALDQVCTDMVTFGAIEAIALCERPSNALIVFRDEDSVAITVHRQEEVENGLYFAVPPLHLALPSCFIESKIIKNINTVVDAAEACDCAQPEPELPESYDNGDDHSSWSWRQKVTMEHHFSHQFYAVYRVRTLRTKARSGRSPVDGWSQFH

SEQ ID NO: 102695 - protein, 165 aa, Oryza sativa
  unsure (1)..(165): unsure at all Xaa locations
  Clone ID: PAT_MRT4530_100193C.1.pep
GXGXSLXWVRRFXTGNCKXXWISEATPRXXXGAGXXRXXCXAXXXRCSGXLXECXVTQTASPRGFHPXFXXXGRQVXXXXXESXDXDQXSXXXXWRXIXXIXXFGXGXYXXXXVXSSXREXSXXTXXWAIXDXXXXXXYGYEXXRSXXXXAXRGLXXPPEXRXXX

SEQ ID NO: 102696 - protein, 63 aa, Oryza sativa
  unsure (1)..(63): unsure at all Xaa locations
  Clone ID: PAT_MRT4530_100194C.1.pep
YLPSLVSSAAITDSRLIRGWCAAFSLWRSYHGMGWVXPPSPPLFPSPSWSFALVPCLCGAGPR

SEQ ID NO: 102697 - protein, 56 aa, Oryza sativa
  Clone ID: PAT_MRT4530_100195C.1.pep
GPGSKRSSLALSRSRALGGRGGLGMMGSESGRAVSSMFSLQLLFYILHLFIKLTLN

SEQ ID NO: 102698 - protein, 65 aa, Oryza sativa
  Clone ID: PAT_MRT4530_100196C.1.pep
RCPLLTRLRFYVETRFYVTLIVHSQRKLDAGVKIMRANRPCRARRRESIVGALAKIRKKRRWGIQ

SEQ ID NO: 102699 - protein, 861 aa, Oryza sativa
  Clone ID: PAT_MRT4530_100197C.1.pep
MAAATVGVLLRLLLLPVVVVVSLLVGASRAANVTYDHRAVVIDGVRRVLVSGSIHYPRSTPDMWPGLIQKSKDGGLDVIETYVFWDIHEAVRGQAQQYDFEGRKDLVRFVKAVADAGLYVHLRIGPYVCAEWNYGGFPVWLHFVPGIKFRTDNEAFKAEMQRFTEKVVDTMKGAGLYASQGGPIILSQIENEYGNIDSAYGAAGKAYMRWAAGMAVSLDTGVPWVMCQQSDAPDPLINTCNGFYCDQFTPNSKSKPKMWTENWSGWFLSFGGAVPYRPAEDLAFAVARFYQRGGTFQNYYMYHGGTNFGRSTGGPFIATSYDYDAPIDEYGMVRQPKWGHLRDVHKAIKLCEPALIAAEPSYSSLGQNTEATVYQTADNSICAAFLANVDAQSDKTVKFNGNTYKLPAWSVSILPDCKNVVLNTAQINSQVTTSEMRSLGSSIQDTDDSLITPELATAGWSYAIEPVGITKENALTKPGLMEQINTTADASDFLWYSTSIVVKGDEPYLNGSQSNLLVNSLGHVLQIYINGKLAGSAKGSASSSLISLQTPVTLVPGKNKIDLLSTTVGLSNYGAFFDLVGAGVTGPVKLSGPNGALNLSSTDWTYQIGLRGEDLHLYNPSEASPEWVSDNAYPTNQPLIWYKTKFTAPAGDDPVAIDFTGMGKGEAWVNGQSIGRYWPTNLAPQSGCVNSCNYRGAYSSNKCLKKCGQPSQTLYHVPRSFLQPGSNDLVLFEQFGGDPSMISFTTRQTSSICAHVSEMHPAQIDSWISPQQTSQTQGPALRLECPREGQVISNIKFASFGTPSGTCGNYNHGECSSSQALAVVQEACVGMTNCSVPVSSNNFGDPCSGVTKSLVVEAACS

SEQ ID NO: 102700 - protein, 98 aa, Oryza sativa
  Clone ID: PAT_MRT4530_100198C.1.pep
LPPKERFPEKYVALISGVPAVIHPGALILAVGKQSPPIFALYWDKKLQFSLQGRTALWDAILLLCHQINVGYGGVVRGIHIGSSALNILSVLDSDMES

SEQ ID NO: 102701 - protein, 57 aa, Oryza sativa
  Clone ID: PAT_MRT4530_100199C.1.pep
SCCVSRLLMGTDVVCSTVTSFVVLAWPLEHVRNFIICRMMHLYLKNYLTKKKKKKKK

SEQ ID NO: 102702 - protein, 164 aa, Oryza sativa
  Clone ID: PAT_MRT4530_10019C.1.pep
WPTSLRRRQPSPSPSRLRLLNPRRRRRRRGRRRRSRSHRRWPRPRRRARSSRRRRTSTGSSSSSSRLIGSGSTGGTAAEAAGARGGGCAASPRGSSSSRSASRSPPRAWPTSTTTRARRRSTFSRSPPRGSASGNSSAVSAMDVTAAVRVVSWNPNDRVSFDPT

SEQ ID NO: 102703 - protein, 50 aa, Oryza sativa
  unsure (1)..(50): unsure at all Xaa locations
  Clone ID: PAT_MRT4530_1001C.1.pep
MATSRSPTRRDGEELLRRTRIGSVVTAKAPPKREETGYWKSWXYHAKFAQ

SEQ ID NO: 102704 - protein, 726 aa, Oryza sativa
  Clone ID: PAT_MRT4530_100200C.1.pep
MKILVLSYTVAFPLSTSVRYGGVRVPNASVGPPKPSNLPRRTPRARRHATAREFTRLPLGGVPFASSAPAPGASPSLHRRSSALPTAPHAPRRLSPTAPPPTPPHRATADSAPPRRRLRPTTRRLRSSPRQIRWAAPSTPPHGAADDSAPLPPPFAASLSLRTASFCYAAAATATAHSSSVRHGIYGAALYANSSVPVPLYNASAAAGGVAPGYSSAFHTSSSFSSAPLQLSNLSSGPLFLSGPIDRAGQLSGPLDPAVPFSGPLPAKPPKPASSSSRGFSRRFRKPSFGSLRRSVSEKNRPCAVPLRRDDGVQWAHGRAGEDRVHVVVSEDQRWLFVGIYDGFNGPEAPDFLVTNLYRFLLRELRGIFYKEADADNKKLWQFLVDGDDDDSELDFSGSGRFALSLDRLKESRFHMWAHAAADESGREWGSRRLAPAPAVRDHAAVLAALTRALASTEAAYLDMTDQSMGTHPELAVTGACLLVALVRDDNVYVMNLGDSRAIVAQRPDDGDDGCVFGTMRRMEDVGVGLEIETRPGGCAIIGLKPLQLSTDHSTSIEEEVHRIKREHPDDDQCIVNDRVKGRLKVTRAFGAGYLKQAKLNNGLLEMFRNDYIGDTPYISCTPSLCHHKLTARDQFLVLSSDGLYQYLSNEEVVLHVENFMERFPEGDPAQSLIEELLSRAAKKAGMDFYELLDIPQGDRRKYHDDVTVMVISLEGRIWKSSGTYV

SEQ ID NO: 102705 - protein, 77 aa, Oryza sativa
  unsure (1)..(77): unsure at all Xaa locations
  Clone ID: PAT_MRT4530_100201C.1.pep
SLGFFEPRRTAAAVFXSLLFLKTSXFWHPLEGDLVCVPLLVKQRSVTLSGGRSGASLLXGLCVGAVGVRVVVYFFPF

SEQ ID NO: 102706 - protein, 43 aa, Oryza sativa
  Clone ID: PAT_MRT4530_100202C.1.pep
RSSPPPPRQRPPPLPPPPPRPAAAPPPPRLSSTPLRSRLILPS

SEQ ID NO: 102707 - protein, 122 aa, Oryza sativa
  Clone ID: PAT_MRT4530_100203C.1.pep
FFFFFSQAMLLETTMRIPRAMGVTVLDTLAIYSMRILPNFPRLLLDVGSSSSSCYVQITNRPCQSRFLPFSETAAAGIPVAPIVTLASIFGSFELVPNSCSPGDPLCCRAAAPRWGPSFCSL

SEQ ID NO: 102708 - protein, 760 aa, Oryza sativa
  Clone ID: PAT_MRT4530_100204C.1.pep
MATTYLVVEVISADIPSSSNTSQTNYSVELHFNSQSKSTTIKENVAVWNERFSFDMRQREDPSGNLILEAAVYCFDQMSNSKSLLGKVLLPEKYFHRHSANVDPMQYTLDNTEGVNAKVLLKLFLTDAVDRILLETEDRHTHQTEGNGLNGIYNYLFQTNYGYGKDQHDDPVVLETAGFDLMEINPNFEPGRLFERMQLLFVRVIKARKLPDMDANGSLDPYVEVKFGAYNRGVTRCFKRNKNPEWNETFAFSFQHDKIPSPTVDIVVNDKDLVRDDFVGKLHLDLKNIPKRSLDDVPLEPTWYPLLDQDGTKLAQASLLLAIWIGSQADEAYRHVGLSGYIPKVYENPNLWCLRVTVVEVQEPFFEDDLELHVIVANPGKDEVVIGQQTVPLSSIVKGGDEHDHFDVMPSKWFDLKNPDKPQFDSSVDDGNDNSSRMRICLKNMLDGRYRIVHDSKGYMDDTRPADRKLWRPPVGRVHLGILRATGLPLRMGKSTVNPYCVAKYGDKWVRTRTILDGPEHVFNEQHTWSVYDIATVLTAGVFDHFPHTRKAHREIGKVQIHLSCLETDRVYAHSYPLIILNRRGFKKAGELQIAVKLSSESFISLLGMYARSTLPKMHYEHPLTVMEEDKFRSEVAEVMALRFSRVEPPLRSEIVAYMCNATGGTSCWSSVHPDEIDEEFDSVESSCSIDLKVLVGIAGFYIMRHPRFRKKNNTPSIVENFFRRLPDKQVCRATSLVLVSWMCPCLCEYLASIVCGLNI

SEQ ID NO: 102709 - protein, 53 aa, Oryza sativa
  Clone ID: PAT_MRT4530_100205C.1.pep
MGPPELLRLAKKKATTVARSTLSSLRRKKREEAGGGGRGLGTDDRYVIRTILN

SEQ ID NO: 102710 - protein, 46 aa, Oryza sativa
  Clone ID: PAT_MRT4530_100206C.1.pep
KKGLLRQRTRLMVDRVHGGGSRKRTAEIDLSKTDSQDLTVYDRSTT

SEQ ID NO: 102711 - protein, 152 aa, Oryza sativa
  Clone ID: PAT_MRT4530_100207C.1.pep
LFFGQAPTIWEQGDFKNAIRYKGLAAQSRFLVPVMLRECGKAVLRGIDSLVDVGGGHGGACTDIAAVFPHLKCSVLDLPHVVGGAPSDGNVQFVAGDMFQSIPAATAVFLKTGLHDWGDDECIKILKNRRQAIFSCDERGEVIIMDMGAGFD

SEQ ID NO: 102712 - protein, 83 aa, Oryza sativa
  Clone ID: PAT_MRT4530_100208C.1.pep
MPSVYDDVLMVYANNSNQHQHQDILPDNMDDKLGISPYTQKDRLYVEDDKGYAKHGLSPYTTSCCLRQEDESLRCKRQARAAT

SEQ ID NO: 102713 - protein, 53 aa, Oryza sativa
  Clone ID: PAT_MRT4530_100209C.1.pep
SIKYPFQFPAATVAVALCCRRPQLCAAAVVLPSTRRIYHQRQLRRHAAEPNRH

SEQ ID NO: 102714 - protein, 105 aa, Oryza sativa
  Clone ID: PAT_MRT4530_10020C.1.pep
FFFFLTTQIHRSLISQIHILHKINHPQQHHTSTTTSQKQVLTSSSSALHQPARQCRDNPSGPPPATVLPSTRPTAACHLLPPIGKGRGLRGGEGIGKGVKRMSGG

SEQ ID NO: 102715 - protein, 200 aa, Oryza sativa
  unsure (1)..(200): unsure at all Xaa locations
  Clone ID: PAT_MRT4530_100210C.1.pep
NRTWISDIRGGLGIQAILEYLNLWSIIQAVDRTATEPDTLLWRWENSGNYSKSAYQALFFGRIQFQSAPIWNSLAPPRCRYFLWLVALNRCWTADRLRSRGLPHPLXCVLCDQHEETIDHILVACPESRQXWWWALRAIRLQDCLPINEASFHTWLCSAREKVHKPHRRGFDTIATLIAWTIWKERNNRVFNNESRTWVD

SEQ ID NO: 102716 - protein, 716 aa, Oryza sativa
  Clone ID: PAT_MRT4530_100211C.1.pep
MKQERRRKRQPGPPRLELVVAHPREEEMAGLDGGGDAEEGATHARGGGGAPPPWREQLTARGLVASLAVGAMYSVIVMKLNLTTGLVPTLNVSAALIAFVVLRGWTQALARLGFAARPFTRQENTVVQTCAVACYSIAVGGQDHPPLHPSSIRRLPSLMEIPTDWFFGSFCAGGFGSYLLGLNKRTYEMAGEDTEGNVPGSYKEPGIAWMTGFLLAVSFVGLLALVPLRKVMIIDYKLTYPSGTATAVLINGFHTPHGDAMAKQQVNGFTKYFAMSFFWSFFQWFYSGGDNCGFSQFPTFGLKAWQQTFFFDFSLTYVGAGMICSHLVNLSLLLGAILSWGVMWPLISDLKGDWYSADIPESSMKSLQGYKAFICVALILGDGLYNFVKIVALTIKNLFDSSKLKNAKKGEDMPVLDELHRNEVFTTDNIPSWLAFSGYLGLTFIAVIAIPMMFHEMKWYYVVIAYLLAPALGFCNAYGAGLTDINMAYNYGKIALFILAAWAGKDSGVVAGLVGCGLVKSLVSISADLMHDFKTGHLTLTSPRSMIIAQAIGTVMGCVISPLTFFLFYSAFDIGNPEGYWKAPYALVYRNMAILGVEGFSALPQHCLQLCYGFFGFAVAANLTRDLCPPKYGRWVPLPMAMGVPFLVGASFAIDMCIGSLIVFTWHIIDKSKAALMVPAVASGLICGDGLWIFPASLLALAKISPPMCMAFRSTN

SEQ ID NO: 102717 - protein, 646 aa, Oryza sativa
  unsure (1)..(646): unsure at all Xaa locations
  Clone ID: PAT_MRT4530_100212C.1.pep
IAKRKLLKAATEHAVKNHDGTTVDAEARRENHGHTAYAAEEAAGSEESVEREGGGDGGAEGEEGRDAAAEGGEEGKEEEEEADRGEERGLEEELKRASREKGFVKGTPNQAVSISLILEGTDVDAKAKTGTLKCFAFLLKAVPELFKXTAEGRIRKSAPNVFILVPTRELCQQVHNEASSLLEFCTSKLKVVQVNASMSDKDIKVALSGPPNILVTTPACVASCISKGIIRGSSIKESLSMMILDEISCDAKDKMLYILVLLKLELIQKKVLIFVNSIDSAFKLRLFLEKFGIRSSVLNAELPQNSRLHIIQAFNARLFDYLIATDDNKSKEERQANKGNKKDSRVSRKQLQQTLDAEFGVVRGIDFKNVFTFPFDLLFLKQVVNYDMPPDPAGYVHRVGRTGRANKTGASISLVSPKENGIFEDIENMLKDVENRDTSCISPFPLLTKNAVESLRYRAQDVARSVTTRDIKEARRQDIKNEILNSEKLKAHFDENPRDLDLLKHDKLLSNKEIPAHLRDVPEYLIDPTTKEASNVVKLSRAAMDIDKPRRRKRMGFKGGSGRSSDPLKTFSAELQMDAFFQLHMRSYGNMAVLKCSGLVKYANGSAVRCSLKAYYLWGNHGGEGGRKETENRIEERGRRWKANLL

SEQ ID NO: 102718 - protein, 404 aa, Oryza sativa
  unsure (1)..(404): unsure at all Xaa locations
  Clone ID: PAT_MRT4530_100213C.1.pep
MFGTPASSPLFGTPSTTPAFGAPSSTPAFGTPSTNPAFGTPSSTPAFGAPSSTPSFGTPSTAPAFGTPSSTPAFGAPSSTPXSGRPSRPRRSAWRRRRRHRRFGFQQQMTPSPSPFGFAGGGGGQITTQMAPVAPLPLSPSDRDIQAIVDAYKEDPGNPRYAFRHLLFSVTEPSQRVKPVAASDIMWAEAMGKLEGMDSSDRERLWPQLVQGFKDLSYRLKLXDGVLVSDSDRLSMTRDNVKKLQRHFQADTYPWIQRLKQQEFXLFERRLLRIMRIVEALENRGYRIPLTKEEADLYERLAVIAKQLKGPTGDLHRRVYNLLSTSRLLASAGGTAGPIYIPSSAKVDEQSVAELLEALQQQTEAVAKLGNVMKRDTRDLEIILSEDTDMAEDSVGRRALKMYN

SEQ ID NO: 102719 - protein, 48 aa, Oryza sativa
  Clone ID: PAT_MRT4530_100214C.1.pep
IKANNSKTLRFLSIQENILSLTNLSLNNNITTFPKHFFQHTYIYMMQI

SEQ ID NO: 102720 - protein, 29 aa, Oryza sativa
  Clone ID: PAT_MRT4530_100216C.1.pep
SCKDTTYEVFNIPSVMFISITLDGKIPSF

SEQ ID NO: 102721 - protein, 77 aa, Oryza sativa
  Clone ID: PAT_MRT4530_100217C.1.pep
QNRSSRMMKKHFRHACSVTQSFSTISFALFLLLFTRYLEAILNLKPPTNRFFLNKFSQYIFNKLSPIICLSIYVRTY

SEQ ID NO: 102722 - protein, 739 aa, Oryza sativa
  unsure (1)..(739): unsure at all Xaa locations
  Clone ID: PAT_MRT4530_100218C.1.pep
ESNSKENSVSSSSSPIESSGPFVYYPTPPATKDDTGLCEAFYHSVKDEADGSVEYTIHVNHLCDTASAFAETMLTDRMNIQEDGRNQENGAKXAKNVQILRSGKGKGIXGIIDLVKLFESVIEASCRSGELFEWKAHKEQSRKGHKFMQLELNQVRKETPRYKEQEEVAVMNRSQVIIKXDLVPKRKLRSKKYFFPRNGLSFFQKNSGINIAXIAQAHGLGQFDVSTVTAISXIECSRNWDANLSFDLISXENSRRAYSGMFIPYLWNALDIFRKQMCIPLSVAMFCNLLKLERIXTSGIFLLGKIAHAANHEAEERRIGAALEKEEDCVAWDRELQQAQEELQQLNNKLLSKSDVKQNLDTNLRRLRSLKSELATYVQNVISEEAEGLVKEHGPDDAQQISGPVKEALASAQKELEEVRANIEKAKNEAKLFKLAATTLRSEMDNEKSSLVELQQREGMASIAICALEAELNRTKQEIEYVKSKEEDAQERMVELPRILQEAAQEAEDAKMVAFSVQEQVRKAREETEKTKTAAATVNTRLSAVLKEIDASKASKKLAFAAVQALQESEEAGDDENSPRGVTLPLSEYYTLSKKVHEAEQLAHESVTEALAQVESAKASESNSLERLCEASKRMNEKKEALERALERAERANQGKLTAEQELRKWRADHEQRRKAQEAAKRAVNPLSSSPKRIVEQKDSFYKEFSGNSYEDLVPNRKLRRKKSFFPLMGSLLSRKTRA

SEQ ID NO: 102723 - protein, 112 aa, Oryza sativa
  unsure (1)..(112): unsure at all Xaa locations
  Clone ID: PAT_MRT4530_100219C.1.pep
GXXRPSFRERVTTAPGXPEKPXETXTXGSPHREVQLVRDEXEQHAQHRAHHDPPQRXMLPQXGTLSTXRRRXGLXXTPAXXTRSGPVISASSATEPXGNASPPLPTYSSSSA

SEQ ID NO: 102724 - protein, 90 aa, Oryza sativa
  unsure (1)..(90): unsure at all Xaa locations
  Clone ID: PAT_MRT4530_10021C.1.pep
GCVPVSPLLPPLLSPPLFPPLTRERAPDSPQDSAMKGANPRARKXDASXCKSKAXEAAQGGRGGGRPTSKGPRFFVYXGRRVRETQDNFV

SEQ ID NO: 102725 - protein, 79 aa, Oryza sativa
  Clone ID: PAT_MRT4530_100220C.1.pep
IKTLRLEDLCKPCNCSLSYTGRSHHVAYCEGHVTTEQNIEGQSFQYCTQHKQFCLRVLTSLAYEHSRTSTYLVCVVTTA

SEQ ID NO: 102726 - protein, 68 aa, Oryza sativa
  Clone ID: PAT_MRT4530_100221C.1.pep
MATVTQGGLEDQYVEMLRRHLRSCSGVCATDGGALARRYERNRVETTLRTTPKKRREKPIEVKPHESN

SEQ ID NO: 102727 - protein, 454 aa, Oryza sativa
  unsure (1)..(454): unsure at all Xaa locations
  Clone ID: PAT_MRT4530_100222C.1.pep
AAAPPPSSPTPGTPVSPPPPPLPPPARAAAAAACRGRPLPPXHGPPPALESPPPFPLPPLSPXTSPPSRRTPPSPPSMALRAHRPPPPXAPPQIPLSPPPHAPYLNPPRPPXPEPPLPPPPPPPKPKSPPGLVPPPPPPPPAPVPPPXPPPSDPGGPRPAAXPPCSSPAPVPSPPASSSAAPAAANPGCPPPASPPTAPAAVVEGQRSPTPRAHSPDPPPPLRAGHRRXPQPLPRAADPALPKAAPPNPPXPTPSPPPSPPPTRSSPTTSSPPTPVARSPMTPSVPXDLPAPPTRPRGPPPHRMASPLPRSTPPALIPASPPPLPLPPXTATPVVVPPPVPVAPPPPPPPCDLPPEMESLPPPLTGPSPPSPTPSRPRRRSPTSGPPGSGRTGTLVARTGEPPFFNPSSSRRHASGAAARCPGLRHTFIAVPHGSPSCTLPTRVPYCQACAHRV

SEQ ID NO: 102728 - protein, 49 aa, Oryza sativa
  unsure (1)..(49): unsure at all Xaa locations
  Clone ID: PAT_MRT4530_100223C.1.pep
YAYCQQLQLQQVGVVYFDQTQTQAQALLALXNLPSICGIYPNYYICSEE

SEQ ID NO: 102729 - protein, 140 aa, Oryza sativa
  Clone ID: PAT_MRT4530_100224C.1.pep
GWWPLLLPSPPCDRNSGCGSPARPCCASSSASGCRRTSPDPCAGGAVLRLPRLDCSGDTARRAMRSSLGDGVAAATINRSSTTSTDTKPTPTPFLHSRATGVWPDRYPGCAHGSRPSSIRPRLVVTPVKPPLAVPASATH

SEQ ID NO: 102730 - protein, 129 aa, Oryza sativa
  unsure (1)..(129): unsure at all Xaa locations
  Clone ID: PAT_MRT4530_100225C.1.pep
MDCSGDTARRAMRSSPGDGVAAATINRSSTTSTDTKPTPTPTPFPHSRATGVWPDRYPGCAHGXSRPSSIRPRLVVTPMKPPLAVPASATPSLPFPMAFLAVHSLTGCRGMASGHGRLPTPTRIGSRRP

SEQ ID NO: 102731 - protein, 138 aa, Oryza sativa
  Clone ID: PAT_MRT4530_100226C.1.pep
MVSGLVAYGKKPSTDLGRPLLPPYSLAPTRHQCSFSPQSSSASTRAVPLPPRVLPSSCSSSSSSRSTPASPSSSTLPRPSPLWPSSASPTSTSTTPCSQLWTSRSASVSTTSASSSCFGTVRYPPLSPTTATSLSPPT

SEQ ID NO: 102732 - protein, 126 aa, Oryza sativa
  Clone ID: PAT_MRT4530_100227C.1.pep
MVDEAGRRGGGRSTLGRWTSATGELAAGEASMGGRRAHSGRSRQRQWHRPRAAAGKAGRGGGIGRERRQAKQVGAAGRRGCIVLKVLAGVIPLLPQRLLVDIVVGEGGEDAGRAPPSSSSMLSSSS

SEQ ID NO: 102733 - protein, 145 aa, Oryza sativa
  unsure (1)..(145): unsure at all Xaa locations
  Clone ID: PAT_MRT4530_100228C.1.pep
TQDDAAAGTTPSTRPPPDPPXGVAPPHRRAATATPPPRRAAADPPPCQATTAPPLRRAATIPPMPPPPQPXPPPRRAAADRPLHLATTARQLLHKEGGGRKFLLGRRRRSLPPQAGVGWGPLTLGGSGRSPCWPCPRTQPAWPQP

SEQ ID NO: 102734 - protein, 54 aa, Oryza sativa
  Clone ID: PAT_MRT4530_100229C.1.pep
VSRFINIYMNVDNIRKFYNLKRSSISHSSRSNSKSPPAGSIDLPLTDTACSPGI

SEQ ID NO: 102735 - protein, 178 aa, Oryza sativa
  unsure (1)..(178): unsure at all Xaa locations
  Clone ID: PAT_MRT4530_10022C.1.pep
SPGVADRWGPAVGXSPTSRPRRRANNRCRAHVGHARACAASPAPTSPSLPPAPSPTPHVGRRIPPIPATSEFPLPNLSSAATPPLFFPISPNSLMLPIAPAPCTHPSLPLPLLQPPLAVARLAAAPHRRRRRVRVAKVHTVHTSSVEGISELVRPPPLSSRGFPSTFAVVLLRAGHSR

SEQ ID NO: 102736 - protein, 102 aa, Oryza sativa
  Clone ID: PAT_MRT4530_100230C.1.pep
GLRPTARMVSAAAAASSLRCFPPSLGNRGPGAATARGGLVRLSSRRARSTAGVAAPSREAESAVSLGDLTRGDLPILDQEFDGSKLGYFDNGATSQKPFCVM

SEQ ID NO: 102737 - protein, 47 aa, Oryza sativa
  Clone ID: PAT_MRT4530_100231C.1.pep
KHKRDSHFYTRYLGGLLSNILIDATDMRSKIFLKNGQPADGRGFFNP

SEQ ID NO: 102738 - protein, 62 aa, Oryza sativa
  Clone ID: PAT_MRT4530_100232C.1.pep
LTPPRDCPWGGFFLFPALKKGFPLFFKKKKKKKKNKKKKKKKKKKKKKKKKKKVKKKKKNLR

SEQ ID NO: 102739 - protein, 82 aa, Oryza sativa
  Clone ID: PAT_MRT4530_100233C.1.pep
FLFFKKQLNRPYSIPTGSGVAKVLRFTSLDPAAVQQKHNNKQQQQQQRTRVGDARTRARRQIGGARADRPGHCGRRADEARG

SEQ ID NO: 102740 - protein, 211 aa, Oryza sativa
  Clone ID: PAT_MRT4530_100234C.1.pep
MKRRKTLNRAASSSSDEPGLGRWTCYHGEEEEEEEKPWLPPADKSSESIREYVAEAARRLPLEEIPEIVDCVGAVGYCFGLADPVTNIILNAVAHLAAGGAEDLPPPPKKRTRRTYSRGWGQARHYLYLASYDLLLAIELVHHDRRRCLPRPSLLPDDGRMKIALRIAAVQADHPAPDKLVQTMTAQYPSHLLSPIMDKLRGSELLTSHHP

SEQ ID NO: 102741 - protein, 203 aa, Oryza sativa
  Clone ID: PAT_MRT4530_100235C.1.pep
MEVAMNKLFVMCMCSSARELVGVMCTDAGWEGGESLGWEGLRSDLAFVAFVGLGAMEIFVHGFLSLVDLLGTRRGEREKRSRSPPLPRRAFVPAPSDSGALSGHYSAGARRPPLGEPPSVASSTRTGFARSSQFSPVEQFGGWCGESASSGGSDDESYGTKEDSLLRQCDSHGSCASLGGSPNAPTHGLCVSGSWREMMAMPL

SEQ ID NO: 102742 - protein, 236 aa, Oryza sativa
  Clone ID: PAT_MRT4530_100236C.1.pep
MEGRHTEVTARSSTLLDGSAVGSACEEGPRMMCSNFTSSFKGVDKGQDVQIIACDGWFGIAVRVGQLVQRLMRCGRASQFDPATDKLSVGFDAGSSRRRRHARSHRRCRIHRGKSSAPSSPSDPPREAVSTASGHGKRPAPLVLPDLPAGSRHTKRRHQEGRRGGEGVAERGRQRRSGTTGRERGREGERHHQEGWGGVRRRRSDAAGRDRGGEEERRHRSGRGRAEGGAHGRVKV

SEQ ID NO: 102743 - protein, 177 aa, Oryza sativa
  Clone ID: PAT_MRT4530_100237C.1.pep
MASSPTSTAPHDRKLDPAASPAARWRTRREQESYSSKLLDALRLVRAASGRPSPASSREVRHAADRALAVAARGRSRWSRAILASRARACALRRVRLGAPPPPPAARPAPRSRPPLASKAKVLGRLVPGCRKLAFPALLAEASDYIAALEMQVRAMAALAQALQSVAPAPPPPPSSS

SEQ ID NO: 102744 - protein, 77 aa, Oryza sativa
  Clone ID: PAT_MRT4530_100238C.1.pep
MAVIGGAAGWRGMQELGRRSTISSRASLACRLLLVFIQKTKEEDGREHRRDQKAMDGAWWLALDDLDTTIASNWLYY

SEQ ID NO: 102745 - protein, 149 aa, Oryza sativa
  unsure (1)..(149): unsure at all Xaa locations
  Clone ID: PAT_MRT4530_100239C.1.pep
MLPQQQQQQKQQAAALMPPSIVXKPPTSTLHHQHHPFLAAAPPQQQIEPILTGNLPPGFDTSTCRSVYVGNVHVQVTEALLREVFQSTGLVEGCKLIRKEKSSYGFVDYYDRRSAALSNVTLNGKQNFXCSLLRVNXWAYASGQREDTT

SEQ ID NO: 102746 - protein, 115 aa, Oryza sativa
  Clone ID: PAT_MRT4530_10023C.1.pep
TKILQFKEPLTLGTEKKEMTKQAFLQIRGNPEKSHMAGEAPKTIRANPTDPSTMQPRKHKQASQSSKNLRPFRQGSSKNSSKGGSFTPQDAAPCSNPLPPGFRPRKLLRSIQQGQ

SEQ ID NO: 102747 - protein, 93 aa, Oryza sativa
  Clone ID: PAT_MRT4530_100240C.1.pep
MVDDLLQLRRADVVRQVEGGAKVVSFGTDQLAHHAASAAALLLLVLIRALHLKNRKQAAAAAAAAGGRGGGSSGRRRRRRQQHNTPHPTRGYD

SEQ ID NO: 102748 - protein, 30 aa, Oryza sativa
  Clone ID: PAT_MRT4530_100241C.1.pep
SCFETQSCGCHGRSTRRVSILIVYLSYLLP

SEQ ID NO: 102749 - protein, 66 aa, Oryza sativa
  Clone ID: PAT_MRT4530_100242C.1.pep
HVSPNSEMKPSEVKLAFLSLPLMLLPFTSQEIILYDSRNIILQNCHYLSGNNLDEFCECISHFLFL

SEQ ID NO: 102750 - protein, 201 aa, Oryza sativa
  Clone ID: PAT_MRT4530_100243C.1.pep
MEGKAAVTTSTEHGDGEASRTAARTVVSGSSRGGAASRALSVADLILRVVAVVAIVDSAIAMGTTNQTLPFFTQFLRFKAQYSDLPTLTLFVVANSAVTAYLVLSIPLSVVHIIRSRASYSRLVLIFLDSVMLALVAAVASASAAIVYLAHKGNVRANWFAVCQQFDSFCERISGPLIGSFAAMAVLLLLVLLSAAALARR

SEQ ID NO: 102751 - protein, 141 aa, Oryza sativa
  unsure (1)..(141): unsure at all Xaa locations
  Clone ID: PAT_MRT4530_100244C.1.pep
GAGSSPGAPPPSLPGSSAPAPPRRSPPRPAGTASPPPPCPRRRRSRAPPPPPPPPPAPRRPPPTAPSSPXTTRTPTRRAPPPSPPTARTPSGSAAAAPSGAPPAAAAAAACPRAPASPPAAPAPSPTRCLSPPPRRRRAAS

SEQ ID NO: 102752 - protein, 76 aa, Oryza sativa
  unsure (1)..(76): unsure at all Xaa locations
  Clone ID: PAT_MRT4530_100245C.1.pep
SGSRSTSVGSRRRSGRRGDEAGPTGSREAGRHRAEIFNRRGGRGGGGRVLDRPLPVARRRRRPSSXPAMAXGPGVR

SEQ ID NO: 102753 - protein, 41 aa, Oryza sativa
  unsure (1)..(41): unsure at all Xaa locations
  Clone ID: PAT_MRT4530_100246C.1.pep
FSFCNXYMTHKACREKLITHQARTEPGFYSETLNRXLXSDS

SEQ ID NO: 102754 - protein, 876 aa, Oryza sativa
  unsure (1)..(876): unsure at all Xaa locations
  Clone ID: PAT_MRT4530_100247C.1.pep
MARMRCFLLEEGETADLKDTLQLLTWTFWNRTLFLNFLFMLAFFLITVSGASWGFLLLLYVFVQISRILVVVILYPLLRHFGYGLDLKEATILVWAGLRGAVALSLSLSVKRASDAVQTHLKPVDGTMFVFFTGGIVFLTLIFNGSTTQFLLHLLGMDRLAATKLRILNYTKYEMLNKALEAFGDLRDDEELGPPADWVTVKQIYHMLEXTWTHAPVHPHAVSDRNDRMHTMNLRDIRVRLLNGVPRVYWGMLEEGRITQATANILMRSVDEAMDLVPTQELCDWKGLRSNVHFANYYRFLQMSRLPRRLITYFTVERLESGCYICAAFLRAHRIARRQLHDFLGDSEVARIVIDESNAEGEEARKFLEDVRVTFPQVLRVLKTRQVTYSVLTHLSEYIQNLQKTGLLEEKEMAHLDDALQTDLKKFKRNPPLVKMPRVSDLLNTHPLVGALPAAMRDPLLNSTKETVKGHGTILYREGSRPTGIWLVSDXGVVKWTSQRLSSRHSLDPILSHGSTLGLYEVLIGKPYICDMITDSVVHCFFIEAEKIEQLRQSCPSIEIFLWQESALVVARLLLPMMFEKMATHELRVLITERSTMNIYIKGEEIELEQNFIGILLEGFLKTKNQTLITPPGLLLPPNADLNLFGLESSAINRIDYCYTAPSYQVEARARILFVEIGRPEIEADLQRSASLISQTLELPRTQSKEHSGLLSWPESFRKSRGAQNGASLTEIRDHPASFSARALQLSMYGSMINDMKSGQGQGQRRQRHRHTKASSNKAHSSSYPRVPSRSSNTQRPLLSVQSEGANMTTARQAAAAGASLPPEPEEAGRRRRRQRKAIEEDEDNSSDESAGEEVIVRVDSPSMLTFRQPSSAADR

SEQ ID NO: 102755 - protein, 53 aa, Oryza sativa
  Clone ID: PAT_MRT4530_100248C.1.pep
VDPWASARERQGHPTFMRVLYNARGAPLTLLLCLFLVTYLKLFYLLKPTLLPT

SEQ ID NO: 102756 - protein, 494 aa, Oryza sativa
  Clone ID: PAT_MRT4530_100249C.1.pep
METSPPHRKPRLPPPPPEGDPTASAVGASLESLPGELLENIVSRLSLRDAVRTSAISRSWIHRWESAPDLRHYWPRRSRPDAICAVLARYSRSVGQFCTWGIRADAFPHIDEWLPLLAAKGVQTLTLSFWDYSDVNVEYYTLHPAIFACGQLTSLHLERCFLPTAPEGFGGFPNLTLLSLVYVGLPENGERKLEAMIRMSPSLVSLELSNVEVTDDDFEDWIIQAPNLERLTITSDIDYGWQIQDLPSIQDANINIEDYSIDRDFVKLLTSLAQVGELELFIPKLRSLTLHTNFYKASSILSTFGLLTRAPNLLHLEIEITDHENQSDEVDIDFLNALWTNSLFANLDFVSIKSATCWSNEMRFIEFVLSKARLLGEFYIYHDDTGSYSKPREEAIIELAKYKRASPKAKVFFRDMESFLLRFEKLTRVLLKAPKPTNQIFASPASIVVLLAKRMWNEKGETTGGYMAVLMRIETQRSTLCTFDPQEVHMIIMA

SEQ ID NO: 102757 - protein, 50 aa, Oryza sativa
  unsure (1)..(50): unsure at all Xaa locations
  Clone ID: PAT_MRT4530_10024C.1.pep
PATSHKFISFTRSCLRFGISTXNHVLGDMACLVFVCPFRMXXXLPAWNIP

SEQ ID NO: 102758 - protein, 344 aa, Oryza sativa
  Clone ID: PAT_MRT4530_100250C.1.pep
MAVSSPAPSSLHVPMAAAALLGMLMMMSSAPEMKVEAAGGLSVGFYAESCPKAEAIVRDTVTKAFEKAPGTPADLIRLFFHDCFVRGCDASVLLESTPGNKAERDNKANNPSLDGFDVVDDAKDLLEKECPHTVSCADILSLVARDSAYLAGGLDFEIPTGRRDGFVSKEDEVLSNVPHPEFGAKDLLKNFTAKGFTAEEMVTLSGAHSIGTSHCSSFTNRLYKYYGTYGTDPSMPAAYAADMKSKCPPETAAQQDATMVQLDDVTPFKMDNQYYRNVLAGNVTFASDVALLDTPETAALVRLYAAGDPAAWLARFAAALVKVSKLDVLTGGEGEIRLNCSRIN

SEQ ID NO: 102759 - protein, 134 aa, Oryza sativa
  Clone ID: PAT_MRT4530_100252C.1.pep
AGNWRRAMARSLLSRHLPSWPPASSVPAASMPACHNHHILLQQRAIHLPIEALQPWHAMEKMSCLLILAIEVAATNTLLGGSGTHRSTSFVVVPVHRRRQELAPRRRHHNSSHTCLPELLSEAAVHRNHTGLIG

SEQ ID NO: 102760 - protein, 68 aa, Oryza sativa
  Clone ID: PAT_MRT4530_100253C.1.pep
LKLYNAPPLFFFFFFLKSKFKKLAAVLFKAGFTNPKKKYFQQNPKFSIHPTHLPNSQLSPTKITQNTS

SEQ ID NO: 102761 - protein, 166 aa, Oryza sativa
  Clone ID: PAT_MRT4530_100254C.1.pep
MDGPGSLPYGDDGNGCTWADLASPIYGGGGEVVDDGITVVDDGITCDFLLKLLRAGSMVGADAALLHELESRAAVVSLCRLRALGSKNRDDDPDGVASTSSLEDEAVHNHYQTTKAGCIFLKTTIREDVRTACVYVESLTKELVFTTKDVTQLLVKGITANIILLI

SEQ ID NO: 102762 - protein, 67 aa, Oryza sativa
  Clone ID: PAT_MRT4530_100255C.1.pep
HQSNYTDINIVHAIVQQLQLQQFGDLYFDRNLAQAHALLALNVPYRYGIYPRYYGAPSTITTLGGDL

SEQ ID NO: 102763 - protein, 514 aa, Oryza sativa
  Clone ID: PAT_MRT4530_100256C.1.pep
MAGGVSDGGAAHGASGRLESILSDSSMPLARRAWAATTIELGLLTRIAAPAVVMYMINYLMSMSTQIFSGHLGNLELAAASLGNNGIQMFAYGLMCQILASFAMINFGKLGMGSAVETLCGQAFGAHKYDMLGVYLQRSAVLLTITGVPLAVIYGFSEPILVFMGQSPEIARAAAIFVYGLIPQIFAYAINFPIQKYMQAQSIVLPSAYISAATLALHVLLSWVVVYKVGLGLLGASLVLSISWWVIVAAQFAYIVTSPTCRHTWTGFTWQAFAGLWDFLKLSAASAVMLCLESWYFQVLVLIAGLLPNPELALDALSVCMTISGWVFMISVGFNAAASVRVSNELGAGNPKAAYFSVWVVTISCAIISAILAVVILCLRNYISYLFTEGEVVSNAVADLCPLLAITLILNGIQPVLSGVAVGCGWQQFVAYVNIGCYYIVGVPLGVLLGFVFKLGVKGIWGGMLGGTCMQTAILVWVTLRTDWNNEVEEAQKRLNKWEDKKKEPLLTGIRDNN

SEQ ID NO: 102764 - protein, 204 aa, Oryza sativa
  Clone ID: PAT_MRT4530_100257C.1.pep
TNTIMIEGMRLDLTKSRYRSFDEVYLYCYYVAGTVGLMTVPVMGISPDSRANTETVYKGALALGLANQLTNILRDVGEDARRGRIYLPMDELEMAGLSEDDIFDGRVTDRWRCFMRDQITRARAFFRQAEEGASELNKESRWPVWASLLLYRQILDEIEANGYNNFTKRAYVPKAKKIVALPKAYYRSLMLPSSVRHCSSLTSS

SEQ ID NO: 102765 - protein, 438 aa, Oryza sativa
  Clone ID: PAT_MRT4530_100258C.1.pep
MAMPAAPSCQAPPTGLPLLTPPPAARTLSFARRLRSHGAAAAAPVASKGHLFLSQRQPRTSNLEAVGDVTAVPEDYTENMPSSSGSTNVATSISSHEDNLAGRVAKTNQTSKENQKMIKISDKLIGVFMVDKPTPTDWRKLLSFSREWDNIRPHFFKRCQERADAESNPEMKHNLLRLARKLKEIDEDVQRHNELLEVVKSTPSDEIGSVIAKRHKDFTVEFFNHLYYVAESYHDDPEKQRELAQLGNDCVDALQAHDDTSGSLEALSAAELKLKDILNSPSVDAACRKIDDLAEKKELDSALVLMLSKAWSAAKGTDITKSEAKDIMFHLYMTAVANLQRQMPKDIRILKHLIMIEDPEERLSALNDAFTPGPELQGDNVDTLYTSPEVLHTWASAIVDAYYNSREGTLLRQARDLMNPKIIKRIEEILKLIKDKYL

SEQ ID NO: 102766 - protein, 811 aa, Oryza sativa
  Clone ID: PAT_MRT4530_100259C.1.pep
MSEVRSVPGMKVEASPAAAAAATVDSPTSVLEDDEKISECKNGDVLDTTEAIKQEEDHLDVLIEEKVDGFVDASSSLNVEPAANNSDLSPLTVPVKEEGQLLEPVKEEKADDFVDAVPSLPIDLEAKNGDASLITDAMKEEEEKLHDARVKAEEEEVARKREEAARLAFDPNARFNKLDELLSQTQLYSEFLLEKMETIADVEGVQTHAEEEPVEEKKNGRGRKRKATSAPKYNDKKAKKAVAVMLTRSHEDCSPEDCTLTEEERWEKEQARLVPLMTGGKLKSYQIKGVKWLISLWQNGLNGILADQMGLGKTIQTIGFLAHLKGKGLDGPYLIIAPLSTLSNWVNEISRFVPSMTGLIYHGDKAARAEIRRKFMPKTTGPDFPLIVTSYEMAMSDAKHLAHYKWKYVIVDEGHRLKNSKCLLLRELKRLPMDNKLLLTGTPLQNNLAELWSLLNFILPDIFSSHQEFESWFDFSAKGGEEEQEDSEEKRKVDVVSKLHAILRPFLLRRMKEDVEHMLPRKKEIIIYANMTDHQKQIQNHLVEQTFDQYLHEKSEIGLYPPVEKLLEQCGKFQLLNRLLSLLLARKHKVLIFSQWTKVLDIIEYYLETKGLQVCRIDGSVKLEERRRQIAEFNDLNSSMNIFILSTRAGGLGINLTSADTCILYDSDWNPQMDLQAMDRCHRIGQTRPVHVYRLATSHSVEGRIIKKAFGKLRLEHVVIGKGQFEQDRAKPNALDEAELLALLRDEQGDEDRMIQTDISDEDLLKVMDRSDLTGPPANADAAPLVPLKGPGWEVVVPTKSGGGMLTSLTS

SEQ ID NO: 102767 - protein, 121 aa, Oryza sativa
  unsure (1)..(121): unsure at all Xaa locations
  Clone ID: PAT_MRT4530_10025C.1.pep
KDSWRTRGPVEKCITYAXMDNSTVYDVWLIXCCTRIPRVQYVLQYFFNRTELSESINPDEALPYRATRQASIFTCXGNQKVQDLFLLDEAPLSYVLETAGGFMTGLIPSNTTIPTKKEEVL

SEQ ID NO: 102768 - protein, 451 aa, Oryza sativa
  Clone ID: PAT_MRT4530_100260C.1.pep
MARRYSLGIVSSSSCTCHLCSCKANKLSYTSNLPGRGKLVNHITMWELLFWDLLGREKKKMKKRRELLKIRGNLTAEANHGRYMCMAVAPLKLKENSIAPWIIHRTDFLRKMHSHVICDLQEEGQRLDFYVEEKELISEVSVPGSESTLRISTEVCRAVLFKIIKRFQSMHSAGFSLGGFEHKILFVTSDFEVKIGGISRVKDFTKTRGSKDYKSIGKIAREVIFSSVTNLPVDIEQLLDLLTDNPMEQTALLGMHYSLLDPLTQVSEFLWWHKRLIHLKDINPEKFQRIMENIPTGNNWMSRAVENKYIRKVSLGIPKRRKGLVHTTEEVKPETTAASQGTGIEGVKPKTAVGQDTNIEDPKPETATPKCKYSEDSWGQSLLCRNSIEHLDRWAALRRIKKKKSGGKIRTVKVQFEEMGRCYIIIQAFSKFFGELQKALAEENELPQKKQ

SEQ ID NO: 102769 - protein, 248 aa, Oryza sativa
  unsure (1)..(248): unsure at all Xaa locations
  Clone ID: PAT_MRT4530_100261C.1.pep
GLTSAYRFDFSAKGGEEEQEDSEEKRKVDVVSKLHAILRPFLLRRMKEDVEHMLPRKKEIIIYANMTDHQKQIQNHLVEQTFDQYLHEKSEIVLRKPGIKAKLNNLLIQLRKNCNXHPDLXWSLRMTHQXLYPXPVEKLLEQCGKFQLLNRLLSLLLARKHKVLIFSQWTKVLDIIEYYLETKGLQVCRIDGSVKLEERRRQIAEFNDLNSSMNIFILSTRAGXLGINLTSADTCILYDSDWNPQMDL

SEQ ID NO: 102770 - protein, 549 aa, Oryza sativa
  Clone ID: PAT_MRT4530_100262C.1.pep
MDSEERSKKRLRLWSRAVVHFSLCFAIGVFAALLPLAATGATSIDSIRASFRPTVAATPPVPELDLLLIVTVTRPDDDDDDGMSQEASLTRLGHTLRLVEPPLLWIVVGAENTTATARAVNALRGTRVMFRHLTYAAENFTGPAGDEVDYQMNVALSHIQLHRLPGVVHFAAASSVYDLRFFQQLRQTRGIAAWPIATVSSADQTVKLEGPTCNSSQITGWYSKDSSSNITETTWDSSSNTTQTTWDSSSNKTQTTTLAALDTNASKQNSSSGPPEINMHAVGFKSSMLWDSERFTRRDNSSTGINQDLIQAVRQMMINDEDKKRGIPSDCSDSQIMLWHLDMPRHTPKIEQATPEKESLTKGDEEESHDMTLDNVVPKTEEHETLEKENLMKGDEKGSHDMMLDNVVAKIEEQETPEKENLTKGEEKESHDMMLDNVVAKIEEQETPEKENLTKGDEKESHDMMLDNVVAKIDEQETTEKESLTKGDEKESHDMMLDNVVAKIEEQETPEKESLTKGDEKETHDMMLDNVVAKIEEQETPEEGKTKEG

SEQ ID NO: 102771 - protein, 54 aa, Oryza sativa
  Clone ID: PAT_MRT4530_100263C.1.pep
RGQHNCSKFLGQRNKSIYIFYTSRMTEKKQIAVKIYCRIHIVVLRTNRRLNSRT

SEQ ID NO: 102772 - protein, 132 aa, Oryza sativa
  Clone ID: PAT_MRT4530_100264C.1.pep
MGGAPDELACEQDPEDDEALECHNGIPGPLHDAGMWGPCAGWREQLGGWEQAQHATAATGNASTAAGSDSKRQRGGRERWRAAAARPHAPLAAVPLPRPDPAVEGQWRPRREATTTTSCGGDDGNDDERGCS

SEQ ID NO: 102773 - protein, 266 aa, Oryza sativa
  Clone ID: PAT_MRT4530_100265C.1.pep
MAPPQERDYIGLSPAAAAALATELRLGLPGTAEEAESEGGGGGGTDAAPLTLELLPKGGAKRGFADAIVGGPAGQRREAAGGKAAAAAAEAEEEEEKKKAQAPAAKAQVVGWPPIRSYRKNTMAMSQPALKGKDDGEAKQAPASGCLYVKVSMDGAPYLRKVDLKMYKNYKELSLALEKMFSCFTVGHGESNGKSGRDGLSDCRLMDLKNGTELVLTYEDKDEDWMLVGDVPWRMFTDSCRRLRIMKGSDAVGLAPRATDKSKNRN

SEQ ID NO: 102774 - protein, 289 aa, Oryza sativa
  Clone ID: PAT_MRT4530_100266C.1.pep
MDHMQQQQRQQVGGGGGEEVAGRGGVPVCRPSGTRWTPTTEQIKILRELYYSCGIRSPNSEQIQRIAAMLRQYGRIEGKNVFYWFQNHKARERQKKRLTTLDVTTTTAAAADADASHLAVLSLSPTAAGATAPSFPGFYVGNGGAVQTDQANVVNWDCTAMAAEKTFLQDYMGVTGGGGAAAAAPTPWARTTTTREPETLPLFPVGGGAGDGAHRHAGHAGFPSNFQRWGSAAATTNTITVQQHLQQHNFYSSSSSQLHSQDGPAAGTSLELTLSSYYCSCSPYPAGSM

SEQ ID NO: 102775 - protein, 85 aa, Oryza sativa
  Clone ID: PAT_MRT4530_100267C.1.pep
AAVLVLASSCGDCRPPLALVLWRLKPPPAPPLMAVAGAARGATNPMLSHAMSALASTPVLANLAPSRGRSGVGWHLWLWTRLGGM

SEQ ID NO: 102776 - protein, 56 aa, Oryza sativa
  Clone ID: PAT_MRT4530_100268C.1.pep
LLFFFFFFFFFFYDLIQRGFTASKVLKGTRYNLNTRLSYLEYHTHTQTFILGLHRR

SEQ ID NO: 102777 - protein, 143 aa, Oryza sativa
  Clone ID: PAT_MRT4530_100269C.1.pep
FVLLIINTEILYYTHHGRSIKNTSVYVRTRRLPAAEVHTDHALRCKAFHGAHLPWRFFFFSISKWRTSWGSPPCSCCGRSSTAAAARTGRPAAAPAPAYTGPPTPWPSSLPSGAFSMKPPSPSFLPSPSSLPSPPPAYRLFQG

SEQ ID NO: 102778 - protein, 36 aa, Oryza sativa
  Clone ID: PAT_MRT4530_10026C.1.pep
FYRIEIANLFDDFQLLKNMIDNLPQFMSYLSSDLLL

SEQ ID NO: 102779 - protein, 65 aa, Oryza sativa
  Clone ID: PAT_MRT4530_100270C.1.pep
EHTCGCDTPWGIKIRGNSVTRAQVYEGRHTISCEGLCAAMWHPVSIQTVYTPPQPHTVVWLPVYT

SEQ ID NO: 102780 - protein, 74 aa, Oryza sativa
  unsure (1)..(74): unsure at all Xaa locations
  Clone ID: PAT_MRT4530_100271C.1.pep
MACVTGGTPVTALPSSTALKTTLLGQSSTRLARAPTTRRNARAEATGEXIPGLAAPTYINSTLRDDNRFHHTGL

SEQ ID NO: 102781 - protein, 355 aa, Oryza sativa
  unsure (1)..(355): unsure at all Xaa locations
  Clone ID: PAT_MRT4530_100272C.1.pep
FFSQQVTHTRADRRRRRCSTGEQSGAKKAAAWVVSPNGQVKREMAVEAARGEXGAAAAAGAGEEEEEVQAGGMIAAAVGDGFEGVEISVRIDLAVLHCPLCLLPLKPPTYQCAAGHLACSSCHGDVPGKKCHTCGGGGGGGVYARCPGLDTFLRAAKILCPNDLFGCRSYVAYHDVAAHQRACPHAPCSCSEPRCDFLGSPPMLLAHLVADHSWPVSKVPYGEVLTIHVPESERRHLVVAGAAGGDDERVFVLSVGALGVARAVSVACVRANAAAGPRYRCKLWAHAPGGGAADFVHMDSAVASSAAAPGGEVAVDEEARFLTVPPCFLHLLDAGTSKEMLIRLSISIDIDIDMS

SEQ ID NO: 102782 - protein, 40 aa, Oryza sativa
  Clone ID: PAT_MRT4530_100273C.1.pep
SDSELQAQTLLPFTLPPIWGISPNYYRAPRGIAPVGGVWY

SEQ ID NO: 102783 - protein, 276 aa, Oryza sativa
  Clone ID: PAT_MRT4530_100274C.1.pep
MGTGEGVICPRTEDAVGNSWVSFHFLPMGNPCLTRYMFGRETPKDCGHYCETPEDRVFARGHCKKVPNKSMGSVRSLLHDSRASTCSLARKIANAVTMDGREVHAIGLGLTREGEIKDGARRPVVEDDADLQDHCAIGWGTWGYMERGQHEADGVVVWLATVHCSQNDNDVKAATRRVRSKAGDDTWRSRRSATREDGIKRKIFGMIRFEGDEEVEGILSRFTVGRRRGRIAGITGYHYLGLYAVDERWAADGDSSVRVFLRTFRGGFSKYQEGIE

SEQ ID NO: 102784 - protein, 204 aa, Oryza sativa
  Clone ID: PAT_MRT4530_100275C.1.pep
SFKICSPPPAKVLSPYAPLIHVMKVKPNKVNLIIGSGGKTIKSIIEETGVDAIDTGDDGTVKITARDLSSLEKSKAIIANLTMVPKVGEIYRNCEIKTIAPYGAFVEIAPGREGLCHISELSSSWLAKAEDAFKVGDRIDVKLIEINDKGQLRLSSRALLPDANQESSSKQQAGGSTREKAPQKDNLVKMTTRRPDVRRSRGIY

SEQ ID NO: 102785 - protein, 79 aa, Oryza sativa
  Clone ID: PAT_MRT4530_100276C.1.pep
WPVNMIILLQRAEVGPWSKNDHSNKAEQGSHTNKHTVDLSGTVMMLSTRADDNMLASMPRGGAQEDPRDPSSDSPYTRS

SEQ ID NO: 102786 - protein, 73 aa, Oryza sativa
  Clone ID: PAT_MRT4530_100277C.1.pep
SCDLQRGETDRAPENTMQLGGLRPFPGHLKYQSFLLPSPGGPEIRIAAFYCTIARPPWLSCTILQRLSFELSP

SEQ ID NO: 102787 - protein, 57 aa, Oryza sativa
  Clone ID: PAT_MRT4530_100278C.1.pep
NGLYFTWSVQYELFEALSLATSISSSIMLVVGYNHVHHNDGTWTTDHFSIEYVLCST

SEQ ID NO: 102788 - protein, 97 aa, Oryza sativa
  Clone ID: PAT_MRT4530_100279C.1.pep
RTGSGLASPRGRRPLPPPAMSHPLSSEPHALEQRAVVVTNKHGEKLVGVLHHTGSSKIVVLCHGFISTKNDSLILDLMAALTKKGISVFRFDFSGNG

SEQ ID NO: 102789 - protein, 503 aa, Oryza sativa
  Clone ID: PAT_MRT4530_10027C.1.pep
MAALHLHALIAGGGGATTVPHLRQIHAHLLTSGRFPSLGPVLLRRLISLPNPHLHLAHRLLLSLPSPSLDLFNLLLPPLASSPDPSTAAALFLRLRRGGLRPDAHTLPHVLKALARLAPGSLPVVGSVHSEAVKDGLASAVVYVPNALMAAYSACGQLERAVQVFDEMPRRTVVSWNTALTACAGNGRHELCVELFAEMLEAGSVPDPTTFVVMLSAAAELGNLALGKWAHGQVVSRRLDMTLQLGTAAVNMYSKCATVSYALRLFERMPARNVWTWTAMIVGFAQNGLAQEALELFDRMKLSKIIPNYVTFLGLLCACSHAGLVDEGRRFFHEMQHVYGIVPMMTHYSAMVDVLGRNGLLQEAYDFVVGMPVEADPVVWRTLLAACQLHSSKDCIEIIDKVQGKLLELEPRRSGNYVMVSNIYCEIGSWDEAAKARRVMREGGMKKVAGESCVEVGGRVHRFIFGDDSCPEFHGACRILHELNLNMRKCEPIDPILFTDDAD

SEQ ID NO: 102790 - protein, 76 aa, Oryza sativa
  Clone ID: PAT_MRT4530_100280C.1.pep
LPFFSGANDTPNFGKEHTGGGPALAAGENNETGALSTTTLGEASPGPLTRQGSSDYAGGGALLVACVSVKRQRLAD

SEQ ID NO: 102791 - protein, 111 aa, Oryza sativa
  unsure (1)..(111): unsure at all Xaa locations
  Clone ID: PAT_MRT4530_100281C.1.pep
TEVNETHDNSRLVQERLLIPSVIVAKRKHSSGPSISSHGQQHVLKNFNARLHLVSWFRLEGXEVPCDLLGYQRKFRMKQYLXGFMLPVCCISSSLAPAKSHFFWSFILGLH

SEQ ID NO: 102792 - protein, 490 aa, Oryza sativa
  Clone ID: PAT_MRT4530_100282C.1.pep
MRQNAHSGHVYTDWTPHKSMKTLLELGQNIVQIIGGPLSNLLAKGEAGRRRSDQRSAWLNGQGLRKGLSSFEVSEAAPSPRSNSEPPPSSARPPPPPSPPPPQLPGSSLTGPSPPSSSSPWVLSVFRELNPKEMLARNTPKYTKCMFSAILEYSVVTAPLVLKNVKREINISTTVCKIDVKTLKHYNFLEEEKHALGCNSRVNGPIILCGFTNSWWKYYICPVSGSTFTMKSEVLHYLFSEMDQRFMESKNCAVGCNLMRTHEWLPKGWLVEIRAGGDNMDKMYKFYVYPPHRVRLYSKDDVLLYIKEMKISGFDTDGQCNTSTQENILAILEFNPKGLPQGWVKEVHYTDPIKNYVFRTMRSAALYVETGKVTIRAFVQKTSVHEVYSFEKFTHLHESLQKRLNLGRTNQLRTRSSKHEKLALKEEILSDEQGSSSGVAALLEMDCWWWSRQLWLEGVSLVAVLVVAAVGGVGHTALEAVQTTAVTGRS

SEQ ID NO: 102793 - protein, 268 aa, Oryza sativa
  Clone ID: PAT_MRT4530_100283C.1.pep
MATTSRNDVPPTVPPTQVENGTSTAPTPGRNPQAAELCPSRRNPEPTRMPIQNLRSWCLVHKTSKHTLEDCLVILHVKAELYACWERGIQRTSPTGFTYCPRLSLHRKIHHEETVNQLTGTQKRKTLLENVLPVLNRHGQPEIQLHRVVRIATFANIWTTGGGKDEIGTTLIVIGVVLPLDEKRTPLTVDTATVSPHAKEGTMIEEAALTKIEIGRPVATAETTTITTIVTMVTTISEIREPMVKFRATASVARRRRWTGTQFPISRI

SEQ ID NO: 102794 - protein, 405 aa, Oryza sativa
  Clone ID: PAT_MRT4530_100284C.1.pep
MGKSPSVGILDDDDRDEVKSSEEATKNLQSDDDDVDGRPGWLPDGWIMEVYCDDDGTIYRYYICPLSGTTFTTKSEVLDYLFSEMDQCFLESKNHAVGSNLTRTHEWLPKGWLVEIRAGGDNMDKMYKFYVYPPNRVRLFSKDDVLIYIKEMKISGFDTDGQCNTNTQENILAILEFNPEGLPQGWVKEVVFRKTNTGKIRRDRHYTDPIKNYVFHTKRSAALYVETGKHESLWKRLELGGTNQLRTRLSKLRKLSLKEEILSDEQGSTSGVELLLVVVWQLWLGGGGGLFGGSAGGGADGSRYWLAIHVVGVVRQTFTNHHPKLCSLSSICVRSSIQAERSLPMRHLSLASQLVLLRFIGELRSNLLSSLPKIATLTIQTQHMGQDKTRHHDGFVDPRIRQRDL

SEQ ID NO: 102795 - protein, 80 aa, Oryza sativa
  unsure (1)..(80): unsure at all Xaa locations
  Clone ID: PAT_MRT4530_100285C.1.pep
XGGMSQLCTRTRHWNHYGFGSAQRQTRVKCRPVWGEPSSNGMEEWRSRTAEGRGSRGNRFPAEHTNPCGDVTRRGRRDRT

SEQ ID NO: 102796 - protein, 192 aa, Oryza sativa
  Clone ID: PAT_MRT4530_100286C.1.pep
MAPAGCCLLLVLLIAAGGRAAANSAAAVATTNNKPQQLVQSTCNSTTYYDVCVAALAADPSISTAADVRGLCAIAVSAAATNASAAGASLLASAAAYQSQPQAPLLRACAARYADARQALISAQEAIKEEAYDYAFVHVSAAAQYPTMCRALFRRASSQQRAYPSDLAKREEGLRRLCTVVLDIISLLLLSY

SEQ ID NO: 102797 - protein, 638 aa, Oryza sativa
  unsure (1)..(638): unsure at all Xaa locations
  Clone ID: PAT_MRT4530_100288C.1.pep
MIPAIFPMMDGAAPLLPETSPESRQQRDPERGKRRTPVLPAVVASAVVLLGLAALFLVYGFHDGGDGRAAVLAPGRPEVAASSSRGVVEGVSEKSTTPALRLGGGAVRDYAWTNSMLSWQRTAFHFQPPNNWMNDPNGPLYYKGWYHLFYQWNPDSAVWGNITWGHAVSRDLIHWLHLPLAMVPDHWYDINGVWTGSATQLPDGRIVMLYTGATEESVQVQNLAEPADPNDPLLREWSKAEANPVLVPPPGIGLTDFRDPTTAWRNPADSAWRITIGSKDRDHAGLALVYKTEDFLHYDLLPTLLHVVKGTGMWECVDLYPVSTSPAVEDGLETSTPPGPGVKHVLKASLDDDRNDYYAIGTYDGETDTWTPDNADIDVGIGLRYDYGKFYASKTFYDPVGRRRVLWGWIGETDSERADILKGWASLQVSMIIFILNANENKGEKSIPRTVMLDTKTGSNLLQWPVVEVENLRMRGKXTVSSREAGAAAYSCGTDGGAVGRGLMGPFGLLVLADDQLSERTAVFFYLVKGVDGNLTTFFCQDELRSSKANDLVKRVYGSLVPVLDGENLSIRILVDHSIVEGFAQGGRTCITSRVYPTKAIYESAKIFLFNNATNVRVTAKSLKIWELNSAYIRPYVD

SEQ ID NO: 102798 - protein, 378 aa, Oryza sativa
  Clone ID: PAT_MRT4530_100289C.1.pep
MWVVPQRLLPDGWIMEVYLGDDGTIYRYYICPVSGRTFTMKSEVLHYLFSEMDQCFTESKNRAVGSNLTRTHEWLPKGWLVEIRAGGDNMDKMYKFYVYPPNRVRLFSKDDVLLYIKEMKISGFDTDGQCNTSTQENILAILEFNPEGLPQGWVKEVVFRKTHTGRIRRDRHYTDPIKSYVFRTKRSAAFYVETGKVTIRAFVQKTSVHEVYSFEKFTHLHESLQKRLNLGRTNQLRTRSSKLQKLSLKEGILSDDQSSSSVLVAMVAQCGNFSKVVVCLLDDRLVWWLGWRQWPLFTRAASLDKLEIHVVGLVRQKFTNHHPTAFRIKVGWRSKMSLDSVDCSSICVRSSIQVERSLAMQPLSLGSQLVLLRFIGEL

SEQ ID NO: 102799 - protein, 94 aa, Oryza sativa
  Clone ID: PAT_MRT4530_10028C.1.pep
MLRCVYTQRRWAHRRGGFVTGGTGWSQRRAPAAAAAVGAVAGAAKSAWWSVVGEMLEIGEGVPRRERFGVPRGSLPVRRRLLLLQLFLRRARLA

SEQ ID NO: 102800 - protein, 119 aa, Oryza sativa
  unsure (1)..(119): unsure at all Xaa locations
  Clone ID: PAT_MRT4530_100290C.1.pep
PERVCLLVLGGEMSKMAEEKVLAARPPXTAGCSSPGTCRLRRRRRRVCGPXRRSSAPAAGALRXAWHHVRAXHNDTXXSYSXSRLRPGXATALXLLVRASHSVQPRVSVWSFLSQFTXI

SEQ ID NO: 102801 - protein, 646 aa, Oryza sativa
  Clone ID: PAT_MRT4530_100291C.1.pep
MGDWYEQFSQSFKDAAKEMLAKTDIDPNVKCFTRKQMKRISNNYRTILGKGGFSVVYKGRLNDGRAVAVKKYNWKTQKKEFTKEVIIQSQFSHKNIVRLLGCCVEADAPMLVTEFVPNGNLSNLLHSNSSQFPVSLGTRLQIALDVAEALVYMHSSQNHPILHGDVKPSNILLGDKDVAKLCDFGISRLLCMDSDEYTGFVIGSRGYVDPVFCQTGRLSLKSDVYSFGVVLLELITKKKGIDDKKVCLAETFARISRKGNGHELFDMDVVTNENMEFLQGIGRLALECIKFEVEERPEMKEVLERLWSLKRSRDRRIREMQVMVRSEIEVLWRRCGFGRFMISKERMDDMTYYFKTVLKECASGKAYIGRFCNAQLLVIKMSISVLDQWKNIVWNELNVQSRIKHWNDAKLLGYCLDLWEGLVLVYEYGAMSLYDVLFHDARKVSPFICGLRLKIAVGAAEGLAHLHSLGIVHGNVSTVNILLDDLSVLKVISRNYPVKIAGYGTSGLPDIDKAQHTGFFMEDSLVTSHGKEHDVYCFGLVLLTLFTWKKVSLQEADTVFEQLWDIGPPHDVNSEPEKPGQQLKEAILRCRHLEEVKSLVSRCLTSEVTKRPSMVEVAKHLKNINDLHDSTACHELAIYQSRMLSG

SEQ ID NO: 102802 - protein, 60 aa, Oryza sativa
  Clone ID: PAT_MRT4530_100292C.1.pep
IWLKLVLNGYNYLIINAYGCFCWNDRRRSFNVIKIGRMGGTLNKQYKYIIWVLKVRILPL

SEQ ID NO: 102803 - protein, 90 aa, Oryza sativa
  Clone ID: PAT_MRT4530_100293C.1.pep
LRRYLGFYVAYMRMQYARSVIGVFLMIWGDEFLDYYPCIKKFTMYTCGLLCLHMVMYTSGIIDVWYGLVINHMNVWVCLTKYWNILCSWM

SEQ ID NO: 102804 - protein, 79 aa, Oryza sativa
  Clone ID: PAT_MRT4530_100294C.1.pep
MPVPVLAPPLPQQPPTLPCHAQPREVLSGPSPTSRHHRRNSHRRSHAASGLAPRTRHPYPSRRNRHRPYPQPPLSPPPP

SEQ ID NO: 102805 - protein, 495 aa, Oryza sativa
  Clone ID: PAT_MRT4530_100295C.1.pep
MKMLLAALVVVAAASFRAAEAALPSMAVGVNYGANADNLPPPKDVAAFLAAHTTIDRVKLFDANPAFISAFANTPISLATGLDTARAWVRANLSPYVPATNVTLLLAGNEILLSPDPNLVLSLLPAMRRLAQALRLEGLTGVRVTTPHYLGILAPSDGIPSNARFRPGYDTKLFPPMLQFHRDTGSPFMVNPYPYFSYNNQTLDYALFRPNRGVYDPNTKLNYTSMFDAQMDAIYTAMKRLGYGDVDIAVGEAGWPTQADPGQVGVGVEEARDFNEGMLRVVSSGKGTPLMPNRKFETYIFSLFDENQKPGPIAEKHFGILNPDFTPIYDLGLLRQSSDSGAPNPSPNPSPNPSPKPAPSGGGKWCVPKAGASDTDLQNNINYACGYVDCKPIQSGGACFDPNNVQSHAAFVMNAFYQANGRHDYDCDFKGTGAVTSNDPTALHITRLSNTLIQKERPAMFLNMATGAANTSPDGTQQAMAVQVQRHQPRVYLQA

SEQ ID NO: 102806 - protein, 159 aa, Oryza sativa
  unsure (1)..(159): unsure at all Xaa locations
  Clone ID: PAT_MRT4530_100296C.1.pep
RAGRRQPRAPRQRAGTGRDHREPEQRPATGTXGTHQGPKAAPARXGTGHRETTPHAPPTHRGTPGGAPAARRTRPSTTARGTGSSAQAPQQAWDGTAPPRPESDGAREPADDRTRAGVQRANTGPKQHXRXAATAARPPKHPAARSTPGPAQGPEDHRG

SEQ ID NO: 102807 - protein, 511 aa, Oryza sativa
  Clone ID: PAT_MRT4530_100297C.1.pep
MMKMLLAALVVVAAASFRAAEAALPSMAVGVNYGANADNLPPPKDVAAFLAAHTTIDRVKLFDANPAFISAFANTPISLAVSLPNSDLPSLADKQTGLDTARAWVRANLSPYVPATNVTLLLAGNEILLSPDPNLVLSLLPAMRRLAQALRLEGLTGVRVTTPHYLGILAPSDGIPSNARFRPGYDTKLFPPMLQFHRDTGSPFMVNPYPYFSYNNQTLDYALFRPNRGVYDPNTKLNYTSMFDAQMDAIYTAMKRLGYGDVDIAVGEAGWPTQADPGQVGVGVEEARDFNEGMLRVVSSGKGTPLMPNRKFETYIFSLFDENQKPGPIAEKHFGILNPDFTPIYDLGLLRQSSDSGAPNPSPNPSPNPSPKPAPSGGGKWCVPKAGASDTDLQNNINYACGYVDCKPIQSGGACFDPNNVQSHAAFVMNAFYQANGRHDYDCDFKGTGAVTSNDPTALHITRLSNTLIQKERPAMFLNMATGAANTSPDGTQQAMAVQVQRHQPRVYLQA

SEQ ID NO: 102808 - protein, 397 aa, Oryza sativa
  Clone ID: PAT_MRT4530_100298C.1.pep
MDGGVGRWRKFLTPWKKTAQDGGGSLADVTVPFPQQPHPQVAEADTQQASDGSRSHSRVQDRLHRLAAMAARAGVASSSATLSPRVAQGGSNIRGEQRGKKRKSPCPAKRMYNLGYLKGHERKEVSAEFSVPIRTVQRIWKKGKSYLDQDQNKIDRLKWCIEMLDPRSVPHNPVFKPLFDYIFIYEKWFNITRKTVQYYAAPTASRRIRIIQNKNFIPKIMILTALARPRFDSNGNCIFDGKIGCFPFVTYTAAKRSSVNHPAGTIEMKPIESITKEVIRSFKIEKVLPAVRAKWPREDAGKPIYIQQDNARPHIAPDDRMFCEAAKQDGFNIKLVCQPANSPDLNVLDLGFFNSIQSIQYKSASTTTEELVAAIDRAFEDYPVRLSNMISCLFMHA

SEQ ID NO: 102809 - protein, 27 aa, Oryza sativa
  Clone ID: PAT_MRT4530_100299C.1.pep
ADGRVACNHKQILKPELDLKLVSRIIQ

SEQ ID NO: 102810 - protein, 44 aa, Oryza sativa
  Clone ID: PAT_MRT4530_10029C.1.pep
VRRLLLSLGHVFSNHGKPWSSIPDVNRAGHFFFLIAVSLPSLQI

SEQ ID NO: 102811 - protein, 137 aa, Oryza sativa
  unsure (1)..(137): unsure at all Xaa locations
  Clone ID: PAT_MRT4530_1002C.1.pep
RFDPAFGKHIVESYKNEDIFVFALLAIVACNASARFDALSQSYRQYQLQSHLLLQQQVLSPCSELGGGQHXIVATPFWXPASFQLLNNQVMQHLCCLQLRLVAXLSHYQAISXVXAIVPLLLLLPVGVVFFVRSLAS

SEQ ID NO: 102812 - protein, 600 aa, Oryza sativa
  unsure (1)..(600): unsure at all Xaa locations
  Clone ID: PAT_MRT4530_100300C.1.pep
MTKEEGRVGRRRKFVTPWKKAAQEVGDGGAEDRVERLAAAASSSTALSPRVTLDGSNVGGKRGKKRKSPCVAMPFFRTPLSRMLLSPSIRIRSPSIQQRTSPSATTHGICQGREQRTMDIDLNLEPGDTYAATDPGEAGFDHSAATDAQGNGEAGFDHSAATDAQGNGEAGFDPFDSNADDDVLVTLEEIGVDPGQENVQPQFDPFFDSDVDDAILVPQENTHKNVVLDNDKRRAIFDAMLVKARKGYLKGHESKEVSAKFSVPIRTVQRIWKKGKSCLDQGISVDVASGRSRCGRKKKVVDVSCLEDISILSRTTIQDVATQLGVSTSKVYRMKKEGAIKRVSSSLDPHLTDQHKIDRLKWCIEMLDPRSVPHNLVFKPLFDFIFIDEKWFNITRKTVRYYAAPTASRRIRTIQNKNFIPKIMILTALARPRFDSNGNCIFDGKIGCFPFVTYTAAKRSSVNRPAGTIEMKPIESITKEVIRSFMIEKVLPAVRAKWPREDAGKPIYIQQDNARPHIAPDDRMFCEAAKQDGFNIKLVCQPANSPDLNVLDLGFFNSIQSIQYKSASTTTEELVAAIDRAFEDYPVRLSNXFSCLFTHA

SEQ ID NO: 102813 - protein, 422 aa, Oryza sativa
  Clone ID: PAT_MRT4530_100301C.1.pep
MGLGNEASSSSSRLLDPAPLLPHHGGDGAGKLSSQPKTFANVFIAVVGAGVLGLPYTFSRTGWAAGSILLLSVAALTFYCMMLLVACRRRLADEHPKIASFGDLGDAVFRGPGRLAVDTMLVLSQASFCVGYLIFISNTMAHLYPVFAPSSNALLSPKALFIWAMLPFQLGLNSIKTLTLLAPLSIFADVVDLGAMGVVLGEDVSVWLAKPPPVFAFGGLSAILYGIGVSVYAFEGIGMVLPLEAEAANKKKFGTTLGLSMGFIAVMYGLFGAMGYIAFGDATRDIITTNLGTGWLSAAVQLGLCINLFFTMPVMMHPVYEVAERLLHGKRYCWWLRWLLVLAVGLSAMYVPNFTDFLALVGSSVCVLLGFVLPASFHLKVFGAEMSWSGVLSDVLLVLLGLSLAVFGTYTSLLQIFHSSSA

SEQ ID NO: 102814 - protein, 369 aa, Oryza sativa
  Clone ID: PAT_MRT4530_100302C.1.pep
MEQGQGDRYWCHHCEEVIEPVEPDMKCPSCDSGFVEEMGSAGFEPSTNLRSDRISLWAPLLLGMMGGSSRRARRLRRQIMEDDDDDDDDEDDEDDSDHELEDLFRRQRRGSSLVRLLQTLRDDLRGLDDIGRDSDRDRERERRERERLRERERERERMRERERERRRERTESLILINSNNEAIILQGTFGPDDNQDDSSNTSSGVSLGDYFLGPGLDILLQHLAESDLNRSGTPPAKKEAVEALPTVNIQEVLGCSVCLEDFEMGTEAKEMPCQHKFHSQCILPWLELHSSCPICRFQLPTEESKNPCESAGGIVSVNDDGDDAGTSSDVDSANQPGSPIFSALSALFSNPSSSSSSSSDDNAPHSSES

SEQ ID NO: 102815 - protein, 144 aa, Oryza sativa
  unsure (1)..(144): unsure at all Xaa locations
  Clone ID: PAT_MRT4530_100304C.1.pep
MAGSERTVVWFRRDLRIDDNPALASAARDGAVLPVFIWCPADEGQFYPGRCSRWWLKQSLPHLSQSLESLGCPLVLIRAESTLEALXRCIDSVGATRLVYNHLYDPVSLVRDDKIKKELTALGISIQSLNGDLLYEPWEIYDDS

SEQ ID NO: 102816 - protein, 71 aa, Oryza sativa
  Clone ID: PAT_MRT4530_100305C.1.pep
ILFYIIRHNRHQTVYKPHRFNKGNANSLSSGLNFKICTETTRYKDAGLSGVPFQNSIDILQAQAQRWLQYR

SEQ ID NO: 102817 - protein, 23 aa, Oryza sativa
  Clone ID: PAT_MRT4530_100306C.1.pep
PICNKISQQRYRKLLSMTILYVT

SEQ ID NO: 102818 - protein, 48 aa, Oryza sativa
  Clone ID: PAT_MRT4530_100307C.1.pep
MAHKQGGSDMAIVISWFPGSRKTPDVCEWAPAVFAASSVHTPVLVTSS

SEQ ID NO: 102819 - protein, 1074 aa, Oryza sativa
  Clone ID: PAT_MRT4530_100308C.1.pep
MARGSNWHRGILLQGESKATLHRQGRIYRVTGVFEEKGIEEIGKIRKTSPAPGVQCGADRLRRCERQVHAGIAADSGDRDPAGSAFRVEPPRAAPSPPDDKAPKYVQISPETYAHLTESEEQVKTLNEKVKALNEDLSAAQSEITTKDALVKQHAKVAEEAVSGWEKAEAEASALKLQLETVTLAKLAAEERAAHLDGALKECMKQVRTVKEEGEQKLHDVVFAKTKQWEKIKAEFEAKLLEFEQELIRAGAENDALSRSLEERGDLLMKIDEEKARAEAEIEVLKNTIQSGEREINSLKYEIHVVSKELEIRNEEKNMSVRSADVATKQHMEDVKKISKLEAECQRLRGLVRKKLPGPAALAQMKMEVESLGRDYGESRLRRSPAKNSSFHRPMSPMSPVPDYAFENLQHMQKENEFLTARKLRGLEVQMLTGSQRKSTSNPNMDIHFDGALSQNGSNPPSMTSMSEDGVDDEGSCTESWANALVSELSHIKKEKGAKSSVTEGSNRLELMDDFLEMEKLACLSSEANGHVSTVEKMKIDDTEASLSGITERDGVKDSQSVLALPGTPSNKLQLSDSSPLLKLQSRISSLLDSESPQNNAGNILDSIRNILKDIEDEADSSNDSKTHHGDMVEVADNGSLMKHSSSGSKHAMDQELVNAILKIQDFVKSLDQEVSKFQGQSSDCDGLCDKIQQFSALVEKALSNENVLNDIVMTLSLILSGTSEIKFMMLKENTKEADNNNLDYVDKVTLLENKVQLEPLKDSISGPCLPRSSSDPEIEGPTDSGCDVKTAVQICSSEEFEQLKSEKLNLEAELSKCNEVIEETKFRFKELEKSLEELTSKLVASEKSNSLAETQLKCMAESYKSLESRKAELENEIKVLQSKIEVLTAELDDERQNHQEDITRYRDLEEKIERYENERNSMCVDEDADTKAKQEKEIAAAAEKLAECQETILILGRQLQSMRPPAESMGSSPNQRMEDFLQDAAGTTEGVEYSQKPTGQLDTDQEMHASGNESPVNGYKTHNAPSEADGSPFLSPNGSKRPKHRSRSSSSISNQLPEKQNRGFSRFFAKEKI

SEQ ID NO: 102820 - protein, 95 aa, Oryza sativa
  unsure (1)..(95): unsure at all Xaa locations
  Clone ID: PAT_MRT4530_100309C.1.pep
MALVSASSYTTAVAALPGAARASCLLGGAGRSGRLLLRQAESSSARASFAVRAGLPDRPIWYLGSTXXARLDSSLPGDFGYYPLGIGSDPESLQR

SEQ ID NO: 102821 - protein, 118 aa, Oryza sativa
  unsure (1)..(118): unsure at all Xaa locations
  Clone ID: PAT_MRT4530_10030C.1.pep
MLEKLWXXDVVAGSSXRXTPAWRSSXKGRYIPAPLSSTKMGAARRAGRRTSGRSRCRRPRXAGDAVVFVSDDDGDDDAAGQXRVVVRVPPGESPLPPEPRRRPFRPPAVLLFSRLPLV

SEQ ID NO: 102822 - protein, 151 aa, Oryza sativa
  Clone ID: PAT_MRT4530_100310C.1.pep
RSAAYQGIIAVVGTVLIALLGMQVIIHRRSLKRQRLIIQRDEYFQQHGGHLLSDMMKIDCNLEFTLYRQEDIEVATNDFDKNQIIGEGGQGTVYKGFIESIPVAIKRCKGMDESRRMEFGQELLILCRVNHDHVVKLLGCCLLFEVPILVY

SEQ ID NO: 102823 - protein, 524 aa, Oryza sativa
  Clone ID: PAT_MRT4530_100311C.1.pep
MEAVLMQQAAAAAAVVARPARRRCTGEEVVGGRRPGLVRLGFARRRWSRLRLSPARAHLAVDRSREAGEEAAAVVEEEGEAAVRLFVGLPSDVVTADGRAVNRGKAVSAGLRALKLLGVDGVELPVSWAVTQPGPTGDELGWAGYLAVAAMVRDAGLCLRVSLDTHGSALPAWVAAAAAADPDILFADRSGNRRDGCLSFAVDELPVLGGKSPLQAYEAFFRSFAAAFHDFLGSTVTDVTVSLGPNGELKYPSYPPGSDGAGGYGGAGEFQCYDRHMLARLKRHAVAAGQPLWGLSGPHDAPRYGESPESSTFFRSPGGSWETAYGGFFLSWYAGELLAHGDRVLAAARRVFDGEPVELSAKVPLPRSRPAEATAGLHGGYGPVAEMFARRGCTVIASGMDGSAAAAAVLAQVKAACAEHGARLAGESASLAVARDGDGAPGAWGGLLAAERTRPCHFTYQRMGAEFFSPDHWPLFVQLVRAMECPEEAHEDDLPAAAGDGGRLAVPSGGRAAEDATAKQAQTV

SEQ ID NO: 102824 - protein, 87 aa, Oryza sativa
  Clone ID: PAT_MRT4530_100312C.1.pep
VQKQPGDSHFWASLMAAKEPFQTLGHFTVNNGKQVIFKVTQLSRLWSLLLKEDEGIEVIAKCKLLEKCMMELIFSTFGWNFRRMMEA

SEQ ID NO: 102825 - protein, 261 aa, Oryza sativa
  Clone ID: PAT_MRT4530_100313C.1.pep
QVCDALRCSGPHARSADVATKQHMEDVKKISKLEAECQRLRGLVRKKLPGPAALAQMKMEVESLGRDYGESRLRRSPAKNSSFHRPMSPMSPVPDYAFENLQHMQKENEFLTARLLSMEDETKMLKEALAKRNSELQTSRNMYAKTAGKLRGLEVQMLTGSQRKSTSNPNMDIHFDGALSQNGSNPPSMTSMSEDGVDDEGSCTESWANALVSELSHIKKEKGAKSSVTEGSNRLELMDDFLEMEKLACLSSEANGHVSTV

SEQ ID NO: 102826 - protein, 111 aa, Oryza sativa
  unsure (1)..(111): unsure at all Xaa locations
  Clone ID: PAT_MRT4530_100314C.1.pep
MDRRSWPWKKKSSDKSSSADASQNSNQAEQDDKAPKYVQISPETYAHLTESEEQVKTLXEKVKALNEDLSAAQSEITTKDALVKQHAKVAEEAVSGXWEKAEAEASALKLQ

SEQ ID NO: 102827 - protein, 66 aa, Oryza sativa
  Clone ID: PAT_MRT4530_100315C.1.pep
VIDVEVRWLTVRIYVSVSRWAYAICYQYRSRLCEVLVVGKQLVSMIIIRSLLVRLQAEEYIMSRLV

SEQ ID NO: 102828 - protein, 68 aa, Oryza sativa
  Clone ID: PAT_MRT4530_100316C.1.pep
DCATAPTTSFYLRCTIEQPKILTALPLIHGSRALMLAPILCADAALTAAQKASNERNTYNHYNPLQNN

SEQ ID NO: 102829 - protein, 45 aa, Oryza sativa
  unsure (1)..(45): unsure at all Xaa locations
  Clone ID: PAT_MRT4530_100317C.1.pep
IDLDRRYAEAACRKLAXRPLGRTLPQHFMKLASSSTWRAEARTRG

SEQ ID NO: 102830 - protein, 64 aa, Oryza sativa
  Clone ID: PAT_MRT4530_100318C.1.pep
LGPPPGRGLGALPPYPLGCLFQAPRMNSFVLPPGDPYLWQNLKIFFSLLALFIFFLQGAGPHKR

SEQ ID NO: 102831 - protein, 33 aa, Oryza sativa
  unsure (1)..(33): unsure at all Xaa locations
  Clone ID: PAT_MRT4530_100319C.1.pep
SYEVLKCLXYEPWRVGVLKDLPLXFSCYFIVEN

SEQ ID NO: 102832 - protein, 95 aa, Oryza sativa
  Clone ID: PAT_MRT4530_10031C.1.pep
DKNFFPNWGTPFSGGLSPPRAFSRPLPLPPCSSRGRPPWALPLKRLSPPPSTFPLPGPPPSLPLVPQNFTPRRAPPISNAPPHNQSYGWVLSLSL

SEQ ID NO: 102833 - protein, 206 aa, Oryza sativa
  Clone ID: PAT_MRT4530_100320C.1.pep
MAITKLASLGFVMLLCIGLANAARVARFSISSATGTGGGEGAGYVNGHGLGSGSGASSGENSVVEGSHAVAQGKGGGGGGAPYGGAGFGGGSGSGSVFSSLDSAGSSKAGGTGGGDGEGQAGGNPGSKGYGADWVEPDPVIPISPTRVPFPNLPQSRVPFPNLPQSAAATAAARTAALEASTTTATLGDGAVILVGSSWDDVTEEK

SEQ ID NO: 102834 - protein, 66 aa, Oryza sativa
  Clone ID: PAT_MRT4530_100321C.1.pep
RTRWHPIYRAPFFFFFKKLTRNVIINCYNIMVPATDYQSIINCQNLFFMLHRVQKHCNSLCRQIRR

SEQ ID NO: 102835 - protein, 36 aa, Oryza sativa
  Clone ID: PAT_MRT4530_100322C.1.pep
NKKKSRAFLNLTPNSRVFSEDQFRSNQLISPNSCMD

SEQ ID NO: 102836 - protein, 114 aa, Oryza sativa
  Clone ID: PAT_MRT4530_100323C.1.pep
HLPQIHQWIRIKLDEKLMFVLCAKLPIHTWPVIVSDQSPRIRGVTTQLVDRCRKPFCMHHLSWYSHWNLHFEQEVASCCHDHGHGSHQFSFLILLLNIFCSCIEHKKTCQIIHP

SEQ ID NO: 102837 - protein, 118 aa, Oryza sativa
  unsure (1)..(118): unsure at all Xaa locations
  Clone ID: PAT_MRT4530_100324C.1.pep
NTKTHHREANSFIMAPWDIHQKCQLVCPAQGGIMPWCPWCGGHIAMGTAAYWPHFGGPSXPGFLMQQAECRPLVASWIGXFSXIXVKLSDIAQPRDRCCGSHPRGEKLPXGNTGGYPC

SEQ ID NO: 102838 - protein, 216 aa, Oryza sativa
  unsure (1)..(216): unsure at all Xaa locations
  Clone ID: PAT_MRT4530_100325C.1.pep
MSAWPEFVPXVGRSKTSKMDYLRCGGSHALIGIRGPREDTVEHLIMVTMKRVMDLNGLESGHMQQKNMNREGQKREGEFTLREMTGGLCKTCLSGDIEVLSGTIYIIYPICEEPTDINPSGFAVLEHWMTNPGVHFVLKISQYILLSFLEVTVSYGQLAFSSGFFSLVYWDHDGDDILQGNHITVGQRRKKETGRKVRGIDIDQEEDSLFLLCCLM

SEQ ID NO: 102839 - protein, 265 aa, Oryza sativa
  Clone ID: PAT_MRT4530_100326C.1.pep
MPLYGTSRYPPYSGAVERAGKRPPADEDGRGSFGPVLVVLAVISFLAVSACIAGRLCGRRPSKSSSSRGEQMRGGGTTAAHADAEKGFGVMQNPAAAAVMRPVPSSRATVHDVDDDVFEIKLCAPVKPPTAAGRQGGSGGDGGGGSAPQPRPPPAVPLGVPRQYAAAAAAAAAAGFRRAPPPSGGAAVRLTHPQAPPPRAERLHPTAERLHPTAPSTAAGHCTLAPPPRPSTAVRPTTERLPRAASYMQSGRPPPGALLSTIILR

SEQ ID NO: 102840 - protein, 216 aa, Oryza sativa
  unsure (1)..(216): unsure at all Xaa locations
  Clone ID: PAT_MRT4530_100327C.1.pep
DAWVQKYADDFSKQYFRKDTSMDSVPSVEDIEGEYWRIVEVPTEEIEVIYGADLETGTFGSGFPKLSPETKSDAEDKYAQSGWNLNNLPRLQGSVLSFEGGDISGVLVPWVYVGMCFSSFCWHVEDHHLYSLNYXHWGAPKLXXYGVPGKDAVNLESAMRKHLPELFEEQPDLLHNLVTQFSPSLLKSEGVHVXRCVQHEGEFXVLTFPKAYHAGF

SEQ ID NO: 102841 - protein, 63 aa, Oryza sativa
  unsure (1)..(63): unsure at all Xaa locations
  Clone ID: PAT_MRT4530_100328C.1.pep
XCTYVHVYAFTPXEXXXVAMXLXLKSLRXLSRSQNXPYSXSLKXCSLPVXYTNAXXKLVRSRX

SEQ ID NO: 102842 - protein, 331 aa, Oryza sativa
  Clone ID: PAT_MRT4530_100329C.1.pep
MANGTVILTTLNSAWAEPGSVVDVFLESFRIGDETRWLLDHLVMVSLDLTAHRRCLQIHRHCFALTTDDGFDFSGEKNFMTDGYLKMMWRRIDFLGHVLAKGYSFIFTDTDIVWFRNPLPHLHHDGDFQIACDHFTGDPDDLSNSPNGGFAYVRSTSATAAFYRYWYAARERHPGLHDQDVLNLIKRDAYVARLGVRIRFLSTDLFAGLCEHGRNLSTVCTMHANCCVGLRRKVDDLGLMLQDWRRFMATPGSDRHSVTWSVLGFAEPTLAVVCTIDEMLTGTNEHAVLSKLGSDSTNLVKTWSRMTEMLRVWCNNRKVSPTAADADAMDD

SEQ ID NO: 102843 - protein, 67 aa, Oryza sativa
  Clone ID: PAT_MRT4530_10032C.1.pep
PPNLSLLQASFFRLLTLKRMIGETSTRGFKHLPTRCQLLLSVADCVVDYKKCHRKTKWVTQKKKKKK

SEQ ID NO: 102844 - protein, 32 aa, Oryza sativa
  Clone ID: PAT_MRT4530_100330C.1.pep
VQQQPPLPAFSMRQFELAMAAQAAATGTTTAS

SEQ ID NO: 102845 - protein, 138 aa, Oryza sativa
  Clone ID: PAT_MRT4530_100331C.1.pep
MSLNTNRTQWLVLLTRKDVSSRPTLNIMAPARTTTAVTLLSSTRPALTTTTVSSRTPTLPNVDQLGASSRSTTTTQLAARAYPAQITTAPAAATTHTAPSTTPDRAGTTTSALTSSATRLCTTHPATVTTVATFSVTT

SEQ ID NO: 102846 - protein, 292 aa, Oryza sativa
  Clone ID: PAT_MRT4530_100332C.1.pep
MEHLERRGLAQGAYDGADPLDIGGFGDATGVDDAAEDVGDDLPLLDEVPAQDDLLRVVLIVADRGGGGGGRGSGISRGVAIRRGRGGHRDGDARCRLLPPELISLLSRAPTTETSSPPSAAMQQRRPASGRPSGTDGSDFSYRMVVDSRYQRVADGKSRLGRLILVQALHQVAGGALLLLALSKGAEMNKFAVMSVAAGLLAIVLGEIGRRRTMAVLLRMYTSLSSIAVAFSVACIIRSELFFKITKQNTESITSHELLEVVRVALGVLLQLVVIATTTRLLQNMSPPRRAS

SEQ ID NO: 102847 - protein, 49 aa, Oryza sativa
  Clone ID: PAT_MRT4530_100333C.1.pep
VCTMHANCCVGLRRKVDDLGLMLQDWRRFMATPGSDRHSVTWSVPRNCR

SEQ ID NO: 102848 - protein, 339 aa, Oryza sativa
  Clone ID: PAT_MRT4530_100334C.1.pep
MANGTVILTTLNSAWAEPGSVVDVFLESFRIGDETRWLLDHLVMVSLDLTAHRRCLQIHRHCFALTTDDGFDFSGEKNFMTDGYLKMMWRRIDFLGHVLAKGYSFIFTDTDIVWFRNPLPHLHHDGDFQIACDHFTGDPDDLSNSPNGGFAYVRSTSATAAFYRYWYAARERHPGLHDQDVLNLIKRDAYVARLGVRIRFLSTDLFAGLCEHGRNLSTVCTMHANCCVGLRRKVDDLGLMLQDWRRFMATPGSDRHSVTWSVPRNCSMKKLGRLEPTLAVVCTIDEMLTGTNEHAVLSKLGSDSTNLVKTWSRMTEMLRVWCNNRKVSPTAADADAMDD

SEQ ID NO: 102849 - protein, 227 aa, Oryza sativa
  unsure (1)..(227): unsure at all Xaa locations
  Clone ID: PAT_MRT4530_100335C.1.pep
MAQSQTRHGGGDDGDAPVQLGKAAQLVGNYGAVEVCDDGDHPVPMGSIKHCAPTPLDWADDAADVGGDGYGPSGGEADSDLAAGDDDKLGAGPPGWRPQRHDGTRHPHSALAPTSRHPPRTAVRRQPRTPTPASPPPPPPSSTASSXPAAAAPPPPHQPQLLAACRTGSSASTLAARGAPPPPPPARSAYASAARCPGSSFSAAGRPPLGELRLRGRQRTPVHRCPP

SEQ ID NO: 102850 - protein, 109 aa, Oryza sativa
  Clone ID: PAT_MRT4530_100336C.1.pep
MAFGGGELGFSVQFCSVRDCGQERLSKVDEGKADSEGGNHQSTGFLGPRTGNAIGTLAFTWATVVLLGGYPSVLRPDEDFLYATTIIFVEAARNSLDINFLAQIYHRYR

SEQ ID NO: 102851 - protein, 271 aa, Oryza sativa
  Clone ID: PAT_MRT4530_100337C.1.pep
MEGMGQQKRRPLVVMASAQAAARGGANPLAELTDRVKTLEAGLRAWLAKQPTHVEAAVATAVGAVQGGALGGLMGTLAPDGGSPFPVPQPPPGADPNALASFKQAQALAGGPLVQARNFAVMTGANAGISCVMRRIRGVEDVQGSAHFDSMAAAFGSGALFSIVSGMGSPNPVANAITTGVAFAVFQGGFFMIGQKFSQPPSEDIYYSRGRNMLKQLGLQNYEKNFKKGLLTDQTLPLLNDSALRDVKIPPGPRLLILDHIQRDRELAKST

SEQ ID NO: 102852 - protein, 853 aa, Oryza sativa
  Clone ID: PAT_MRT4530_100338C.1.pep
MVLICSESSDDKNKCGDELINYILSWSWTTCIESNFENPQESAASSYAKSLLEPLVEETVAAVQSALQKLCFAPQFKIIDILPAAGVNISFLDIDLQEVITHNTERGDIFLLCTELPRDSSQLCNDEAVLAMATCSNLYDTFQRSFNVKTHQKVKRQKFNHALFLCNILMNIQIWESLNAVILYDCPIINDLLAPPSMVVTCCNEELVDVLMSQKITLDEVQLEAAKAIYSAARCKHSRSIHVISGAHGTGKTKIVFSAVASLLSVSEKVIVCVPNAQSFSAMCSDFVEMAESHMDEELGICLGDILVLSNETGLEDNVQQLTIITRVKEVLPLMIWHDMMKALRKSLAAFKEKYVAEFKEKYVASAKHNCQPSAKKLLTSLFFEKAGFLLICLATFRKHFPKNMFSEQVSKRIKSLIKCVSKLENLLKDRNLKEYDVHVAFGILSGKRETISVLAKDLRQTKNHCVTALDDLLTRLDLPFNKDCIWLRNYFISNAKCVLCTPLSTFDLQLSAGSIETLIVDNADQIRDYDLILPLTLRDVKNIVLTGDPSKVKEGSFFQRLLSVGFSVFELRRQYNLLDDKERHEADGQNTLSEALNDKIKAEELSLTIGSPKQLYSEFTWLHRPHNQKYILPQLCDQKGHPHCTVHASLAALEFKYKYKAASENPPHDFSSKFCTKHMLNVYAAKYGELGSERESTRGSKRLSNVLDILQNDGAKREAMMGKQVYKISSYACTYKIGNDTECLQETIDHLKIGDISIGSFKVSENLRFFKPGEVYIYNPEKPVLTPTANQPSAHCVLVIGGGGCPSDSTAEPVLACNMQFMIQNSYGKGFGELGIGRVRGDSFSTMHRISL

SEQ ID NO: 102853 - protein, 311 aa, Oryza sativa
  Clone ID: PAT_MRT4530_100339C.1.pep
MPSFSPSPPPSCPCATRIPSKRCSPTPHPHLYIASPPDLAIDAGYELADAVSICIAVLLVPTSISCGGSTICDRGSRGSIQLLSAHHHPLYQGFYLSSRGTWHLTWGYIGFRYLAKGQLISTGLYYCSIILPSTDCFYIVIYIGHIADRAKSYRYRLVPILKPTPMPTDISSPKSEQVGKTTPMIKRIEGVGKSVREIEWLDQRVMMASPIPPLGRGRSGCVERVVGAIGGERNNTYLGKMRRWSWEEDGGDENWKGYTEGLLLQIWTWTCYPVSMKREQNDYHGLRETTMAMEMDDGVDNSSTTTEVTPI

SEQ ID NO: 102854 - protein, 69 aa, Oryza sativa
  Clone ID: PAT_MRT4530_10033C.1.pep
MAGDARAAGGAAARGPRGGRAAGQLRMLGQGIGWYPLCRTGGIPAGGRGGFGVSLPTTAKRYLLGGVAV

SEQ ID NO: 102855 - protein, 67 aa, Oryza sativa
  Clone ID: PAT_MRT4530_100340C.1.pep
MATWIVFLFGGRAIDGHSAGNGEANVGYRGGLTLGRSYMFKGGAQEPGECVQEDVGLAVENRGMARP

SEQ ID NO: 102856 - protein, 94 aa, Oryza sativa
  Clone ID: PAT_MRT4530_100341C.1.pep
MKTRRAALLMLLLLVVVAAASWPQPCDAASGFCGSKCAVRCGRGRGRGSGCLRSCGLCCEECNCVPTGSGSTRDECPCYRDMLTAGPRKRPKCP

SEQ ID NO: 102857 - protein, 73 aa, Oryza sativa
  Clone ID: PAT_MRT4530_100342C.1.pep
KSRCILGWSQVSCDFYHVSRDTREVSCETCQVSDDFNHVSRDTHEVSCDTCHVSYNFYHVSRDTREVSCDTCQ

SEQ ID NO: 102858 - protein, 53 aa, Oryza sativa
  Clone ID: PAT_MRT4530_100343C.1.pep
NHCICTTLQHTHSAPTKLSYQSLNGFRRGEDGRRLTAPPVRRLSDGLRRRRTL

SEQ ID NO: 102859 - protein, 86 aa, Oryza sativa
  Clone ID: PAT_MRT4530_100344C.1.pep
MVGCEHMVLMVVLMTIKDRFTIFSCETLTVPTTSQRGQRLYFPYSMVHCRAPDYEVAEISPRGSLGSPCVVYKGVIMIRERCIALN

SEQ ID NO: 102860 - protein, 772 aa, Oryza sativa
  unsure (1)..(772): unsure at all Xaa locations
  Clone ID: PAT_MRT4530_100345C.1.pep
MAMLLLLRSLEFLAIMAVASSLAMPVAAAAAVPQPEPEVKPSDTDALTIFRNGADAHGILAANWEXSNACAGGWIGVGCSGDGRRVTSLSLPSLDLRGPLDPLSHLGELRALDLRGNRLNGTLDTLLLGVPNLKLLYLSHNDISGAIPDAIARLLRLLRLDLADNSLRGAIPVAALANLTGLLTLKLQDNLLTGLLPDVTAALPRLAEFNASNNQLSGRVPDAMRAKFGLASFAGNAGLCGLAPPLPACSFMPREPAPTSPSVPSSPQSVVPSNPAASSSSVASSSPALATPESRDGPGKGGLSTGAIAGIVVGNALFLFAMLSLLVASCCCSTGGESGGEPPKKRKRGGRVGLEDDDDGGMFGQGKGVQPGRPGSAGMRSDDGGDSDGARSKLVFFGVDGGEDDDDDDGGGSDSSAGRRATGGGWTAAPHQPHGRRSRFALEELLRASAEMVGRGSLGTVYRAVLSDGRMVAVKRLRDANPCARDEFHRYMDLIGRLRHPNLVPLRAFYYAKQEKLLIYDYLPNGNLHDRLHGHRMSGESPLDWTTRVRLLLGAARGLACVHREYRTSAIPHGNVKSTNVLLDKNGVACVADFGLALLLSPAHAIARLGGYIAPEQEDNKRLSQEADVYSFGVLVLEALTGKVPAQYPQPSPVVAADAAADAQRKDKRCSTAVSLPEWVRSVVREEWTAEVFDVELLRYKDIEEEMVAMLHVALACVTPQPEQRPSMADVVRMIESIPVDQSPFPEEDRDISTMSPSIGITTDDGDGRLSC

SEQ ID NO: 102861 - protein, 74 aa, Oryza sativa
  Clone ID: PAT_MRT4530_100346C.1.pep
VEQLYLVMPHELHFHMVYRLLREHIDQEVDYKVIVFCTTAMVTEFMYIMLRDLKLNVREIHSRKPQLYRTRISE

SEQ ID NO: 102862 - protein, 201 aa, Oryza sativa
  Clone ID: PAT_MRT4530_100347C.1.pep
ERWHARGHRSGIAARPVFILFTRLTRARDDDSDDLTPARRDDGDCRPASSLHLPQRTPSFSLRRAFFDGEDETRTSDLPPATTTAYSGEPPPPYGESPSPPSGEPLPPRRAPLSAAHRRSAASQTIPLSPDPPLFPSKAPPFPPPPHPLRTHAQRPLTAPLSIRRPRLSRGRAVAGSRHRPWPSRGRAAAVGRRDLFHLKP

SEQ ID NO: 102863 - protein, 74 aa, Oryza sativa
  Clone ID: PAT_MRT4530_100348C.1.pep
PNHTPVVSLEPSPTPPFITASRITSSPRTPRGAPPPLLPDLAEGRARPPPLHRGVPPPLRRARPPPPPPSPGRI

SEQ ID NO: 102864 - protein, 109 aa, Oryza sativa
  Clone ID: PAT_MRT4530_100349C.1.pep
WPPRRPEENTESVALDNPTIHPSSPSSPALLLPSSPPPGSHHPLEHPPPASFSTPAVDGRRRYRHRGAPPPLLPDLAEGRARPPPLHRGVPPPLRRARPPPPPPSPGRI

SEQ ID NO: 102865 - protein, 72 aa, Oryza sativa
  unsure (1)..(72): unsure at all Xaa locations
  Clone ID: PAT_MRT4530_10034C.1.pep
PNQPSPCRLPPPCPTDVLASPRTPPSGRAVIRAIRAASSSRPPFTSPADAASVARADPXPPAPPPSFFLGLV

SEQ ID NO: 102866 - protein, 918 aa, Oryza sativa
  unsure (1)..(918): unsure at all Xaa locations
  Clone ID: PAT_MRT4530_100350C.1.pep
MATPSDAATIIWSTELELAPLIAMVRNRDYFAGARFHVLRGACEHLAHVRDCVRTRARVAARRGRRLATAAAWTEEAEIYLLRFGELRSAHGRIPRLIFWDLLGCYRVSKVASLMMPQVKRLCEEGGRIVRRSKLPQPMEISTGFASRDRTLRAAIERVRTIQPNGIVAIWGRAGLGKTYLLKLVEEYFSRDDTFDLVLRIASPRDSSVAKVQSEIAKKLMLANCDGMQHRARIFDFLKERNFLLLLDCVWQRLDLEEVGIPSLDLVGSCYNRRVVFTACSSHVCDQMNVEVENRIEVHCLDHTESWEIFKQNADLDYLGHKHVYLPRNISAELLGSPLELVTIGKAMHNKKDAIYWQNALHYLTESCLRDTQWSGSEEATFFRLKLAYDSLTGILKDCFKLCSLWPEGHIFNQRKLVDFWIGSGLIQGDDIEASYNEGFSHITTLQEFCLLEPAEDGEAVQMQSTIRDFALWVVHSQGEDKNKWRIQTKENWGLAEQVLLVGLKITELPRIPSNQKTLEVLILQHNYLEDGSFGNFPSLLSLQYLDLSFNKLSNIPVEICMQVNLRYLNLSNNRIKTVPVELGCLTRLRHLHLRNNPNLVIPNGILPKLQNLEVLDVCSFNLLQCSSYEAPINELVRMDKLQSLGITVRSETSFQGISKTTLPIRSLSIVIYNHEDXMRLMYLLKILVSILKDKQTCLNLVFTQDKRLLCLTAFIQCGMFSMLRXAYLHGYFVDRIICQKLHTGDIFAKLRRLDIVRCSRLNHISWIIHLPLLEDLLLFSCSTLHQIIATAQDGVVKTNQEKENPSVNNTFPSLKRMTLIEAGALVRICSPFFSFPSLECLQISACPLLNKLPFLTVPSKLKCIRGENEWWDGLEWEDQDLEPSLELYFHGLSAEDQLSELYLFNSLEVEWASIFTP

SEQ ID NO: 102867 - protein, 171 aa, Oryza sativa
  unsure (1)..(171): unsure at all Xaa locations
  Clone ID: PAT_MRT4530_100351C.1.pep
MKPTSTGTFSTSMAMVMHRVSLCCAVLLVLWPLVAVAWRPWPSRNGSGKDEGMGAANNVEGPRDVVLLXVPHVAPSLAVDILVHPICYCRWPVXQNRTMRAFLRKLSPTGSGSGCGCIRSTAVAGWRLPVRLYTGQTCANVAXVVRLGRWKCYARASRSLRLTPLDVHAVV

SEQ ID NO: 102868 - protein, 185 aa, Oryza sativa
  unsure (1)..(185): unsure at all Xaa locations
  Clone ID: PAT_MRT4530_100352C.1.pep
RHGYISRESGYNVIGLYASLGGMLFEXTDSSCFYAAIXKDLGSMEFXHLSKLXHLVVIPLVKNSPDKXWKILIVNLLQPLLMHFGNVLEHAWSSMLHHGRARVPYHFGNLHGSLEIVRKLEEPLLLEFTREVCDLLGVLALPELNKGLTSFQNRSLVGYLIFPVLFVSFSIKNQKKVFIKKKKKK

SEQ ID NO: 102869 - protein, 144 aa, Oryza sativa
  unsure (1)..(144): unsure at all Xaa locations
  Clone ID: PAT_MRT4530_100353C.1.pep
DEQVLLEXGPVRPDSGCRPDQMHVVSEDSICHTSEILCAYGMRSRIWKESKFGMIGXAKLVSCMSLVCWFRMPTSCINREGGSNLXNITGRTGGIAAVRPVAASGDGSXISAVRPEKQSRPVRPTVSRRSDRRIYSGQTACHRN

SEQ ID NO: 102870 - protein, 60 aa, Oryza sativa
  Clone ID: PAT_MRT4530_100354C.1.pep
MVSMWPSSSTASSLLAETLGEGARAKRLEGDNDKRACTAGLLRPCAKERRKNDNKSGIDM

SEQ ID NO: 102871 - protein, 226 aa, Oryza sativa
  Clone ID: PAT_MRT4530_100355C.1.pep
MIQLLFLVLVAEAAVAAVLLFKTPLRKLAVMGIDRLKRGRRAPVAVKTVAGVVLALLASTLYSMAEISGRAGGDPESGGGGGGASLSPTDQVLFSRHLLEASLMGYSLFLALVIDRLHQYIRELRGLKKNVEAVTKHNKMLEEAKHGRSEETKKYQEEIGALNEDMKKLKLQVQEKTEEVHVAEDKALAIRKQSESLLLEYDRLLEDNQHLREQLQSIDHRLSSPK

SEQ ID NO: 102872 - protein, 40 aa, Oryza sativa
  Clone ID: PAT_MRT4530_100356C.1.pep
ETLQFGRKFLLPMNFLQISYVQTKKGGKTPFFFHLFFVRS

SEQ ID NO: 102873 - protein, 305 aa, Oryza sativa
  Clone ID: PAT_MRT4530_100357C.1.pep
MELLSSIKERGFVPVTPLVIALLVRTVKVSNISLNASKREITEFFSFSGDIEYVEMQSESERSQLAYVTFKDSQGADTAVLLSGATIVDRSVIITPVVNYQLPPDARKQSAGEKSSSAESVVRKAEDVVSSMLAKGFVLSKDALNVARSFDERHNILSNATATVASLDRQYGVSEKISLGRAIVGSKVKEVDDRYQVSELTKSALAAAEQKASIASSAIMNNQYVSAGASWLTSAFGMVTKAAGDMSSMTKDKVDRAEEERKAIMWEERNGLVSDYAKIHLDEPSSWEPAVLPLESVDEQKLQAV

SEQ ID NO: 102874 - protein, 129 aa, Oryza sativa
  Clone ID: PAT_MRT4530_100358C.1.pep
MGRRILNDALRTMVNAERRGKATALLQPISGVMVSFLNIMKHRGYIKKFEVIDPHRVGKINVELHGRIKDCKALTYRQDIRAKEIEQYRVRMLPTRQWGYVVITTPNGVLDHEEAIKQNVGGQVLGYFH

SEQ ID NO: 102875 - protein, 605 aa, Oryza sativa
  Clone ID: PAT_MRT4530_100359C.1.pep
MQFRLVILVLLLSCSLQLLRAFPFPIPFFGPFTSPQDVDAINELYASLGSPDLHGWASSGGDPCMEAWQGVQCLGPNITAMDLSSNRIGGVIPESLPPAVKQLNLSSNSLSGKLPDSMAKLNSLSTLRNGNHLTIPTMPGSSPTPDTIPGSPPTPAAAVAAPRSGASHPPIYVIPATPHGAAQGDPPRHGKKVSPAKAAGFSILAAGSLTIAVVLIVFAVSKRRRETSLHGGFLRGVEMSTPDWSGKPSGQSAVVKVDKEQSTVAEEKDTKGSISSYQKNVQESLQNHPLQFKFTIFTVASLQQYTNSFSEQNLMRQTLFGKIYLAEQQDIKFAVLKLDEAMARMPVDEFLRMVQRISELQHPNIEELAGCCVEHGQRLLVYKHFSDETLDDMIHLKKLASSDDPAAKITLPWDARVAVALEAAKALEYLHEGGQRQVVHQHFRPEHVLVDGEMRVRVSGCGLAAAVKSGLDLQSECWLDALSYEPPEAAAAPWTDKGDVYSFGVVMLQLLTGRRPYDGARPRGERRLVAWASSRLHDLTALEKMADPRLGTPATVRSMSRFADVISRCTQQEAEFRPAMSQVVQDLRRALQPARDACGQQSCSN

SEQ ID NO: 102876 - protein, 41 aa, Oryza sativa
  Clone ID: PAT_MRT4530_10035C.1.pep
PTYSWYPATYIDKPHLETGDKHIMPPYALNCLASMHIEYTM

SEQ ID NO: 102877 - protein, 79 aa, Oryza sativa
  unsure (1)..(79): unsure at all Xaa locations
  Clone ID: PAT_MRT4530_100360C.1.pep
LHPIRAFAXLSLPHSSNLQRQTIGGEEIGEQREQRDLRRYERYWQFLKMIATTQNILFVWRFDIVQVSILRRALGVCTD

SEQ ID NO: 102878 - protein, 966 aa, Oryza sativa
  unsure (1)..(966): unsure at all Xaa locations
  Clone ID: PAT_MRT4530_100361C.1.pep
MVARKPNPASVTGPDPGMIDDDTTAYLGASLVDEEELAKLVTSGVLAEKQAAAPGKAVVPKPGDNRTVVFTVFFEAGLRFPCNVLLPEILRLFQVELPQLSPSALIWIAIFDWACRTAGFXPNAELFGTVFYARERELQAGSDVAKSLQWRHRAIAPNKKPKVAVDGAMEARFALLRKVCSRLSCRDLVEEFCMLRIFPLSQLWQVEVNXDEEVDGLPKLVMLEGANMLTLVQAEAEARKVIGDVPITEYGQLLTRQAAGRANRVYDGDLPSREKPSKADGDEGTSRKXKAPASTDSDADDEDTVNDRDGEEEGEDEGEMEVAAETAADEPADDRTETCGYTPTPSPDHVETGVESNSFPLRRKDLEGAKALVLIAAAKVANGGSVKESSKKKGLVDVACVFSDDESSDETPTSPAGRSLGLSTAPGATTDTGEAGGSAAAGTSASADRVLQATVKLFGSLLRHTPASPPAIQKGKKVAVEASASDYSLAAPRFAPGDFETWADLIPFVEGVSHLVSPAGSPSQFTELNEFDEGYSAIKSLADWVSAAHCSTEQTVRARLDDFKNRLRAKDDELGYKILEMESLANTLKETKAENKRLQVELEKGSEAKAEIERLKAELKKEQEHSTALTDYYNLTEPKMEALRQEFSKAEATAEREAQRFAQEMAKAIESAKTACRTLRLALTDLGAKVRGVPSQDASAFDFSEWTQQASGAVSDCATAYGDCCARVSAAFTMGLLQQNGCEHIAEFPKFAKGDWEVSSQDVLPVLRAWRKQFRQKEARSTTKARLLEHLAKAEAMDQGKEPAAEEGXADAGAGAADVGQDHPEGLRRKLCVWPPFGDWQKTNEKFVAVKGLAKVSYVCREMIINGNSYKVLKVAGWMRAQPGRTLDNYDLFHVLRREDMARFWRNHRRTDRQEAIAXRRYSLVCVSPPSPLRVVYNISSDDEPSSPDHTLGSGGYFGGEDVILL

SEQ ID NO: 102879 - protein, 149 aa, Oryza sativa
  Clone ID: PAT_MRT4530_100362C.1.pep
ARRTWCPAAWQRHPSARAAAAYRMATQNRSETTAATRIWPAVVAAARMRPAAATGARMQSVAAAATRFRSAAAAASRMRLAAAAATRMRPAAAAAMPLLPSAATAARMWPPAAKAAPMHPAAATAAPLQSATASVVRMCPAMAAWMRLG

SEQ ID NO: 102880 - protein, 75 aa, Oryza sativa
  Clone ID: PAT_MRT4530_100363C.1.pep
MSLVKPVEMGGLTVAGPPQGVRGGSAVSRVTGGREAGVVLCKALGVDGHLSNLNVEVPFNYRGKKARGVPASGVA

SEQ ID NO: 102881 - protein, 69 aa, Oryza sativa
  Clone ID: PAT_MRT4530_100364C.1.pep
SFDPIHSQSHPIPSIDRSHAAALPIDALEIAARFIDRSAEIYMGIDKSAAGSSSSPPRPVAAATAAVCC

SEQ ID NO: 102882 - protein, 77 aa, Oryza sativa
  Clone ID: PAT_MRT4530_100365C.1.pep
MASEGAIQSVLPLLPLSSNGFPRGCRQPGAEAALAMTDGGVGAAEGVCAAAGLQGGAATGVGQGDGQPDVEQQGHVQ

SEQ ID NO: 102883 - protein, 118 aa, Oryza sativa
  Clone ID: PAT_MRT4530_100366C.1.pep
TATPTGLAAPAASRRRTAAPAAPPARPSPAAPRPSTASTRRRPPGSASAPHPPAAAAATSPLEPPHRRRAPPPTRPSPPPRRVSSPAAASPPSRRRRRRAPRRARRGVAAGGGGGGSP

SEQ ID NO: 102884 - protein, 139 aa, Oryza sativa
  Clone ID: PAT_MRT4530_100367C.1.pep
NKKNKTQPIITAAAMRVRWSQRRRRRIKPAPADLVVAGMAKADLVTIVRRAAQRCPAPEAPPATPAATRAPDEVVGGRGAGACGSGRCGASEGRSGRRLPPRYSPPPRAQGASRRSWRPPRCLLLPPPCGESLKPWHRP

SEQ ID NO: 102885 - protein, 63 aa, Oryza sativa
  Clone ID: PAT_MRT4530_100368C.1.pep
RAGKFEAKFFHKILQEEIGGVKGHFGPINALAFNPDGRSFSSGGEDGYVRLHHFDSDYFNIKI

SEQ ID NO: 102886 - protein, 87 aa, Oryza sativa
  unsure (1)..(87): unsure at all Xaa locations
  Clone ID: PAT_MRT4530_100369C.1.pep
GSKETPPPLVNVRHTYPVSPVVXVINVAQSILVIPLSPLVRXPGGKKIIRGRLPFLVPNVDPRHLAELFFSKKSFERFIKQKYGVKK

SEQ ID NO: 102887 - protein, 250 aa, Oryza sativa
  Clone ID: PAT_MRT4530_10036C.1.pep
MAMATSTFSPPASQLSLTRRRLHPGPDLLTLSSPRLRAGLRLAGAAAGEAPVETVEAPPSKPEAEPSPAASNGAAVKAEKPPAAAAAPPLPKFRDSRWVNGTWDLRQFEKGGAVDWDAVIDAEARRRKWLEDCPEATSPDEAVVFDTSIIPWWAWMKRFHLPEAEKLNGRAAMIGFFMAYFVDSLTGVGLVDQMGNFFCKTLLFVAVAGVLLVRKNEDIETVKKLIDETTFYDKQWQATWQDESPSQPKK

SEQ ID NO: 102888 - protein, 233 aa, Oryza sativa
  unsure (1)..(233): unsure at all Xaa locations
  Clone ID: PAT_MRT4530_100370C.1.pep
ARSDEFAIGDGLVVITTDSFMEXRCRPATAQVKRIAEDPDDQPEESLLVIXGRINSAVXGPSNRTIISSSPRLACIAIWHVQTGQCLKESDKEQGHQKTITSLSKSSDXSPFQTGSLDKSAKLWDTRTLXTLIKTCVTERPMSQYLIPKYISSVVIGGGQDAMNVTMTNCLAGKFEPKFFHKVSSSHIVXVLCFSENNDSSSCIXGVNSFSSGGENGYVRLPPFDFDYFNIKI

SEQ ID NO: 102889 - protein, 68 aa, Oryza sativa
  Clone ID: PAT_MRT4530_100371C.1.pep
MRELPTSLGRNLGLGWGSLPARASTWAEFVPLPIVFRAAPSPPLRPSGGGTLPSAESSGRGGGGGPAA

SEQ ID NO: 102890 - protein, 1259 aa, Oryza sativa
  Clone ID: PAT_MRT4530_100372C.1.pep
MPRRRRRRRAAPGGQVPPELRLAYGARALTLGRTVFSLLPSPRHCESPCPACRGRVASGCLACRRWEHLLRDGDPIAYRRLITRAVCAIAADDLSAPPPPRYTPGNSGHSQARLVREMMKSIVADQSHGTKNVLCNGLHEGGQSICISDLVSSSSWSILLHRIGDLLMCYLLRCTSIFLPVKKNDYFQVSGVPLNVVLRNPIFASTVARKHQPQTTKAKCHPCYLWKSANMAENLSICHDSSNSGVNSSFSSTCKIVTQQSCETCGSIRRAESKDPSEGCNCPKFPSDGRSGECCNCYTHNTRKRKRLYSWQRRSKKKQVCSVDESSAEWSKLNGSNFNMSNGPSENLAGKMNDQAQSVELTVDNTSLARSNDDSSSEIKVINATILSSEKSPCSVFDIRGSQGLSCHYSLSEVQYQSTCPQVGPSSYLHLNSCSICFNCIISNASKHLSLDSLISRNGIFYNRRTTYSVFHCKHILSKRKRPDALSLVKHIFGINSCCASLLKYNCHESTIRKSNCLCCWLPKSIKNLIRNSKRCQYKKLFLKHCSVKCKVAPDVTKNDGKAHYPPGGKAAYYDRSFSRLEAYSTHQQVASFVWAVLKRIVPKPLLGNFFGKRSLRTNIWKFIKLRRFETFQLSDCIGDLKVSHYSWLSNIEFSNCFCSAIIGKQTGSSTSAEEQEQKNILHCWISWLFSDIVIPVVRTYFYVTERESKRYDVFYYPKSVWRDLTSNAIASLNKKNFRILRGEPRKAVRHLNCSSRVRFLPKAKDMRPLVDLRAKSKDANLNKCHLIMKKLRDEKPEMFGSSVFDYNNVHQNLSQFISSKRSQLMKKLKVYIVVADVSKAFDCVSHDMVLKMIDDAFKCDEYTVRKCSKVICNRSKNSLYRFDSNASIGNGNSIYDLSIQLSSGGGIFADQGTICRILKEQFHHLLYEQIKCNILKIGQKYYLQQVGIAQGSKLSPNLCSLYYGHLENSVLSKFLHDSKLNAGEAFSEPEYLLMRFIDDFIFISFSLEHAQKFLNRMRRGFVFYNCYMNDSKYGFNFCAGNSEPSSNRLYRGDDGVSFMPWSGLLINCETLEIQADYTRYLDITIISTITVKMHSSTKYIHSKLCHYMRPKCHPIFYDSNINSPGTIRVNIYQAFLLCAMKFHCYIRSVSDANVSKLELLQVIKRTFRYMHSLIVRRMQDVELHYNVRPVLKLRRKETIWLGLTAYIRVLQQKQSRYKDMLTLLTAELGRYCHLGHECDTLRYAVDDSHSSMFWKFKF

SEQ ID NO: 102891 - protein, 109 aa, Oryza sativa
  Clone ID: PAT_MRT4530_100373C.1.pep
VGCSVLGRVSEKAHAGSLVEQDPAGPRVLALASPVVGARVNIALPPTPFSRSRRMQPRIPVPGRSAKPLASCRRRRARMHGGRFGPRPGDTHHRFISVQELASSSSMTT

SEQ ID NO: 102892 - protein, 489 aa, Oryza sativa
  Clone ID: PAT_MRT4530_100374C.1.pep
MAENLSICHDSSNSGVNSSFSSTCKIVTQQSCETCGSIRRAESKDPSEGYQESVATAIPTTPGKEKGYTVGSAAAKRNRCCWLPKSIKNLIRNSKRCQYKKLFLKHCSVKCKMLVSFSIDLVRVEEKSDLGTEVAPDVTKNDGKAHYPPGGKAAYYDRSFSRLEAYSTHQQVASFVWAVLKRIVPKPLLGNSFGKRSLRTNIWKFIKLRRFETFQLSDCIGDLKCSAIIGKQTGSSTSAEEQKQKNILHCWISWLFSDIVIPVVRTYFYVTERESKRYDVFYYPKSVWRDLTSNAIASLNKKNFRILRGEPRKAVRHLNCSSRVRFLPKAKDMRPLVDLRAKSKDANLNKCHLIMKKLRDEKPEMFGSSVFDYNNVHQNLSQFISSKRSQLMKKLKVYIVVADVSKAFDCVSHDMVLKMIDDAFKCDEYTVRKCSKVICNRSKNSLYRFDSNASIGNGNSIYDLSIQLSSGGGIFVDQLRVRNLKVHFC

SEQ ID NO: 102893 - protein, 112 aa, Oryza sativa
  Clone ID: PAT_MRT4530_100375C.1.pep
GGQSICISDLVSSSSWSILLHRIGDLLMCYLLRCTSIFLPVKKNDYFQVSGVPLNVVLRNPIFASTVARKHQPQTTKAKCHTVSILQYIFILLSILSEKSSNCIVSITRAIR

SEQ ID NO: 102894 - protein, 101 aa, Oryza sativa
  Clone ID: PAT_MRT4530_100376C.1.pep
FLNNYTLLLSRYMHSLIVRRMQDVELHYNVRPVLKLRRKETIWLGLTAYIRVLQQKQSRYKDMLTLLTAELGRYCHLGHECDTLRYAVDDSHSSMFWKFKF

SEQ ID NO: 102895 - protein, 146 aa, Oryza sativa
  unsure (1)..(146): unsure at all Xaa locations
  Clone ID: PAT_MRT4530_100377C.1.pep
MPRRRRRRRAAPGGQVPPELRLAYGARXALTLGRAVFSLLPSPRHCESPCPACRGRVASGCLACRRWEHLLRDGDPVAYRRLITRXAVCAIAADDLSAPPPPXRYTPGQLRGIRRARLVREMMKSIVADQSPWKKRTSSDIWFARD

SEQ ID NO: 102896 - protein, 81 aa, Oryza sativa
  unsure (1)..(81): unsure at all Xaa locations
  Clone ID: PAT_MRT4530_100378C.1.pep
MAANAALALAVSLLRAPIXNTCTYCPKPPTPKPNPSVPRPSTPGSCSGSCPRHALKLHLCSNVLGLVKVKIEAEVTYELLC

SEQ ID NO: 102897 - protein, 174 aa, Oryza sativa
  unsure (1)..(174): unsure at all Xaa locations
  Clone ID: PAT_MRT4530_100379C.1.pep
MATNNPVSLKAEEQKCHGGGGGRVIQAITMLVATAVTAQAAYRARREPWDLAFVLFAYADLGLLFLCLSMYERLPPPLEEIQKGDSGDDGAXRRRRLKMAVWALSTALSVAFAWRVAAVMPAPAMRAAVWGMTSTVAVAGFYLLFVYRPVTISSYSEMDTCKHKQSSPKLDQMV

SEQ ID NO: 102898 - protein, 388 aa, Oryza sativa
  Clone ID: PAT_MRT4530_10037C.1.pep
MDKHNSLQDDQQYCIKTHGVQGTQQIMSLNAWMRSDRSRAGRYYNYQKGQPYGAGANNVEIFTRVPLKNMMPASVPLKSSSLSLCHRQTLSRPPHHSVLFSPNGVKQRNQMTLLPLDLRAHLVKFVFFCAIRRAAIRAQGRGRCSGEARCGRRGEGADRAAVMVKERIARALRLYKKRRGNGGGTVSLTRVFPVGGAAAADKQGLPARAFDTGTPEWTPNVQCYGSGEYARISYALIYDIQGSLFLPILDPDDASSPLAVHELVSTVLRLRGSGEVQGLLAVNQIVNPDETRAAMAELTSCHWHANMGEMQERRKRHGEGRADDRRRTVPPRRRRRRAKEVVGRQLEGWPVALSARLGGDGGDEERGGRRGGAGVQQLGHARLGVGWE

SEQ ID NO: 102899 - protein, 71 aa, Oryza sativa
  Clone ID: PAT_MRT4530_100380C.1.pep
EWCVIWRFQSVVFRVGLCVLRYMVRVVWIGCAYEFGCGKICVVFVTSLCGGSGLNLMYLVFVRKWVCVVLG

SEQ ID NO: 102900 - protein, 91 aa, Oryza sativa
  Clone ID: PAT_MRT4530_100381C.1.pep
MEALFSMLCKAFPSSNKVPKSYSDAKKTMKDLGLDYTKINAYLNDCILYRGANDKADSSPVCGISRWKNEGHNNVSKSRRRRVKKVPHKVF

SEQ ID NO: 102901 - protein, 51 aa, Oryza sativa
  Clone ID: PAT_MRT4530_100382C.1.pep
VLIVFLIASIVFLLEIQQGIDYDKIKMLLQRIRGIGVVGDKLDNIATMKAM

SEQ ID NO: 102902 - protein, 165 aa, Oryza sativa
  unsure (1)..(165): unsure at all Xaa locations
  Clone ID: PAT_MRT4530_100383C.1.pep
CRPCHEPIWLKAIPNTCRIFLWLAFRDRLNTTDCLRSRGLSHPDRCVLCDQCEETIDHLLVACPESRQLWWIALRAIGHSECLPLNEPSFHSWLCDSRKKMVKEHRRGFNIIATLVAWTIWKERNNQVFNXKSGTWAEIVRVMTGEAELWRLARAAIPVMVTHYM

SEQ ID NO: 102903 - protein, 169 aa, Oryza sativa
  unsure (1)..(169): unsure at all Xaa locations
  Clone ID: PAT_MRT4530_100384C.1.pep
AYQKMSYRMMSNEYAIRYIRHVSTKEQLSTRVGCGXVHRIIENVLEKCRVVAHNLPTKTDDLSHSTNHGXAIREKENSIQHCXRLHVSMVLHQDRLRRVRXMLMRLRRRFYAFSITRERLVDLDKEYGMKRWRDXSVVSDLAGCGFEEEGYPVVDYESVLQTAKSTTVR

SEQ ID NO: 102904 - protein, 63 aa, Oryza sativa
  unsure (1)..(63): unsure at all Xaa locations
  Clone ID: PAT_MRT4530_100385C.1.pep
LSPPPWQPPRTPTLSPSSSPTPTPLPPPRXPAPPHIAFAAPPTMPPSSTVARPMRTSARRLHG

SEQ ID NO: 102905 - protein, 43 aa, Oryza sativa
  Clone ID: PAT_MRT4530_100386C.1.pep
SNLRLRSSEAERRNQPTGPKPDATEELAQGAPGVDGVQSSTQG

SEQ ID NO: 102906 - protein, 86 aa, Oryza sativa
  Clone ID: PAT_MRT4530_100387C.1.pep
ILCLSNNHNTLWHKFGSSVGNTHGFDITFYTTSLKDYIGQWNQTCCLRKTTTTSSITLHDQTVQTNIRMVSIHSQEQSIVPSISSM

SEQ ID NO: 102907 - protein, 83 aa, Oryza sativa
  Clone ID: PAT_MRT4530_100388C.1.pep
LEHKWLVIKMYCPSPYLCFPPIFPWLYGFGPLLSVKDRTALGRVKQFPLSTFLSLFFGANHFSIKNALPYSTPLLTSQHTLFM

SEQ ID NO: 102908 - protein, 407 aa, Oryza sativa
  Clone ID: PAT_MRT4530_100389C.1.pep
MWGDGKAMLKSRGGGAAGGAGGASGDEEADYCPPTPRKEWWTTGLLVKLVTVAVIFMAGVVIGLSASANVSRYYYNSHTELFFPSNTFGACERADCAPTFKSFVHPPHLAHSMSDPELFWRASLVPVADDFPFQRVPKVAFLFMTRGPLPFAPLWDRFFRGHHGLYSVYVHTLPDYKLNVSKNSAFFARQIPSEEVSWGSITLVDAEKRLLANALLDFSNERFVLLSESCIPVFNFPTVYEYLINSAHSFVESYNIDTPQCAGRYNRRMAPHILPSQWRKGSEWFELNRELALRIIADNKYYSIFRKHCRPSCYPDEHYIPTYLHLFHGSLNANRTITWVDWSRGGPHPARYGASNISEEFIQAIRNNGTRCTYNSKPTSVCYLFARKFAPSALGPLMNLTSTILDF

SEQ ID NO: 102909 - protein, 444 aa, Oryza sativa
  Clone ID: PAT_MRT4530_10038C.1.pep
MDKHNSLQDDQQYCIKTHGVQGTQQIMSLNAWMRSDRSRAGRYYNYQKGQPYGAGANNVEIFTRVPLKNMMPASVPLKSSSLSLCHRQTLSRPPHHSVLFSPNGVKQRNQMTLLPLDLRAHLVKFVFFCAIRRAAIRAQGRGRCSGEARCGRRGEGADRAAVMVKERIARALRLYKEAAGGGGSGGGWMVQVWAPVRDGARRVLATRGQPFVLASQCHRLFQYRTVSLTRVFPVGGAAAADKQGLPARAFDTGTPEWTPNVQCYGSGEYARISYALIYDIQGSLFLPILDPDDASSPLAVHELVSTVLRLRGSGEVQGLLAVNQIVNRDETGAAMAEVSELLTTTWVRCRSGGDDTEKAALTTAGAPFHLAAVAAGQRRWSGASWRGGRWRCPLDSAETAVTREGEAGVAARASSSSATLGWVPAGSDADADAMERGESREKRE

SEQ ID NO: 102910 - protein, 950 aa, Oryza sativa
  Clone ID: PAT_MRT4530_100390C.1.pep
MGDAGGPLPGERRLSPADPEEPSPPASSSDGTGSGGGGGENSVEEGDGEGPGSGSGTPTAKRQLFDADGSASRPTRRRRIASDDEERIHLRTLVAVEGKLWRCPSVLVPLPAQQRGRAWGGGLGRAAMRINGKEITQAFTGETTSENTSSTNESNPFIAVLDSMWSKKRELDAIKEAGKDERHEKLLSLQKERLALERQKLEYERNLLEFKRNQRDERIMNMDLSDMTGQLREYYLRLQDSESDRKTCDKIKDFRIHRLRRMGMGAPMPPEWNETIIVLIPKVPKPENIKDLRPISLCNVLYKIVSKVLANRLKTILPEVISPTQSAFVPGRLISDNILVAYEMTHYMRSKKRGKMGYAAIKLDMSKAYDRVEWSFLRDMMLWLGFNAEWINLVMHCVTSVSYKIKVNGDLSEVFSPGFSALLRKTEEEGRLQGIKVCHNATSVSHLLFADDSLIPCRANRGDAQNLQNILTLYEEFSGQMLNKEKFAIMFSSNTGSEKRREVMQTLQINKQTMNERYLGLPVFVGRDKTKVFAYLKDRIWKRIQGWKEKMLSRAGKEILIKAVAQAIPTFAMACFDITKTKQCWRLLQEPDSLCAQIPKAKYYPSGSILQAKPRSGMSYTWSSILKGLQTLKTVMIWRVGNGNSIGIWDDPWIPRDWTRKTVSNKGTNLLTRVNELIDPYTGDWDEMLKEMERRNSRRTPASSSRGAQSDQVWKRLWKLNCPNKMKHFMWRLGHDAIALRMTLKRRGMDIDTKCLISNRMDEDGSHFFFKCKEVKHIWGDLNLEEVRCKLAVVQSALAVLQAILELEEKQRIHAIVLLYSCWNERNGRREGEGRRGASILAFSVQKQADEFKDLAPQWGSGQADRSNRKWARPTGNVLKINVDGAFKPQEQKGGWGFVIRDSEAQVIQAGAGFSSRLQDAFHAEVLAGVKGLKAAASLGMAHIHLESDL

SEQ ID NO: 102911 - protein, 51 aa, Oryza sativa
  Clone ID: PAT_MRT4530_100391C.1.pep
MIVSKKSSGSTWVSRHPRSIPRGGRPDRHRTAIWIKTVTLSEQLTLGNENE

SEQ ID NO: 102912 - protein, 199 aa, Oryza sativa
  Clone ID: PAT_MRT4530_100392C.1.pep
MGDAGGPLPGERRLSPADPEEPSPPASSSDGTGSGGGGGENSVEEGDGEGPGSGSGTPTAKRQLFDADGSASRPTRRRRIASDDEITQAFTGETTSENTSSTNESNPFIAVLDSMWSKKRELDAIKEAGKDERHEKLLSLQKERLALERQKLEYERNLLEFKRNQRDERIMNMDLSDMTGQLREYYLRLQGEIMARRSG

SEQ ID NO: 102913 - protein, 1231 aa, Oryza sativa
  Clone ID: PAT_MRT4530_100393C.1.pep
MIWRVGNGNSIGIWDDPWIPRDWTRKTVSNKGTNMLTRVNELIDPYTGDWDEMLVRQTFCEEDVKAILSIPVQVDRDDVVGWHYDKRGLFSMKSAYKVQKEIERRNSRSAPASSSGGAQSDQVWKRLWKLNCPNKMKHFMWRLGHDTIALQMTLKRRGMDIDTKCLIFSGSHFFFKCKEVKHIWRDLNLEEVRCKLAAVQSALAVLQAILELEEKQRIHAIVLLYSWWNERNIHREGEGRRGANILAFSIQKQADEFKDLAPQRGSGQAARSNRKWARPTGNVLKINVDGAFKPQEQKGGWGFVIRDTEAQVIQAGAGFSSRLQDAFHAEVLAGVKGLKAATSLGMAYIHLESDSMMLIQALKGEDLQFAPLGTLLFEAKNIIASSFLTCKFSFCPRDCNKLADAIASIGCNSPPNTDLFGDGAPPGVEEFDVFYKMDAYYREKRRLGSQVGGATQPVTAVSKDFTAALFRFFWPYNAHYCILIYPEFQTILNLIKKRSIMRPSQFPCSRISSKLPTDLLGFALLTVLCLASSTDSCIDQEKSVLLQFLAGLSGDGGLSASWRNGTNCCTWEGITCNADMRIADILLASKALEGQISPSLGSLTGLLQLNLSHNSLSGELPLEGLVSSSSIVVLDVSFNHFSGALQELFIQSTIWPLQVLNISSNLFTGKFPTTTCKVMNNLVALNASNNSFIGQIPSSLCINSPSFGVLDLSSNQFGGSIPSDIGNCSMLRVLKGGRNNFKGPLPDELFNASSLEHLSFPNNDLNGVLDDANIIKLSKLSILDLQQNIFSGNIPKSIGQLKRLKELHLGENYLYGELPSTLGNCTNLKILDLKINYLSGDLGKINFSSLSNLMIIDLLVNNFNGTIPESIYDCTNLIALRLSWNKFHGEFSHRMDRLRSLSCLSVGWNDFTNITKALYILKSFSNLKTLLLGGNFNHETLLADETMDGFENLQYLEISGSSLHGKISLWLSKLTKLKVLQLSNNQLSGSVPAWINSLNFLFYLDISNNNLTGEFPTILTQIPMLKSDKRTNLDVSVPNMRFYGIPFIKNRQYQYIHTTINIAKNGFTGAIPPEISQLKALDMLNLSFNSFSGETPQAICNLTKLVMLDLSNNNLTGTIPLELNKLNFLSAFNVYNNDLEGAIPTGGQFDTFDNSSFTGNPKLCGGMLSHHCNSARALPSPTSSTDQFGDKVIFGITFGLFFAYGVLLDQMVLKRLRSLQGILIFQLYEQS

SEQ ID NO: 102914 - protein, 92 aa, Oryza sativa
  Clone ID: PAT_MRT4530_100394C.1.pep
AGGGRTASENAEAVVDFVADKMNRAWIGFGSAPEGSMKNRIHSFGLKLLSRVRPSEVLLKSVTKDVSLLEIVHPASINTRLGRRRLRHFDAG

SEQ ID NO: 102915 - protein, 83 aa, Oryza sativa
  Clone ID: PAT_MRT4530_100395C.1.pep
MRMMSISLQVNLLEETKDGDLNMFVHHEVPLADFPLCTAWMDFNLKGGDKGNFVAVGTMDPAIEIWDLDIVDEVQPHMVLGGH

SEQ ID NO: 102916 - protein, 73 aa, Oryza sativa
  unsure (1)..(73): unsure at all Xaa locations
  Clone ID: PAT_MRT4530_100396C.1.pep
NKKKXPQKKTKTXQTTKKKPKTPKNTPPLFFFFTFYLFNILSFFFFFFFFFFFFPPPPFFFFFFFLINKKPAV

SEQ ID NO: 102917 - protein, 156 aa, Oryza sativa
  unsure (1)..(156): unsure at all Xaa locations
  Clone ID: PAT_MRT4530_100397C.1.pep
PPVSSEKRAPTTPAPRKTPKATEPXLPAGNQMPTRKVSYTYSTLCFIHKTSNHSFMNCKVVLQVKAELDACRDREIQRTSPFKSWCPIHKSKGHSLSGCKVFLDATKSMTRPPXLLDPSTRKPISXVSKDDCTEEPLDRFVGVIDIDPHDSTNPPP

SEQ ID NO: 102918 - protein, 96 aa, Oryza sativa
  Clone ID: PAT_MRT4530_100398C.1.pep
MVKGLQRLLKEAAAAATAVDPEGGGYDLQWRQLLPKVVAATCCGNGGGGGGDSRRQRIHQSRPQATTVTGGGGSYWCCKRWAAVLAGEEFLGMFLL

SEQ ID NO: 102919 - protein, 142 aa, Oryza sativa
  Clone ID: PAT_MRT4530_100399C.1.pep
MGADQPGTQDLGHLSTKNEHAEGKKLGKCREISKAAAPRAPGDQGHCKCDLLANLELGLQKQCGHIEVPTGYQELRNVAEKRSKARYKWPNAARRHQITPNGPHVSCRIPRGFGLHGQRQRRDGPYRRVSLEQCLNYIPRKL

SEQ ID NO: 102920 - protein, 140 aa, Oryza sativa
  Clone ID: PAT_MRT4530_10039C.1.pep
MQSWSLVKTTFLLAAFDDLDDGNGRVNVFLRKLAKSCIGIISSESPHALVQFVLEEAALGFISSECSIGAAADRIWRLFPVLYLPACSNFILWQQHPTPGQMLFALEGIKMPIPSNSRYLEAPTAATRKPALSVGISNLP

SEQ ID NO: 102921 - protein, 90 aa, Oryza sativa
  Clone ID: PAT_MRT4530_1003C.1.pep
MTARLRSEGFCPARGCLVVLETSFIMLLKLLTFDRLRAAGVAFKPSSLSNGRSKHTVENFVSYSSTVAEAKTMETHAQASPPAAADKFAS

SEQ ID NO: 102922 - protein, 230 aa, Oryza sativa
  Clone ID: PAT_MRT4530_100400C.1.pep
PPRRLPLPAADKTKGALLNWSKRFQIIKGLAEGLLYLHKHCWIVHRDLKPSNILLDHDMNPKIGDFGSAVTLVSDVAEERTKRVVGTSGYIAPEYASQGLYSLKTDVFSFGVVVLETISGRKNFIMEKQRDIVGYLFQAWHMWKDGRLQELVDPALCDGYESTVIMRCTQVALLCAQEDPADRPTMTDVTAMLDSESIMLSDPKEPTELTHGGAPVLTGHRHILVTQARR

SEQ ID NO: 102923 - protein, 239 aa, Oryza sativa
  unsure (1)..(239): unsure at all Xaa locations
  Clone ID: PAT_MRT4530_100401C.1.pep
MAPVVATPSLLFSSPTPRRPSSCLPPPPPCSSSSSSYASHGFKLLQPQLLFINRLTSRNSNGSSRRSISILSLRCSSSGTDSASSSATSERWVLEPAGDGDWRHIGYRVARPGGFQIASEAAVTVGRVPEQADIVLSVATVGACWXQTWSSGTHARLEKKEGSLLVTDLESTNGTYINERRLTPGFPTPIDPGSLLIFGDIHLAMFRVSKMIVDVSSDTNGAEQEAETAQVSAATQQTN

SEQ ID NO: 102924 - protein, 137 aa, Oryza sativa
  Clone ID: PAT_MRT4530_100402C.1.pep
TDKTKGALLNWSKRFQIIKGLAEGLLYLHKHCWIVHRDLKPSNILLDHDMNPKIGDFGSAVTLVSDVAEERTKRVVGTSGYIAPEYASQGLYSLKTDVFSFGVVVLETISGRKNFIMEKQRDIVGYLVRDVSEDTVQ

SEQ ID NO: 102925 - protein, 403 aa, Oryza sativa
  Clone ID: PAT_MRT4530_100403C.1.pep
MAAREGASSSSGSSSSHHEAGGRRSPLELSLLLTAAAGAAVAAAATPRDAHAASGGVMGGRRSSSPSSYCRRTSSSSSSSSSSSSSSSSPSSREDESVISVIVAGAVVVAYGVACVGAYVACGVVYIAAHLLRPRSATTVVKLQVAFRGLTKIIQRDLNGIARKVDTSNRSWDKFMLTETICSLNRHKDICISSSLSADLQKRLLFWGDCWEKHFDKISIEERSKFDEETLYNVQGIKMKKKYLKPGLGKENEYLVLTILLAAEGKLEFPIVRSASDLTTVLGILNSIHANKIEGIQVLWTPQKIGDILPEERLLKDYPYLKPLLKESDSLGVASVTEIEQSNQRSITEGQDSFAVSSVTETMQSNQGSVMQDQYFIEVANVTDVKQSNQESTKEDQDSKQSN

SEQ ID NO: 102926 - protein, 71 aa, Oryza sativa
  Clone ID: PAT_MRT4530_100404C.1.pep
CPPCLPRPLAPLCHRRRGPPCPRPPGLPPSQAPTRPRRGGAPAATGTSPSGRACRWRPRHCRCSPPSRPRP

SEQ ID NO: 102927 - protein, 48 aa, Oryza sativa
  Clone ID: PAT_MRT4530_100405C.1.pep
MAILYAVVARGTVVLAEHSAAATNAGAVARQVLERLPGGGADSHVFYT

SEQ ID NO: 102928 - protein, 116 aa, Oryza sativa
  Clone ID: PAT_MRT4530_100406C.1.pep
ELPGGMDYWLWDQKGNKIPPLLGLLMWALAATWCDQMLKENGPPKLQECLPPNPGLENAQSQESHWALQGMGIIQFGPEDPVDFWRWPRSCPCNRSSYATVPTSKPMALASEFREF

SEQ ID NO: 102929 - protein, 230 aa, Oryza sativa
  Clone ID: PAT_MRT4530_100407C.1.pep
RKKEVMGVAAYLFQYATVIVVRSAAQYASCTPPPVTARAFGLGPQGMRGVHSLRRPARLARDETRKPKRPIYYPPGSGNGGRRGVGMQRGGRRAATLTQPEHSRAGIRGGEEKSGATHNRPAARERRAAGGHVPLQRGFRFAASRRSLCLCGGSLGDGQTRGENGGGTPERRRRSRRWSPVGVIAASVAAATGRWQNSATRLWAWTPSWAFGPDTNESRRAQFGFFPPTR

SEQ ID NO: 102930 - protein, 167 aa, Oryza sativa
  unsure (1)..(167): unsure at all Xaa locations
  Clone ID: PAT_MRT4530_100408C.1.pep
HVGVILDLGSLVGKEARTSISMAVEDFYASHXNYRTRLVLHVRDSRGNNFQAASAGTCSMFSLWMPPPSGGDVVGARGYELRAATEGFRTPNQKGSELPLVQSRPAAALGGGEKHSISPRRIRDHRRLRRRPQRARCYLIRRRRGRGGGDLWAVRPWRRRLAADPGD

SEQ ID NO: 102931 - protein, 162 aa, Oryza sativa
  Clone ID: PAT_MRT4530_100409C.1.pep
HPRVAVAAPIPHPHRGAPSPLSSSRSPSPSTTAAEVSVASRRCRRLLRRHSLPSSLRSPSLEASSQARRPPPPDSLGSAPTGFGVGARPLPPPCGLRPRTASGPARPPPPFHGSSSRPSLPRSPLRAAAVSLCMIVVAHLHGKRAVRRGRGRKRGGRRGSRS

SEQ ID NO: 102932 - protein, 321 aa, Oryza sativa
  Clone ID: PAT_MRT4530_10040C.1.pep
MAAQTTVTTVAASCSHSTPPASRSLPDRVRLRAVGRSWRAVAATRSLAVDNLAPRLLPAIFFLGLRSLLVADAAGYGRGRVVTRTIVAVHQETTTSCKGDQCNGCSDDDEEEDVHDGEDGCWVAYGRRGMMRRLPPPLPSLRGAMRRTCTKDGRLVVTEAPAGARRRHEYIRARRRGGRVTMQLVESKDFYPCPSPVEEDDDDDDIVNVTQAVSDTSTAAATVGECDPGHMQKAPATAPPPPSPPSIGCFEDVVKYHSIGSTSLHQIATDVGGQVQRRAPRPGSGGHGDVVLVKQQVHACRAALPGALELGAAAWHPASLT

SEQ ID NO: 102933 - protein, 64 aa, Oryza sativa
  unsure (1)..(64): unsure at all Xaa locations
  Clone ID: PAT_MRT4530_100410C.1.pep
FFFFFFSPYLYIILLLTKTCHAQLWLGRDLIHRTKRKHKKENTNLIXNASQPDLLNNGVKARPA

SEQ ID NO: 102934 - protein, 107 aa, Oryza sativa
  unsure (1)..(107): unsure at all Xaa locations
  Clone ID: PAT_MRT4530_100411C.1.pep
MQLKPKVRTRRNKTKAKRXWRCAEIVLNVTLSMHGNRLEAYQLNPMSHTKSYRRNRLYRLTQSDRTQPILIVTDLDSNRFLLCFRNDLHFRFRFDSIFFSDTNITKL

SEQ ID NO: 102935 - protein, 51 aa, Oryza sativa
  Clone ID: PAT_MRT4530_100412C.1.pep
LAVTSAVAAPLRCRRWPREVKGHLVHPAHPAVHRLPPPSVVVFTHAGPSPW

SEQ ID NO: 102936 - protein, 316 aa, Oryza sativa
  Clone ID: PAT_MRT4530_100413C.1.pep
MAAGEEVMDRSTSAEDGYCSAGTDSPRAESVDEQGAAEESSPRGGQKRELPSPSASPSSPLPPAAKRSRRSVEKRVVSVPIAECGDRPKGAGEGPPPSDSWAWRKYGQKPIKGSPYPRGYYRCSSSKGCPARKQVERSRADPTVLLVTYSFEHNHPWPQPKSSSCHASKSSPRSTAPKPEPAADGQQPEPAENESSASAELEVPEPEPEQESEPVVKQEEEQKEEQKAVVEPAAVTTTVAPAPAVEEEDENFDFGWIDQYHPTWHRSYAPLLPPEEWERELQGDDALFAGLGELPECAVVFGRRRELGLAATAPCS

SEQ ID NO: 102937 - protein, 106 aa, Oryza sativa
  Clone ID: PAT_MRT4530_100414C.1.pep
RRSVEKRVVSVPIAECGDRPKGAGEGPPPSDSWAWRKYGQKPIKGSPYPRGYYRCSSSKGCPARKQVERSRADPTVLLVTYSFEHNHPWPQPMSSSCHASMSSLGR

SEQ ID NO: 102938 - protein, 109 aa, Oryza sativa
  Clone ID: PAT_MRT4530_100415C.1.pep
DFFFKSAENISFFFEEKAFGDDGCLKQAKELSINKVGHGIGGEVVPHQDNTFLYTNPPSCTGLWLALEDATKTNDGLKRRMIRDENDTHFDHPSPTYDLKEFVPLEVKS

SEQ ID NO: 102939 - protein, 58 aa, Oryza sativa
  Clone ID: PAT_MRT4530_100416C.1.pep
MIFPRDKINTIPLKYSWVKCYNGISVRLRINFVTIIYQEYFCAIARNYISSNVVKKYQ

SEQ ID NO: 102940 - protein, 220 aa, Oryza sativa
  Clone ID: PAT_MRT4530_100417C.1.pep
MPPAGSLTDEQLRFFDANGYLVLGSFSSAEEVRAMRDRMAELVDGFDGAGDVFSTKDHRQVKNDFFFKSAENISFFFEEKAFGDDGCLKQAKELSINKVGHALHELDPVSKKFSFGANGCLWAIPGSHKNGLKRRMIRDEIDTHFDHPSPTYDLKEFVPLEVKSGDLVVIHGDLIHQSFENLSPVSRHALSLHVIDTEGCEWSKQNWLQRKIPPQPLYEN

SEQ ID NO: 102941 - protein, 194 aa, Oryza sativa
  Clone ID: PAT_MRT4530_100418C.1.pep
LKQAKELSINKVGHALHELDPVSKKFSFGENVSSLFSSLRYKRPAVIQSMYIFKQPGIGGEVVPHQDNTFLYTDPPSCTGLWLALEDATKTNGCLWAIPGSHKNGLKRRMIRDEIDTHFDHPSPTYDLKEFVPLEVKSGDLVVIHGDLIHQSFENLSLVSRHALSLHVIDTEGCEWSKQNWLQRKIPPQPLYEN

SEQ ID NO: 102942 - protein, 977 aa, Oryza sativa
  Clone ID: PAT_MRT4530_100419C.1.pep
MEAALLPSSTLLPKLVELSWYLLLKEDIRVIRSGGGHKITLAKQDLQELQNCINKASFFLAGTGRINAQSWQTSRLHTWISDALKAASCLEDQIAMYAMRGVYVGHLYAMKSAIGMLSTDKLVKIIRDRKNEMPTEVQNYHQEVMERLPAILPFTPHSHCEEQDTVPIGFMEKIEELKNILLRDAAPVIFVSGEQLSGKTTLMNQVYKDIDVRNHFKIRSKVDMSKTRCLSDLLRAVLKHEERETNSMYPDAIDELKIIEEIQRTFRTVGNRYLMVMDDVDDTSSLHVLRHVLGGWEGKIVCLTRNTRIQYEELHAKVEIRPLELAYQQQLLVHVAFRNADDTPAPVAVDRNNDGQQGGGEYDQLEKALKGKTETDNIDGDDLTPMVETLKGILRKCRGNPWNIRAVGALLGANRVDKWKEIEENQVDDLVIGDKKRDPLIPAEYAQLPADIRLGFLYCLAFPERSEIPENSLIPARKLVRLWTAEGFPPNDSPLQSQEQEAENLLQRLIDYKLLVVKKTGLDGEVLKCKVNEHMRSLALEMCEAQKICRFARDPAHPAPRTRPSSSLFSRKTALLHRYRVLAVHGDGDGNEAVQEMSSAMSKDIRLRSLLYFRTERKEPPKLELSFGRTYKLLRTLDLQGTRLTRLHSSITCLVCLRYLGLRGTQLEYLPETLQSLRRLMCLDIRDTGITEVNDVSEFKEMRHLYLANSFRDQSVLIKEGLLSLLHLQTLSGATHEVPSERKKAGMVPFEQELLYLKLLRKLSVKKASISCSKGISDAINKMDLLQSLTITCAAGEKRGFNLSYLNVNKNLRKLKLGGRMQKFDRLQPKLQSITYLYLWDSKLPVEGKDPLQLLQGLQQLLLLSLYNVYEGEKLTCTNGYHKLKKLSIIAMGKLNECTFGTKNMANLEVLVFAKCARLSSPPPKLDELNFLREVHLAQMPQGFYDGMKPATKKLVHFPEFQHHFHSSTRAVVQGGS

SEQ ID NO: 102943 - protein, 625 aa, Oryza sativa
  Clone ID: PAT_MRT4530_10041C.1.pep
MAPGQKVRPPRNSQPSNCPQTQHVSTSNSKKVRGKNKSKVERRPIGENHELLSREIGIVTRYHAPIKRIGWNNFSEADKEPLYELLKMKFNLDLSEPHVKGCLELLFSSSYKTFRHRCYTHYLKSGGGDSARNSPYEPLRDRPGDWTWLCDHFETEEFQKKSVIGKANRMKLANVHKKGTKPFVALQHELSCDQISLYKECYCSDKGWASRDARQNYETMLQMQHENEQEGAIQLTEQQICEKVLGKAYGYIRGRCHGPKPNRRASSTSANTYQQMEEELAYTKQTVAVQQNQLAVQQNQLESQQKQLDWLRSVVSKLAGIPPPAMDDNDALGPSHTTTTSIDGSGTPQRNLPGYIILTILIMWVNKSLVTKCLEDVGGRRDVPNAKRKQIVNALLTKSKNGKLERHVMREVAELFNVHIRSVQRTWKQGKSYLDQGITVDVNVDNRRRNCGRSMPNNPMFKDMFDVVFIDEKWFYLMRKSESYYLRKNQVEPTLTYEPAKRSSVNRPAGTMEMKPIVSITKEVIRDFMINKILHAIRVKWPQEDMNKPIYIQQDNARPHLGPTDQLFHEASQQDGFDIQLICQPPNSPDLNILDLGFFRAIQSIQYKKVTKTLADHVKAVEEAF

SEQ ID NO: 102944 - protein, 45 aa, Oryza sativa
  Clone ID: PAT_MRT4530_100420C.1.pep
MKLVRHLIILGKHPKLVTLGGCYLLDGLKELLGDLSEKVLEEARC

SEQ ID NO: 102945 - protein, 102 aa, Oryza sativa
  Clone ID: PAT_MRT4530_100421C.1.pep
QKLETFFFFFFKLQNIIFFSPKGVSFFMFRIPQGMAFVFSNQNHFPLKGHAPPPPLKIFLPPRRFFIFFKHQFFLLNRPFILNPFFLFIFPLQFFAAQFFFS

SEQ ID NO: 102946 - protein, 88 aa, Oryza sativa
  Clone ID: PAT_MRT4530_100422C.1.pep
HRFTRRRPASPPPAARLPPPPAAPSSATACRPPAASACRPPPRVPQHGRTDVVAPTPHRSPPLLPPDPEEGRTPPLPAASSCATAAAP

SEQ ID NO: 102947 - protein, 85 aa, Oryza sativa
  Clone ID: PAT_MRT4530_100423C.1.pep
MDLALLASGAASAVDPASVACSVGGKRDGVHGGSGIGGMRGGIAGVRGNVSGGRGDVNGHSHNISSIICVGGGRDSVGYRSRRGW

SEQ ID NO: 102948 - protein, 398 aa, Oryza sativa
  Clone ID: PAT_MRT4530_100424C.1.pep
MGVVTRAKKRKLEEESSNPHLAPGGGEDLINRLPDDILIGIITILPGKDAARTQVLSRRWRPLWRSAPLNLEARVNGGRIAKDVATIRSTLRTHKGPVCRFSVSWTFDYNHFPVVDSLLGSPRLDNLQEFELFYHYNCSRYPPVPRGCRRLRISSLTLRSLGVSNDTRKDEKLEEVIVEDAPLLERLTPHTIWQGDFVIRVIQAPKLKTLGYLSHKITTLELGTMVFQKMVPVSLSNVMRSVKILALDTTPDLDVVIDFIKCFPCVEKLYIVAFNQGNLKNIRRNVSLECFDLHLKMVEFINYQGNMLDLNFIRFFVLNARVLECIKLVARRDKCEAKWIEKQNQKLQLYGRASRRVTFDFQADYGVDSLVHMKHISDLTTDDPFDRSFCRCRDEEIY

SEQ ID NO: 102949 - protein, 160 aa, Oryza sativa
  Clone ID: PAT_MRT4530_100425C.1.pep
MPPLRPLPAPLQETPSSELKPRETIYFPSPTTPRSQERRANVKGEDDARGDDDVEDIAKMATVWRAAKGDPATRTLFIHGLGWSIEVDDLHSVFFCFGFVIFRSHRSTFHALYRPHDKKGKGERSRERSPLPVPFRSASLLRPLHPTSRSTPSATHMPEK

SEQ ID NO: 102950 - protein, 92 aa, Oryza sativa
  unsure (1)..(92): unsure at all Xaa locations
  Clone ID: PAT_MRT4530_100426C.1.pep
YLKMGVNEKGXVANDAETEQIVYGARPWPTEASSVVQNRGSIPLFWSEETSKMNNXPDIILDQKGENXEATRLHFENPRRRYGDPIIFFRLD

SEQ ID NO: 102951 - protein, 73 aa, Oryza sativa
  Clone ID: PAT_MRT4530_100427C.1.pep
INLYYWNAILNIYGSDHLVKYDQGLSRKICGFCVAYGICNHILWLYDLAKSIRRNDADICLPCMVHLFLKAVW

SEQ ID NO: 102952 - protein, 130 aa, Oryza sativa
  Clone ID: PAT_MRT4530_100428C.1.pep
LENPRRSGAGRREEKQATREASNTRGKARRALAMAMAGPAPAERSPCSPSSSRAAVPPSPEPGPPPPPSAASAPAPRASAPSCSRHPGTPAPRTLLTLKIGNLYRFTTSNQAKVKPHMLVDPQMYYISKN

SEQ ID NO: 102953 - protein, 137 aa, Oryza sativa
  unsure (1)..(137): unsure at all Xaa locations
  Clone ID: PAT_MRT4530_100429C.1.pep
FQFVDAYDSIXQRYNEASQAVSPDLLMERDSINQEARLLALIQGVLAANIFDWGSRACVHLYHKGTIIEIYRMSRNNMQRPWRIDDFDMFKKRMLADKKGHPYKRALLFVDNPGADVVLGMIPLERELLRNGTEVVW

SEQ ID NO: 102954 - protein, 96 aa, Oryza sativa
  Clone ID: PAT_MRT4530_10042C.1.pep
KDAGGKTLVVLEFMAEWSEPCKSMAEPYRQLASELGQEPVKLCTIDFNKFKDLGRRLRVDAMPTFLLVKGYSVVDRLITLKKEDLRKSIDTQLPRS

SEQ ID NO: 102955 - protein, 74 aa, Oryza sativa
  Clone ID: PAT_MRT4530_100430C.1.pep
TTFFPSHLIKKKTNPGGQKKNPPPPRVGRFINRSGAPGFFPGKRAVSPTQLILVSSPLWPPRLSLLCFRLVFFV

SEQ ID NO: 102956 - protein, 63 aa, Oryza sativa
  unsure (1)..(63): unsure at all Xaa locations
  Clone ID: PAT_MRT4530_100431C.1.pep
LSXGRGPLSSLYLFLHNILQLIYTTLQTQVIFRNYILHPPLFSLNTRPPLQTPIFLDPLPNPL

SEQ ID NO: 102957 - protein, 141 aa, Oryza sativa
  Clone ID: PAT_MRT4530_100432C.1.pep
MDVVDIGRKTLAGKLTRSSEKKLASQGERIRLAIDDKLHARAAVNQRLQQFSLSNDVSLCYRRLHAFPIPPHITLLVRFTAITVTDLFRTFAKVEIGRRLSANLFSAEVVHISANGTGADIAPAWRARRDVAGPQRQCIWR

SEQ ID NO: 102958 - protein, 394 aa, Oryza sativa
  Clone ID: PAT_MRT4530_100433C.1.pep
MGGPHRWTSATRVTVRRWACPSAAVEETNATAHCGGRIAALEPSLILSMLDKRGRCSCDGEPDGNDYGSIRKKLQWRGGVSALEQAERWCLQASVAAAAGKRRLGRCVAGAGGSGDISGRGRSKGAGDAGGTAGERRRGVASFALSRRPHLPPLRPLPPLRRATSLGSSDECDGGGGGNQRRERRRHAPPSATSAVAAPSSACRARPLCPQPAALAFCSPAAVQRRYACRRAARLRSAHRARSVDSGLKDDLVFGDPNAPRFVLWEGKLRPVPSKPGDLPFFNLMSIPGKLRAGLGVLGIRPPPPSDPSATGGNIPVGRKDPLPEQEPVPEPAPISRRGRPRSAGHSGCGGLSGEISGRRQRGVAGHPHGFSKLILALKSLEEGVVDQVSAVQG

SEQ ID NO: 102959 - protein, 391 aa, Oryza sativa
  Clone ID: PAT_MRT4530_100434C.1.pep
MGGPHRWTSATRVTVRRWACPSAAVEETNATAHCGGRIAALEPSLILSMLDKRGRCSCDGEPDGNDYGSIRKKLQSRKSLFTRKSTDAQAKAGANLWRGGVSALEQAERWCLQASVAAAAGKRRLGRCVAGAGGSGDISGRGRSKGAGDAGGTAGERRRGVASFALSRRPHLPPLRPLPPLRRATSLGSSDECDGGGGGNQRRERRRHAPPSATSAVAAPSSACRARPLCPQPAALAFCSPAAVQRRYACRRAARLRSAHRARSVDSGLKDDLVFGDPNAPRFVLWEGKLRPVPSKPGDLPFFNLMSIPGKLRAGLGVLGIRPPPPSDPSATGGNIPVGRKDPLPEQEPVPEPAPISRRGRPRRPRGSGCGGLSGEISGRRQRGVAGLAVA

SEQ ID NO: 102960 - protein, 113 aa, Oryza sativa
  unsure (1)..(113): unsure at all Xaa locations
  Clone ID: PAT_MRT4530_100435C.1.pep
EDSGSESERDEGNGNSNNEQILQSHRLIDSSHGNEETSASDCTDCLYYVTEKATFISPKLPGFFQSSLPGTLKGCHWVLLYSAXTWKHGTSLRTLFRRSENLQGPCLFIVGDM

SEQ ID NO: 102961 - protein, 58 aa, Oryza sativa
  Clone ID: PAT_MRT4530_100436C.1.pep
SLSSKNIVLCEIPGSLILPGCLLWGSFFVSYVGIVGMKSTLVTLYMNSREVKITQFLL

SEQ ID NO: 102962 - protein, 134 aa, Oryza sativa
  Clone ID: PAT_MRT4530_100437C.1.pep
MAGGGVKGFYRQKKKGGVAKKPISRKKLPPQNCSESQDCGDHDLGDEVEEQLQQFDMDMTYGPCIGMTRLRRWERAAAMGLRPPPRLRDLLLPPPAPHPLPSSSSSPAKILTGSSGGGGSTSVQGECLWEGKVS

SEQ ID NO: 102963 - protein, 133 aa, Oryza sativa
  unsure (1)..(133): unsure at all Xaa locations
  Clone ID: PAT_MRT4530_100438C.1.pep
INTSFTLCPRYYDYTASLSGRCIGTGIMFAYANTLCHDGDIRVIFGSLGVVLRLLGIIIWGYMLRMRCGPLMVTAQCGYSSARVXNPKFIPWGGYSSVFSPGCMVMRGCPKELGSQGWLLELPGWHRKGEKGK

SEQ ID NO: 102964 - protein, 83 aa, Oryza sativa
  Clone ID: PAT_MRT4530_100439C.1.pep
DARRRERRSEETARRRTDVNGDGDRFPSDVHALRRLLAADNQLIFPNVDGLLPEGPEEGEARLISDEVLKRMCLILKYITVHA

SEQ ID NO: 102965 - protein, 1132 aa, Oryza sativa
  Clone ID: PAT_MRT4530_10043C.1.pep
SFCNESRSEKIKGKKRVPHEVLRYFPLIPRLQRLFMNKDIASDLRYHRDKRVIEENVLRHPADGEAWKDLDGKYQWLAHDPRHLRFGLATDGFNPFGTLSSSYSVWPIILVVYNLPPWKCMKEPFILMPLLIPGKKAPGRDIDVYMRPLIEELNLLFNTGVSTYDAFVGDTFNLRAVVLGTISDLRALDSLSGYVAMGYKACPICLDWTDSCSLRSKIGFLGHRRYLPIQYRWRRSKNFNGKNETSLRPRQLSGDENFAMLQKLDHLQGFKYGKHDGNKKRKTSERDIPGKNFTKISILYELPYWKELKLPHNLDVMHIEKNICESVLGTLLNINGKTKDTLKARMDLQDINIRKELHLQQRGSNVIKPPACYTLSQEERQDFFQFIESVRFPDGFGANISKGLSYKEGKITGLKTHDFHLLLQRILPIGIRGYLQNDICDALLQLVHLPQQARLGGPVQYRWMFFIERFLGTLKGMVSNRAHPEGSIAEAYIMKECSTFCSMYLNGIETRFNREERNYDGERQFADRYSIFLSRFCAFGHKDDVILTQDQYNSLCCEHEDVLEAQGVGNIANRLQQEFATWLRQRVIDLRKDGSSQVSDCLYALAIGPHKKVHKYSGCIIGGVRFLTKEREEGRKTQNSGVCVEGPHKGKIITYYGTLTDIYVLDYPNDRQVALFMCDWYNLERNKPVIIDNDFVSINISKRWYTDDNYVLASQVKQVFYVPDTKLKGNWQVVQKVNHRHLFDPEVWSAGSESALDIGANEDIAFQEEEGGDIVLDDTFEANTLSRDDVILEILHMAPGQKVRPPRNSQPSNCPQTQHVSTSNSKKVRGKNKSKGLERLIKKAGHPLNLNISVERRPIGENHELLSREIGIVTRYHAPIKRIGWNNFSEADKEPLYELLKMKFNLDLSEPHVKGCLELLFSSSYKTFHHRCYTHYLKSGGGDSARNSPYEPLRDRPGYWTWLCDHFETEEFQKKSVIGKANRMKLAYVHKKGTKPFVALQHELSCDQISLYKECYCSDKGWASRDARQNYETMLQMQHENEQEGAIQLTEQQICEKVLGKAYGYIRGRVSCPNLLVFHLLLWMIMMPQDHPTQPQLQLMDPWVNKPLVTKCLSQFLGDVIRLIIEEFYALD

SEQ ID NO: 102966 - protein, 64 aa, Oryza sativa
  Clone ID: PAT_MRT4530_100440C.1.pep
NTPRAPLRTLLMLVSGEIWGERNARIFRSTASTPWEPAAVAAACASSRSRRRRRRPCQPQPSAP

SEQ ID NO: 102967 - protein, 70 aa, Oryza sativa
  Clone ID: PAT_MRT4530_100441C.1.pep
MEVPLVRVSLVSLGDEGKREEHLLQSIEEPPRRGSPLMTRHLLNLSDNLLPSELFQPPALDGHNHRLKWS

SEQ ID NO: 102968 - protein, 85 aa, Oryza sativa
  Clone ID: PAT_MRT4530_100442C.1.pep
GSRATWCSASTYRLNWTGCRSSTRGSHRPLPTKWFNGWKSDSSAAPACTGVIGAEEGGGRGTLRCRPRVSARRRRWRRGMGGTSS

SEQ ID NO: 102969 - protein, 144 aa, Oryza sativa
  Clone ID: PAT_MRT4530_100443C.1.pep
MPWRGMHQCCGPFLPDSWRLPPAPPSGGFHSLAGVPNPGMATCGAMPIAPPKSPAHSLSPFCPGHPHSGPIDTLSPGAPPRGPILSRAPGHPCPAAAACAPFPRVPGHPIPPEGGPVIPSRRPVILSPHPPCHPSPPWSCVGPR

SEQ ID NO: 102970 - protein, 214 aa, Oryza sativa
  Clone ID: PAT_MRT4530_100444C.1.pep
MATQLSATFAPAATTTATPLPAPQQRLRHGRRCYHALSLRPPRAASGDDGAGGEVEPAAPAAPAKTATATDDGGDDFEERVLRIKSRVGPKKRGSAAARKRKGGAGASSKSKAAVTLPPVPLREARSSVGVPVEFGFSAYSERLNGALAAVGLAALLLVELGSGKALVKYHQPATLFLQVYTVAAAGAVFVKYEKERISVWPGPPATKPPATGE

SEQ ID NO: 102971 - protein, 76 aa, Oryza sativa
  Clone ID: PAT_MRT4530_100445C.1.pep
STMQFNLDHDSCMNNNDRTIEARTLTHAEPINTGMTYATMECICSLSCQAPSTGDTSHGEGGMISNYRRTRTLMHH

SEQ ID NO: 102972 - protein, 196 aa, Oryza sativa
  unsure (1)..(196): unsure at all Xaa locations
  Clone ID: PAT_MRT4530_100446C.1.pep
MLGESVSKNHSVIRAAYFSQLMQILAHVGAMFFTEMKKFKNHQNLIFGHIGVCWXIRVENSHRDSRGELLSINANIGLYXTRGCDVFHRNENVQKAQKHDFWTYWSVLSAFVAKNHSVIHAANFCQLMPILAHMGAMFFTXNEKVQKAXKNDFWTYWSVLGASSAKKLLCDSRDEFEKRNNTKAEYNHHTHQATPM

SEQ ID NO: 102973 - protein, 228 aa, Oryza sativa
  Clone ID: PAT_MRT4530_100447C.1.pep
LNSPLILLLPQASPAARFRPVMEASASAAAAAALWGHKHLPLLARASSKESVEYILQALWRTRRTGLDAADRAVVRDMLHLASDADLDPLLVCLRVLIRRCVHGNIGKDEVAKLFPEEVSPELQRLLTLLLQKFQPEWQEDVAKDQASASRPETTECPSNQNQDTTEQPAAGATEIQNGGKSSVVEKELKLQLTKDTLDKMLEDMYSTKGQASNTGNTNGHEETAGCT

SEQ ID NO: 102974 - protein, 75 aa, Oryza sativa
  Clone ID: PAT_MRT4530_100448C.1.pep
GNSRKQGRHDNRRLSVRRSEVEHTVDAVARAPRLARHGLVCRLAHGHAPSKKYITSSARHITASARLHVCHSAQV

SEQ ID NO: 102975 - protein, 78 aa, Oryza sativa
  Clone ID: PAT_MRT4530_100449C.1.pep
MLKMDSSSLKGIANNYLLVERFRKPFWFMRKASKIIRNQNHSRPTQKVKQPYLVIGNDDRGTEENILQVNIHHIHQKD

SEQ ID NO: 102976 - protein, 374 aa, Oryza sativa
  Clone ID: PAT_MRT4530_10044C.1.pep
MDLNMEPQNDDNFTDEMEYGDLNLDDGLDFNLEDLIDFNLEPHTEDVDDDVILDAESDVNLEAEIEFNMEVVSTLLKLNSTNYLYSYQVTGQYLVTSHMTTYSNQGMFLGTLKGMVSNRAHPEGSIAEAYIMKECSTFCSMYLNGIETRFNREERNYDGERQFADRYSIFSSRFRAFGHKDDVILTQDQYNSLCCEHEDVLEAQGVGNIANRQQQEFATWLRQRVIDLRKDGSSQVSDCLYALAIGPYKKLHKYSGCIIGGVRFLTKEREEGRKTQNSGVCVEGPHKGKIITYYGTLTDIYVLDYPNDRQVAFFMCDWYDLERNKPVIIDNDFVSINISKRWYTDDNYVLASQVKQVFYVPDTKLKGNWQVVQK

SEQ ID NO: 102977 - protein, 325 aa, Oryza sativa
  unsure (1)..(325): unsure at all Xaa locations
  Clone ID: PAT_MRT4530_100450C.1.pep
TCIKPLSRTSQGTLHGSDETNLFKTSPTEKNFNSGVEXKRARLSTTHCTQQVIPEEERSPPSPAGNGQPPVRAAVNPEADQPDTPADPTPSRPPSPGADVSKGWGGADMRAPLVSSSRGREGYWQAGPTGRRLMGKGGRRPGLARLQAGRPVXGEGGGGKRPPTAAAGDAGDGTSRRRACGERRRAREEERGSSHRGLEGERVPTTSESHGRRRRLWWXLTGARREAGPDGGIGWGXGGRGSFGGGEANGGGMGGVGTVGGDVGARRGVGRGRRGXAGGVGGSAVAGLGSGGGRWKKGPTVTVHSNNPYRVVKAVLGISSSRILN

SEQ ID NO: 102978 - protein, 166 aa, Oryza sativa
  Clone ID: PAT_MRT4530_100451C.1.pep
AILDGSDGTNLSETAPTEKNFNSGVGEKSKTEYYPLYSASRTGRGGMMQDISKGAKGGAHRAAAHGGRRKAAWLGSASSRPAGYGEGGGGKRPPTAAAGDAGDGASRRRACGERRHAREEEKGREFSPGFGRRGRRRRQTATVSDRRATANGGRAPGHPKRGSVRG

SEQ ID NO: 102979 - protein, 287 aa, Oryza sativa
  unsure (1)..(287): unsure at all Xaa locations
  Clone ID: PAT_MRT4530_100452C.1.pep
MCIKPLSRTSQAGDSIPQATLDGSDETNLFKTSPTEKNFNSGVREKSKTEYYPLYSARXSPPSPAGNGQPPFRAAVNPEADQPDTPADPTPSRPPSPGLTSARGGGGADMRAPLVSGSRWREGYWQVGPTGRRLMGKGGXGGLARLGFKPAGRLWRGRRRQAATDGGGRRRGRRCIAATVHRGDAHAGSGGARGRKRRGGSSHRGSAGAGGEDGKRRRFGGGEANGGGGLAQRRLQRRRAVPGGVEKAAAAGGRRGRLGGCRLGERRRKVEEGADRWAPPVGDPEGL

SEQ ID NO: 102980 - protein, 233 aa, Oryza sativa
  Clone ID: PAT_MRT4530_100453C.1.pep
MANHRRQWASWQTFHPVHPMEDLMPGGVRLPDPDEQPPDPIYAFLEVFEELYGDQFPPHVLLYDSGDPNGGDDMEESDDDVDGGGESLSAIVYGGGRLHPSRRPSVPPPEERPRGWMPCPVLPRAGGGHGDADAAAAEQGVEGEGPAGRVAAVLPRPRRRQARGVGGGGQPGALDRVPARPRRREEHLVVEVVRAAVRTCRPFVDFQKILNLAFEDLGYLLNSNADPKSCFRA

SEQ ID NO: 102981 - protein, 614 aa, Oryza sativa
  Clone ID: PAT_MRT4530_100454C.1.pep
MSTSASPSVAPSAEYAEVSIHWLDLFLLQHIGFLLPHIVFFFSILVCIHSICPICAIPSLSHENHYFLGPIGDSDPTEFIIAETNRIPFRLANPNLSHWKNTFKSWPSLEKTSPEKSWTTWYKRVSASKQVHWDDIGIGQALALTIANSAKDEPLMAAATYFWSNAINAFLFNQGPMTPTLIDITMITGLDVTSSANPMSLNTKNQFDFRTKSIGGRNIQVSYEFYHPMSSARQFGMGQLPIGLFFADKIQCRGEISSTLMMDQLLNIPGPPLGNIENIELARFRSKNFDRWWGEWKKHIFHQPASMYMTDLFPDVIPQTTESSPTRKSNSGRDIEYAPGLIPNGGGPSPPVIGYNAPKTSTLLQGLIRESADAGKKRKTRSLAVDPSAQAPKKKTKSQKTKPTDDLPALDSSIEQALDEEEIEEDVDQAAAEKKKTAVRKKSAAATLKPAPPPPPPPVQTESSDHSPSAAGSHNVDEEEQPAAPTIPVLADLFSFDIKDYLDETEEDTSSKALAPLSDDVKKTLEDISHWLEASSLDSLVVDCGSIRTRLHEVQALIPDELADALTPAVYLEQHQFKLEKAKLRLAERRERKDIEATIQINRQLVHEEKSKLD

SEQ ID NO: 102982 - protein, 648 aa, Oryza sativa
  unsure (1)..(648): unsure at all Xaa locations
  Clone ID: PAT_MRT4530_100455C.1.pep
MAKGEGPAIGIDLGTTYSCVGVWQHDRVEIIANDQGNRTTPSYVAFTDSERLIGDAAKNQVAMNPINTVFDAKRLIGRRFSDPSVQSDMKLWPFKVIPGPGDKPMIVVQYKGEEKQFSAEEISSMVLIKMREIAEAYLGSNIKNAVVTVPAYFNDSQRQATKDAGVIAGLNVMRIINEPTAAAIAYGLDKKATSSGEKNVLIFDLGGGTFDVSLLTIEEGIFEVKATAGDTHLGGEDFDNRMVNHFVLEFKRKNKKDISGNPRALRRLRTACERAKRTLSSTAQTTIEIDSLYEGIDFYSTITRARFEELNMDLFRKCMEPVEKCLRDAKMDKSSVHDVVLVGGSTRIPKVQQLLQDFFNGKELCKSINPDEAVAYGAAVQAAILSGEGNEKVQDLLLLDVTPLSLGLETAGGVMTVLIPRNTTIPTKKEQVFSTYSDNQPGVLIQVYEGERARTKDNNLLGKFELSGIPPAPRGVPQITVCFDIDANGILNVSAEDKTTGQKNKITITNDKGRLSKEEIEKMVQXPEKYKAEDEEHKKKVDAKNALENYAYNMRNTIKDDKIASKLSADDKKKIEDAIDGAINWLDSNQLAEADEFEDKMKELESICNPIIAKMYQGAGADMGGAAGMDEDAPAGGSGAGPKIEEVD

SEQ ID NO: 102983 - protein, 159 aa, Oryza sativa
  unsure (1)..(159): unsure at all Xaa locations
  Clone ID: PAT_MRT4530_100456C.1.pep
MSVRFSFSLLPILSLPFGMRAWLIPLPSEDRHTPIDKLAATXTELQIRRLQTPSSNAHSTATEDDSRXKSSSSTYGGGGGGGNGGGVLQRRQRRRDEVAPSGEVELAEDTCAGMSSSAMTTASLAHPSAELGGSKLKLYSMSSGLASIRLWSVRPASTS

SEQ ID NO: 102984 - protein, 65 aa, Oryza sativa
  unsure (1)..(65): unsure at all Xaa locations
  Clone ID: PAT_MRT4530_100457C.1.pep
APWHEDLRGHHGGGDTRLRSVDSFWTVVTPHTGAAILNAAYHAKTQTAAGPGGLPILVPGSFAFX

SEQ ID NO: 102985 - protein, 571 aa, Oryza sativa
  unsure (1)..(571): unsure at all Xaa locations
  Clone ID: PAT_MRT4530_100458C.1.pep
MITVAAPEAQPQVAAAVDEAPPEAVTVFRSKLPDIDIPSHLPLHEYCFARAAELPDAPCLIAAATGRTYTFAETRLLCRRAAAALHRLGVGHGDRVMVLLQNCVEFAVAFFAASFLGAVTTAANPFCTPQEIHKQFKASGVKLILTQSVYVDKLRQHEAFPRIDACTVGDDTLTVITIDDDEATPEACLPFWDLIADADEGSVPEVAISPDDPVALPFSSGTTGLAXKGVVLTHRSVVSGVAHQVDGENPNLHMGAGDVALCVLPLFHIFSLNSVLLXRGCAPAPAVALMPRFEMGAMLGAIERWRVTVAAVVPPLVLALAKNPFVERHDLSSIRIVLSGAAPLGKELEDALRARLPQAIFGQGYGMTEAGPVLSMCPAFAKEPTPAKSGSCGTVVRNAELKVVDPDTGFSLGRNLPGEICIRGPQIMKGYLNDPEATAATIDVEGWLHTGDIGYVDDDDEVFIVDRVKELIKFKGFQVPPAELESLLIAHPSIPDAAVVPQKDDVAGEVPVAFVVRAADSDITEESIKEFISKQVVFYKRLHKVHFIHAIPKSASGKILRRELRAKLAAC

SEQ ID NO: 102986 - protein, 623 aa, Oryza sativa
  Clone ID: PAT_MRT4530_100459C.1.pep
MSRPQPPPLLPVLPELGGLQALTSSSASLATWLRGGGREEVAAINLDGGDAVILVVVPPHLAGHGGQGRPPHYSIERRRSQPQFECHAYVKGVKYLVFEFRGVIRLTAIAHGVVGDVFLGSEAPVVTSSISKYAGLVFGGAHRDVSALGEEKLSFFGKSSQQKRISTNQLYNSGIPVTVPSPLPAIPATLDENIPRIPDGQNVPRERELRSTPMPPHQNQSTVAPLHGHFQSSTGSVGPLRSSQAIRFSSVSSNEQYTNANPYNSQPPSSGSSSTLNYGSQYGGFEPSLTDFPRDAGPTWCPDPVDGLLGYTDDVPAGNNLTENSSIAAGDELAKQSEWWNDFMNYDWKDIDNTACTETQPQVGPAAQSSVAVHQSAAQQSVSSQSGEPSAVAIPSPSGASNTSNSKTRMRWTPELHERFVDAVNLLGGSEKATPKGVLKLMKADNLTIYHVKSHLQKYRTARYRPELSEGSSEKKAASKEDIPSIDLKGGNFDLTEALRLQLELQKRLHEQLEIQRSLQLRIEEQGKCLQMMLEQQCIPGTDKAVDASTSAEGTKPSSDLPESSAVKDVPENSQNGIAKQTGARMFLLELNIQTTVPQTRQRRFRVNGMIFRFQKAAQANLH

SEQ ID NO: 102987 - protein, 178 aa, Oryza sativa
  Clone ID: PAT_MRT4530_10045C.1.pep
MYPSIAASLISKYTGLIFRGKAGAVENFNSSPFAMLAARSIRLKLRIDLLFVMVIFYKIAETKIYKTVWLSRLSRVRPVTDVEYMSRVPYSSAVGFLMYVMVCSRPNLSHAMCLVSRYMANPGKEHWKAVQWIFGYLRGTANAYLKFDRTDKGLVRYVDSDFAADLDKRRSTATGTPL

SEQ ID NO: 102988 - protein, 125 aa, Oryza sativa
  Clone ID: PAT_MRT4530_100460C.1.pep
GAAKAAGAVIPSLKGKLTGMAFRVPTVNVSVVDLTVRLARPATYDEIKNVIKAASEGPLKGIMGYTEDEVVSSDFIGDSRSSIFDASAGIALNDSFVKLISWYDNEWGYSNRVVDLIHYVFSHEA

SEQ ID NO: 102989 - protein, 144 aa, Oryza sativa
  Clone ID: PAT_MRT4530_100461C.1.pep
MERISTNQLYNSGIPVTVPSPLPAIPATLDENIPRIPDGQNVPRERELRSTPMPPHQNQSTVAPLHGHFQSSTGSVGPLRSSQAIRLSSVSSNEQYTKANPYNSQPPSSGSSSTLNYGSQYGGFEPSLTDFPRDAGPTWGPDPS

SEQ ID NO: 102990 - protein, 64 aa, Oryza sativa
  Clone ID: PAT_MRT4530_100462C.1.pep
LRLHRRLASVAADWCHRLHGWPIMPLLLGVYNFIAGRRPPSSPPTSVFIVIDGRLSSHIGHLCH

SEQ ID NO: 102991 - protein, 860 aa, Oryza sativa
  Clone ID: PAT_MRT4530_100463C.1.pep
MEAEHPHQITYTTTTTTSTSSLCPRRRKRGDDEAAHHLVFPMDLDSAAAAAAAAAHHQQQQQQTTSQDKLKALAYEYGHEFRVFSSVTFESMTSNLPAADQEEDDDFYELQPADYFNLVSNRIGALSKTMKLTAEQSKVLKTRKMREAELAAQRAKIKKAVMRVRFPDGYILEADFHPSETVQSLMDFLKKVISRPDLPFYLYTVPPKKRIKDTSLDFYTIGFVPGANVYFSYDLPEGSELNTDSVKSGPYLREEIRMLDGLPIVQEPVHQPIDSTMNSSSAHQSDVSQSDFAPPANKKPAKPKWFKRVLEGDDERSSHRDQEKEVCKASLKSLISEDRLDCKMCADFAVIISEIRSIFRLSSFDVTRKEEGEERKLVGCTAICVLEPGNGEARTHQISPCICPAITLEFFTVGGTEHAGWKGILLKEEEHQPIYHVRRIFTKGFIQSGEVHIFGYARSNLSDDGLRERIRGYLKGASEEHLSDFLQHIKYVSGSYDSGEGFEKLNKEISEYEKSNKSESPRRLFYLALPPSVYPSVCKMIRTYCMNPSGWTRVIVEKPFGKDLDSAEELSAQLGELFDENQLYRIDHYLGKELVQNLLVLRFANRLFLPLWNRDNIDNIQVFCLVAMEKPVSLKPEHIRDEKVKVLQSVNPIKHDEVVLGQYEGYKDDPTVPDDSNTPTFASVVLRVHNERWEGVPFILKAGKALSSRKAEVRVQFKDVPGDIFKCKRQGRNEFVIRLQPSEAMYMKLTVKKPGLEMATEQSELDLSYGMRYQNVKIPEAYERLILDTIRGDQQHFVRRDELKAAWQIFTPLLHDIDEGKVKSIPYQPGSRGPKEADELSERVGYMQTHGYIWIPPTLA

SEQ ID NO: 102992 - protein, 505 aa, Oryza sativa
  Clone ID: PAT_MRT4530_100464C.1.pep
MSGGSSPRSRRSSFNSLSRDLELPSEQGCLSVIVLGASGDLAKKKTFPALFHLFAQGFIQSGEVHIFGYARSNLSDDGLRERIRGYLKGASEEHLSDFLQHIKYVSGSYDSGEGFEKLNKEISEYEKSNKSESPRRLFYLALPPSVYPSVCKMIRTYCMNPSGWTRVIVEKPFGKDLDSAEELSAQLGELFDENQLYRIDHYLGKELVQNLLVLRFANRLFLPLWNRDNIDNIQIVFREDFGTDGRGGYFDQYGIIRDIIQNHLLQVFCLVAMEKPVSLKPEHIRDEKVKVLQSVNPIKHDEVVLGQYEGYKDDPTVPDDSNTPTFASVVFRVHNERWEGVPFILKAGKALSSRKAEVRVQFKDVPGDIFKCKRQGRNEFVIRLQPSEAMYMKLTVKKPGLEMATEQSELDLSYGMRYQNVKIPEAYERLILDTIRGDQQHFVRRDELKAAWQIFTPLLHDIDEGKVKSIPYQPGSRGPKEADELSERVGYMQTHGYIWIPPTLA

SEQ ID NO: 102993 - protein, 304 aa, Oryza sativa
  Clone ID: PAT_MRT4530_100465C.1.pep
PTRPPTRPPTRPHQITYTTTTTTSTSSLCPRRRKRGDDEAAHHLVFPMDLDSAAAAAAAAAHHQQQQQQTTSQDKLKALAYEYGHEFRVFSSVTFESMTSNLPAADQEEDDDFYELQPADYFNLVSNRIGEQSKVLKTRKMREAELAAQRAKIKKAVMRVRFPDGYILEADFHPSETVQSLMDFLKKVISRPDLPFYLYTVPPKKRIKDTSLDFYTIGFVPGANVYFSYDLPEGSELNTDSVKSGPYLREEIRMLDGLPIVQEPVHQPIDFTMNSFSAHQSDVSQSDFAPPANKKPAKPKWFKR

SEQ ID NO: 102994 - protein, 156 aa, Oryza sativa
  Clone ID: PAT_MRT4530_100466C.1.pep
SERIVRDGEAHGAPPRRPPSSFVALVATVWTLLVRSKSKTSAADDAEAFLFFFADFRERLDPPVDARYFGTCLTGCFVALPARDLLHGDGALAAAASAIQEEIRRMADDPLALWDFFSFGWGKPRWTVPARMNHDGQMALARAGDGRGVQVSVSLR

SEQ ID NO: 102995 - protein, 33 aa, Oryza sativa
  Clone ID: PAT_MRT4530_100467C.1.pep
IEWSPGPLFHVSVNLVVKSMSLEFPVFDHTPHT

SEQ ID NO: 102996 - protein, 124 aa, Oryza sativa
  unsure (1)..(124): unsure at all Xaa locations
  Clone ID: PAT_MRT4530_100468C.1.pep
YPFQKKNLFFXILKPSPYXXIKFHFXXLLXXXXXNFHFXKYFTISSKKNQLIFHKHXTXHXKSVXLXXINPKXFPIFXXSFFXLLNKNXSSLFIXSXLXXXXSXXXSIKIXHFFXXISYXXXXX

SEQ ID NO: 102997 - protein, 288 aa, Oryza sativa
  Clone ID: PAT_MRT4530_10046C.1.pep
VILQILTSEFYLLQMKFNLDLSEPHVKGCLELLFSSSYKTFHHRCYTHYLKSGGGDSTRNSPYEPLRDRPGDWTWLCDHFETEEFHKKSVIGKANRMKLSYVHKKGTKPFVALQHELSCDQISLYKECYCSDKGWASRDARQNYETMLQMQHENEQEGAIQLTEQQICEKVLGKAYGYIRGRGHGPKPNRRASSTSANTYQQMEEELASTKQTAAVQQNQLAVQQNQLESQQKQLDWLRSVVSKLAGIPPPAMDDNDASGPSHTTTTSIDGSAMQHFFLLKEKQNIVL

SEQ ID NO: 102998 - protein, 574 aa, Oryza sativa
  unsure (1)..(574): unsure at all Xaa locations
  Clone ID: PAT_MRT4530_100470C.1.pep
MGNACGGSLRSKYLSFKQTASQRHDTDDNNNAAAADSPKKPSRPPAAAKTDDHPVSASAPAAAMRRGQAPADLGSVLGHPTPNLRDLYAMGRKLGQGQFGTTYLCTELSTGVDYACKSISKRKLITKEDXEEVRRENQIMHHLSGHKXNVVAIKGAYEDQLYXVHIVMELCAGGELFDRIIQRGHYSERKAAELTRIIVGVVEACHSLGVMHRDLKPENFLLANKDDDLSLKAIDFGLSVFFKPGQTFTDVVGSPYYVAPEVLLKHYGPEADVWTAGVILYILLSGVPPFWAETQQGIFDAVLKGFIDFDSDPWPVISESAKDLITKMLNPRPKERLTAHEVLCHPWIRDHGVAPDRPLDPAVLSRIKQFSAMNKLKKMALRVIAESLSEEEIAGLKEMFQTMDADNSGAITYDELKEGLRKYGSTLKDTEIRDLMDAADNFSLMIVFLLQTFQKQVNMADIDNSGTIDYIEFIAATLHLNKLEREEHLVAAFSYFDKDGSGYITVDELQQACKEHNMPDAFLDDVINEADQDNDGRIDYGEFVAMMTKGNMGVGRRTMRNSLNISMRDAPGAL

SEQ ID NO: 102999 - protein, 71 aa, Oryza sativa
  Clone ID: PAT_MRT4530_100471C.1.pep
DTTGGDDDDDHDDDDDDDDDDDDDDDEEDEDDDDDNDDDDDHRANRDCCRWLKEVEPACVCDGCSAFRHSS

SEQ ID NO: 103000 - protein, 162 aa, Oryza sativa
  Clone ID: PAT_MRT4530_100472C.1.pep
FLHRACAGDVSLAVVVVDTNPLFWATAALPFADFFAHLIHYVNSLLLLNHLNHVVVIAAGLSSCTYIFDSSDASASGAADVAATFAKASRKMDEFIAEDARATSSNGSVADGNAASLLSGALSLALCYIQRVFRSGTRHPQPRILCLQGSPDGPEQYAHSSI

SEQ ID NO: 103001 - protein, 39 aa, Oryza sativa
  Clone ID: PAT_MRT4530_100473C.1.pep
ANRTSYNIIFHYSYHIPQPAGSGRGAEIYPVPFFHPLNF

SEQ ID NO: 103002 - protein, 91 aa, Oryza sativa
  Clone ID: PAT_MRT4530_100474C.1.pep
MMRFSSMDMKDRRNKVFSTTLPTRSLTIPPQPVVQPAPPADLKGIFVLQVLMHPSQILLFLVKPYDVFNLLREGASLQRKGIALGISIAYG

SEQ ID NO: 103003 - protein, 50 aa, Oryza sativa
  Clone ID: PAT_MRT4530_100475C.1.pep
NLSHVTGSVATTTMALSTAVMVRAVPLISSALLGEGRITMRKTGSNPKPT

SEQ ID NO: 103004 - protein, 70 aa, Oryza sativa
  Clone ID: PAT_MRT4530_100476C.1.pep
DTSRHPQAQEVLSALSRGQLLLYAPLERGYTLDHIAAIDHELWAKRTTALHIDYTLEIMYQVDNGKYEKE

SEQ ID NO: 103005 - protein, 73 aa, Oryza sativa
  unsure (1)..(73): unsure at all Xaa locations
  Clone ID: PAT_MRT4530_100477C.1.pep
METTILSRSTIYFXAMLSCQEYMDQLLNPSTNPWHSXPRAGSFRERRSDRLQASEPLRKARPEAAVSENLEEK

SEQ ID NO: 103006 - protein, 236 aa, Oryza sativa
  Clone ID: PAT_MRT4530_100478C.1.pep
MATGNSLSGVTSASPSPRRQHEEGWRQRAHQWLEAAGGVTTVGGSKPRDNGSTTGGGRRRDGVWRRPAMRRGLETARSSMVGGDRRHGVGQRRRDPAHARGRGGARHARLEQRQRQRRRCGVEDSNVNAGHLGGWGRQTLAPCNPHSTAPRNPLRRLHVLLAGAGGSAGSRHVRAQAVPPHVTSAALGGKDGDAGGDGDGARRLVNMDAQKQIRMGDSLPIVPSVAFIRVHPQAEQ

SEQ ID NO: 103007 - protein, 60 aa, Oryza sativa
  Clone ID: PAT_MRT4530_100479C.1.pep
HAKNEGMSTRGITIPFCFARLADFVSKIKKGGVHTKIKLGVHPKVQKKPLLLKKKRWHKF

SEQ ID NO: 103008 - protein, 265 aa, Oryza sativa
  Clone ID: PAT_MRT4530_10047C.1.pep
MRNSTSSAAAQPAPASAAMYGSYASPSSGAGGYAKIPTYPPPPSAYPAAPPPPVMGQPVPPPPAQLHDPTAPPSPIAKAAELVTRFREQGQALIAARRPWGEVFRAPAFSRPPSVGEAVARARRNAAYFRANYALAVLAVVAASLLWHPGTLFALLALCAAWFFLYFARPASSAGQPLRLLGMEFEDGTVLAALTGVTVIALLFTNVGWNVIGSVMIGAALVAAHATLRSTDDLFLTEQEAAGDGLVAAGMSAAGPILPTYVRIA

SEQ ID NO: 103009 - protein, 92 aa, Oryza sativa
  Clone ID: PAT_MRT4530_100480C.1.pep
RRAGPGGCAAQARGQAASGLTRWQPGGRPRTSARARMRGRGRISNGGGGKSAPVGELLTADVLPRSAHCALWPIHPRRSSSPISPCTAVIRS

SEQ ID NO: 103010 - protein, 140 aa, Oryza sativa
  Clone ID: PAT_MRT4530_100481C.1.pep
FWFFFFFFFFFFFFFFFFFFFFNPAKTKPYWVGNKGTGGGEQGTKSDQAGPRDHPGGAKRKGSGERKKPLTSITGDMHRGAKRGGKPPWLPWGAGFKDWAPGFNTAGHNLAGLAGTYRNPGGGPKGSFPRGPRGRGVKGG

SEQ ID NO: 103011 - protein, 105 aa, Oryza sativa
  Clone ID: PAT_MRT4530_100482C.1.pep
SAPPLAAAPRTPGPPRDPEPSAARPLPHPPEAAPPAAAAVAAARKRRPRPGSNWRTDRSAASWPARRRRRRRRRQPERGARRRLTNQSGTSWRRRRRIGEATAKA

SEQ ID NO: 103012 - protein, 149 aa, Oryza sativa
  Clone ID: PAT_MRT4530_100483C.1.pep
MGATHLHVASAPSHTLAPLLLLLRRQTDAHLSRSTRGARVSGGADADADDEEQVNKRMCVWTVDRVILLLRHHRIVSRETWSFGRCAVSILRLLAVSENSSTRRQTVVRSAYLILLPVLQAFSWTDHASHTPYLALIATTSRVHMVWLI

SEQ ID NO: 103013 - protein, 357 aa, Oryza sativa
  Clone ID: PAT_MRT4530_100484C.1.pep
MAISHLSRRLLSPAAETARLLPKPHPLLFLHPHRHFSAPSQPDGGGGPAPVSPESMKHQEIEGPTVERDTSPLADETRRELDALRAAVQRISGSLALLGGAHLAAGAWIASGAAPVGVGSAAAVQGVVAFAFPFTAALVLRRAIKPIAFFQKMEANGRLQVLTLCLQATKNVNLMLLRTRVVAISCALGVSVGDYSSYDHYVNGSQSNVTKYLAELNRKRYFLYETFNIFNKWYGHIGLANPARGNLGILLGLRSSLCHHYHFPLAQGWENPYVIGYNVLDLARPRLIFCFLDELRVCDIPVKLIHLSWLTRKNIYGVFVSESCAWQHASLSIVIIDMTYESIVVVILNHMLYTLTK

SEQ ID NO: 103014 - protein, 111 aa, Oryza sativa
  unsure (1)..(111): unsure at all Xaa locations
  Clone ID: PAT_MRT4530_100485C.1.pep
NHSVLDYMFKRHNTDIFKQFRPICVLNDCFKFLSKVVTLRLTEVANDMISITQTAFILGRFILEGCVILHEILHELKSKKQRCIIWKIDFEKXYDKVSWSFVFEILKLKGF

SEQ ID NO: 103015 - protein, 218 aa, Oryza sativa
  Clone ID: PAT_MRT4530_100486C.1.pep
MLAKSPSLPFLTATETAAISLSPSCDLFSSPNARFSKKKYGGRLTIQPNIEFGKTQNSRTQRKWRTFSADQAQATVVDAGDNKTWEEAKQILTSLDYSIEDADKMLKKAFGWIHSPYWSEERKKEVPNAEVVSGVLNYIRTLGLSDDDLRKLLKKFPEVLGCDLDSEVKLNVGKLDSDWGINGKTLRSLLLRNPKVLGYNVDCRGDCMAQCTRCWVRF

SEQ ID NO: 103016 - protein, 86 aa, Oryza sativa
  unsure (1)..(86): unsure at all Xaa locations
  Clone ID: PAT_MRT4530_100487C.1.pep
GGYYGDSNNIXGGRRSIXPPPPRCLRPCTKPSLIYSSVTNRVVASXDSPVNDALTXLVLAYDNCNRWCAIKVPNPVVSEEKLLFIN

SEQ ID NO: 103017 - protein, 81 aa, Oryza sativa
  Clone ID: PAT_MRT4530_100488C.1.pep
MADRSSGGILPCRSSARSHGTTRRQGVGGRRWVPCRSGGDAASIRPSSDNNVAEGWQRWGDEALGEWLLLASMEIKGSAVS

SEQ ID NO: 103018 - protein, 155 aa, Oryza sativa
  unsure (1)..(155): unsure at all Xaa locations
  Clone ID: PAT_MRT4530_100489C.1.pep
FPLFSFVQMRAVKVNLFQNALLSPFWNINRXRVVFFSQGRARVQVVPXHGKPVFSGEFSRGQLLFFPPXYAVVKKAQKKGWGSIAFKANPNFLVSPLAGKSSLFRGFPNDVLANAFRFSKKKGQGVQHNKGDGLGAFPPIQYKRFQGVFNGAESF

SEQ ID NO: 103019 - protein, 72 aa, Oryza sativa
  Clone ID: PAT_MRT4530_10048C.1.pep
TTFLECKVNTIPNRRSKYNTSESKESRLSSKRLAHSYRRIQQCTSGTSKPRPSYNKKSVRRNESPKNSSKSG

SEQ ID NO: 103020 - protein, 281 aa, Oryza sativa
  Clone ID: PAT_MRT4530_100490C.1.pep
MQPRCTLIHAVAVVAAAAAAALLLPPLAAGQPWPTCDTSAGTYKAGSAYESNLRDLAAALRAGAAASPSALFATGIRGGAPDAVYGLLLCRGDLSVSDCFDCGTRVLADVGRVCGGRHGRAKDVALVYNQCYARFSNKGDFLAATDNAGGETLLISGTNITGGAGVVAAYDRAVTELLAATVRYAVEENPARLFATGQRVGDDARDPGFRNIYSMAQCSPDLPPASCRRCLDGVLARWWQVFPLNGEGARVAGARCYLRSELGVGPFYTGAPMVVLRADKV

SEQ ID NO: 103021 - protein, 62 aa, Oryza sativa
  unsure (1)..(62): unsure at all Xaa locations
  Clone ID: PAT_MRT4530_100491C.1.pep
SRQHQYQLLHPIQQQPIQQTPPRQQVVQPIQQTPPRQXVVQLIQQQGLMNASAGFGTPQQRP

SEQ ID NO: 103022 - protein, 98 aa, Oryza sativa
  Clone ID: PAT_MRT4530_100492C.1.pep
MAKRGDQALYNGFGAAGMHGDAVMQPPTFGQVRGQELLWVQLIPRFILLLYQRWKQLPAAALAYPHRSCLLRLPPPRFPAVAPPVSVRRRRRQKRRKS

SEQ ID NO: 103023 - protein, 752 aa, Oryza sativa
  Clone ID: PAT_MRT4530_100493C.1.pep
MAEERESFESQWAPSDVTEENLKEMVAHGVLLTKEIIGWRPAYGEAFPTPDTHEVVVFSHFFYGGFSLPTSKFFREILEFYGISLHHLNPNSIVHIANFIHACKAFLGIRPHFALFRRIFFLKPQPNKSKPCVVGGAGFQLRGTLSQKYFFMPFKTSNKGWHANWFYVQNPELALPEYSCLPPVYQDTWNSLPMGDEAVQALTLMERMLKLKEQGLQGEQITRHFIKSRLAPIKERSRTAFEFDGKNDPNREDPESLEFKIMKERMYKIFLTGIVVSYSHLLPVVPYNAFNPPPPEFSLMKSDPPTAQCRSPRRQTGQASGSPKFQPTVQPSSPKPTNQSGSQKRKLVLSDDEGDNAEKTLSKEVTGKQPKQANPKKKTSSRPIPKIRKSSRKPSDIALSGKDPESTDKETGSTTTKETGPTDENHPTGDQPATDNVKTGDEPPTGNQSAEAEADANQEPPTRDQSGMEHNKDIPETDAQASSPPPKDTDTGPKSSSSDKRIHLRNEAKTTTLEKLVPHLGTLEATRTQLHETRELARKTEHDLRDRIAELQDSNFELSGSSKGCITVQAAKITELEKRIKALEKDKGELTKRRDSALKDVEDRKIKSQAQFEVLVNKIKKLEGARDEGTNAATPLIQAMFFNNNGPSTFDVVEIFDKLRTTPDTYFKNIKEAGCMGASMALAMTKSLYPKIDIDAIDCFADGTSEEDALDLINNAQKAADKIAADVVERFQDNNLGPTGSDESDDEKTESN

SEQ ID NO: 103024 - protein, 755 aa, Oryza sativa
  Clone ID: PAT_MRT4530_100494C.1.pep
MDLDKSTSTSVSLEKLQEEGALPGRGTMEREPGGTEPEPVLGRMVAVEDYILCGFVPPPSEFLLLVLNFYGLSLLHLNPNSIAFLSIFSHICEAYIGVELFLDLFRFYYELRWMESNRIENSDPVFVVLEEQPDKISSWTVKPALTPSLQSFIDIVDDLRVRELSGYEVAADFIGLNSETVGRRIGQVMISGPTTASNVPVPLCENWAAEREAAINVVPDPVRRLSTSLCRVSPPFTVVSLHAGRTSSWADLVSMGVGTGSGNPSGPYPLPSLVGPLVDHQAAASLKEDVAKEASDAAAAVATTSGVNVPKKGRKFSSVLGNRRKTPTPSASDASPPPPRRQRLVTLGEKAARAKAAQDRSGGNSSASPVVASTDVVVMTRSREATPNGPVGDLVPTQGSPADILTWEELQVEMGRILQAGARGIRHEIAEARAAAASSANERADKLARDLAEVREDLQKMRELVAGNERQRQGLKNRMSELENNLSEIRGSLRLAHPELDLQKILYQGAASNARKDVMEEIGDMGESILPLFEEDVDVEDVQQRGQPKLPVVVPALELEPYVPRDGIDQDLPEETDVASTPLDLDSALVDRDRRIQYWRTKFEVAEPERTILEVKRDRAVEALRGREVWFNSYLRSCCTTMAIICRELRVPHGDPEELAAGYISWLNGACAHLEGIRGRIDEALKQECRRSSRYAGGHVLACIRDHRPQLHLEFLHEGFSRSRRNPAEIDNLAKSMAPLAEKIIQSMDWRWPSW

SEQ ID NO: 103025 - protein, 124 aa, Oryza sativa
  Clone ID: PAT_MRT4530_100495C.1.pep
MEIDLRILHLHHVEAVEEAIRQLLLLIKKLLQRRRRRLQGFLPQCEISMEPARPVHAARPTASSSAPSAIHGAAGRTEPVLTSTGTTPSLGDELPHGTAATPDRRTPPPSPLPLRGEEKGWGRE

SEQ ID NO: 103026 - protein, 123 aa, Oryza sativa
  unsure (1)..(123): unsure at all Xaa locations
  Clone ID: PAT_MRT4530_100496C.1.pep
PTKSAATSYPIVCRELQVPRGDPEESAAGYISWLNGACAQLEGIGGRIDEALKQEECRXSSRYAGGHVLACIRDHHPQLHLEFLHEGFSRSRRSPAEIDNLAKSMAPLAEKIFRSMDWRWPSW

SEQ ID NO: 103027 - protein, 163 aa, Oryza sativa
  unsure (1)..(163): unsure at all Xaa locations
  Clone ID: PAT_MRT4530_100497C.1.pep
QHPPPFYRSNQEQEDKGMLTVKFGNXQNYHRFRVSIGFKVLESADGRISISSEGVSPTFCRVLVXSIGYVGVLVDLMTSDLQPMCALTFGSIFVLLFHIVSRLVSTGLYCYIILSSADCLYIIIHIGHIADCLNPIAIGWYRYRLLSAIGWNYSIGLSADRLF

SEQ ID NO: 103028 - protein, 190 aa, Oryza sativa
  Clone ID: PAT_MRT4530_100498C.1.pep
MEADKSGEGEKAGGKTISFRCSDGQAFHMPVAAAMLSTAIRKMFDKYPSIDHGGVIELPHQISSGIFPKVKEYCTKHAKVDDKGNPTVSTNTGAAAAASSSSTDDEEEDLKNWDKEFVNMEVKPLHDLLLVAHLLDIKGLFHITCRKVADMLKGKTSEEMRQILNIRNDFTEEEDKAIKEQNPWVFPDPE

SEQ ID NO: 103029 - protein, 122 aa, Oryza sativa
  Clone ID: PAT_MRT4530_10049C.1.pep
FPLEIEIWDPLTGKNPFTDFLYGPFTGGIENSPLLPPGPAILPPSVGVSYGPTLVLGTVKKSEFHEALQKCAVLIDPLSHGASPEINFFFLPPHPPFVRPVSCTKSGKEAMPVPVVVCTSLG

SEQ ID NO: 103030 - protein, 103 aa, Oryza sativa
  Clone ID: PAT_MRT4530_1004C.1.pep
NVVGQPPRFPESPMVSFSPRALIKGLLVKDPQPRFAYKGGAPEINQPPFFEGVNWGLIQWASPPEIPNPVEFEGPPKPAPVIEKVAPAATQKGSANYLEFGFF

SEQ ID NO: 103031 - protein, 323 aa, Oryza sativa
  Clone ID: PAT_MRT4530_100500C.1.pep
MGIINWMQNRLSTAKQDKRRTEAAAVASSARRRGGGGGESCRQEEARDEIKIAGDHLLSIGTLGNESPPRPPAAAAATAAEEVADFTIEEVKKLQEALNKLLRRAKSTKSGSRRGSTAAEHDADERSSSSSSSGSQLLLPLDRFLNCPSSLEVDRRVAAADGEFSPDTQIILSKARDLLVNTNGGGAIKQKSFRFLLKKMFVCRGGFSPSPAPPPTLKDPVESRIEKLFRTMLHKRMNARPSNAAASSSRKYYLEDKPREKMQREHLHDDEDDDENAEDIFKWDKTDSDCNHCSGDVDRDARFNAIIIVCTMISDTVGVRFTI

SEQ ID NO: 103032 - protein, 38 aa, Oryza sativa
  Clone ID: PAT_MRT4530_100501C.1.pep
ERGGSIDQSKCSDIGFKLPSSMALKLGIDSNKWTPPQT

SEQ ID NO: 103033 - protein, 243 aa, Oryza sativa
  Clone ID: PAT_MRT4530_100502C.1.pep
RIECTGRRRQLSSSSSSGGRSGRSGAEATDGERARGGDGSRRHRPVAGGGRSGRSLPLPLSPVEGGGGDPGGGRSGAAVDTWSNCPDTFGLTSHPVPTALFTDRKHYSLFSQQTFTFDNYSSHRLNHHMISQNHALWSQFLIKLSVIILFVQEFLPGFSSVPVAPLYCSEPLSHPLRAPAMLFGKLGTELLSNVIRSISPHKMLLFLLQWKTLVPGKMVEQMENCRGLLDARIRLLQSEDGIG

SEQ ID NO: 103034 - protein, 50 aa, Oryza sativa
  Clone ID: PAT_MRT4530_100503C.1.pep
FFVHHASMSHFTWLPLSPESKANEAHSAPNSSRYGGWLRILGLRMLLFNI

SEQ ID NO: 103035 - protein, 717 aa, Oryza sativa
  Clone ID: PAT_MRT4530_100504C.1.pep
MAGAPCLLRVLAVSSCLCLLADAARLLAAAPAEEADALLKLKAGIVDGGGALDTWAAGTSPCDGGTSAWAGVVCSKGSVLGLQLEKEGLSGELDLAPLKSLTGLRTLSFMDNEFAGAMPDVKGLGGLRAIFLSGNKFSGEIPADAFAGMGWLKKVSLSRNGFTGAIPASLAAVPRLLDLQLNDNKFTGKIPDFPQKDLKVFDVSNNELDGEIPASLKSIDPQMFEGNKKLCGAPVDAKCEAPSPAATTSPPAATSGKIGTSPSPTAAAETTTTGTVPAEEGTQGATKPTKGSTSFGVLAAFLGTLAIIGFAVVELQRRREYNTQNFGPAASTKPTLPSAPASPATKPTHAAAAATAAAATTGGGGARSSSVSGSTARGGGGKAGEQGRLTFVRDDDRGRFFELQDLLKASAEVLGAANLGVCYRATLTGGHSVVVKRFKEMNRVGKEDFEEHMRRLGRLSHPNLLPLISYYYRKEEKLLIHDYVPNSRLAHLLHGEGRRVKKLVHWPARLKLVKGVARALQYLYDELPMLTVPHGHLKSSNILLNDRFEPLLTDYSLVPVMNQSHSAQLMVAFKSPERRQFGRSSKKSDVWCLGILILEILTGRPPSYDPPPQPEAATANGDLVGAVASTPEGEWLEKVVDADMIRKWEDEESKGEMVKLIKIGMACCEAAVDSRWELKTAVESIEELKGGKEEDANDEHSFYSSIDGDEFASVAIN

SEQ ID NO: 103036 - protein, 296 aa, Oryza sativa
  Clone ID: PAT_MRT4530_100505C.1.pep
METSCFLTSNASPVKSMVMPSPAGVVKARPHVLFGGRRAASSSVTTCCSYNGEGAAPAIDPDWRSFRAQLYFNEQYAKSVNPAVAAVRATATTPEPVKIGDKWAHPLVEPEKGCLLIATEKLDGSHIFERTVVLLLSAGVLGPVGVILNRPSLMSIKEAQAVFAETDIAGAFSGRPLFFGGPLEECFFLLGPRAAAAGDVVGRTGLFDEVMPGVHYGTRESVGCAAELVKRGVVGVRDFRFFDGFCGWEREQLRDEVRAGLWRVAACSPAVLGLATVVKGGLWEEVQGLVGERRVW

SEQ ID NO: 103037 - protein, 246 aa, Oryza sativa
  unsure (1)..(246): unsure at all Xaa locations
  Clone ID: PAT_MRT4530_100506C.1.pep
MSDRVSQLTGHLNYPKGLLAGQVAIITGSGQGIGAEAAKLFAKEGAKVIVADIDAEKCKAVAESINKDGGQAKAVPGDILKADYVETLIKSAADFGDGKINIIVNNAGYTWDGVIHKMTDKQWDTILALHCTAPFTLVRAAAPYFRVRDGAPRCIVNISSTSGVHGNAGQLNYALAKAGVTGFTKTIAKEWGPSFGVRANTVXAFGHILTRLTAAKEEGAFVKGPDGENIALGIPAKQKQAAGEAA

SEQ ID NO: 103038 - protein, 70 aa, Oryza sativa
  unsure (1)..(70): unsure at all Xaa locations
  Clone ID: PAT_MRT4530_100507C.1.pep
HLQNKNYNFHLDNKIEFFHLAGLKHGTKQRSASAQKTVQQPFKRALTXNYKIKANNFYVGGRSQHMLQLL

SEQ ID NO: 103039 - protein, 66 aa, Oryza sativa
  Clone ID: PAT_MRT4530_100508C.1.pep
SLSHMEPFISRILTTSFRFHSKLIMHSFMAFFSQVPPNDLTQFFSQLIMHSFLKKSCIPGSAVTEG

SEQ ID NO: 103040 - protein, 48 aa, Oryza sativa
  Clone ID: PAT_MRT4530_100509C.1.pep
GHQGRCARLVPAQGLQSARATSLTSCSAYWSSTGPTASWHAAASVVDR

SEQ ID NO: 103041 - protein, 90 aa, Oryza sativa
  unsure (1)..(90): unsure at all Xaa locations
  Clone ID: PAT_MRT4530_10050C.1.pep
NCLENGVELYAKKVVNRSLYAISHGXTLRYKLLGRMAGHRARYGVLHCVIESGANVCEVMVSGKLTPHRAKYVKYMDGYMISCGQSVNEY

SEQ ID NO: 103042 - protein, 120 aa, Oryza sativa
  Clone ID: PAT_MRT4530_100510C.1.pep
MGEARRRRAAVLRAMGEALGRGAASSRARRTGRRARRGVRTRREARQPRGQCAGGRGAAGARAGIKTFVIQGEEDTCSFVFLRQCLRYRLLFAEVAVITGGASGIGRATAEEFIVPNNVF

SEQ ID NO: 103043 - protein, 44 aa, Oryza sativa
  Clone ID: PAT_MRT4530_100511C.1.pep
YSIVLRETRSFCCSAHDQIKHTFIIICSIQTIRFSVSKPLIPLL

SEQ ID NO: 103044 - protein, 490 aa, Oryza sativa
  unsure (1)..(490): unsure at all Xaa locations
  Clone ID: PAT_MRT4530_100512C.1.pep
MDDLTARPLLDSVVVSTTGEIERRRERFSACSLVAWQVGALGDKVELNVFADDVRSAFHIRRADIQFTKFHPEDFFVTCSNQSDRDAILRQPRLATASGRVFLFRPWDESLHGVQVRYRYRARLCIEGVPMHGRIDETMTKVIGRKCAIHYVEEYSRRGNYNRTYDLWMWTDEPRAIPRGGSFSITAANEEVXGLSTDIPLPELEPHRNPPLLPNLSLIRINMLKLLLLSPPLLRPHLASFRPLSLWVATSNPSSPAVGKVSQIDNFINNIATPIQSPLLPAPDVKAWKPSRAKVKIRAITSAQHHSERLLCKCHAGAKLENLGQEILSKNFGLIDDYASFDDNIKKLYLXRYKKPLSPASLKTIADLVEKGGCKTIRLKTLKKKAAINVYLFNWNVRGLNAKAKQDSVKFCIQQHGASIVCLQETKVXGDMSDQHILNTLGQRFVHQYAYLPADGSKGRVILACDENFFSLSDVHLGQLPPPSPFQTRS

SEQ ID NO: 103045 - protein, 63 aa, Oryza sativa
  Clone ID: PAT_MRT4530_100513C.1.pep
IVNCSSIFQGCYLNGIADGDSDTIRDHMDTVAHRTLPVATSPFLCCHSRCLLNAGMCVNFFYS

SEQ ID NO: 103046 - protein, 99 aa, Oryza sativa
  Clone ID: PAT_MRT4530_100514C.1.pep
LAVGEQKRDALCRLDATAEHKQDEVVARPAAAAGADGGGAGEDRGHPPPRERLSSAPCREASPLLEPTPTAPMVVLCLRAATAPPLQASRRRGASDHAR

SEQ ID NO: 103047 - protein, 39 aa, Oryza sativa
  Clone ID: PAT_MRT4530_100515C.1.pep
MDEAAHNRGHNYSNSFTLIRDVQLYPRDTAPRHVTVRRH

SEQ ID NO: 103048 - protein, 118 aa, Oryza sativa
  unsure (1)..(118): unsure at all Xaa locations
  Clone ID: PAT_MRT4530_100516C.1.pep
MSFDINKWPEINKKIGVKTHEIAKEFKNIQLHPLHLILALLLDEEGFTSNIISKANGNSKDFERAIKKRVTKLPCQDPAPPELTLHSXASEVLQNAQEISKNAGDSLIAADNLLLACA

SEQ ID NO: 103049 - protein, 68 aa, Oryza sativa
  Clone ID: PAT_MRT4530_100517C.1.pep
MTTSRRLADRKTAKFQKNITKRGSVPETTVKKGNDYPVGPLVLGFFIFVVIGSSLFQIIRTATSGGMA

SEQ ID NO: 103050 - protein, 131 aa, Oryza sativa
  Clone ID: PAT_MRT4530_100518C.1.pep
MSWQAYVDSSLVGTGHIDKGAIISAAGDSAWAASADLQLKPEEMKAISAIVSGDEKAKDKAFAEGLYIAGERYVMARADGRSIYARSGRSGVAVAKTTQAIVVGHHGEAQIAGNATTTVESLADYLIKSSY

SEQ ID NO: 103051 - protein, 460 aa, Oryza sativa
  Clone ID: PAT_MRT4530_100519C.1.pep
MAVARPPRPLPLCSASPLCSARARSSRRRQGRAAWSRRRPPLPIRSRARLPLPPLSPADAASPQPCSPTDAAAPPPRSLPTPPLRLLWPPFWCGGGSFPSGDGGRLNSELGPSRFSVASVHRVGILDVCLLNIDRHADNILVKKSPESKCASGDSTPTPLDFLYGSGIAKSKYGRYDAEKLHGSGVAGEDPFARLYASVDADLNECLEKAEAAKQEKNRATVVALNAEIRGTKAKLLEEDLPKLQRLALKKVKGLSKEELAIRGDLVTALPDRIQSIPDGSATSSKKTGLWGSSGSRAGTGIKFDSTYDLEWKLIYVGSAEDENYDQLLESVLVGPVNVGTYRFVLQADPPDPSKIRKEDIIGVIVLLLTCSYMGQEFIRVGYYVNNDNDDEQLREEPPAKLLIDRVQRNILADKPSVTKFPINFHPETSAGAGQEQQQQQQSGSPENHPNQGSKPNPDQ

SEQ ID NO: 103052 - protein, 87 aa, Oryza sativa
  Clone ID: PAT_MRT4530_10051C.1.pep
MPRVSAALLRRRPPPPAGHSCCAPRLNRPSSQWTVAGQIRAWVGKIHHRARVTLAKSGGPDKPKVRVMEPMLAWEEAEPWESRLWQR

SEQ ID NO: 103053 - protein, 371 aa, Oryza sativa
  Clone ID: PAT_MRT4530_100520C.1.pep
MGLLELFITACVPVLNMLLVTGVGSFLATDFVGILNKDARKYLNNIVFYVFNPSLVATYLAQTITLEGLAKLWFMPVNILLACTFGLILGWIVVHVTRAPARLRGLILGCCSAGNWGNIFLIIIPALCKEKGSPFGAPDVCHTYGLAYSSLSMANTGVTIVSDLLQLGAVFLWTVAYNIMRATSKVADEERAKRFVSSMFGAIDFKKIFAPSTIAVIIGFIIGGTPLIRNAIIGENAPLRVIHESADLIGGGAIPSVTLIMGGNLLNGLRGEASVQPSVIASVIVVRYILLPSLGTLLVKSAVHLGLIHPDPLYQFILLLQYAVPPAMNIGTITQLFGVGESECSVIFVWVYALASVAVTVWSAFFMWTLS

SEQ ID NO: 103054 - protein, 96 aa, Oryza sativa
  Clone ID: PAT_MRT4530_100521C.1.pep
MIVTDIKYVLLQEGNKGEGKFKDQSTFNIEVFEWLHNNLCLAERTKTVEEEVACNLKLQDHGVNNRIWHQTRIRRKEIEMDLVLKQVKLGIGLCIG

SEQ ID NO: 103055 - protein, 612 aa, Oryza sativa
  unsure (1)..(612): unsure at all Xaa locations
  Clone ID: PAT_MRT4530_100522C.1.pep
MDSGGGGGGGALRPSALDLVAALLTGRGRPEEEGWPPSLAENRHLIVLLTTSLAVLVGCGVALLVRRSSISAPAVRAQEPQPRAPAPAKRKQEAEPDPDDGRQRVAVFFGTQTGTAEGFAKALAEEAKSRYDKAVFKVLDLDEYAADDEEYEQKLKKEIIALFFVATYGDGEPTDNAARFYKWFGEGNERGEWLSNLRFGVFGLGNRQYEHFNKVGKVVDQLLAEQGGKRIVPLGLGDDDQCIEDDFNAWKELLWPELDKLLRVEDDKSAAPTPYTAAFHEYRVVLVKREEARHVSINLMLSNDHDKSDIQHPCRANMAVWRELLMPASYPSCIHXEFDISRTGLTYDTQDPGGVYADNCTETDEEGANWFGFHLESDLSFNGYNEEVTPLAGVFVATXLHTAMTVTSALVYGQTPTGRIHKGVCSTWMKNSIPLEESQECSWAPIFVRQSNFKLPTDPTVPIIMIGPGTGLAPFRGFLQERLALKETGVELGHAVLFFGCRNRKMDFIYEDELNNFVETGALSELIVAFSREGPSKEYXVQHKMSEKAPEIWNMISQGGYIYVCGDAKGMARDVHRVLHTIVQEQGSLDSSKAESFVKSLQTEGRYLRDVW

SEQ ID NO: 103056 - protein, 44 aa, Oryza sativa
  Clone ID: PAT_MRT4530_100523C.1.pep
SGAARRVVIILQYLDDAWPGEPAPPPLRPFDRALARFWCHFADD

SEQ ID NO: 103057 - protein, 152 aa, Oryza sativa
  unsure (1)..(152): unsure at all Xaa locations
  Clone ID: PAT_MRT4530_100524C.1.pep
DAWAATRHCVLAPLSAVMVLIVLLRYCLHQVDXSPRHMSPSRDPKLEREVQAVLTAXDLRSLADIPGKDCRWRRGYYTHHDNGXFHVPTEEAHMAQAAMFXHPNMTMGMMTTNLSMIVTQTLTFAXWMNFFFLPFVASQIPLTLTPLMSWDM

SEQ ID NO: 103058 - protein, 401 aa, Oryza sativa
  Clone ID: PAT_MRT4530_100525C.1.pep
MPLLLRCSPAASPPLLPRRRSGSLLSAAPPGRRPLLPAAAGRVVLGCGLVTLDYLATVDAYPRPDDKIRSGELQVSGGGNAGNALTGAARLGLNTRLISKVANDEIGGTVLSELKEAGIDISHVIADQMKIPILVDAEPERTREELGEILLQYPRACFAVVTLGENGCMMLERGKDGENYETEPVDIENVAESLRLKVDKDDILPTCVSSKPAGSRSTWLTKRHLQAAADMSSATAAAGGRCRHVEVRSTTAASRRKVCYYVLFPARDCNFSERPGESKPLHRPLSMASSSSPPPPCTVAAGGGIAVERSPPESRLSELGARWGGGPGRMALSYGARQTCYIVRGKVTATATAAASAAEGSPENGRRVEFGAGDIVVFPKGTRCTWHIAAAVDMHYAFDPS

SEQ ID NO: 103059 - protein, 122 aa, Oryza sativa
  Clone ID: PAT_MRT4530_100526C.1.pep
AALASPLPPCAGGGWTCEPIAMAGGKIQKKRHGGGGGGGGGGGGGGGGGGGRDPVRQVQGVLRNPSLVDSIVEKAGLKPTDTVLEIGPARGTSPSASSRPASRPSSLSHMVLELNRPMVPVL

SEQ ID NO: 103060 - protein, 188 aa, Oryza sativa
  unsure (1)..(188): unsure at all Xaa locations
  Clone ID: PAT_MRT4530_100527C.1.pep
MADQLSEEQIVEFREAFSLFDKDGDGSITTKELGTVMRSLGQNPTXEAELQDMISEVDADSNGNIEFKEFLGLMARKLRDKDSEEELKEAFRVFDKDQNGFISAAELRHVMANIGERLTDEEVGEMISEADVDGDGQINYEEFVKCMMAKKRRKRIEEKREHDGGSRTKSAGPSAAPASKRGQKCVIL

SEQ ID NO: 103061 - protein, 89 aa, Oryza sativa
  Clone ID: PAT_MRT4530_100528C.1.pep
PKVSKGKKEEIGSYFKIPNHNTGKTHYKKPPKGGKARGAPKNRGGNPYLKGPLKTKKTGAWAKFPPKERTPNRGKVKPGGLWAEKRGKA

SEQ ID NO: 103062 - protein, 206 aa, Oryza sativa
  Clone ID: PAT_MRT4530_100529C.1.pep
MAEGKEETLDVTAAAEEDVEEVRPEIGASASGLRFSLSAAVAVAVKWESQVLNVPFGLEQRRWTCHSTTNSTEVALAARQRRWVARGGDLRVYDAGEEDAIFLAPAGMTHGDAQHGGLPTAMGTTDRGLAFRSGQRHRGGGLDDRDRDRCTGGVEAANQRGREDPKGRGKVGVKRRHSQHTHTHPYEGTHAYPTPMSIFEDWAGKY

SEQ ID NO: 103063 - protein, 1146 aa, Oryza sativa
  Clone ID: PAT_MRT4530_10052C.1.pep
NLLSVSSAIDQLKCIVVFDENSCLFQEKRTGRRIGTGVRRDGLWYINHEELGLAAVVGDVEKEISLLHCQLGHPSFEILSKLYLDLFSRVDKHRLVCDACELGKHTRSTYVGIGLRNCEPLILIHSDVWGPCPVTSVSGFKWFVTFIDCHTRMTWIYMLKHKSEVLRCFQDFHKLVTTQFDAKVKIIRTDNGTEYINNEFVSYVSDEGIIHQTTCPGTPPQNGVAERKNRHLLEVARSLMFQMNVPKYLWSEAVMTAAYLINRMPSRILGMKSPAEQLLGKREFKVPQSQKGYKCWDPIGRRLFVSMDVTFREFEPYYKSKGDLDQFLEEFSTVMEVDSREGERERGDIHEKNVGDKNGEAVVIGSIPCSIDDASKVVEVIEDTQDEDREMVPHEEDGEEGEVVVGTIPCPMEGAERVKQKDVLVYQRRRFDSQGEKRKGLVQSQIEELPHPKCPVPESSQSLSPPASLASLETIGNTSPTLEHVELPLAQRRETRSNAGRPPIRLGFEHLSSMHDIANYITYSHVSPAYKTFIASLQTMPIPKDWKCAKQDPKWKDAMKEELNDLVKNKTWELVKLPPEKRAVGCKWVFTVKQTPEGKVDRYKARLVAKGYSQTYGIDYDETFAPVAKMGTVRALVSCAVNFGWPLHQLDVKNAFLHGDLHEEVYMEIPPGFGNSQTVGKVCKLKKSLYGLKQSPRAWFDRFRHAVCDMGYSQCNGDHTVFYKHRGTHITILAVYVDDIVITGDDVEEIRCLKERLGKAFEVKDLGPLRYFLGIEIARSSKGIVLSQRKYVLDLLTDTGMLGCRASTTPIDRNHQLCAQSGDPVDKEAYQRLVGRLIYLCHTRPDISYAVSVVSRYMHDPRTGHLDVVHKILRYLKGTPGKGLWFRKNEHLNVEGYCDADWASSMDDRRSTSGYCVFVGGNLVSWRSKKQAVVARSTAEAEYRAMALSLSEMLWMRSLLTELRVLRSDIVMLHCDNKSAISIANNPVQHDRTKHVEIDRFFIKEKIDSGVLSLEYIKSCEQLADCLTKGQIVYSSGGRIKHTAAVPICGYTDQIEVCAQHLVANRDSYRLKHIAYQIHDMNMCLVVSKCGQEERLSVVSCVCLDEKGIGGQGPPCLADNTEAAELLGWEPHQDVEQHVQREDARI

SEQ ID NO: 103064 - protein, 864 aa, Oryza sativa
  unsure (1)..(864): unsure at all Xaa locations
  Clone ID: PAT_MRT4530_100530C.1.pep
MMAGASSYFSLRRLLLLLLPLVPLLGATTAAAAGANSSVTYDHRSLIISGRRRLLISTSIHYPRRVPEMWPKLVAEAKDGGADCVETYVFWNGHKPAQGQYYFEERFDLVRFAKIVKDAGLYMILRIGPIVAAEWTFGGVPVWLXHYAPGTVFRTNNGXPVKSHMXRRFTYHLLVRRGIWRRFMPWGHQNTLAQVENEYGDMEQAYGAGAKPYAMWAASMALAQNTGVPWIMCQQYDAPDPVINTCNSFYCDQFKPNSPTKPKFWTENWPGWFQTFGESNPHRPPEDVAFSVARFFGKGGSLQNYYVYHGGTNFGRTTGGPFITTSYDYDAPIDEYGLRRLPKWAHLRDLHKSIKLGEHTLLYGNSSFVSLGPQQEADVYTDQSGGCVAFLSNVDSEKDKVVTFQSRSYDLPAWSVSILPDCKNVAFNTAKVRSQTLMMDMVPANLESSKVDGWSIFREKYGIWGNIDLVRNGFVDHINTTKDSTDYLWYTTSFDVDGSHLAGGNHVLHIESKGHAVQAFLNNELIGSAYGNGSKSNFSVEMPVNLRAGKNKLSLLSMTVGLQNGGPMYEWAGAGITSVKISGMENRIIDLSSNKWEYKIGLEGEYYSLFKADKGKDIRWMPQSEPPKNQPMTWYKVNVDVPQGDDPVGLDMQSMGKGLAWLNGNAIGRYWPRISPVSDRCTSSCDYRGTFSPNKCRRGCGQPTQRWYHVPRSWFHPSGNTLVIFEEKGGDPTKITFSRRTVASVCSFVSEHYPSIDLESWDRNTQNDGRDAAKVQLSCPKGKSISSVKFVSFGNPSGTCRSYQQGSCHHPNSISVVEKGTLGWAHRRACLNMNGCTVSLSDEGFGEDLCPGVTKTLAIEADCS

SEQ ID NO: 103065 - protein, 167 aa, Oryza sativa
  unsure (1)..(167): unsure at all Xaa locations
  Clone ID: PAT_MRT4530_100531C.1.pep
LSNLNTDKTIPFVPPKCKIFTXLLIRNRIWTVDRLQKRGWVNQWICPLCYTTQKTSTHLLAHCRFSKRIWQEIQRWIGLDLDMXNWGNRTSVEDWWYHLMLRLPRPTKTLKSLIILIAWEFWCERNAKIFQHVDTIPPRHXTIIAKIKKEAVTWVRAGATPLAEFIF

SEQ ID NO: 103066 - protein, 79 aa, Oryza sativa
  unsure (1)..(79): unsure at all Xaa locations
  Clone ID: PAT_MRT4530_100532C.1.pep
DSEEGPRILKAIGATXSLWPSTAXWSKSMELTLKPHCMSLAQRILMHMQSFAHMSNAMRYVAGTANCAQTISTRLIYNP

SEQ ID NO: 103067 - protein, 61 aa, Oryza sativa
  unsure (1)..(61): unsure at all Xaa locations
  Clone ID: PAT_MRT4530_100533C.1.pep
QYGEVPVVAIYVTDXNNSANQLTLDRDFLLAGNKRNPQAYGVKFEEWSQTYCGLALNCLRG

SEQ ID NO: 103068 - protein, 225 aa, Oryza sativa
  Clone ID: PAT_MRT4530_100534C.1.pep
IEGWILLVSGVKEDAEEDDLYNTFSDFGHVKDLHLNLERRTGYAKLLAVRASHIQLINLKGMRNVYFHIKSRICTSLVLPECYILGYALVEYESFEEAQTAIKAMNGTQLLTRTVYVDWAFSRGPIQKLTSTSSVIMSKPQMIIHCFNNQSEAITSAISDSTSQACCLDMLTGSYYVRNPECSRSVFFDRWLHLQGATTSVCLVITDAIVRFNCANHYRFLALRA

SEQ ID NO: 103069 - protein, 492 aa, Oryza sativa
  Clone ID: PAT_MRT4530_100535C.1.pep
MGWWPPAACRRWGVVVVVVAALMAVSATAAVKEELEGRESGVVAAAAQGRWPRHRHAYAAMMYMGTPRDYEFYVAVRVMMRSLARIGADADRVLIASADVPADWVRAMREEDGMRVVLVENMKNPYESNLGGINRRFKLTLNKLYAWTLVDYERVVMIDSDNIFLQKTDELFQCGQFCAVFINPCYFHTGLFVLQPSMDVFKGMLHDLEIGRANSDGADQGFLVGCYPDLLDRPMFHPPENGSKLNGTYRLPLGYQMDASYYYLKLHWHVPCGPNSVITFPSAPWFKPWYWWSWPILPLGLSWHKQRWDDLGYAAEMPVILMEILMYAVIITITRLAKPGMTKLCYNRRPEKQNAMVQGLIKMSAIVAMLIAYAIPFFIIPRTVHPFMGWSMYLFGALALGVLVSNAFLLPLLAVLTPWLAIIGMFFVMAFPWYHGGIVRVLAIFGYAFCSAPFLWASLVRVMDSLQTMLEREPFFPRLGEPAQETEFSKLF

SEQ ID NO: 103070 - protein, 616 aa, Oryza sativa
  Clone ID: PAT_MRT4530_100536C.1.pep
MAESCYVRVLFLLLLVVTPLPISIASPLKLRLSASEVAALEAHAPPPPPPPPPDTPTTYFEVDRPHRPPPGSFGPCSTLLLSHSFGFTYTLPPVTAPYSPPPCLAAAGGRASAISLAVLEWRATCRGVQFDRIFGVWLGGVELLRSCTAEPRPKGVVWSVSKDVTKYASLLAARNSSTLAVYLANLVNDQYTGVYHANVTLHLYFRHPPQPPQPGLGPADVIVPISQSLPLNGGQWFQINNNEDVESASLAVPANAYRAVLEVYLSYHGSDEFWYTYGNPFNGNGPFREVTVRIDGDVVGAVWPFPVIYTGGISPFLWRPISGIGSFNLPSYDIELTPFLGWLLDGEEHELGFAVTDAQDFWYVDGNLHLWLDPRSAATTAGIISYDAPPLEKVTAVASRGPGNEYYQTTAFRRISAAGWVQTSSYGKITATWTQRFSFVNTNQVREDTEQTVNQTTDAYSGVHVTDHAGVAYSQEAEQSFPLYIYQGQVNQTSNDSFTEETSVQLRFEEERVAAGRPGFWSRSLSNAQDSAVDVRVQEGDAVGTSWRAAQTYRYEATDGCYYRDVASQGYGVVSDHADEVCAKGSPAAGRAIAGGAATELGGDAAAAAGVARLSS

SEQ ID NO: 103071 - protein, 155 aa, Oryza sativa
  Clone ID: PAT_MRT4530_100537C.1.pep
SYIIIILNRYFISFNRTLIISYTPLYLHPLHHPLLSQSPLTLSYPTFCYYPPTFLSHLFSSPILSYPTTYPHPINNLYLNYSPLPPPLLLNPYLLLLSSSLLPFPFTPPHPPLLSPSLPPLPTHPPTPTPHLPSYSLSLTFITPLALIIIYISLS

SEQ ID NO: 103072 - protein, 183 aa, Oryza sativa
  unsure (1)..(183): unsure at all Xaa locations
  Clone ID: PAT_MRT4530_100538C.1.pep
MSSATTSRIGLRSQDEVGVQPNARNYYRCSAAGCXGVKKRVERDGDDPXLYVVTNYDGVHRRPLRFVNPGVTGDAAVGWWWGVCGGADRGLRQDLRRWLDVVPLPRQQKTGGVGFQTKDRYMFGGCRCAPTWTRRRSATSWTSSSWATGRRRVNAMCDEYLVKGATSAKTECNTAKEPHLHWL

SEQ ID NO: 103073 - protein, 120 aa, Oryza sativa
  unsure (1)..(120): unsure at all Xaa locations
  Clone ID: PAT_MRT4530_100539C.1.pep
ARSLVVALQQTDPLTPEYIQYHVHPHLILHQHMLTPSPDFQIHYFIKVATPFFQSPILQLKNCQPIQQHCLQQLIIIXQQSHYQHITNPHPIAPHLQLQQSPFHSTFHPQSTSTPTYSSP

SEQ ID NO: 103074 - protein, 65 aa, Oryza sativa
  Clone ID: PAT_MRT4530_10053C.1.pep
MASKVGFFAAALMADMEGMSGAHMSESAMRLTDRHCHRKVQDSHVDACRHELDRQLTGRQRFQPM

SEQ ID NO: 103075 - protein, 186 aa, Oryza sativa
  unsure (1)..(186): unsure at all Xaa locations
  Clone ID: PAT_MRT4530_100540C.1.pep
TRCRYAQNGMSNEAISLFHNMKKAGVCPDKITLAGVLSACSAVGALELGSELDGYASXQRSLKKMVYVGTAXVDMYAKCGDLDKAIEVFRKMRCKNVASWNALICGLAFNGQGDEAIQHFELMRNEDGLKPDDITFIGVLSACVHAGLVKDGKRWFNSLTSEFQIIPKIEHYSCMVDLLARSGHLE

SEQ ID NO: 103076 - protein, 127 aa, Oryza sativa
  unsure (1)..(127): unsure at all Xaa locations
  Clone ID: PAT_MRT4530_100541C.1.pep
LSTNFHLYLYQYSSVASLPDRCNGVGLVSDYSVALCHLGGYRVVFNNIDVVSRLLSIIIWAYMLRDSRGEPLIVTTQYGYSSTLVXIHKTNSWGGYYSIFNPXWKAMTGCRKELDNPGWSLKTPGGH

SEQ ID NO: 103077 - protein, 146 aa, Oryza sativa
  unsure (1)..(146): unsure at all Xaa locations
  Clone ID: PAT_MRT4530_100542C.1.pep
RSEKRQVRYFLGDEISQIRNNIIYSGLGGNVLTTKFGNPSVRDEDXSKQNPRSRSFQKHSKNRLIEFESDKVSRLSRFRQYDMFGQKSTAKTYGILEFVRDKSRVQHGHTLIKSAXTLTNLKASFWTCTGVKQISQASCFRINNRI

SEQ ID NO: 103078 - protein, 406 aa, Oryza sativa
  Clone ID: PAT_MRT4530_100543C.1.pep
MVSLPLQWKPALATHVDRNKSSPLHFASSDGDCSIVQAILACSPPSAPYMQDNEGFSPIHAAALMGHTATVRLLLQFSPASADICDNRGQSFVHTAATKGHSSIISYAIGSSMLEHLLNAQDREGNTPLHLAVDAGKCKIVSKLLSSEIVQAHIMNNEGHTPSDLVQNCKGFYSMVSLVVKMYASGAQFQPQRQDHIEKWNAQDIMKWRDTTSKYLAIVSTLVATVAFSAAFNIPGSYGDDGKANLAGNCMYDTFLILDTISLVTSVVAIMLLVFGRAFSSHHSWLSFMISTHFLWLSINTMVLGFLAAISAVMSKKKGLNITMAILIYFGMWILTMLLTSLTTVGSFTGILKFLFGGRMERQRRAKRRISRQYPYAIFYTFNMVLFFVIANIALAGFDTFKSLSY

SEQ ID NO: 103079 - protein, 350 aa, Oryza sativa
  Clone ID: PAT_MRT4530_100544C.1.pep
MATRAALCWRHVAVFAAALLAAAAVVVAGDPGKIGICHGRVGSNLPPPAAAAALLRQNGITKARLFLPDPAVLPAFAAAGIDLMVGVPNENLTFLSAAGPDGALRWLQSAVLAHAPADRVRYLAVGNEVLYNNQFYAPHLVPAMHNLHAALVSLGLGDKVKVSSAHASSVLASSYPPSAGAFDAASLDVLRPMLRFLADTGAPFMVNTYPFISYVNDPVNVQLGYALFGAGAPAVSDGALVYTNMFDATVDALAAALDREGFGAVPIAVTETGWPTAGHPAATPQNAAAYNAKIVERVARGAGTPRRPGVPVEVFLFDLYDEDGKPGAEFERHFGIFRADGSKAYNINFA

SEQ ID NO: 103080 - protein, 61 aa, Oryza sativa
  Clone ID: PAT_MRT4530_100545C.1.pep
MPNILSLTCICFNSVIYPTSFFFAKLPEAYAIFNPIVDFMPVIPVLFFLLAFVWQAAVSFR

SEQ ID NO: 103081 - protein, 99 aa, Oryza sativa
  Clone ID: PAT_MRT4530_100546C.1.pep
LFPLFSCLSAFERAPPGSPPRGPLKRLVWALSTLCHPPCLRGRSRRSLPPPWRPSFGPSPGHPRPQDSWPFSSTPEVVTPIDPCFSVACDVLHAHKASN

SEQ ID NO: 103082 - protein, 143 aa, Oryza sativa
  unsure (1)..(143): unsure at all Xaa locations
  Clone ID: PAT_MRT4530_100547C.1.pep
FVHFRPSQNLFLKKAGSSFQICSGNGTILFFXFPEEEEIXRLKAIFLKEFNXNYGIFWLKKMGFNLESFXTPQIPPKVWPIXIYLKFLGKRGQPNGGKKKTQRGKTRXXXKPXNPIFPFPLXFGGKMXXXLGFKXXKVAPQTN

SEQ ID NO: 103083 - protein, 179 aa, Oryza sativa
  unsure (1)..(179): unsure at all Xaa locations
  Clone ID: PAT_MRT4530_100548C.1.pep
RTASRPVDLXIAAFVRFKNGNKSGVEALSKFLGNYDKAPFMLLQKDLRGGDDKDGEWLFINGSQWQEIDEVLIYSFIYGGTDNWQGTDATITLYVPGQPPISSTLVNGSELXNVAAIARLKNVDGDIKVXRLNSFFRNRQSLDXHYGWGFXWXSGASKNYHIHLTGINYTPPGLNNAKF

SEQ ID NO: 103084 - protein, 521 aa, Oryza sativa
  Clone ID: PAT_MRT4530_100549C.1.pep
MGSGSSKAGASSASSSSSASASASASGGDEASKGNGKGQRRGRGRGRGLLQRLPSSSSSCFRGHGTPSRDDASSASSPPPPPRPPRRPFESSKGEENGSLPSIAQMDKSEEDAPTIPKSHPGEGATLPSSHINRDQDVDVLQNATAVNNRVEVNQSPNHSDSSRPRFGVNFGLSRAVSLGSSVACSILSSDLSTSANPDGGHGNVDNSSDANISQQGGASTAGIDSTLDMLRDSVTAQARAAHQARRNLLESDNANLRYSNRRMGPQEPFEGSVRFSRTLSVGRLRDRVLRRTPFSDGLFTPSLLYDRAIWPSGNASARQNSAIMQRTNSERNSELQLDSSTDSATLREANNRDLLERRSAFLERRRIRSQVRALQRLGSRTSSRPGNSDEETNTRASISRIVMLAEALFEVLDEIHQQSAALSSRPSFSSIGSVPAPKEVVERLPVKVYRRSLKHQTEEAAQCYICLVEYAEGDCVRILPCNHEFHLTCVDKWLKEIHRVCPLCRGDVCRSNASGIGKTT

SEQ ID NO: 103085 - protein, 938 aa, Oryza sativa
  unsure (1)..(938): unsure at all Xaa locations
  Clone ID: PAT_MRT4530_10054C.1.pep
MTRCAVVAAVAAVLLVAGAAAAGGGEEEEAPSTCARRGPGFVDALASRCPCIRIEPSPPVEVRGEAIAKELNLRHRGVTYSVLFYAAWCPFSSKFRPIFEALSTMFPQIYHFTVEESSAMPSLFSRYGVRGFPAILLVNETTMVRYWGPKDLSSLVDFYKETTGFDPIAYFDVDHQDSTGDFRPVTPGDRSLRKIAKDEPFVLLAVLFIILKVAAHFVPIVVSHLKTFLVVRVQNLNLGIRRGSSQLLERALNVLDVKRLCSKLRLSNKTRDLRKGASNARAWASSFTSVSLGMWEPHGHVNSEGLTLLWHPNPSTATVKIFNEGLSAVQFDMSRGTASMDAISLDEWELLPDNKSSYFMEEFTSDHGTVVGKDDQFLFGASLIMINMDHFTPASHPSPYDCILDDETKNIFLPIHLSEEVYVGDPVIKFKDIDVVKIESYREEFVPKVTEIFDAEEEAEMIKSPVSAEEVDVDDDDEVMAMVAPDQCVEEEEGAQKDKEHNGFSVGKLRVNGVGALCSFGVAAATLCIFLLGGRQQQLHKTQNQKTPFQMYADNEAGMQLEHNLQPSTDERKRALEDKCRSSKALVVFVLLLLHCMSLHDEDEVEDGVEATAGTREVAARPTATAAERRAGVVGRSRDRGVGATAQEWWRSCDQESPTDVESKRGGSFFTRELMIEAIQNAAVVWKTLSNMYSGEGNVMMMVEAQNKVENLKQEGRTVQEYASELQQLWADFDHYDPLPLKHEDDIVIGNKWLQRRRVIHFLKGLNKEFEDRRAAMFHQATLPTMEEAISAMVQEEMRLRLMRGXSIRGGHGGTRGGFRGDRGVFGGNRGGRGGDRGGRVGGRXNKTNESSNTTTHFGNFANYAQVGEVNLLSISSAIDQLKCIVVFDENSCLFQEKGTGRRIGTGVRRDGLWYINHEELGLAAVVGDVEKEISLLH

SEQ ID NO: 103086 - protein, 118 aa, Oryza sativa
  unsure (1)..(118): unsure at all Xaa locations
  Clone ID: PAT_MRT4530_100550C.1.pep
HVLHASKTRGRRTTKTAPPXDGAAALGAPRPPPTRGAAPKAPAARSRTTPAAAPSPPTTTTPPRGSTPSRVVPPPPPPPSADRARRERARSNLRRHPPALVVADGKLHPTQSRERHGF

SEQ ID NO: 103087 - protein, 62 aa, Oryza sativa
  Clone ID: PAT_MRT4530_100551C.1.pep
MEKLKFFPVKEPFVPPSSLIAGLGFFFPPVVNPMLDFWETAKQVPPPALKNVVAGVPGKKKE

SEQ ID NO: 103088 - protein, 99 aa, Oryza sativa
  Clone ID: PAT_MRT4530_100552C.1.pep
MCGCGVGGMTACAGVKQEWGLTWRFEGGQGPAIAVDYDQGMTARETSWTILRPSMWGKWLLAGLADVYCWTSEPLFALATFVFSIVAVVKSALLSRWGG

SEQ ID NO: 103089 - protein, 127 aa, Oryza sativa
  Clone ID: PAT_MRT4530_100553C.1.pep
AAASASCARGLWMSVVSSSCCLLSFPLLCLPHDTSHGFCSAAQRSPAPCFSPLSVCSPFMHGHWKENSPCIVGREEREMDSERDHQLMQCKDHSVTGGSVYGDASFSTSHTHLLPSISLTRTHKNTH

SEQ ID NO: 103090 - protein, 210 aa, Oryza sativa
  Clone ID: PAT_MRT4530_100554C.1.pep
RMVQMIVTAAELSSWVTEWRGSAKSLPYSYNLGMFKTQPHRTKNVPTTSGSKLLGPTATGPSTSFDAFLLAHVCLSHLPFTFSTQSGGLVPPGHQRIVEIPNGGHGVDDECETGLSPDERSFAVARELVLEHDLLCVLLLGGHGFPASIKKEKSNQISTKMHEIQIHAHQNAIAYEKSASKRSKFAPTKATYPHEKQTNREARDPNSHPP

SEQ ID NO: 103091 - protein, 114 aa, Oryza sativa
  Clone ID: PAT_MRT4530_100555C.1.pep
MEAADVAKEHHKEEKKDKEHAKEAKPEKEKKEKKEKNGEEAAKPAKEKKEKKEKKEKVEETTDVAVRRAKLEKLDAKIDDLKAKKQEIVARLVQLEEGATANAAAADAAPPASG

SEQ ID NO: 103092 - protein, 59 aa, Oryza sativa
  Clone ID: PAT_MRT4530_100556C.1.pep
DRHNGHMGFRGFYVCSNGTGNVPPMLILYQQALTYDSILSCCCRLKKKKPNQKKKKKKK

SEQ ID NO: 103093 - protein, 213 aa, Oryza sativa
  unsure (1)..(213): unsure at all Xaa locations
  Clone ID: PAT_MRT4530_100557C.1.pep
MASMTGLSQGVQLPAGPRRAGGRSRLAVVRADAAAADVQTGRRAVLGLVATGIAGGALAQAALAEAAKPIKLGPPPPPSGGLPGTLNSDQARDTDLPLRERFYLQPLPPAEAAARAKESAQDIINXKPLIEKKQWPFVRDDLRLRASYLRYDLKTVINSKPKDEKKGLKDLTGKLFATIDGLDHAAKIKSPEEAEKYYTLTKSALGDVLAKLG

SEQ ID NO: 103094 - protein, 55 aa, Oryza sativa
  Clone ID: PAT_MRT4530_100558C.1.pep
GHVLPKLYAKVHHCVSWNAIHAHIVSVRSCENRRNCELPQHFRTVRICLFADHCG

SEQ ID NO: 103095 - protein, 207 aa, Oryza sativa
  Clone ID: PAT_MRT4530_100559C.1.pep
MTCDLAGRDHRRAGRDNSLESDKALFSNMIHEIAGGHGYPPHQGYPPQGYPPPAGAYPSPPGAYPAPTGAYPPPPGAYPPQHGYPQPGGYPPPGGYPQHGGYPPAGYPGSSGHQGGHGSSGGGHMGAMLAGGAAAAAAAYGAHKISSHGHGGHMGYGGHGGFGGYGHGYGGHHGGKFKHGKHGHHGKFKHGKHGHGMFGGGKFKKWK

SEQ ID NO: 103096 - protein, 943 aa, Oryza sativa
  Clone ID: PAT_MRT4530_10055C.1.pep
MSSGVGKEVVDASSVVTKGDMKDLLENLLKMGMIGPKSVAGGFELKLELMPNELRLEWSKNYLSWCRRAQLMLRAKGVDHFLQESCEEPSDKESQAWRMWNTTNSTVVSWLMTSVAPSISRMIETIQNAAIVWKTLSNMYSGEGNVMMMVEAQNKMQRQRVIHFLKGLIKEFEDRRAAMLYQATLPTMEEAISAMVQEEMRLKLMRGTNPTRSAYTVADNRECYNCGQVGHVSYNCPTPRNIGGRGLIRGGYGGFGGTRGGFGGDRGDFGGNHSGRGGRGGDRGGGGRGRGEEKGTGRRIGTRVRCDGLWYINHEELGLAAVVGNVEKEISLLHCQLGHPSFEILSKLYLDLFSKVDKHRLVCDACELGKHTRSTYVGIGLRNCEPFILIHSDVWGPCPVTSVSGFKWFVTFIDCHTRMTWIYMLKHNSEVLRCFQDFHKLVTTQFDAKVKIIRTDNGTEYINNEFVSYISDEGIIHQTSTPPQNGVAERKNRHLLEVARSLMFQMNVPKYLWSEAVMTAAYLINRMPSRILGMKSPVELLLGKREFKVPPKVFGCVCFVRDHRPSIGKLDPHAVKCVFVGYASSQKGYKCWDPIGRRLFVSMDVTFREFEPYYKSKGDLDQFLEEFSTVMEVDSREGEIERGDTHRKNVSDKNGETVVVGSIPCSIDNASKEAVEVIGDTQDKDREMVLHEEDGEDGEDEEVVVGTIPCPMERAEKTVPIPKDWKCAKQDPRWKDAMREELNALMKNKTWELVKLPPGKKAVGCKWVFTVKQTPEGKVDRYKARLVAKGYSQTYGIDYDETFAPVAKMGTVRTLVSCAVNFGWPLHQLDVKNAFLHGDLYEEVYMEIPPGFGNSQTVGKICKLKKSLYGLKQFPRAWFERFRCAVCDMGYSQCNGDHTVFYKHRGTYITILAVYVDDIVITGDDVEEIRCLKEWTPKCRRIL

SEQ ID NO: 103097 - protein, 191 aa, Oryza sativa
  Clone ID: PAT_MRT4530_100560C.1.pep
MGGGKDKHDESDKGLFSNMMHGVAGGHGYPPHQGYPPQGYPPPPGAYPPPPGAYPPPPGAYPPPPGAYPPQHGYPQPGGYPPPGGYPQHGGYPPAGYPGSSGHQGGHGSSGGGHMGAMLAGGAAAAAAAYGAHKISSHGHGGHMGYGGHGGFGGYGHGYGGHHGGKFKHGKHGHHGKFKHGKHGHGVILSL

SEQ ID NO: 103098 - protein, 363 aa, Oryza sativa
  Clone ID: PAT_MRT4530_100561C.1.pep
MPAVFTLAAAARRARIGANTSPADSNRGQVNPSPEATIAAKGNFYHYHVQEFCAKHKKDMADEHPVISSDSMFLKAILPTLNVSPCNPLTITGGAGSSTVTAAAFAGGSSSPAPLQVLVFQQQSTGNGNVEISFNSNASPMAMWCPAAGCSLAEGAFSYQGPLPPSMRNHINLLLTALPLQIGIAMDKGKAPLIELPYGIPMDDFLVGQTAYGGAGPSIEAPDATAAAYPYIDALNNNVAAGSLMASPMEPTFSITEPTVLTQGEGSETNAVATTRNNAAPLMVPDQVTADAAMDAEEDIMFSLESLLGLDYDMLPMEDSSAAEAAAADDSAGMDIGWDLDLHDILVENANDFVFLDSIAGSE

SEQ ID NO: 103099 - protein, 459 aa, Oryza sativa
  unsure (1)..(459): unsure at all Xaa locations
  Clone ID: PAT_MRT4530_100562C.1.pep
RNTKVVVGSIPCCVGDPVQEKEXRKPCEEENLQVYTQRSRLPVIQQVERLXSQDAEVDEQMLDHIKPIQVYSELGQGEEESEEGGGESELPIAIRKGTRSAAGKPPQRYGFESEDEGGDNNNIANYVLYSLLSPTYKAXVASLNSVAIPKDWLEAKIQDCXEAMIEELEALEKNRTWDHVPYPDKKKVVDCKXVYTVKQNLDGKIERYKARLVDKXYSQTYGIDYDETFAPITKMSTVRTLITCAANLDWPFYXLDVKNAFLCRDLQEEVYMEIPPGFATLQTRAKVLRLKKSLYGLKQSPRAWFDHFKRAISGMGYIXCNGDHTVFYRHNGCHITMLAVYVDDMIIXGDDSMEITRLKENLSKEFEVKDLGQLKYFLGIXIARYPRGIVLSQRKYALDLLYDTGMLDSRLASTPIEQNHKLCAESGDQVNKERYQRLVGWLIYLCHTRPDITYAVSVV

SEQ ID NO: 103100 - protein, 171 aa, Oryza sativa
  Clone ID: PAT_MRT4530_100563C.1.pep
MDGSDDECCYYYDAVDSDGDEEEEEEIIMLDEDDVGLLDGAALPPPEEEVEHRAICWAITKESLAAAQEQDLSMVMNLVNVERHNARALLAHHRWKMERIYDRLDMMGRDALLRDAGVVVLPEKSSSSGSSMAMAKTNPPGSVAVTCNVCFEEYPLGSVSAMDCGHCFCND

SEQ ID NO: 103101 - protein, 85 aa, Oryza sativa
  Clone ID: PAT_MRT4530_100564C.1.pep
MARASTKPALDTLWRMRFATAPREKRSRKPHARRGSRSRAGGRLGAELRRPVRCGGREIFVPAVAQRGEPATDAAAGTAWTVDVT

SEQ ID NO: 103102 - protein, 235 aa, Oryza sativa
  unsure (1)..(235): unsure at all Xaa locations
  Clone ID: PAT_MRT4530_100565C.1.pep
PLLFLEQTLSIRFHYKRSFHPWLFPPHQKTLMACTTPSRTSHPRTPQHITWHPIILHPRQGASGQPRXGGAHTPIHNPRGSTIRVQRGVSHTSRHSSTHRHITYFYPYMWRTQSGRITVARPMGHMWQXPLYMWVAHTPVGQHTQFVGSKTPARQTGYQACGAHPRPIIRGNPXGPFGTPANGGKSHXGRCGGSPTDNITISRLWAFTISLPHVDIKLAHSGGYRHPFXWCSKTI

SEQ ID NO: 103103 - protein, 66 aa, Oryza sativa
  Clone ID: PAT_MRT4530_100566C.1.pep
YTQKDVKFSTACREEHLPNSKEIPIRQFSQCRKLEDKKLGNLKLECSNKDHLFKYIYTRFLYQQST

SEQ ID NO: 103104 - protein, 246 aa, Oryza sativa
  Clone ID: PAT_MRT4530_100567C.1.pep
MYDTVADKTIDSVRNLERRRRQGEGRHEGRNLSGSSGGFGGDGLSSPEKAGASGQWPPPRWCRARLGRTRGLMQKAKPETPLAPAVPPALRRQGDQQLQDESVLPAWSTRVLQILRSWTVAHSNGHTTAAMSMGGLINKMTGRIGDSPLIGSGEGKAIIRSTLARDIAAVMEYRGAGLQEAIDYCVKERLDEGFIGLIAVSGTGEVAHGFNCTGMFSGVALEDSVAAVLGEDLGNNTPHGGLRWWR

SEQ ID NO: 103105 - protein, 129 aa, Oryza sativa
  Clone ID: PAT_MRT4530_100568C.1.pep
MESSRILAGPVAAGRIRPTSVVHLSPADLEVVDWSDFILCGHCLQGLQVVDNSYFITEDNVGMLKLAKEANSILEAIDYCVKERLDKGFIGLIAVFGTGEVAHGFNCTGMFSECGCRRKEREGRERGEE

SEQ ID NO: 103106 - protein, 174 aa, Oryza sativa
  Clone ID: PAT_MRT4530_100569C.1.pep
TRAMPSITCDKVVLDNLYGEIAKSVVTIKRYNRTGLVNFATGFIIYATRSEVLVCTDHTVLKQGEDTYVYYSDGTARQAFEFIKRTPCGHAILLVSVQPGERRQYPVSFSTVQAKREEICMIARVNHDGDPGFMSGIVVAPSGKIMLAIRKSYHLVMRKKFAFTCSHGRTGNVV

SEQ ID NO: 103107 - protein, 51 aa, Oryza sativa
  Clone ID: PAT_MRT4530_10056C.1.pep
GWAFKGQTAANPLDQLLEKDPALMERRQKCLNRRESYKAARAEKNACARQR

SEQ ID NO: 103108 - protein, 129 aa, Oryza sativa
  Clone ID: PAT_MRT4530_100570C.1.pep
MKRDEQDRRGGHTTSAACPTEPGKIERSIRPARARSSKRGMVVGCSPARTTQAQQRAIEPAAKLTNRVVISRQSASVRASRLAAVAACVSCAVLPDDYTREKGTAASIGIYHNQPAPSIADAPMHLPSA

SEQ ID NO: 103109 - protein, 120 aa, Oryza sativa
  Clone ID: PAT_MRT4530_100571C.1.pep
MEEMPRLAMGAAMLIMLLTVWSSPEMAMAASAAATVAHRLGLNGNGVAGTHPVGPGSTLIEHAHQGNIYLSFLKTIDTKFFLETGRINVGVRRNLKIAVPLKHGFSAFVNVSDQGVRRWP

SEQ ID NO: 103110 - protein, 127 aa, Oryza sativa
  Clone ID: PAT_MRT4530_100572C.1.pep
MESSRILAGPVAAGRIRPTSVVHLSPADLEVVDWSDFILCGHCLQGLQVVDNRSSLTAVSRAGDGGLRSGALKRPHRGGHVHGRADEQDDRAHRQGHHTLHAGARRAPGGEVAHGFNCTGMFSECGA

SEQ ID NO: 103111 - protein, 201 aa, Oryza sativa
  Clone ID: PAT_MRT4530_100573C.1.pep
MESSRILAGPAAVGRIRPTSVVHLSPADLEVVDWSDFFLCGHCLQGLEVVDNSYFITEDNVGMLKLTKEANGILTVGCAVVHSNGHTAAAMSTGGLMNKMTGCIGDSPLIGSGEGKAIIRSTLARDVAAVMEFRGAGLQEAIDYCVKERLDEGFIGLIAVSGTGEVAHGFNCTGMFSGCGCKRKEREGRERGRKKGWREKG

SEQ ID NO: 103112 - protein, 50 aa, Oryza sativa
  unsure (1)..(50): unsure at all Xaa locations
  Clone ID: PAT_MRT4530_100574C.1.pep
GRRRGPLHPMVWCHPNGHVVTQHHTQXLASIFRTYGELLFLRVXSYPRDL

SEQ ID NO: 103113 - protein, 108 aa, Oryza sativa
  Clone ID: PAT_MRT4530_100575C.1.pep
MRRAWAAAGARLWATLSPSSTGRTTERSWAWKTGAAGTGGGRLGRSWVVALRHERRCHQARPAVPIFSMMGHGEKGRQAGARGVVTELDQPSPFSHQGTRKRGGHCRR

SEQ ID NO: 103114 - protein, 315 aa, Oryza sativa
  Clone ID: PAT_MRT4530_100576C.1.pep
MKLTLLGNCIHHPVLLLVILACAGIAPASGAGGRWDVLQRSIGVSAMHMQLLHNDRVIIFDRTDFGLSNLSLPDGRGRRNPRERVTGGWNDGYRNVRTMAACEAGDDTCDWDETQDALAANRWYATNQILPDGRAFIVGGRRQFTYEFYPTADSSGGSAISLPFLVQTKDPEENNLYPFVHLNIDGNLFIFAKNRAILFDYKKNKVVRTYPELAGGDPRNYPSSGSSVLLPLKPSPTEAEVLVCGGAPAGSYTSTKDGTFSSALVTCGRIKITDTAPAWVIETMPSPRVMGDMILLPNGAEVVIINGAMDGTAGW

SEQ ID NO: 103115 - protein, 74 aa, Oryza sativa
  Clone ID: PAT_MRT4530_100577C.1.pep
VFPVAAVVKARPVNLSYVTQYQNYCMACRGTSAWQLHTQPARGWSRRRRTGRSRPEPSPWRWRRQQYTRLIVNR

SEQ ID NO: 103116 - protein, 152 aa, Oryza sativa
  Clone ID: PAT_MRT4530_100578C.1.pep
MATASTAENSPRPPPMRPLSGLFYHTASTVPLLGEGKEARRRRHHDDEPATTTTSRKPLVPAPPEDASRSLDSEARHTAAASRASAAREESTTKREEKAKGRRSEQRRQHGRRRGEAHGGGIPGVLLRRGRRGGAAAWEERRRRGGEDRAEG

SEQ ID NO: 103117 - protein, 158 aa, Oryza sativa
  Clone ID: PAT_MRT4530_100579C.1.pep
MRLQPSLPIIGMTLGHTWPLGHIELPVTFGDSTNFRTKRIDFDMANLNLPYNAVLGRPALVKFKAATHYAYLQMKMPGPNSPITISGDVKIALACAEQRADSLAAATEPVEAGGSPEASASHASKKRITSGDEVPVKDITLGDDPSKTAKIGGNLDAK

SEQ ID NO: 103118 - protein, 882 aa, Oryza sativa
  Clone ID: PAT_MRT4530_10057C.1.pep
MKLRLMRGTNPIRSAYIAADNRECYNCGQVGHVSYNCPTSRNIGGRGSIRGGHGGTRGGFRGDRGVFGGNRGGRGGDRGGRVGGRGRGRGVPQANAVKEDGKAVTLIGEQVTQWEEWQKNKTNESSNTTTHFGNFANYAQVGEGTQAQALASTYRHPIDWIIDSGASKHVTGLHNTFTSYTPYIHSETIQIADGTSKPIHGIGSVECTSSMNLSSVLHVPSFPVNLLSISSAIDQLKCIVVFDENSCLFQEKGTGRRIGTGVTRDGLWYINHEELGLPAVVGDVEKEISLLHYEGIIHQTTCPGTPPQNGVAERKNRHLLEVARSLMFQMNVPKYLWSEAVMTAAYLINRMPSRILGMKSPAELLLGKREFKVPPKVFGCVCFVRDHRPSVGKLDPHAVKCVFVGYASSQKGYKCWDPIGRRLFVSMDVTFREFEPYYKSKGDLDQFLEEFSTVMEVDSREGERERGDIHEKNVGDKNGEAVVIGSIPCSIDDASKVVEVIEDTQDEDREMVPHEEDGEEGEVVVGTIPCPMEGAERVKQKDVLVYQRRRFDSQGEKRKGLVQSQIEELPHPKCPVPESSQSLSPPASLASLETIGNTSPTLEHVELPLVQRRETRSNAGRPPIRLGFEHLSFMHDIANYITYSHVSPAYKTFIASLQTMPIPKDWKCAKQDPKWKDAMKEELNALVKNKTWELVKLPPEKRAVGCKWVFTVKQTPEGKVDRYKARLVAKGYSQTYGIDYDETFAPVAKMGTVRALVSCAVNFGWPLHQLDVKNAFLHGDLHEEVYMEIPPGFGNSQTVGKVCKLKKSLYGLKQSPRAWFDRFRHAVCDMGYSQCNGDHTVFYKHRGTHITILAVYVDDIVITGDDVEEIRCLKERLGKAFE

SEQ ID NO: 103119 - protein, 95 aa, Oryza sativa
  Clone ID: PAT_MRT4530_100580C.1.pep
KTTKGKGNIFGNQYKPFVLKKAGVGPRTKPEEQNFKKTKMGSLGKTFYLNRAILRGPRGKQAKTFLRLWGRGEKATTFFLYIKNFGAGEQHRTPT

SEQ ID NO: 103120 - protein, 119 aa, Oryza sativa
  Clone ID: PAT_MRT4530_100581C.1.pep
AVSPARSSKNAVVATVLDCFAGQPRCAVHAMVLFPDGIGPLPSLLIRPNPSMEDEAPIQSVAAPLAIAPIPDAVPTGHVLPIAASMPEAATAGRRISSTGCSVSTGRQDQHHQYATKLL

SEQ ID NO: 103121 - protein, 554 aa, Oryza sativa
  Clone ID: PAT_MRT4530_100582C.1.pep
MVLVLAASGDAAPGGGDEATGGGPAQLRSGAATREALELDCGLVGTLRLGWRCGGGTRQLAEDSRLGHGCGDGEDVARGNCIRDWSNSRRHGDGLDRRFVFHGWVWAYQERPEGTYQRIHRRIVETLLHLRPVAQIRYSRGNCHQIHEGEVRYHQTSTLLATPDGLLTKPFRCRALLRSRLAAGITVGHWPRLSARPARRWLRLFACPARRSPRFSSAPLDPPLPAPAKPLPHAPAIAGENLKASLLKSAYLMEFAYFVVIDLEATCERGRRIYPQEIIEFASVVVDGATGEQLAEAFRAYVRPLHHRELTDYCRELTGIAQADVDAGVDLREALRAHDAWLDARGVKNAAGGGGGGGGFAVVTWGDWDCRTMLEGECRFKGIIGDGKPEYFDRWINLKVPFRQVFDRGGARRIGLEEALAVAGLAFEGRPHSGLDDARNTARLLALLMRRRGGVRLAITGSLPPPPRPPSQLVAIGASAAATPAAAAPGVGGGGARVHYCQCGVASRVGVARRPGPTQGRRFFGCGRWTPARGAVCSYFVWEDVDMSRANPRP

SEQ ID NO: 103122 - protein, 443 aa, Oryza sativa
  unsure (1)..(443): unsure at all Xaa locations
  Clone ID: PAT_MRT4530_100583C.1.pep
PPRPEETLNLSTTIPSLPSPXSMADQPPRRWAAANDDVLLEIVRRIPCGIDRRNMGRACHSWRVALAKLEPPAPSPPLPWLLLPRADGPPTFSCVLSGCRSHRFFIPPGAVQRARYFGSYDGGWLFLAIGGQGQAQRHLLLRHNPFRLLVLPNVTHFPDMVYPPVLGVVKRDHQISIVAATLSCKPTEEGCIVAGIIDFAHSPGRAVRQIALWRMGDQVVLPPYWEQVPNQPMIEAVPVDLIHHDGAFHFLIRLEHIIVCEEPPEFQEEAVHLVPVYMYFQPRGGDNGDETVLARYLVESRKKLLMVVRYSSGRQHLPTSAFRVFQMKKFNNGEEDEPLNNGGFQYYWSELDKLEGRMLFVGRGCSRSYEAGDSYPAGMEGVYFLDDRSFAEAAMAFGEGANKLPYRCSDNGKWSGAPADSRVDRCFPSRGPSIYSPPVWLLP

SEQ ID NO: 103123 - protein, 137 aa, Oryza sativa
  Clone ID: PAT_MRT4530_100584C.1.pep
MAELQCQGYWSFALSTLHDGTTAAVDALVEAFLEEKEQGNGVVEGGGGHVQLVRTLVVRAKTRAGRSVYEVAVRMGGCKVDKYMYMVMVMGMERLGFEADFREWKAKILPLAREMLDEMREREEQHNNGLTMNLIII

SEQ ID NO: 103124 - protein, 97 aa, Oryza sativa
  Clone ID: PAT_MRT4530_100585C.1.pep
MAAGRLPAAAARHGRCPPTACLAPAACPPPDGSRGEEEGEKGRRGGEAGSDLREGVGEELYLRGSWRGAILSLNIFSLGLSRSEMGEKYLLPGINRD

SEQ ID NO: 103125 - protein, 49 aa, Oryza sativa
  Clone ID: PAT_MRT4530_100586C.1.pep
KHFQTKPPNWANKPHWQYRFHTVYTTIHKHSHININIKHKLNIIELRNE

SEQ ID NO: 103126 - protein, 448 aa, Oryza sativa
  Clone ID: PAT_MRT4530_100587C.1.pep
MAAAAREEQPLLLRREEGEEEGEEVGWRRRWGSEAGKLAYLALPMVAIGMASALETLCGQAYGAKQYHTLGVHTYRAILTLLVVCIPLSLLWVFMGKILVLIGQDPLISHGAGRYIVWLIPGLFANALIQPITKFLQSQSLIMPMLVASVATLVFHIPLCWLMVFKTGLGYTGAALSISISYWLNVAMLVAYILLSSSCKETRTPPTIEAFKGLDGFLRLALPSALMICLEWWSFELLILMSGLLPNPELQTSVLSICLTSITLLFTIPYGLGAGGSTRVANELGAGNPEGARSAVYVVLSVAVTEALIVCGTLLASRRLLGRAYSSEEEVISFVAMMVPLVCITVVTDGLQGVMSGIARGCGWQHLGAYVNLGSFYLLGIPMAILLGFVLHMGAKGLWMGIVCGSISQITLLSAITFFTNWQKMAENARERVFSEKPTEPSRYHLVE

SEQ ID NO: 103127 - protein, 72 aa, Oryza sativa
  Clone ID: PAT_MRT4530_100588C.1.pep
KPNKAQQLGPTGEYPRGELIHTATGNREKTFNLTNKRPQARGPTKNKLAKSKKVTSQNIGGKNPKNQGLKTF

SEQ ID NO: 103128 - protein, 88 aa, Oryza sativa
  Clone ID: PAT_MRT4530_100589C.1.pep
SVIDAKDRAFMFAVLQSTMFAMASFLLRRRARPFHFFFLPMLAVRRLPRRGSTTRPADSNPEEEYSMGFDIPARLGGTHSPLGIYTPP

SEQ ID NO: 103129 - protein, 231 aa, Oryza sativa
  unsure (1)..(231): unsure at all Xaa locations
  Clone ID: PAT_MRT4530_10058C.1.pep
MDQEKADGGGRRRRSRATSSSGSGASSTAAAAAAERKEMERRRRQDMKGLCVKLASLIPKEHCSMSKMQAASRTQLGSLDEAAAYIKKLKERVDELHHKRSMMSITSSRCRSGGGGGPAAAAGQSPXGGGGGEEEEEDMTRTTAAAPVVEVRQHVQEGSLISLDVVLICSAARPVKFHDVITVLEEEGADIISANFSLAAHNFYYTIYSRAFSSRIGIEASRISERLRALV

SEQ ID NO: 103130 - protein, 93 aa, Oryza sativa
  Clone ID: PAT_MRT4530_100590C.1.pep
SLPRPVCETLEVVLREKLFLMSSISPRVSIHGVARVLETVLTMTHESDPRYVAGHDDLYAVIPVSPTVGYGCPAPRLLAVHNISMTRSVARRK

SEQ ID NO: 103131 - protein, 149 aa, Oryza sativa
  Clone ID: PAT_MRT4530_100591C.1.pep
WHCPLHQHVRRRAVRSWNAHNHKHPMTAAVAPSAFVSTSDRSLLAVQAVVAEFDRFLDAYDFNAVGWSRDHPMAAAAGRFLDKRNPNTDKNNPSGLAGVARRFVMFNGAVCEAQLRWLDGVLRGRCCGGKLRWCAGTCRYTSARHHCQG

SEQ ID NO: 103132 - protein, 37 aa, Oryza sativa
  Clone ID: PAT_MRT4530_100592C.1.pep
ELINCRTNFWGYHLNNMLLISTRLLFISSFFRFACSI

SEQ ID NO: 103133 - protein, 235 aa, Oryza sativa
  unsure (1)..(235): unsure at all Xaa locations
  Clone ID: PAT_MRT4530_100593C.1.pep
MFWKDSGGRSSGGGGGLEQNGVGPFGQVRVLVVGDSGVGKSSLVHLILKGSAIARPAQTVGCAVGVKHITYGSAGGSSNNIISDVQRNFFVELWDVSGHERYRTCRSIFYTQINGVIFVYDLSQRKTKTNLNKWAVEVAETGTFSAPLGSGGPGGLPVPYLVISNKVDLVPRDGSRXVSSGXLVDXARQWVEKQGLLPSSEELPLTDSFPGNSGLLSAAXEARYXQEAGIKFFRM

SEQ ID NO: 103134 - protein, 46 aa, Oryza sativa
  Clone ID: PAT_MRT4530_100594C.1.pep
GGDGFLWLAAEFFPGATCCDVSIHVASSACLLYWISPILMEAAIEQ

SEQ ID NO: 103135 - protein, 207 aa, Oryza sativa
  unsure (1)..(207): unsure at all Xaa locations
  Clone ID: PAT_MRT4530_100595C.1.pep
PWACFPVAGRWAFFPHVRYHLEQAQQHAKKFYDRRHQELSFAIGDGVWLRLRHRVPASLATPVKGKLGPRXYGPYQILEVINDVAYRLALPDGARLHDVFHVGLLKPFVGTPPTSPSALPPTQHGVVLPIPAEVLKSRVARGVRQPLVRWDGLPASATSWEDLDSFRSRYPAFXLADELLVKEGRDLMXGLTYRRRGRNAQLAQAHG

SEQ ID NO: 103136 - protein, 379 aa, Oryza sativa
  Clone ID: PAT_MRT4530_100596C.1.pep
MFWKDSGGRSSGGGGGLEQNGVGPFGQVRVLVVGDSVLQLFTKKVCSVLTNLGWNCAIFLSLKTWDTKEELGTKEAVGVGKSSLVHLILKGSAIARPAQTVGCAVGVKHITYGSAGGSSNNIISDVQRNFFVELWDVSGHERYRTCRSIFYTQINGVIFVYDLSQRKTKTNLNKWAVEVAETGTFSAPLGSGGPGGLPVPYLVIANKVDLVPRDGSRVSSGSLVDFARQWVEKQGLLPSSEELPLTDSFPGNSGLLSAAKEARYDKEAVIKFFRMLIRRRFFSNEPAAPSPWSLTPREDSILPVETLKDEVDSFQRKSGEDFMYKGVNPLPAQRNLASPPDLSPQQPVFSLDNYRYHRYSSPSLPDVSSSRTSREDIDV

SEQ ID NO: 103137 - protein, 241 aa, Oryza sativa
  Clone ID: PAT_MRT4530_100597C.1.pep
TNGSASSTARKEGKRLTHHYLKFALLLVTISTVPLIDILFLRGDALKLPLGLKFAAFFAFTAFVTAISLMFHTLKLMTIKPEHVISAINQLKLSIVLLATSISSLILSFISITCSLLPKAYYFLPISLVPSILVGVFHFIYNGKFDVRDVRPEESKALKKALKSANQLTLSLVTTSFSGFIGDLLGIYHKTEKLGGSVFIRQGVDLLHAWFRSGRNLGRCSFAGCLSNSEVHRRRPSRRRG

SEQ ID NO: 103138 - protein, 70 aa, Oryza sativa
  Clone ID: PAT_MRT4530_100598C.1.pep
PSTGRGKMLTVGVNPDIDGVRRYCSPWSAHAGHPRCVACRVVALLRDPRVVPLVPKKTPRRRVLPTTTKS

SEQ ID NO: 103139 - protein, 89 aa, Oryza sativa
  Clone ID: PAT_MRT4530_100599C.1.pep
AFVKTYRSRRLQCLPSNWFYSSQRAHHPYQNCDHSSFLLSTAAFHVNPWRTHLMWVGSIDLESGGSATVGSTVAARKAPLWVLSSLPAT

SEQ ID NO: 103140 - protein, 1082 aa, Oryza sativa
  Clone ID: PAT_MRT4530_10059C.1.pep
MSSGVGKEVVDASSVVTKGDMKDLLENLLKMGMIGPKSVAGGFELKLELMPNELRLEWSKNYLSWCRRAQLMLRAKGVDHFLQESCEEPSDKESQAWRMWNTTNSTVVSWLMTSVAPSISRMIETIQNAAIVWKTLSNMYSGEGNVMMMVEAQNKMQRQRVIHFLKGLNKEFEDRRAAMFYQATLPTMEEAISAMVQEEMRLKLMRGTNPTRSAYTVADNRECYNCGQVGHVSYNCPTPRNIGGRGLIRGGYGGFGGTRGGFGGDRGDFGGNHSGRGGRGGDRGGGGRGEQVTQWEEWQKNKINESSNTTTHFGNFANYAQVGEGIQAQALASTYRHPIDWIIDSGASKHFTGLHNTFTSYTPYVHSETIQIADGTSKPIHGIGSVECTSSINLSSDLHVPSFPVNLLSVSSAIDQLKCIVVFDENSHLFQEKGTGRRIGTRVRCDGLWYINHEELGLAAVVGNVEKEISLLHCQLGHPSFEILSKLYLDLFSKVDKHRLVCDACELGKHTRSTYVGIGLRNCEPFILIHSDVWGPCPVTSVSGFKWFVTFIDCHTRMTWIYMLKHNSEVLRCFQDFHKLVTTQFDAKVKIIRTDNGTEYINNEFVSYISDEGIIHQTSTPPQNGVAERKNRHLLEVARSLMFQMNVPKYLWSEAVMTAAYLINRMPSRILGMKSPVELLLGKREFKVPPKVFGCVCFVRDHRPSIGKLDPHAVKCVFVGYASSQKGYKCWDPIGRRLFVSMDVTFREFEPYYKSKGDLDQFLEEFSTVMEVDSREGEIERGDTHRKNVSDKNGETVVVGSIPCSIDNASKEAVEVIGDTQDKDREMVLHEEDGEDGEDEEVVVGTIPCPMERAEKTVPIPKDWKCAKQDPRWKDAMREELNALMKNKTWELVKLPPGKKAVGCKWVFTVKQTPEGKVDRYKARLVAKGYSQTYGIDYDETFAPVAKMGTVRTLVSCAVNFGWPLHQLDVKNAFLHGDLYEEVYMEIPPGFGNSQTVGKICKLKKSLYGLKQFPRAWFERFRCAVCDMGYSQCNGDHTVFYKHRGTYITILAVYVDDIVITGDDVEEIRCLKEWTPKCRRIL

SEQ ID NO: 103141 - protein, 424 aa, Oryza sativa
  unsure (1)..(424): unsure at all Xaa locations
  Clone ID: PAT_MRT4530_1005C.1.pep
NIGTVRLDTISQKSPTHLEAGKKLDMTYSVKWVQTNVAFARRFEVYLDYPFFEHQIHWFSIFNSFMMVIFLTGLVSMILMRTLRNDYAKYAREDDDLESLERDVSEESGWKLVHGDVFRPPRSLVFLSAFVGIGTQLAALILLVIVLAIVGMLYVGRGAIITTFIVCYALTSFISGYVSGGLYSRNGGKNWIKSMILTASLFPFLCFSIGLVLNTIAIFYRSLAAIPFGTMVVIFVLWAFISFPLVLLGTVVGRNWSGAPNNPCRVKTIPRPIPEKKWYLTPSVISLMGGLLPFGSIFIEMYFVFTSFWNYKVYYVYGFMLLVFVILIIVTICVTIVGTYFLLNAENYHWQWTSFFSAASTALYVYLYSIYYYHVKTKMSGFFQTSFYFGYTLMFCLGLGILCGTVETXSTLFVRRIYRNIKCD

SEQ ID NO: 103142 - protein, 108 aa, Oryza sativa
  Clone ID: PAT_MRT4530_100600C.1.pep
LTCGWDIHNSRCDNVRCVVSPLDTCVQCPSIIPTKVELHDAVSGCMAIHFYFNGVDQARTDLRHGGRLGMFPSHSLLQPISGELVGHTDRRYWSYIRHQELGTDNNGD

SEQ ID NO: 103143 - protein, 77 aa, Oryza sativa
  Clone ID: PAT_MRT4530_100601C.1.pep
MPELKVNRSSNRVQVGPHKLPARADVVNSYVHLYIDREASIIASEMIELASSWLALPNAHIAGINAPPSAEIMIQID

SEQ ID NO: 103144 - protein, 62 aa, Oryza sativa
  unsure (1)..(62): unsure at all Xaa locations
  Clone ID: PAT_MRT4530_100602C.1.pep
RSCMRLLHQYSRRLWGCGSISLSQIRSLGFLAKHIHLNGPSTCIKILGSRCSTNXYISSPHY

SEQ ID NO: 103145 - protein, 93 aa, Oryza sativa
  Clone ID: PAT_MRT4530_100603C.1.pep
ARVLFPHHHHMSGFAVGCLFPPRGVAWPHLAFSAVCWGNDCRLSVLCLAFRSLVYWCLVLWFLLFFSFLFFFGFLVFLVFFICEKIKNGIGGG

SEQ ID NO: 103146 - protein, 218 aa, Oryza sativa
  Clone ID: PAT_MRT4530_100604C.1.pep
WMIMFSPTYYFTFTVDLTATDWFLRLHGYATSSLLIGIIIFTTTNIFATSGLNIFAEATDEALSRDMCHMMTKQSNLAFWPVKRHDGNGTLPLPVSINWRNKTCEGQPCLGANYDNPVLLSEQELVDCHPRSKGCAGGLALNAFQYVMKNGLALSTFYPYMGVDDGTCHASTTPRVNMIMRRFQELPRHDNAETINNTLLAYRPIGYQSIDSAFILYC

SEQ ID NO: 103147 - protein, 95 aa, Oryza sativa
  Clone ID: PAT_MRT4530_100605C.1.pep
MATGQDATGGDPTVTGSQIHHSREGTQMRVVAVGSMLSLPAAVRRERRSLELPVAVEEESGVRGEAAESSLSAASVTGACARGLAEAEVQFTQLA

SEQ ID NO: 103148 - protein, 121 aa, Oryza sativa
  unsure (1)..(121): unsure at all Xaa locations
  Clone ID: PAT_MRT4530_100606C.1.pep
VGGXLGNTIWYXKVAIMWQVILWYKFQEPSSILHSSVLFKDNKTQPWFLPAILLLAFQRRHKPAAHKHRQAVPPCSYARMHACTSNQQFVASSLTHLLAVLHDRSQSXDDAGIILLAPCNT

SEQ ID NO: 103149 - protein, 436 aa, Oryza sativa
  Clone ID: PAT_MRT4530_100607C.1.pep
MEHVFAVDEIPDPLWAPPPPVQPAAAAGVDDVGAVSGGGLLERCPSGWNLERFLEELDGVPAPAASPDGAAIYPSPMPAAAAEAAARWSRGYGDREAVGVMPMPAAALPAAPASAAMDPVEYNAMLKRKLDEDLATVAMWRASGAIHSESPLGNKTSLSIVGSILSSQKCIEGNGILVQTKLSPGPNGGSGPYVNQNTDAHAKQATSGSSREPSPSEDDDMEGDAEAMGNMILDEEDKVKKRKESNRESARRSRSRKAARLKDLEEQVSLLRVENSSLLRRLADANQKYSAAAIDNRVLMADIEALRAKVRMAEESVKMVTGARQLHQAIPDMQSPLNVNSDASVPIQNNNPMNYFSNANNAGVNSFMHQVSPAFQIVDSVEKIDPTDPVQLQQQQMASLQHLQNRACGGGASSNEYTAWGSSLMDANELVNMELQ

SEQ ID NO: 103150 - protein, 170 aa, Oryza sativa
  Clone ID: PAT_MRT4530_100608C.1.pep
MALASASLGHGEEWSNDRAVIAPAADVTVAGGRVWSDAACGVLAKLLELTHEKEVEVEAAGLSFRSGSDRRRPRARHGVGSHGATRLSRQGFVPDSGISPPHCPTQATQGFGSFNPLTVISTMAIVVDDAHSCYMETKVCAAMVRVGVGGELSGGAGAVGLAMGGGQVRQ

SEQ ID NO: 103151 - protein, 112 aa, Oryza sativa
  unsure (1)..(112): unsure at all Xaa locations
  Clone ID: PAT_MRT4530_100609C.1.pep
MSEGSMALFSSSIGRAAPRPSLALSXQGRMSIRMTVTMPRLTVTTRRPWLGTNRVLYLVPISWKTASYLTXKTPREYGRDTLGFSFEQETIDKNRQLQARHSRWTTLAALGW

SEQ ID NO: 103152 - protein, 1421 aa, Oryza sativa
  unsure (1)..(1421): unsure at all Xaa locations
  Clone ID: PAT_MRT4530_10060C.1.pep
KLELMPNELRLEGSKNYLSWCRRAQLMLRAKGVDHFLLESCEEPSDKESQAWRTWNTTNSTVVSWLMNXVAPSIGRMIEAIQNAAVVWKTLSNMYSGEGNVMMMVEAQNKVENLKQERRTVKEYASELQQLWANLDHYDPLQLKHEDDIVIGNKWLQRRRVIHFLKGLNKEFEDRRAAMFHQATLPTMEEAISAMVQEEMRLRLMRGTNSIRSAYIAADNRECYNCGQVGHVSYNCPTSRNIGGRGSIRGGHGGTRGGFGGDRGGFGGNRGGRGGDRGGRVTNESSNTTTHFGNFANYAQVGEGTQAQALASTXRHPIDWIIDSGASKHVTGLHNTFTSYTPYIHSETIQIADGTSKPIHGIGSVECTSSMNLSSVLHVPSFPVNILSVSSAIDQLKCIVVFDENSCLFQEKGTGRRIGTGVRRDGLWYINHEELGLAAVVGDVEKEISLLHCQLGHPSFEILSKLYPDLFSRVDKHRLVCDACELGKHTRSTYVGIGLRNCEPFILIHSDVWEPCPVTSVSGFKWFVTFIDCHTRMTWIYMLKHKSEVLRCFQDFHKLVTTQFDAKVKIIRTDNGTEYINNEFVSYVSDEGIIHQTTCPGTPPQNGVAERKNRHLLEVARSLMFQMNVPKYLWSEAVMTAAYLINRMPSRILGMKSPAELLLGKREFKVPPKVFGCVCFVRDHRPSVGKLDPHAVKCVFVGYASSQKGYKCWDPIERRLFVSMDVTFREFEPYYKSKGDLDQFLEEFSTVMEVDSREGERXERGDIHEKNVGDKNGEAVVIGSIPCSIDDASKEDREMVPHEEDGEEGEVVVGTIPCPMEGAERVKQKDVLVYQRRRFDSQGEKRKGXTLEHVELPLAQRRETRSNASRPPIRLGFEHLSSMHDIANYITYSHVSPAYKTFIASLQTVPIPKDWKCAKQDPKWKDAMKEELNALVKNKTWELVKLPPEKRTVGCKWVFTVKQTPEGKVDRYKARLVAKGYSQTYGIDYDEIFAPVAKMGTVRGLVSCAVNFGWPLHQLDVKNAFLHGDLHEEVYMEIPPGFGNSQTVGKVCKLKKSLYGLKQSPRAWFDRFRHAVCDMGYSQCNGDHTIFYKHRGTHITILAVYVDDIVITGDDVEEIRCLKERLGKAFEVKDLGPLRYFLGIEIARSSKGIVLSQRKYVLDLLTDIGMLGCRASTTPIDRNHQLCAQSGDPVDKEAYQRLVGRLIYLCHTRPDISYAVSVVSRYMHDPRTGHLDVVHKILRYLKGTPGKGLWFRKNGHLNVEGYCDADWASSMDDRRSTSGYCVFVGGNLVSWRSKKQAVVARSTAEAEYRAMALSLSEMLWMRSLLTELRVLRSDTVMLHCDNKSAISIANNPVQHDRTKHVEIDRFFIKEKIDSGVIRLEYIKSCEQLADCLTKGLGPSEIQSICNKMGMIDIFCPS

SEQ ID NO: 103153 - protein, 469 aa, Oryza sativa
  Clone ID: PAT_MRT4530_100610C.1.pep
MEHVFAVDEIPDPLWAPPPPVQPAAAAGVDDVGAVSGGGLLERCPSGWNLERFLEELDGVPAPAASPDGAAIYPSPMPAAAAEAAARWSRGYGDREAVGVMPMPAAALPAAPASAAMDPVEYNAMLKRKLDEDLATVAMWRELLGHIPLEDEIILVEKKKLLYWNLASGAIHSESPLGNKTSLSIVGSILSSQKCIEGNGILVQTKLSPGPNGGSGPYVNQNTDAHAKQATSGSSREPSPSEDDDMEGDAEAMGNMILDEEDKVKKRKESNRESARRSRSRKAARLKDLEEQVSLLRVENSSLLRRLADANQKYSAAAIDNRVLMADIEALRAKVRMAEESVKMVTGARQLHQAIPDMQSPLNVNSDASVPIQNNNPMNYFSNANNAGVNSFMHQVSPAFQIVDSVEKIDPTDPVQLQQQQMASLQHLQNRACGGGASSNEYTAWGSSLMDANELVNMELPRVRHILTT

SEQ ID NO: 103154 - protein, 64 aa, Oryza sativa
  Clone ID: PAT_MRT4530_100611C.1.pep
APTSLLFSRVESRIKIKQLKTEREKKNKKRKASSPSIAIATLHKTPCGALHVAASHALLLSKKQ

SEQ ID NO: 103155 - protein, 116 aa, Oryza sativa
  Clone ID: PAT_MRT4530_100612C.1.pep
DPPGCRPARTRPAAPHPRVTDSPSTISLLSRAAPPSSSREVLADPPPPSCRSKSRHRQTPVPRSPSLIPHLLCPVLADPPPPSRRHVADSLSSSGAPPGSVDADPQFVVAASFSPD

SEQ ID NO: 103156 - protein, 201 aa, Oryza sativa
  Clone ID: PAT_MRT4530_100613C.1.pep
MISSKCANSWMMGEEKMYPLLNEVDLGAFTNCSSALDTLKPSRTVLRLFIDSEMLLMMMTIDLHKLFFGPLTDDETLMLMKALHKLFFGPSLIDDDDEKLRCGDDEVTMKASSDGELMMMRTSSDREMIHRWVSSFLLLCSRRTLPKPHAAGRQADNHNGHAAQQWRRAAMTSVQGRPAKTGAVADDGGGLPPAARTRSAT

SEQ ID NO: 103157 - protein, 387 aa, Oryza sativa
  Clone ID: PAT_MRT4530_100614C.1.pep
MQEALLPPAHPGRFYSDFGPKPFGSGDQRLSSPNLLTNGGDLFYGCYSPFSPTRVLSPPPPRRAASFSHCSSSSDSVVDDGDGAGAAAATEHRLHLAHLALQYQEMANRFELCLSHLADAADEAAALRQENAELRVANNDLACRIAKFGGRQSSAIALAGDLRRLRLPKEQTVPALPPPPQSPPAALMNPVAVPEKQAVLPKSISIRSTGYQKLNQGGKHRVSKPVNVGSVRPNPPIPPLCCVWLPLLQRTDSCAESKIPILTSTMFLMRQCKQQRVFVGIDGAEGGEHKVGVKKEEPPMGGLEFEVYNQGMFKTELCNKWEETGACPYGDQCQFAHGVAELRPVIRHPRYKTQVCRMVLAGGVCPYGHRCHFRHSITPADRFSFGH

SEQ ID NO: 103158 - protein, 89 aa, Oryza sativa
  unsure (1)..(89): unsure at all Xaa locations
  Clone ID: PAT_MRT4530_100615C.1.pep
VDPRACRNRHEDCSEREPAKRDSVLTAFAAAAAISIPSLSXRRRRRHPWRQGSTPTSARRPEVRRPLRPQASPLPSLSFLLAMVVVHLS

SEQ ID NO: 103159 - protein, 47 aa, Oryza sativa
  Clone ID: PAT_MRT4530_100616C.1.pep
FTLGVYRCPMLCIIPLPVSPRQPKYQYVRTPYMKHWHNNLPSGSTRP

SEQ ID NO: 103160 - protein, 49 aa, Oryza sativa
  Clone ID: PAT_MRT4530_100617C.1.pep
QFQQFGDLYFDENLAQAQALLAFKVPSRNGIYPRDYGAPRTITTLGGVL

SEQ ID NO: 103161 - protein, 48 aa, Oryza sativa
  Clone ID: PAT_MRT4530_100618C.1.pep
MRRPARRRPSRRAGTRRRRRRRRCRRTGRRCTAACSAAAPCSGSPAPT

SEQ ID NO: 103162 - protein, 134 aa, Oryza sativa
  Clone ID: PAT_MRT4530_100619C.1.pep
WHASATPRRPSSPLGHFAATASRSPRRRYATRPPPPRARHAAATPRRGGRAPPPRPHAAGLPTPLPRPHAAGGPGCHCSVTAWLPASVARPDRAFGSGLPAPIPGSRRCSPSGPPAAMPPPPFLGSPPPAAFSV

SEQ ID NO: 103163 - protein, 229 aa, Oryza sativa
  Clone ID: PAT_MRT4530_10061C.1.pep
MSRGTASMDAISLDEWELLPDNKSSYFMEEFTSDHGTVVDDETKNIFLPIHLSEEVYVGDPVIKFKDIDVVKIESYREEFVPKVTEIFDAEEEAEMIKSPVSAEEVDVDDDDEVMAMVAPDQCVEEEEGAQKDKEHNGFSVGKLRVNGVGALCSFGVAAATLCIFLLGGRQQQLHKTQNQKTPFQMYADNERIQQVVQQASRLNQAVSTVMGGASTRASISFGGYYDGF

SEQ ID NO: 103164 - protein, 170 aa, Oryza sativa
  Clone ID: PAT_MRT4530_100620C.1.pep
MAAGDPGITGSCPNRKESQPLNSRSASLFMQNYFPTIPVENEACKENSVGLPQMVQTCYTAAGNRIPNFIAVNYYMRSDGGGVFDVQDRINGVTLCGCNTIAACQAGAPAGACKDTGAPNRTSSSVNGNVYSGTIEFKSPASAASISNANIPSKFVGLLLLGLVLIIKPF

SEQ ID NO: 103165 - protein, 360 aa, Oryza sativa
  Clone ID: PAT_MRT4530_100621C.1.pep
MAGLPFLLALHIALLLLLPCSCQVGDSCSSARDCGAGLYCGNCAATGKTRPSCIRDLAIQPTSIVKGLPFNRYSWLVTHNSFSIIGEPSHTGVERVTFYNQEDTVTNQLRNGVRGLMLDMYDFNDDIWLCHSLQGQCYNFTAFQPAIDTLKEVEAFLSENPTEIITIFIEDYVHSTMGLSKLFTAADLTKYWYPISEMPTNGKDWPSVTDMVAKNHRLLVFTSDSSKEASEGIAYQWSYLLENESGDPGITGSCPNRKESQPLNSRSASLFMQNYFPTIPVENEACKENSVGLPQMVQTCYTAAGNRIPNFIAVNYYMRSDGGGVFDVQDRINGVTLCGCNTIAACPRARRAQQRSLHSW

SEQ ID NO: 103166 - protein, 55 aa, Oryza sativa
  Clone ID: PAT_MRT4530_100622C.1.pep
MCERVTGGVELRGPVSGVGWGGGGRGGGNGYELGAPDKRTRVIDWFVRMAAADAA

SEQ ID NO: 103167 - protein, 68 aa, Oryza sativa
  Clone ID: PAT_MRT4530_100623C.1.pep
YTFTSKGAFFQRRLGRDWRYCHSFSARTLPKLLNGVFFAKNFYMKVVLKNHISPFLKFKIVNTQLIMH

SEQ ID NO: 103168 - protein, 64 aa, Oryza sativa
  Clone ID: PAT_MRT4530_100624C.1.pep
KKKIQSSIVYNILLFISCCKNWATLQCYRNQLLYYGQNFFAPFGRFFPGLKLSRVLHTIMSEHG

SEQ ID NO: 103169 - protein, 98 aa, Oryza sativa
  Clone ID: PAT_MRT4530_100625C.1.pep
IYICLIFYIFYLYGVYWGTQRQPRSGRFYNFRGVTFKNTDVFESRSMLKVKKKIIPFSMLCYLKGRGNQIWGPKTNCGYIPNICNNTIPISIYVQRKI

SEQ ID NO: 103170 - protein, 110 aa, Oryza sativa
  Clone ID: PAT_MRT4530_100626C.1.pep
LEKPTELLHGGGVLSSWMAVIKAFCRDYARKKGRTTVREDDPIHDPAPQGRASAPDSAKTELLPRIRSSMDTTTPEVINRDGRSYMYHRTNTGRPILPGTKGAGTMSMIR

SEQ ID NO: 103171 - protein, 93 aa, Oryza sativa
  Clone ID: PAT_MRT4530_100627C.1.pep
CHRGSHRMDLAVFSDSLPWVLNPFSLVFRVHGTIFKLLNGEGFQPLQKKYGEDSSEPWHPSLQFSLFTACTNIFIFFEFNFQLNTLSQNIRCL

SEQ ID NO: 103172 - protein, 495 aa, Oryza sativa
  Clone ID: PAT_MRT4530_100628C.1.pep
MPTASPAHAVFFPYPVQGHVASALHLAKLLHARGGVRVTFVHSERNRRRVIRSHGEGALAAGAPGFCFAAVPDGLPSDDDDDGPSDPRDLLFSIGACVPHLKKILDEAAASGAPATCVVSDVDHVLLAAREMGLPAVAFWTTSACGLMAFLQCKELIDRGIIPLKADAEKLSNGYLDSTVVDWVPGMPADMRLRDFFSFVRTTDTDDPVLAFVVSTMECLRTATSAVILNTFDALEGEVVAAMSRILPPIYTVGPLPQLTAASHVVASGADPPDTPALSAASLCPEDGGCLEWLGRKRPCSVLYVNFGSIVYLTSTQLVELAWGLADSGHDFLWVIRDDQAKVTGGDGPTGVLPAEFVEKTKGKGYLTSWCPQEAVLRHDAIGAFLTHCGWNSVLEGISNGVPMLCYPMAADQQTNCRYACTEWRVGVEVGDDIEREEVARMVREVMEEEIKGKEVRQRATEWKERAAMAVVPSGTSWVNLDRMVNEVFSPGNNM

SEQ ID NO: 103173 - protein, 94 aa, Oryza sativa
  unsure (1)..(94): unsure at all Xaa locations
  Clone ID: PAT_MRT4530_100629C.1.pep
GFVPRNREFLAGNMVDTEVLVAPVSSSQLLFKPARPPPLRDAPPFCWPSXQTWPWSLSVVEEKCSSMKVVQSVXSQGSYASPVLHVPCDCVDLS

SEQ ID NO: 103174 - protein, 99 aa, Oryza sativa
  unsure (1)..(99): unsure at all Xaa locations
  Clone ID: PAT_MRT4530_10062C.1.pep
APSATATCSEPLHIILGTGPLQEMLLLSCMTSPPTSDCLRWSLTLFRWSYVFFLTEWSYVRDLSNQTFLLLIHCDDGTNWLLDIQKSPVALCIFSXLSG

SEQ ID NO: 103175 - protein, 119 aa, Oryza sativa
  unsure (1)..(119): unsure at all Xaa locations
  Clone ID: PAT_MRT4530_100630C.1.pep
SNLTMGKGIQKDGHVGIDEEARDINVGPLPVGKTETLAKVVVAAVRRGDYYVTWPGWYWPFHMVMCTAPELVDWFSRTFXVSKSSDHDGDALSKKILEAVGGKKFLYPKTIRSHAIAGR

SEQ ID NO: 103176 - protein, 73 aa, Oryza sativa
  Clone ID: PAT_MRT4530_100631C.1.pep
SCFLPPFFHGKRKDEFLHSLNPSSGLTGLEGAASALTGRCSDQLNYNPHRASDILILQWNHKNKNIRLSYSKK

SEQ ID NO: 103177 - protein, 356 aa, Oryza sativa
  unsure (1)..(356): unsure at all Xaa locations
  Clone ID: PAT_MRT4530_100632C.1.pep
SRIDGVLLKCLPRETGVEIISNIHEGECSGHAMXRTLVGKAFRHGFYXPKALQDTVELVQRCHAYXFHTTQIHQTTQTLQTIPLSXPFAIWGLISWACFPRPXGGYEYLFVTIDKFTKWPEEFLVTKIDKHSMLKFIQGITSHLGIPNRIITDNDTQITSDLFRDYCEGVGIKLCFASPTHPKSNGQVEXTNAEILKVLKIRXYNMLRKHSVEXIDELPTVLWANXTTLSIVARDTSFFLIYGAKEILPSKLTFGSSRVQLYNSGPKQEQMRRDNMDYLEERXAVGHALGLYQQRKVQALVLRHVLTRAGKTKLSPIWKAPFLVTDVPQXELKTGYXDGTPLPNPWNIEHFRKSYP

SEQ ID NO: 103178 - protein, 78 aa, Oryza sativa
  Clone ID: PAT_MRT4530_100633C.1.pep
LYRSVLHQDVIGNAVCCLHDAPQDLDPHHGLLTYATPCRARFGKLEEWWNFLCEIYLLNPSFIAGSMRIGSEVKCVRC

SEQ ID NO: 103179 - protein, 86 aa, Oryza sativa
  Clone ID: PAT_MRT4530_100634C.1.pep
KKITLQRMGNMLVTLKQNFVRLDRKQLARQNITAQRTNNFIRDMNDCKGSAYFLFLPPCPPMTLSHVVLWDIGARSSCKLHRSLVP

SEQ ID NO: 103180 - protein, 141 aa, Oryza sativa
  Clone ID: PAT_MRT4530_100635C.1.pep
SCLFSNASSPCLWICTSIAGQHHDGGWSISNLVVLAACWSALLCCTLRRKKRRGKELRKLDRNNLCKTETTACGERGGSVELVESGSCRVLAGDRLLELEVWSRKGQGPPCRPAAARRPAVGVKKNERMWRRRGAGQEATG

SEQ ID NO: 103181 - protein, 58 aa, Oryza sativa
  Clone ID: PAT_MRT4530_100636C.1.pep
KEIEDQRSMGREKRLRCCGEEEIEVELLKEVVVVRWSLTMMVACWLWQWQRRLVVRGS

SEQ ID NO: 103182 - protein, 114 aa, Oryza sativa
  unsure (1)..(114): unsure at all Xaa locations
  Clone ID: PAT_MRT4530_100637C.1.pep
MSCCGGTAVRRGCHAAGLRGCKXFPDVEXTXTXKTFVLAAPSNKAXSGGRKMXVESGENGGCGCXTCKCXTTCXGCSCCSSHESIVVPRLLRIYRMDAATVDSLYRGPNLLALL

SEQ ID NO: 103183 - protein, 197 aa, Oryza sativa
  unsure (1)..(197): unsure at all Xaa locations
  Clone ID: PAT_MRT4530_100638C.1.pep
TRFVLEIVHLXEAMKERELVFNQCLEPLSLIMHQLSTIFHWTKGKEILLMSGNVLGKFXETVIEAFNDMKSNANVMLASTAECYKGITLVGASHVVLLDVVWNPYVRRXVSNQAYRIGQEKIVYTYILIAEGTXRKTNKXKQARKDHMSKLLFSKEPHQYQSLQDFNLSKKVISNDKILEAMTSQGELKDMFLNLVI

SEQ ID NO: 103184 - protein, 63 aa, Oryza sativa
  Clone ID: PAT_MRT4530_100639C.1.pep
VKGSWGKSLAPFPQGWPYSNALGGLKSYKNPKNKVPAVPANEKQLGGAPSKVERANAFLATVQ

SEQ ID NO: 103185 - protein, 489 aa, Oryza sativa
  Clone ID: PAT_MRT4530_10063C.1.pep
MAAAMILSCRYLLICSATLALLLLRLCSGLSLDTVREFLTREEDTVVFGLIERAKHPRNTPAYDPGYLAGGGHGHDASFAEMFVRESEAVQAKAGRYQSLQEIPFFPFRVPFTLAPPYNFTTELYSAAALVNVNDAIWSMYFNELLPLLAKNGDDGNYAATVSSDLVCLQALSRRINYGRYVAEVKFIGDQQNYTTLIRNKDTDALMKLLTSEAQEDVVKRRVQKKAMDEVEDGVEATAGTREVAARPTATAAERRAGVVGRSRGRGVGATAQEWWRSCDQVSRLAAVACCCYPAAAGCCAGTEDDKKGTGCCLLLLLLVVCYLRLLLLAVCCCCGEKGLLFAAAIACLVDCCCGEKGKERRRLLLLVVGVGKEVVDASSVVTKGDMKDLLENLLKMGMIGPKSVAGGFELKLELMPNELRMIETIQNAAIVWKTLSNMYSGEGNVMMMVEAQNKGLNKEFEDRRAAMFYQATLPTMEEAISAMVQEEM

SEQ ID NO: 103186 - protein, 67 aa, Oryza sativa
  Clone ID: PAT_MRT4530_100640C.1.pep
PANPERGQRVAQFLLTKRGRGVKPPGSGGGNSPRFPLPESRKRRRRTTIKTIPWCETKYFGAKNMEG

SEQ ID NO: 103187 - protein, 128 aa, Oryza sativa
  unsure (1)..(128): unsure at all Xaa locations
  Clone ID: PAT_MRT4530_100641C.1.pep
MAIYRAPSLSSFGRHLSLSPPSPETFSPRAXPLSVAGSRSSRPXLPPRSSPLRATTSLGSARTRESPAAISPKPKTPGRPSSPXIPSSPPRFDLQRGPTAPPVIVNLHPTGLFLRRRDQQMYVHMSRT

SEQ ID NO: 103188 - protein, 661 aa, Oryza sativa
  Clone ID: PAT_MRT4530_100642C.1.pep
MDELGIKDIAATIKHIETQHASSKTKNSGTKKSHGEGSDTSEFLPEDDEQGVQCDDDSYLEPEQPIPIMIEYPRQTRRKKCATKKKPTLKMPPGVRISKRVRAGAPTEMPPGVSTRSAKRQLIAEQVPIRRGTRKSRPPTAGIMLDKMTKAMGRMPIAVAEGKKRPDEPVQAAKFASEAGVIIRTKVPVFPHWKQYKDDEGYINNFMGKLSVRLAINQKNQPTRDACADVLQKGIRQTRYNLKKAYFNGVPANEIRTTSPISSMTDEQWLELVAKWSNPKNMQISEQNKQNRLNVRFHQATGSRSYAAHLHAYKEKNKVVELDVVDAFEDCHTSREKGLSDAAKDAISSMKAIMEEPVPDGETPRTSAEVVSKVLSRDNSNTTFLKNAGLQMSSKKSVTPTEAALQEELAAEKQSSAILHAEVVALKEQANLANEALAKTQKELAEFKQQQEENNLLLRCILSLSQGELHTVLWANRTTPSCATGETPFFMVYGTEAVLPSELSLGSPRVALYNEADQDELCRNDLDYFEERRRPPLSGSPKVTALPLATLVPGRHDSPTLTTAPFGMNLRMRFKCFCAVMREARRTALPVSWAMAIGEDEREVGRVKRGGQGWNAGGRGAHDLADPPVFPPYAPPCVAQLLAVESSSWWALELSIPMTAI

SEQ ID NO: 103189 - protein, 76 aa, Oryza sativa
  Clone ID: PAT_MRT4530_100643C.1.pep
MADQSNNMIIEEVNKGLNPGTIVLLVVATLLILFFVGNYALYMYAQKTLPPRKKKPVSKKKLKREKLKQGVSAPGE

SEQ ID NO: 103190 - protein, 46 aa, Oryza sativa
  Clone ID: PAT_MRT4530_100644C.1.pep
MSSKRRHGIAKASWCSATSKASYCHNLESMASALGLGYRYGIAIVA

SEQ ID NO: 103191 - protein, 563 aa, Oryza sativa
  Clone ID: PAT_MRT4530_100645C.1.pep
MGRRRRPVAREPAQNEYERTRQEKILQNIRRIDELGIKDIAATIKHIETQHASSKTKNSGTKKSHGEGSDTSEFLPEDDEQGVQCDDDSYLEPEQPVPIMIEYPRQTRRKKCATKKKPTLKMPPGVRISKRVRAGAPTEMPPGVSTRSAKRQLIAEQGKGNGHEELPPETENNGDEDVGSGHLLQDNDVNWPPSPVMDWSYGHDANHEEQPAQQTNSDVEGKGTRKSRPPTAGIMLDKMTKAMGRMPIAVAEGKKRPDEPVQAAKFASEAGVIIRTKVHVFPHWKQYKDDEGYINNFMGKLSVKLAINQKHQPTRDACADVLQKGIRQTRYNLKKAYFNGVPANEIRTTSPISSMTDEQWLELVAKWSNPKNMQISEQNKQNRLNVRFHQATGSRSYAAHLHAYKEKNKVVELDAVDAFEDCHTSREKGLSDAAKDAISSMKAIMEEPVPDGETPRTSAEVVSKVLSRDNSNTTFLKNAGLQMSSKKSVTPTEAALQEELAAEKQSSAILHAEVVELKEQANLANEALAKTQKELAEFKQQQEENNLLLRRILSLSQGNLNLS

SEQ ID NO: 103192 - protein, 51 aa, Oryza sativa
  Clone ID: PAT_MRT4530_100646C.1.pep
LIHPRRHRRRHGFPLHHRRARADGSPPPVCTARPRPLWRSRRHCCVFVGEA

SEQ ID NO: 103193 - protein, 92 aa, Oryza sativa
  Clone ID: PAT_MRT4530_100647C.1.pep
VGMMVVEHANDRKCPATAIRSKSRASMPNPEINSDDQDLAETWLGPTGPSFGLGLLLSLPYPFRRFLGLHFGVKMELKSPTLVWMKISFNLV

SEQ ID NO: 103194 - protein, 112 aa, Oryza sativa
  Clone ID: PAT_MRT4530_100648C.1.pep
MARGSTGGCLPMGLATTPRTDVGRGQDLGGGGRRAAWICSAIDFIDMEGGVAFIDIAMDGAEGAVDVDALDDDLGVVDQARRLTRPICFTALVKICEGLKMCFTRIRRVAWI

SEQ ID NO: 103195 - protein, 58 aa, Oryza sativa
  Clone ID: PAT_MRT4530_100649C.1.pep
FVCCVCRSYFLNWIIFLLLTGHAIIVCGEICIIQLAIYNRGQNLYIDCFISSCLDCLN

SEQ ID NO: 103196 - protein, 291 aa, Oryza sativa
  unsure (1)..(291): unsure at all Xaa locations
  Clone ID: PAT_MRT4530_10064C.1.pep
GGFGGTRGGFGXDPGYFGGNHSGRRGRCGDRGGEGRGRGEVXSCHVAIEEGKAITLTGEQVTQWEEWQKNKINESSNTTTHFWYFANYAQVGEGIQAQALAFTYRHPIDWIIDSGASKHFTGLHNTFTSYTPYVHFETIQIADGTSKPIHGIGSVECTSSINLSSDLHVPSFPVNLLSVSSAIDQLKCIVVFDENSHLFQEKGTGRRIGTRVRCDGLWYINHEELGLAAVVGNVEKEISLLHCQLGHPSFEILSKLYLDLFSKVDKHRLVCDACELGKHTRSTYVGIGLRN

SEQ ID NO: 103197 - protein, 432 aa, Oryza sativa
  Clone ID: PAT_MRT4530_100650C.1.pep
MPAEGGGNGGAHRRVRTAGSSGEIGRGRGGRRGPQACEPDGGGSNSGERGPEGWGGERWLGVAWICRRSGEGGKRGGRRDSKLESQPFLGVNAREKWDGGCGMYGRGRGERTTCARRTGEAGGDGCGRGRCRPEAAPTAAGLTTGRKRQESSTASESDGGGATPLEDATAGLMMEWERREGGQLLPSPTKVDPSLLSPLVAELPRPVPPPFLSSTCATPPDLPPHIKLSLTSSFYRERGTRIRRAITVPVCKMPAPRPVLASATRDARIITDDLGMGGSVTSDREAGGSTASDLVASRSIPDDCETGGSIDDGDGGSGSAGLGSGGSVAIGALTAAVTTMLDYGDHDDNHGLGRLGGSIACDRGAGGSTTSDLAASRSVPNDNGTDGSIDYNYNYGDDDGVSGGAGLGCYRFIAIGLRRGIDRCSDDDGGLR

SEQ ID NO: 103198 - protein, 205 aa, Oryza sativa
  unsure (1)..(205): unsure at all Xaa locations
  Clone ID: PAT_MRT4530_100651C.1.pep
MMLPRVLVKGGDKSWXLSSMYWPQRDDEMLMFLEEMTTIREVYPGEWIIVWDFNLITSATYKNNSRIKHQMMNIFRSKIDELELKKMYLFERRPIRHRRFKFETFWTKLDDFMVHGGGSGGMMATLNLSELNAPFTEEEVWASIKNIPNEKSLGPDGYTCLFYQKYWSIIKPKLMAVLLKFGYGNNQNLDLLNTVIITLLPKKEL

SEQ ID NO: 103199 - protein, 102 aa, Oryza sativa
  Clone ID: PAT_MRT4530_100652C.1.pep
LIPHQSKYTNKLHVTINPSIPPWTTQDRIPCLPAPAQKEKRQADRVLTFQTNTGAARTAVGGFCGHGAKKKHEDSRRFCCEVGEKRGKKEKEEKNKSMETTR

SEQ ID NO: 103200 - protein, 250 aa, Oryza sativa
  Clone ID: PAT_MRT4530_100653C.1.pep
MNGSRQMELHYINTGFPYTRAAGFGACLEGLTYAHADFAIADAFHDQANPYWAMMHTNSYKYGYSGAGNYYSYGHVYDMNDYMHRADGGRRIWDNATPVNNTESPNVVLQGGETPHANTSSTTEECIQQQVHQNSSSPQVIWQDNIDPDNMTYEELLDLGEAVGTQSRGLSQERISLLPVTKYKCGFFSRKKTRRERCVICQMEYRRGNLQMTLPCKHVYHASCVTRWLSINKVCPVCFAEVPGDEPKRQ

SEQ ID NO: 103201 - protein, 100 aa, Oryza sativa
  Clone ID: PAT_MRT4530_100654C.1.pep
MERKAKGKGPHRFNCSMVSMAAEAEDDGERRAAEDFSRPRSVARRLELRRGETEEKNGYPEIRITQLDLPSLDFGVRTVGLDPNFLSSPPPCAGRNRRTR

SEQ ID NO: 103202 - protein, 92 aa, Oryza sativa
  unsure (1)..(92): unsure at all Xaa locations
  Clone ID: PAT_MRT4530_100655C.1.pep
MDGGSSTAARSSAAEMEEHQNWKKNAPVLYDLVISQPLEWPSLTVQWLPSHSRSPGSXRSHRLVLGTHTSDETPNHLLLADAALPLPPRLAA

SEQ ID NO: 103203 - protein, 397 aa, Oryza sativa
  Clone ID: PAT_MRT4530_100656C.1.pep
MGVATPAEIMPPADFRWAARPMRRRRRGGSSSSSSSPRDREPRDGRIAANGASAAASLYTMRGNKGVNQDAMLVWENFCSKEDTIFCGVFDGHGPYGHLVSKRVRDLLPIKLSANLGRDGHKETSTNIVTSSMTEGGGTERMDRDTETPLGTEENGDYPEMFAALRTSLLRAFYVMDRDLKFHKTIDSVFSGTTAVTVIKQGHDLLIGNLGDSRAVLGTRDEYDQFFAVQLTVDLKPTIPSEAARIRERSGRIFSLPDEPDVARVWLPKYNMPGLAMARAFGDFCLKDYGLISMPDVSYHRITEKDEFVVLATDGVWDVLSNSEVVSIVSQAKSEASAARFVVESAQRAWRTRFPTSKIDDCAVVCLFLNTDARNKPPGSGIKDLANAIELGGGNLS

SEQ ID NO: 103204 - protein, 673 aa, Oryza sativa
  unsure (1)..(673): unsure at all Xaa locations
  Clone ID: PAT_MRT4530_100657C.1.pep
QSEHHRRLAFVAANWCPRLYGWLXPIMPPLMGIYIFTDRLPRLPPTGVLTFIVGWSHHPXWASTSSSPACLRYRRLVSPPARLAYYAVIDGCLHHHHRLAVVAIDWCLHLYGWLVTPPLLGVYVFTAGLPSPPPIGVSACTVGLLCRHXWVSTSSPPACRRRHRLLSSPIWLVGHTTIVRRLRFHRWPAFTAADWCLRLHGWPIMPPLMGVCIITTDLPSSLPTNVFAYTVGWSHHHCWVSTSSPPASLRRHRSVSLPTQLDGYTTVIGGLRLPHRFAVVVADWCVRLHGWXYMPLLMGVYVITTGLPSSAADWCLRLHGLMVTPPSLGVYVFTNWLPSXPPTSVSAFMVGWSHHHCWASISSPTGCLRLPPTGVSAFIVGWSHYRXGVYVFFTDRPPRLLSIGVSAWTAGLLXAAIDGDLRLHHQLAVTAANWFPRLHGWLITPQSMSVIVFTASSSSPPSMESSLSRLAYYTATQGRLRFHHYSASSIGDCDFIFIVFGTGKXLYCRYFSSFATSPTTTSTRASTSRHVSPDLTPHXITSGFPIFKICTRISSTHIFIQEMATRRQAIVLDSMFRCFPTNQRDRGYTNIRLXKFDKLYVKXKAINQPTSSMEFSSGVISFVFASEQTFYFSNSYYFIGNFGFWTLPQSTSSFSSXSSSRFNLHVREFGVIN

SEQ ID NO: 103205 - protein, 243 aa, Oryza sativa
  Clone ID: PAT_MRT4530_100658C.1.pep
MAAAANLEDVPSMDLMNELLRRMKCSSKPDKRLILVGPPGSGKGTQSPIIKDEYCLCHLATGDMLRAAVAAKTPLGVKAKEAMDKGELVSDDLVVGIIDEAMKKPSCQKGFILDGFPRTVVQAQKLDEMLEKKGTKVDKVLNFAIDDSILEERITGRWIHPSSGRSYHTKFAPPKVPGVDDVTGEPLIQRKDDTAEVLKSRLEAFHKQTEPVIDYYSKKALVANLHAEKPPKEVTAEVQKVLS

SEQ ID NO: 103206 - protein, 1459 aa, Oryza sativa
  Clone ID: PAT_MRT4530_100659C.1.pep
MTLTRARNNERADSLLEPIELTILITNAAQATLPAGSGGIFGNAAPLHHRVALVPCSFTTRSALSKKGVEEGVVIQSAAYAAQRRLHVHSLGGPSVPDHRAKEGDYGGIGKRIFSFPVKEVPTSKEQVIVRECDPEEDKDKRREPSIEKAEEAGRQAEDLGRHPARLRRPNTKSEVGFGCFGGEKSTKVSAPSIWLAKFGEHVRDYGPKLAMDLDAKFDLLFKTIADNEKKRMEAEERTRADYLELKKTVEGRIPAMEKKVEELGESLQSLSTKVEQLEGNTMRQVKFEPFSAASASGVQGGAKEEQFGGVAGMFTPNGTPEKFSPSPIPFNCDSASPTFGNGMGTMNLSSAIPPMTCPQFTGDNPQMWKSNCEQYFDVYGILPVHWVKIATLNFSGNAAFWFQSVRNQMSGISWVSLCDLVCSRFFKDRQQALIRQWFHIKQEGSVSEYVEKFDSLMHQLLAYYNSLLPVYFVTKFIEGLRSDIRMVVLVQRPQDLDSTCSVALLQEEAMEGVKFQGYKRPNNSVMIRNNSPAPIVGQASTPQKIFSPQITEDRRGTEAARARDDRLSALKSYRRSKGLCFTCGEKWEQEIDEVGDLMSISQQAVWGTESSRSIRLIGWVQGTELLMLIDSGSTHSFMDETVGSKMVGVSPLRKPLSVQLADGGSLLCSHEIANCKWWMQGHSFSSNFRLLNLGGYDIILGMDWLEQFSPMQVDWSQKWMEIQVNNQPVRLQGITSQTNSCNAISAEQCLGMARKGSILYLVQLTSSVSEICDTMPEAVHNLLLKFQDVFSEPTELPPKRYCDHSIPLVPVATPVNLRPYRFNPALKDEIEKQISDMLKSGVIQPSHSAFSSPALLVKKKDGTWRLVIDYRKLNAITIKGTYPMPIIDELLDELSQAKWFSKLDLRDGYHQIRMAPALPDFKKVFIVETDASEAGIGAMLSQDNHPIAFISKALGPRTKGLSTYEKECMAILMAVDQWRSYLQLGEFIILIDHHSLMHLSDQRKGTSNAAADALSRKFQDDNSELYHISSSTPLWLQEVTKGKHFSLSAGLLKYKGRVWIGNNDNLQLQLMSALHDSPIGGHSGFLVTYRKIKQLFAWPNMKKMVKTFVHQCQVCLQAKPDRAKYPGLLKPLPVPEGAWQTISLDFNEGLPRSEHSDCILVVVDKFSKYSHFLPLAHPFLALSVAKLFMKNIFKLHGLPLVIIFFRDKVFTSQLWEHLFEGAGTKLHFSSAYHPQSDGQTERVNQCLEIYLRCFVHSVPSKWAAWLHLAEYWYNTSYHSAIHATPFEVLYGHPPNHFGIGISDCSIPEMDTWFKEKKLMQQLVQQHLHRAQQQMKHFADKKRSFRTFAIGDWFPLHILDRRLAKKEEATWEDMEDLRSRFPAALAWGQANFQGEGLVRKCDPEEDKDKRREPSIEKAKEAGRQAEDLGLSFSSSEEAQYQGPRPRLGCVSHLLACELA

SEQ ID NO: 103207 - protein, 63 aa, Oryza sativa
  unsure (1)..(63): unsure at all Xaa locations
  Clone ID: PAT_MRT4530_10065C.1.pep
RAAMVCSKPRGLSGAIARQGGPAYTVEAIQSEKPTYQVGSSPSMVTPTYGGLXETPVTSSPLV

SEQ ID NO: 103208 - protein, 103 aa, Oryza sativa
  Clone ID: PAT_MRT4530_100660C.1.pep
MPPASHRSLLFPFFPVHGPALATGWKTSLALTPTEDPTGERGPPLPEWIATAGHLLWQQEAAHRNVVTVGGGDKVSTAEDGGDEAAPSRGGNEEATSGRASAL

SEQ ID NO: 103209 - protein, 81 aa, Oryza sativa
  unsure (1)..(81): unsure at all Xaa locations
  Clone ID: PAT_MRT4530_100661C.1.pep
NIYTPNFHIFHSHXPHPTAYRRNKYHSYIXSXXDHLNKNKIISPPVKSKHHQQTWNTRDNVLYFILSXINNKTKLYITITA

SEQ ID NO: 103210 - protein, 44 aa, Oryza sativa
  unsure (1)..(44): unsure at all Xaa locations
  Clone ID: PAT_MRT4530_100662C.1.pep
ETQSMSPPLSATPFPSLGRXSSRKRKVLVTARTFPSRERLESAP

SEQ ID NO: 103211 - protein, 35 aa, Oryza sativa
  Clone ID: PAT_MRT4530_100663C.1.pep
MDGCGGNDDDDDDNMLMDATLRVGLVAPSFVPPTY

SEQ ID NO: 103212 - protein, 70 aa, Oryza sativa
  Clone ID: PAT_MRT4530_100664C.1.pep
SSLHACRSTLEDPHCNSATTPTRCTSRSNVPFEISPDFATVVAEAIRLNKITEGAFNVTVGPLVNLWGFG

SEQ ID NO: 103213 - protein, 159 aa, Oryza sativa
  unsure (1)..(159): unsure at all Xaa locations
  Clone ID: PAT_MRT4530_100665C.1.pep
MYCTASRITRRKAAQGIGGASATATLVSPGGFPAGVGGAGPGRPXTPRHAVVGXGCTGGVFGSGGGGALGHGLPSNPPTPPSSPPASCVCVGTPGCQGDGGVGPPGLLSNPPSSSAASCVGVGTTGCEGGGGVGPTGLPTSHPPASVIGPPGAKGDGGM

SEQ ID NO: 103214 - protein, 80 aa, Oryza sativa
  Clone ID: PAT_MRT4530_100666C.1.pep
MATRNGRGRREDGEANVWPPSILPDADGDQAKRRRNLRRSSASRVEVGEAGGRDRRLGPGSAAPTSRRRCSRVPVSSAVA

SEQ ID NO: 103215 - protein, 112 aa, Oryza sativa
  unsure (1)..(112): unsure at all Xaa locations
  Clone ID: PAT_MRT4530_100667C.1.pep
IIWMTXSCRSRPKTLCHTARHTAFHQHSQNKNPNTSLCPPQWHLTRAAHAHFMLDLTLITQHVXHYFLSLCNTPSRTVGTAQRADTPSPSIYIHNSQPSQPHHNFSHTRQHV

SEQ ID NO: 103216 - protein, 481 aa, Oryza sativa
  Clone ID: PAT_MRT4530_100668C.1.pep
MAHALGCGAATAPAGVGLLHHHEKAGALFSAAGSIVRVQQLSGKGSKSQAIRCAMPSASEHGGISTATASSSDQKKGGLRGKLNKVVLAYSGGLDTSVIVPWLRENYGCEVVCFTADVGQGDIELEGLEKKAKASGASQLVVKDLKEEFVSEYIYPCLRAGAVYERKYLLGTSMARPVIAKAMVDVAKEVGADAVAHGCTGKGNDQVRFELTFYALNPELKVVAPWREWDITGREDAIEYAKKHNVPIPVTKKSIYSRDRNLWHLSHEGDILEDPANEPKEDMYMMSVAPENAPSKPEYLEIGIIAGVPVSINGKDLSPASLLAKLNEIGGKHGIGRIDMVENRLVGMKSRGVYETPGGTIMAAAVRELESLTLDRETMQWKDMLALKYAELVYAGRWFDPLRQSIDAFMENITATTTGSVTLKLYKGSVNVASRKSPYSLYREDISSFENGEIYNQADAEGFIRLYGLPTRVRAMLEKGI

SEQ ID NO: 103217 - protein, 412 aa, Oryza sativa
  Clone ID: PAT_MRT4530_100669C.1.pep
MASLLGLLFSSLLFSERCEARRRARSGGEVAMDEAEAAAAAAKMDELAGGGGGGGGDWSYLAADALAAASFTAFPFHHHHHHHHRDVLSASTPSSLLLNMDAATAAAMFDFQAAFPSSSVPPPPPTTTAALPPFHDFASSNPFDDAPPPFLAPPGQKLGFLGPPGGAFGGGMGWDDDDEIEQSVDASSMGVSASLENAAPVAAGGGGGGGGGGGRGKKKGMPAKNLMAERRRRKKLNDRLYMLRSVVPKISKMDRASILGDAIEYLKELLQRINDLHNELESAPSSSLTGPSSASFHPSTPTLQTFPGRVKEELCPTSFPSPSGQQATVEVRMREGHAVNIHMFCARRPGILMSTLRALDSLGLGIEQAVISCFNGFAMDVFRAEQCRDGPGLGPEEIKTVLLHSAGLQNAM

SEQ ID NO: 103218 - protein, 55 aa, Oryza sativa
  unsure (1)..(55): unsure at all Xaa locations
  Clone ID: PAT_MRT4530_10066C.1.pep
AAPAPRRPQLSSPPPPPPPPPXHGGSPAVGPATPPLIGAAACCLACACACVEWRR

SEQ ID NO: 103219 - protein, 193 aa, Oryza sativa
  Clone ID: PAT_MRT4530_100670C.1.pep
MGSVKKKATAMAQRSAHHGNRTSSLKTVQSTSASAMANAAAGAGGEDAGRPQAQVQVAAVEVRSYFPFPYAAGPFRPSAGGGGGGVSLGTHQADQPPAPEVVAAQQQLPHFPYAPRGGGSASASLSVECAICLERLRRGELCSELPECRHVFHRDCVALWIKSKSTCPLCRARISPWFSGSIGAPPPPLADMV

SEQ ID NO: 103220 - protein, 176 aa, Oryza sativa
  unsure (1)..(176): unsure at all Xaa locations
  Clone ID: PAT_MRT4530_100671C.1.pep
DPPGCRSLLPSFDSIGRKPVIGLEFSSXLVFNTLXGLSTQYWMAITTRFLVGSLNGLLGPIRAYTTEVCRPEHQAIGLSLDSTSWAMGLIIGSVIGGYLAQPTEKYPKLFPGNSLFGRYPYLLPSLCISVFCFIIFISCMWLPETLHDLKVHKKDDGPIESPVAHFGKSEELLSNI

SEQ ID NO: 103221 - protein, 79 aa, Oryza sativa
  Clone ID: PAT_MRT4530_100672C.1.pep
RLVTSPVAIRVEKGLLPPPQNWVGGNNLNQYFLISQPIKVWKILTGWGLCPLSPPSLVNWRLLEVQRWGCNCLKTQEFF

SEQ ID NO: 103222 - protein, 492 aa, Oryza sativa
  Clone ID: PAT_MRT4530_100673C.1.pep
MARARASAMGAAPPPHLRSHDLVVVVAVAAAALCLACRGASAGGGGGVDVLDRARRPEFAAWMAGVRWAIHERPELAFEEIETSRLVRAELDAMGVAYRHPVAGTGVVATVGTGRPPFVALRADMDALPMQGKYRHLYIELLYLNYVQNMAGEEVQWEHKSKVAMKMHACGHDAHTTMLLGAARILQERRHELQFHIVQYSILQLKASAGTVVLLFQPGEEVGTGARRMVEAGAVDNVEAIFGFHVSVELPTGVVGSRPGPLLAGCGFFEAVITGKGGHAAHPHASVDPILAAAPVVLALQGLVSREADPLEAQVVTVTRFLAGDALNVIPESITIGGTFRVFSNEGFLRLKRRIEEVIVAQSAVYRCAAAVYFHAGGRPLLPPTINSAALHAHFQAVAAETLGASAAVLGAMEPCMGSEDFAVFSEAVPASHFYFVGVRNEAEGLVHLAHSPHFRVDDAALPYGAALHASLAMRYLDERRREGGSHPHEEL

SEQ ID NO: 103223 - protein, 89 aa, Oryza sativa
  unsure (1)..(89): unsure at all Xaa locations
  Clone ID: PAT_MRT4530_100674C.1.pep
NTFRCSTSPSCDPKRISNLGNVCNLHKVKTIQGQQLLRGSGYSSMMYPNVEDYXDGSHGCHYIAKTRSCHTSHVTCESKALTVPCDLFS

SEQ ID NO: 103224 - protein, 38 aa, Oryza sativa
  Clone ID: PAT_MRT4530_100675C.1.pep
MASGAALSGMAGGDGKKGARAAGNGGGHLCSAGYGRAE

SEQ ID NO: 103225 - protein, 265 aa, Oryza sativa
  Clone ID: PAT_MRT4530_100676C.1.pep
MKGVTPDVVRLWLFPFSLLGKAKQWFYANRATINTWDKCSKAFLSNFFPMGKTNTLRERISSFQQTRDESIPKGWEQLREYMAACPHHEMDDWLIPQNFYNGLTPTSCDHLDAATGGAFFPKTVRGAVDLIEKMDLLMKRLDDHEKRSQGTVKALDSHVTCEVCGSMGHSGATAQKSVKRRCTWATTTTDSIHKEAKTIDALSKKLAANDKILENINLKLDGFASAFQMTRSCLCYVVTAMTPVLVILHIRIHHRAIARTTLADQ

SEQ ID NO: 103226 - protein, 583 aa, Oryza sativa
  unsure (1)..(583): unsure at all Xaa locations
  Clone ID: PAT_MRT4530_100677C.1.pep
MSVIHAEDIEISLCDGNSEDERRRRRIGSNLRRKAIHAIKKRGRRRVDCRFPPAISIEDVRDAEEERAVAAFHDRLAAHGLLPDKHDDYHMMLRFLKARKFDIDSAVQMWADMLKWREEFGADTILQDFDFHELDEVLRYYPQGXRGGHREVHPVYNERRCXVDLNKLMQITSVVRYIKYHVREFERALREGCXVLDIIKAHGNDPFILKLXIQGVGFKNFSKTARELINRMQKIDSDYYPETLHQMFVVNAGSGFKLIWNSVKGFLDPKTSSKIHVLGSNYQSRLLEVIDSRLYNILTVVVFLSELPDFLGGSCSCSDKGGCLGSNKGPWNDPFILKWQGMISDISNAESGSDVDDFGSFFQKGVDYGYLTPVHEEVRGTDSLTYYSCDDQTRRDIAPESCKGVQATGMVQNQLPDNRQPSTNRNPHDSGNNGHLDGAFARRSLQNYIQVVVTTFIKLLSFLRLFISRPVRRLENVHSCTVPVPSEEKPEPRSIRDDDMTMCLQRLDSLESLCNHLASRPPEIPREKEHMLLNSFERIKCIEADLERTKRVLHATVVKQKALVETLEAVQESSRARKRLFCS

SEQ ID NO: 103227 - protein, 152 aa, Oryza sativa
  Clone ID: PAT_MRT4530_100678C.1.pep
MSLHIGRLSSHVRQRYLEHLFQRFGNCTVRLKDGYGFAVFDSNDDAARAMRALQGKFVCGERITVNWSKQQPRFSKDFRSSRNIESSHQRAPRVRDGNIRFRDSLAQKNHPASHDQGHSPDVAPEQKSSDGALEKKSDEKKSEGDVGGFERM

SEQ ID NO: 103228 - protein, 111 aa, Oryza sativa
  Clone ID: PAT_MRT4530_100679C.1.pep
ARAGPWGLSRRTAPPPRCASPTPTTASRCTSTRRRRRCTRRRPPSPPRRRPSAAMAVRPRPPSSTSASAADRASTPSRTCRSPSCHPRRQRLRPPPAPAPTSLRRRPRCRR

SEQ ID NO: 103229 - protein, 754 aa, Oryza sativa
  Clone ID: PAT_MRT4530_10067C.1.pep
MAHAQLLVFLIPMALFLKLAMPVDGAMAMPGCPDKCGNVAIPYPFGIGENCSATNLNSYFNLMCNDTFHPPRPQIREPEAHIEVTGISLERGEMRVLSPVNHICFTSNTTSTKSSGVGYDLSRTPFLPSPSRNRFTVIGCNTLGLITGYRGASGQYVTGCYSYCEGINSTSDGAPCAGMGCCEASIPANLTAFAVTFDLNHSKVWTFNPCFYSVVAEVGWYNFKKQDLVGHLGFIKERAQNGVPIVADWAIRNGSCPKKGEKEPSSYACVSANSYCTAVINSPGYLCNCSQGYGGNPYLSDGCQDIDECEMRKLDPKYEELYPCRKGVCQNTPGSYICKCKKGKKSDGTGYGCQPADSPDYRMVVGLSVSAIVVTAMACMLIMQLQRRRHKKEKIEYFKQNGGLRLYDEMISRQVDTIRILTEREIKRATENYNEDRVLGSGGHGMVYRGTLDDNKEVAIKKSRVINDDCREEFVNEIIILSQINHRNIVRLLGCCLDVDVPMLVYEFAHNGTLSEFLHGTDHRSPIPLDLRLKIATQAAEALAYLHSSTSRTILHGDVKSANILMDDQYNAKVADFGASTLKSMDESEFILFVQGTMGYLDPESFTSHQLTERSDVYSFGVVLLELLTRKKALYTNDFNKNESLSYRFLSMFRQNKHQAMLDPEIVDGSNVVAIEKLTKVVVQCMSPRGDDRPTMKEVAERLQMLRKLQMQATCDGENDRDVHDNFGGSPSVILHFDEMTDSSIETSNLILSE

SEQ ID NO: 103230 - protein, 139 aa, Oryza sativa
  Clone ID: PAT_MRT4530_100680C.1.pep
MALRKHQPSGNAASISMVPLDFPSQELEKVNSVNPVVATDVPPEADVDVDMREVYFLIMHFLSHGPFKRTVGELCNELLEHQLLPRRYHAWYSRGGFHSGEENDDGISLPLGYLKLVERYPHIGKDHLVKLEYSIVSPK

SEQ ID NO: 103231 - protein, 44 aa, Oryza sativa
  Clone ID: PAT_MRT4530_100681C.1.pep
AMPVSLRLAFHGGAVPYGVLREKNIAWLALPFRSGRGRWVGLLE

SEQ ID NO: 103232 - protein, 117 aa, Oryza sativa
  Clone ID: PAT_MRT4530_100682C.1.pep
MLRSVWRARPSPLALCSAATALLAEATLSLAMAAASSMSWLPIRLCANRHSACLYFHAHRCGAICSRLAIATSPLLQFRRATAPPVAARSFPPHPTNPMRRIMRKIERRKGEKRGNR

SEQ ID NO: 103233 - protein, 165 aa, Oryza sativa
  Clone ID: PAT_MRT4530_100683C.1.pep
YESEVPLLVYEFISNGTLYDLLHTDASAKCLLSWDDRIRIAVEAAGALAYLHSAAAIPIFHRDVKSSNILLDNSFTTKVSDFGASRSVSLDETHVVTIVQGTFGYLDPDYYHTGQLTEKSDVYSFGVILVELLTRKKPIFINDVGTKQSLSHYFVEGLQEGSLTE

SEQ ID NO: 103234 - protein, 240 aa, Oryza sativa
  Clone ID: PAT_MRT4530_100684C.1.pep
MHLPAVGMSHPTEGELVFHYLYRRAVNMPLPSEFICDVNVLPHNPWDIVPGSEKPVYYNQGGGSDCMLVGMRRTLTFYFGNSRTAERTKWGMQEFRLAGNGLSPYPAMKHATGDGSKPPCNCAETTIAKRNDGLSAVLRNVLAVTPLVETVVEPDGSWLICRIYRTRQRALPVITPPAIENAREIIIPPANGNAREAQVRFIDFLQQGSHIESSSPCSCIVGPSLAEGSDESAGSVDQKD

SEQ ID NO: 103235 - protein, 96 aa, Oryza sativa
  Clone ID: PAT_MRT4530_100685C.1.pep
KEAVAAAAGEAEAAAAAASRAGGGEHSAAGALLRLHPSVPRPVPAAARCRVCRLPPGVAPRGGGVAPRRRRPLRRLLCRVDAPPPQLPRAAAAVPH

SEQ ID NO: 103236 - protein, 122 aa, Oryza sativa
  Clone ID: PAT_MRT4530_100686C.1.pep
MEEEVMTRTSSLRRRWRWTRRPRHCPAAATRCLVLLSRVASSSSPPPPLPPPYERAGKRTRRSPPRPPPASSPLPPPRRPGRRSLTRSTPCPPSPAAAASSRRGLRRHPPGPPPAFPEQPRF

SEQ ID NO: 103237 - protein, 166 aa, Oryza sativa
  unsure (1)..(166): unsure at all Xaa locations
  Clone ID: PAT_MRT4530_100687C.1.pep
MSMTMRRISLSCVVLIVLAPLAAVVWRLCPPRNGSDEVKGIRASKKSERSSQLVQHQSHIGTVISSDIPVHPIWYARWSLEHRXCTIRAFLRSLCHPGSASVDVGITXPIVPAWLRSVRLYSDQTSTNVCXVVRIGREKFDARAXRGGRLTRLDIQSVVRTPKQRE

SEQ ID NO: 103238 - protein, 367 aa, Oryza sativa
  Clone ID: PAT_MRT4530_100688C.1.pep
MEPGPSSPSPSSACADHPTPAPEEDEEGGRGWVVVPASEVPGADAPKVIDWEDLQQELARVWSLSAALATARERKALLAARLQSALEARKASVQQDNELAEIRERVQARADFMWDLKMHTKKMTEDVDDRREELRIKIRTLSTTSNTLSTARNKLKEADKLLSGENGLHVRLKTVERMLRTRQQYMTAQVAHLYPNFAGDAESMAPNGSQNGQAPLAILGLQLSKLTMKKTGYFSDKTEIQNSATALGYVAHAVSLIASYLDVPLRYPLRLGGSRSYVLDRAPSVESSSLASAISSAPLSTTMRTMEFPLFFESQETTRSAYAIFLLNKDIEQLLNHIGAESLGPRHVLANLKQLTTIVQSQQYISN

SEQ ID NO: 103239 - protein, 59 aa, Oryza sativa
  Clone ID: PAT_MRT4530_100689C.1.pep
FFLSTTDLPFLHDPISFYTQTTQITMHEPSSSTAKSTPRSISSLATPFLVSGYLGGRVG

SEQ ID NO: 103240 - protein, 35 aa, Oryza sativa
  Clone ID: PAT_MRT4530_10068C.1.pep
TRVEDHGSAPKAEEPLPPTTGVMARVSLLRKQHLE

SEQ ID NO: 103241 - protein, 623 aa, Oryza sativa
  Clone ID: PAT_MRT4530_100690C.1.pep
MLPRLRVLLPGTRGLSTASPAEAAPAPLSAAELELLLRRDHYSASTRRAISGKVDDPGFVEFLRELFASDAVAFELGGCELGRGLPQESELTATLLNIFFDPVDREVIAIREEVHKKNPRVKDDSVLHTPVRVYAVRYLDEMLVVTSGSKMLTIEVRDRILAVLERDLEVKVDKLGSSVHSAESEKMEFLGMEFQAVPPSVLHPPMSEKAKRARKMYLKRKAAKAQELKNARETRRKKLGLKILSHLFKKVRRGHEFEFDFQIESEVQQLFKEWAEEVVTEYFKSPEHCRYWHRLLTSGDFLSLARVRDQLPPELVDSYDKFQKTLDRFLMPMRDRGTSDEEERLAEEEERQYEKRTVQDLTELKMRVNAPIELMVKTVVSYHLRFSCFLTLAEKHECTKRQAISHYSKDLKVTNDDGVAEVHFPTEREIRMMGDKNLSDPKPVDGALTMIFVRLAVDDTTYPCVAHFCAETDTVIYRIRLLQNRLNVDPLNEKKWLVDSVIDLARNLVIPTELIVMVRMYHHDEVLSSMVKVVSCFYLTWPCRDISMLNRKLFMIVVMAGIGFHEMDDKATGPCRRWNIFGGVRSTAAVDTSYAQDLDQSLKGRQIATARSGLHYAIVYHSE

SEQ ID NO: 103242 - protein, 88 aa, Oryza sativa
  Clone ID: PAT_MRT4530_100691C.1.pep
TLVVWNLWSAKRPRPQQLNIIYSRMTPKGQGSDGSYGTHSVTPLASPWISNLVVIPALLHKNKNDRVNKNRCHIRQDNLHCPLTIMSR

SEQ ID NO: 103243 - protein, 330 aa, Oryza sativa
  Clone ID: PAT_MRT4530_100692C.1.pep
MLPRLRVLLPGTRGLSTASPAEAAPAPLSAAELELLLRRDHYSASTRRFHSFLPLLSHPSLLLSSALLLRRRAHPSLHSPPPEPPPLAPAAAAAAEAISSPSSHLRLLLPSRVKGRPLPVPTLPLRLATLSAASALDAVFAPRAATFAYRARHAAVRYLRSIPNASWFFRVAIPRQPFGPRHVRRLLSAISGKVDDPGFVEFLRELFASDAVAFELGGCELGRGLPQESELTATLLNIFFDPVDREVIAIREEVHKKNPRVKDDSVLHTPVRVYAVRYLDEMLVVTSGSKMLTIEVRDRILAVLERDLEVKVDKLGSSVHSAESEKMEFL

SEQ ID NO: 103244 - protein, 288 aa, Oryza sativa
  unsure (1)..(288): unsure at all Xaa locations
  Clone ID: PAT_MRT4530_100693C.1.pep
TPAGASLGGVLLAWRTAVWSVSDVHLADFFLTALVWHLSGDAPXWLSVVYGPQKESEKLQFQDELQMLRSSRSGPWAVAGDFNLILDAQDKKNLNLNRRMMGRFRRLIDELDLRELSLHGRRFTWSNELQETWXTSCQPPSSSHACLVFRXTVKRFQSWSDRHVGSIRLQLRMAKELVFQLDVAQENWSLSPLETWLRRDLKLKCLGLASLERTIARXRSRLIWLKGGDANTKLFHLHTRARRRKNFITRLRKGDQLAVSHDELQELASSHFGAIMGTCEAWGVGSTT

SEQ ID NO: 103245 - protein, 73 aa, Oryza sativa
  Clone ID: PAT_MRT4530_100694C.1.pep
MVREIGNERNNEHFSSESLSDLMLALIQQREKKDRTDDLNVQVQDEIGMVREDSKVRILAVEMILWHKRWHMV

SEQ ID NO: 103246 - protein, 155 aa, Oryza sativa
  Clone ID: PAT_MRT4530_100695C.1.pep
MSVIWPEEGGGRPAAAATAGRCPNCENRCGAGGPISRLGKLVLAACKNAFSSSVGALGHGQASNVAYLIGVDALSLFLCGGAGGIVCMRSEAAPIVRAGAHRAASPPRRFRPPPPPPATAAGESRGEGRGEERGGERPVRRGEGRGKEERCGGEE

SEQ ID NO: 103247 - protein, 401 aa, Oryza sativa
  Clone ID: PAT_MRT4530_100696C.1.pep
MALSSGRHLLSDCTCTHESWRRPTSSFLGPCTLSFLGPCTLSKSTTMDMRARDHARKRREEEDDDMMLFIFPALHLLSSSGAREKKRRHTSKITGEERVRELLEGHVKNCRVAFRMEPEIFISLANYLRTEKLVDDTRIKVKEKLAFFLYMLSHNASFEDLQEKFGHSGDSFHHHNCLGAIDGTHIPISISSDKAAPFRNRKNTLSQNVMIACDFDLKITFMSTGWEGSATVPPGKFYLVDGGYANTNSFLAPYRKVRYHLKEYGAVNMLLRGSPRLTMLLAKAAQKKNSPKGHPTKKHGGSPIEKRRASWNTALEKILVELLHEHNTPEYRGQNGWTSEAWNKIVKEFHEKDRYVCLTKSQIQEKEKELKREYRMLKEARKQSGASWNNQRCIIEAEPAI

SEQ ID NO: 103248 - protein, 25 aa, Oryza sativa
  Clone ID: PAT_MRT4530_100697C.1.pep
PSTTQPSSGLSILFSNISFCFSPIP

SEQ ID NO: 103249 - protein, 308 aa, Oryza sativa
  unsure (1)..(308): unsure at all Xaa locations
  Clone ID: PAT_MRT4530_100698C.1.pep
RLREALRRRNEDTDATGAAAAARGAWRDPEATATATARLTPPAATFSPIAHAPIRLGEDQPPPSWDLVPSPSWDLVPSPRVNMLGRGSPRLTMLLAKAAQKKNSLKGRPTKKHGGSPIEKTRASWNPALEKILVELLHEHNTPEYRGQNGWTSEAWNKIVKEFHEKDIYVCLTKSQIXEKEKELKREYRMLKEARKQSGASWNNQRCIIEAEPAIWNNIIISFPKAKKFRTKSFPLFEXLGELYDGHTAERTYNFTSTEPLQHPIITQIESDQDDLRNTEIIFSDYEDTFAYQVQDDADATEDDYANA

SEQ ID NO: 103250 - protein, 780 aa, Oryza sativa
  Clone ID: PAT_MRT4530_100699C.1.pep
MPLLSHFPSSSFFPSSSFLLQPVRRRPRLREALRRRNEDTDATGAAAAARGAWRDPEATATATARLTPPAATFSPGPAVWSCSGADADADRMFSSGSGGGMAGTREGSWTPERRGEERRRRREEGSWFLARSLQSVGTLHVGFSSRCSPSTSLILFSARLHTHPLDLEKTNLLLPGTLYPLLPGTLYPLQECKIVNNLCAIYSTTMDMRARYLARKRREEEDDDMMLFIFPALHLLSSSGAREKKRHHTSKLTGDERVRELLEGHVKNCRVAFRMEPEIFISLANYLRTEKLVDDTRIKVEEKLAFFLYMLSHNASFEDLQEKFGHSGDSFYRHVKHFFNSVVPTLLKRFLKPPNPNEVHWKIEKDPRFYPYFKITFMSNGWEGSATDARVLTSAVNKGFQVPPGKFYLVDGGYANTYSFLAPYRRVRYHLKEYGAGRRRPQNYKELFNHRHAVLRNHVERTLGVVKKRFPILKVATFHKIENQVKIPVAAAVFHNIIRSLNGDEQWLNNQPHNIHPSNYVDLPDVNMLGRGSPRLTMLLAKAAQKKNSLKGRPTKKHGGSPIEKTRASWNPALEKILVELLHEHNTPEYRGHTAEGTYNFTSTEPLQHPIITQIESDQDDLGNTEIIFPDYEDTLAYQVQDDADATEDDNANAERLKEMPQRRVVAVPRNKEEKEPKRQKKSVGVEGLMERYLDMRTKQTEDEAVQLAREKEAHLAREKEINDFSIKRCISVLNSMDVTKAKKVKAYTVFKNAENREIFVSACDEDPESALSWLRSEMA

SEQ ID NO: 103251 - protein, 421 aa, Oryza sativa
  Clone ID: PAT_MRT4530_10069C.1.pep
MAPAAQEPWAILAAIPNVVGYKEAKRIFPPGTDISVARKEVPRASVLTVPRHISLPACLGLYPYVVAADRSGLLLLGTHPVTSASAMVSYHICDAHTGEVVSLRDCKPMRPMTFYGAANVGLIIKDDGCMVAELQPGCKGTSTGGATLLSYKVGECCKWRERELTCSPPLPLDWYPEGVVSHGGMLWWVDLSYGLLACDPFAEEPNLIHVPLPQVPDELPVDDQVNRGAHRCVKVSGGRLMYVQIHGNPVVPVVSTWLLDESTCSPGEWEWNPQLSAPLAELWIDQSYVDTMLPLTIPALALPHPTDPNRVYFFLKSCIFAADLRLRKLVSFNSFEMLDPPCELWMKRSSHLVHAWQYDPSSSRSDFVLACLRQDKAIASKSSFSGIIPVTRRTAKSLKRVWDSVTRQQQKQEQQLQKQAM

SEQ ID NO: 103252 - protein, 586 aa, Oryza sativa
  Clone ID: PAT_MRT4530_1006C.1.pep
MRRRSPPAWSYRRIHILFLLLLATSSSSASAANFTCTTVQAACQSAIGYTTRNATTYAELLSLFNTSTLAELLRANGLPPTAMPPDTAIPAAATVTVPFRCLCNVATRVGRSDYRPIYLVGSQDGLDAIARKVFDGFVTYQEIADASNIPDPNKIFVGQELWIPLPCSCDQVDGHNVTHFAYKVRAVDTTSAIAAKFGVLESTLMRINGITDPKNLVQGQILDVPIPGNDTMARMARKHEGLINQEDINIDLSTLRTATNNFDERNKLGEGGFGVVYKGALPDGQQIAVKRLSNCSRQGINELKNELVLVSKLQHKNLVRLVGVCVENQEKLLVYEYMPKRSLDTILFDPDKSRELSWEKRLKIIIEIARGLEYLHEESRLKIIHRDLKANNILLDSDLTPKISDFGLAKLFGADQSHVITNRVAGTYGYMAPEYAMFGQYSVKSDVFSFGVLILEIVTGRRSMGSYSDHEQSFNLLDLIWQHWNRGTLLELVDPTNQCSLQADQMLGCIHVGLLCVQANPADRPKLSAVTTMIGGTASLNPPSRPAFWVLPEEDATRAAGTNSSPGGRVMAASANRVSITEIEPR

SEQ ID NO: 103253 - protein, 377 aa, Oryza sativa
  Clone ID: PAT_MRT4530_100700C.1.pep
MPLLSHFPSSSFFPSSSFLLQPVRRRPRLREALRRRNEDTDATGAAAAARGAWRDPEATATATARLTPPAATFSPGPAVWSCSGADADADRMFSSGSGGGMAGTREGSWTPERRGEERRRRREEGSWFLARSLQSVGTLHVGFSSRCSPSTSLILFSARLHTHPLDLEKTNLLLPGTLYPLLPGTLYPLQECKIVNNLCAIYSTTMDMRARYLARKRREEEDDDMMLFIFPALHLLSSSGAREKKRHHTSKLTGDERVRELLEGHVKNCRVAFRMEPEIFISLANYLRTEKLVDDTRIKVEEKLAFFLYMLSHNASFEDLQEKFGHSGDSFYRHVKHFFNSVVPTLLKRFLKPPNPNEVHWKIEKDPRFYPYFKVLT

SEQ ID NO: 103254 - protein, 44 aa, Oryza sativa
  Clone ID: PAT_MRT4530_100701C.1.pep
MGLHNEAERFGRAIEGAPVVQTSRLIQIAGAASSLHAQSPLTVA

SEQ ID NO: 103255 - protein, 253 aa, Oryza sativa
  Clone ID: PAT_MRT4530_100702C.1.pep
MLGRGSPRLTMLLAKAAQKKNSLKGRPTKKHGGSPIEKTRASWNPALEKILVELLHEHNTPEYRGHTAEGTYNFTSTEPLQHPIITQIESDQDDLGNTEIIFPDYEDTLAYQVQDDADATEDDNANAERLKEMPQRRVVAVPRNKEEKEPKRQKKSVGVEGLMERYLDMRTKQTEDEAVQLAREKEAHLAREKEINDFSIKRCISVLNSMDVTKAKKVKAYTVFKNAENREIFVSACDEDPESALSWLRSEMA

SEQ ID NO: 103256 - protein, 97 aa, Oryza sativa
  Clone ID: PAT_MRT4530_100703C.1.pep
APKRGKKKQNQKKTGGEKKKITETGPWVNPKKWAPHRRGPPHWLKGGKAELGEQKDKSGSREKMDYPPKSTQNTNRKHKRENPGGPKGGATQHKGGA

SEQ ID NO: 103257 - protein, 817 aa, Oryza sativa
  Clone ID: PAT_MRT4530_100704C.1.pep
MATTRLSPPAATFSPVSTLPFPFFPPLAKLGLHVHPLELEKTNLLLPGTLYPLLPGTLYPLQEIFCCCAKCKIVNNLCAIYSTTMDMRARDRARKRREEEDDDMMLFIFPALHLLSSSGAREKKRCHTSKITCEERVRELLEGHVKNCRVAFRMEPEIFISLANYLRTEKLVDDTRIKVEEKLAFFLYMLSHNASFEDLQEKFGHSGDSFHRHVKHFFNSVVPSLSKRFLKPPNPNEVHWKIEKDPRFYPYFKNCLGAIDGTHIPISISSDKAAPFRNRKNTLSQNVMIACDFDLKITFMSTGWEGSATDARVLTSAVNKGFQVPPGKFYLVDGGYANTNSFLAPYRKVRYHLKEYGAGRRRPQNYKELFNHRHAVLRNHVERTLGVVKKRFPILKVATFHKIKNQVKIPVAAAVFHNIIRSLNGDEQWLNNQPHNIHPSNYVDLPDVNMLGRGSPRLTMLLAKAAQKKNSPKGRPTKKHGGSPIEKTRTSWNPALEKILVELLHEHNTPEYRGQNGWTSEARNKIVKEFHEKDRYVCLTKSQIQEKEKELKREYRMLKEARKQSGASWNNQRCIIEAEPAIWNNIIISFPKAKKFRTKSFPLFEALGELYDGYTAEGTYNFTSTEPLQHPIITQVESDQDDLGNTEIIFLDYEDTLAYQVQDDVDATEDDNANAERLKEMPHRRVVAVPRNKEEKEPKRQKKSVGVEGLMERYLDMRTKQTEDEAAQLAREKEAHLAREKEAQLAREKEAHLAREKESNDFSIKRCISVLNSMDVTKAEKVKAYTVFKNSENREIFVSACDEDPESALSWLRSEMA

SEQ ID NO: 103258 - protein, 82 aa, Oryza sativa
  unsure (1)..(82): unsure at all Xaa locations
  Clone ID: PAT_MRT4530_100705C.1.pep
WGGERETSSCVNSVRLPGRYIKSVLEWWDXTTSVKEAPKKVLRSLTLLVAXEIXNERNRRTFQHKELPPSGLLTKIKDEAKI

SEQ ID NO: 103259 - protein, 683 aa, Oryza sativa
  Clone ID: PAT_MRT4530_100706C.1.pep
MGSDVIQAKLVLLGDLGAGKTSIVESTIGAAFFSQVLIMDEATVKLDIWDTAGQERYHSLAPMYYRGAAAAVVVYDISSTDSYIRARKWVDELQRQGNPHLVMALVGNKVDLEEKRQVGTQEAMEYAERNGLFFIETSAKTSQNVTELFYELGKHYRNNSAGQSATSPPFRDGSPRRPAPPRRRRRLAMAALLLRLMRLYRLPKYAILNRKRLLLNPPWTLNVPASRCGPPGRHSESDTTHHIAFASPSSSRTRTPTDRPSPSPTNLAPPPLLCFLLPTYFPFPPLLSPRTLRAAAAAAAAAHVEQPAMENACEAGLPLSVAVSVPPVMVDGETVPKEVEECEDEEEEEEYAGDAPPPWKVMGSDDEGETEAGEEEEIAEADGEEEAADVEEVEYEFYDSDGSEDEGDGEEVDPAVASAAQFVPEGQFLGSAQFAAYGCAAGFMRVAAVEADPADGQEILVLYRYTLLKRAWSDPAGVELSMWAKVSKIHRLRFIVPASGDPASSLPFAGLSLSPLIYHNDYVEELETLWSKLAAQVRVPPVATRVQVIVDVGILRAGDNTPERREYMRAELEAKKEMPWPGKLLGMELHVPEPVVAAAASCKRDSSEEVFDDAPAPPAKRRKVFDAGEECPVCLDELEDGVVAWPGCSVAHVFHGQCLETTLKGSQMCPICRRDLGLKTLQE

SEQ ID NO: 103260 - protein, 71 aa, Oryza sativa
  Clone ID: PAT_MRT4530_100707C.1.pep
SFFFFFFRFFTFCSWQVNTNSFVCVQRCLNKHLMPPHKTQTVRHSRLLHNQHNDLTAGRWGQPNPKSQGFY

SEQ ID NO: 103261 - protein, 81 aa, Oryza sativa
  Clone ID: PAT_MRT4530_100708C.1.pep
LQICDARFRLPDLSRTRTGHSSTLISWVHSTANNNASSSTKGGKKPYNLTSTFLQGPDPTWDMGGSVEPPNFWGNKQRLRL

SEQ ID NO: 103262 - protein, 57 aa, Oryza sativa
  unsure (1)..(57): unsure at all Xaa locations
  Clone ID: PAT_MRT4530_100709C.1.pep
PSRAANTHRPMKSQLTHYTKARFVIISVLVFSSXPTATVVKARVGPIDIAPTNLITN

SEQ ID NO: 103263 - protein, 240 aa, Oryza sativa
  Clone ID: PAT_MRT4530_10070C.1.pep
TTSPSWLVPTIVCISLPRRSSSSALSKTTSSSTNTARRFIIHCTQSLWLERTSLAKCYLLSSRSLPIAWEDHPLKWRWISLPDSRNQKVTELLKVCWLDLCGRVNCRELSPNTEYAAYLVFKLTDDSYGLDCQTQEADITMDDQVVSAKRTISFYPRPRPRPRPSTRETLSNMGRIEEAGQAEEPSYPRERGDGWLEVQLGHFYNDLEDTGVVVIRLKEHIQLNWKKGLILEGMEIRHNI

SEQ ID NO: 103264 - protein, 54 aa, Oryza sativa
  Clone ID: PAT_MRT4530_100710C.1.pep
SAQPYKVKNGELLTVETCDPSSTWIVSISKSSMIADILCQDCLEDVMYTIYGRS

SEQ ID NO: 103265 - protein, 171 aa, Oryza sativa
  unsure (1)..(171): unsure at all Xaa locations
  Clone ID: PAT_MRT4530_100711C.1.pep
IGHVNFSLINIGSINFGDRSLPLSPGDRSPISTSAVNNANIHLQQFLEICSTYTIKGVSPDAVRLRLFPFFLLGRAKQRFYANHAAVNTWDKCSTAFLSKFFPMGKTNALRGRISSFQQTRDKSIPDAWERLQEYVATCPHHGMDDWLILXNFYNGLTPMSRDHLDTVSRP

SEQ ID NO: 103266 - protein, 466 aa, Oryza sativa
  Clone ID: PAT_MRT4530_100712C.1.pep
MARLTVEQAKREAGSAGTLATSLNLSHRALSDVGAVSCLSSFVNLERLDLGYNCLLTLEGLSNCANLKWLSVIENKLVSLKGVEGLSKLQVLNAGKNKLKTMDEVKSLTSLGALILNDNNISSICKLDQLHQLNTLVLSKNPIFTIGDALMKAKAMKKLSLSHCQIEKIGSSLTACVELKELRLAHNKITTIPSDLAKNVKILNLDLGNNLIERRSDLEVLSELHYLRNLNLQGNPIAEKDGLAKKVKKLVPNLRIFNSKPMEASSKSKNSREENLPINDADTPDDGPTDIYTKKKGKGKHSKQQIKSPEEPAGQSTRPDVTIAAPAKSELLDGKEMKKEKAAVEHVKNKKSKRKDDNSSVDHTDKKVSKGAKRTKSAKKEEKNADGIDDTEMPFADLVFSGEGNNPELELKGKNQEIARDGKFGGLVIDHTKKKKKAKGTVFGSSALEQLSSVPEVGSGALSGWD

SEQ ID NO: 103267 - protein, 714 aa, Oryza sativa
  Clone ID: PAT_MRT4530_100713C.1.pep
MANKTLREFAAPSTDNVANWPQINMGDVDFDLKSSLITMVQACPFCAKPNEDANAHLQQFLGICSTYTIKGVSPDAVRLRLFPFSLLGRAKQWFYANRATVNTWDKCSTAFLSKFFPMGKTNALRGRISSFQQTRDESIPEAWEQLQEYVAACPHHGMDDWLILQNFYNGLTPMSRDHLDAAAGGAFFSKTVQGAVDLIEKMVSNMSWSKERLQTRQRGMHTVKETELLAAKLDLLMKRFDDHEKRPQGTVKALDSHITCEVCGGIDHSKNDCPETREEAMHMGNNGYLPRGGQGWNQPRPYYQEAKTTDALSKKLAANDKNLENMNVKLDGFASAFQNQLSFNKMIETQLAQFASLVHANETGRIPGQPDFSIENVKVITTRGGTTGITKEAPSSDSADKEVQPEKTVPQKPLVDEQSAHFVDVIRKIHINVPLLDAMQVPTYTRYLKDILNNKRPLPTTEMVKLTEQCSNVILYKLPEKKKDPGCPTITCSIGAQQLDQALCDLGASVSVMPKDVFDKLNFTVLAPTPMCLQLADSSVRYLTGIPEDVPVKIRDFFIQVDFVVLDMDTGKETPLILGCPFLSTAGANIDVGTGSIRFHINRKEEKFEVQLRTEQCSMVRIKYGPNSQNIQVVEVEPPKTDSLVKFMQNFLEKETTMPRNHYWRTPVKPPIPAKLEQPAQRKPSFAPKQRKVWKEKPKMPAPSPTETGRKSAN

SEQ ID NO: 103268 - protein, 352 aa, Oryza sativa
  Clone ID: PAT_MRT4530_100714C.1.pep
MAAAAIAAASLLPSSAFALRRLSSAANVSRFAQLKRFDRARRFAPAAAMSTSSGPKEAPANNPGLQAPSEKDPATKGYFMQQTSGRRVSWVKRDGWGSSGSLWAAVGQGGEDVAVLPRLWETRAAGQCQVSVAPAACSSAANVSRFAQLKRFDRARRFAPAAAMSTSSGPKEAPANNPGLQAPSEKDPATKGYFMQQTMFRVKDPKVSLDFYSRVMGMSLLKRLDFPEMKFSLYFLGYEDVESAPTDPVKRTVWTFGQRATLELTHNWGTENDPEFKGYHNGNSDPRGFGHIGVTVHDVYKACERFERLGVEFVKKPDDGKMKGIAFIKDPDGYWIEIFDLNRIGAVTAEAS

SEQ ID NO: 103269 - protein, 114 aa, Oryza sativa
  Clone ID: PAT_MRT4530_100715C.1.pep
APASSASSPPRRCRSRPVWRCRIACSLLDVLYLDARRLLCSFFVTGWMLLLCWLLSMLDGFCCFSVVEVISFCCCLFSIAVMYLIVWFLSYFFLIFLFLYYIFYFFFLPFFLFF

SEQ ID NO: 103270 - protein, 86 aa, Oryza sativa
  unsure (1)..(86): unsure at all Xaa locations
  Clone ID: PAT_MRT4530_100716C.1.pep
PRKHEEAIFLSRYCIRXLKVKPANHFLIFKMLSSLLXGPFVFFPLLLRAKSIGGSMSKAGRGDAEERREKNSPYLSPMPRPALLIL

SEQ ID NO: 103271 - protein, 505 aa, Oryza sativa
  Clone ID: PAT_MRT4530_100717C.1.pep
MDRAVETPTRSSGGGGGACHVSNVLEGEAKKPGADSKDARKDGSADRGVSRVGSDKSRSHGGLDSKKDVVIQRDGNNQNIAAQTFTFRELAAATKNFRQDCLLGEGGFGRVYKGRLETGQAVAVKQLDRNGLQGNREFLVEVLMLSLLHHTNLVNLIGYCADGDQRLLVYEFMPLGSLEDHLHDLPPDKEPLDWNTRMKIAAGAAKGLEYLHDKASPPVIYRDFKSSNILLGEGFHPKLSDFGLAKLGPVGDKTHVSTRVMGTYGYCAPEYAMTGQLTVKSDVYSFGVVFLELITGRKAIDNTKPQGEQNLVAWARPLFKDRRKFPKMADPMLQGRFPMRGLYQALAVAAMCLQEQATTRPHIGDVVTALSYLASQTYDPNAPVQHSRSNSSTPRARNLAGWNEDRRSVRSPNHHSPDLRREAARSSRAEVSRTSSTGDSGRRSGLDDLDMTGSQMGSPAQTGRKRETPRTADRQRAIAEAKTWGENSRERKHPNGHGSFDSTNE

SEQ ID NO: 103272 - protein, 380 aa, Oryza sativa
  Clone ID: PAT_MRT4530_100718C.1.pep
MVLTIIAYHFFLQGVDVFYSDAPLPGVRGKRCADELPSGERSSKHTASGTTYAGTPGRVVGGPKGFGKLSTQDDPGRAESSLGIKGAGAQVDPEPTPAVAGEQADAYGDAAPGTQVAAEGVKAGDASVQPGAAGEHANVYNDAAPGARAGAEGTKAGDVSTQSGGEDDGDLREQAPGTQPSGGDGAAECATGSSRRGGDAGAKTNAGGRLSSSLRRSLPCAFSPLGAEGGPGRHAGKEATGNNEEEVGQQEREALKKVFDDAADKADAEAMNEAGIILMQKMQPTGREGLPKRRRLVAKTSAAKLTAKLEEALKESNDLRTQLACNFRLSFALIGFVLTLWIDVSFPTVAQATIESDAAEKEQLAKDLKDKTTAFDNFAS

SEQ ID NO: 103273 - protein, 34 aa, Oryza sativa
  Clone ID: PAT_MRT4530_100719C.1.pep
LLRVACRLSIASSYTGHPNIQIHLVRSVLQPVAH

SEQ ID NO: 103274 - protein, 101 aa, Oryza sativa
  Clone ID: PAT_MRT4530_10071C.1.pep
HALGKKREKENLPPPPPATARERDAAQFVVSLRLAGVWIGISAPARNFTLQILAHRPAGRRAPSSRRFSRQKDPLGFLTTSWIGYLSSGCFYYRISLAASS

SEQ ID NO: 103275 - protein, 790 aa, Oryza sativa
  Clone ID: PAT_MRT4530_100720C.1.pep
MSEMEGALRSCMEQLLIAREEREQIIVEAASEISSEKKKARELQRKLDAATKKAAKLAAENSSLAKALDAKDAAIGELRESKSASDGELAGARARLDAAQKQAASLQYEVRMLQKELEIRGQEREYDLQSVDASRRQQAESQKKIALLEGECQRLRAMVRKRLPGPAAIAKMRDEVDQPATPRRSRSVAPMSPRSVAPAAPMTPMSTSARPMTPTMSARPMTPMSARPMTPRRAAAAEHETPAAAAKLRAVEDENKALKQTLAKRDAELQFVQMKYADEACKLSVLQRQLSELTEENKQLSDAHGQTESWASALISELEQFRAAKLQGAAASEMSLLDDFAEIERLEMASGGQGLRSPKNAHSEAISSEKNDKDTVLENGISISNGQPEWVQDMCKLVMQKHETSGENIDTILEEITRALDQSANNQKGDDLNGSYDWSIMKEMVFSLTEKITSVIGISEEGNVASSQKLLLDRSEFCARLEHLVHVCHDLLHGKTDLEKFVHEVCLVLEYIINQYKNISFQEQPDTVNNNTENLDGEESFGNMNGGCDIKSPKSSSAPDIQTEALEESIQSVEGRKTDHILVNQEESQLDEELTRVILDQDEKISQENSASCEIESPHDHPSAETLAEKEEKHLASSSEISAAAEKLAECQETITNLSRQLRALKSPAVSGNLDSPMSNSRPSSSDYKPQSLACILAEGEDSSTEDAISPATKEVHSKKEPDAASRKSVAQDGSVNAALKAVEEELTQTVVHPIFPEPSQEIISADLKKKRRSPSLLGRIMFRKKVEGS

SEQ ID NO: 103276 - protein, 308 aa, Oryza sativa
  Clone ID: PAT_MRT4530_100721C.1.pep
NLEQIKALIEHYGPTVFFHPQEIYLPSSVSWFFENGATLHKKGKEMGDVILASGSNLPAGGTNDGEYWIDIPDGDRNEYVKAGNLKSAELYVHIKPAHGGTFTDIAMWVFCPFNGPATIKVGFASFALQKVGRHTGDWEHFTLRISNFSGELSSIYFSQHSGGDWVDACDLEFISGNKAIVYSAKDGHASYAHPGCYLLGSEKAGVGVRNDAARSDILVDSSTRYKIISAGHLGDAVIEPCWLQYMREWGPTVEYNSRSEIDAVLSFLPFFLRFTAEAILNSLPVELYEEEGPTGPKEKNNWEGDERG

SEQ ID NO: 103277 - protein, 64 aa, Oryza sativa
  Clone ID: PAT_MRT4530_100722C.1.pep
YLVTMTCTSTTPLSSLAKAACSPSAWNPSPVKTPPFPHPSLSGDELPNDTTSSLMTQQAGEVPN

SEQ ID NO: 103278 - protein, 155 aa, Oryza sativa
  Clone ID: PAT_MRT4530_100723C.1.pep
MGTGMGFLPDRPGEYVAAHRNQAAEASSGCAILRHATVDSPSGDRGRRPKTAYNGSLDCQNSPSPLFSINSPSPSLLYLLISSSHSPSISSSTPALSPTPPETERVVEVKLYHKPVVLAGLLLPPDASDDGYLLDLISWLDEQPGTDMTEEVASA

SEQ ID NO: 103279 - protein, 147 aa, Oryza sativa
  Clone ID: PAT_MRT4530_100724C.1.pep
GGSPFPPGPIFGWLPPGPKRGSLRGRWTAPGTGRVFRVPPKGPEFFFFKAMESLVLAPFGLGDVPPMGPPFFFLKAQGGLFPPAINPPQVAGFRIPLNNFSASGGPPPPGFLPTSRGGHKVCLQTSFFFGCSPRPPVLQGFFVSPFF

SEQ ID NO: 103280 - protein, 53 aa, Oryza sativa
  Clone ID: PAT_MRT4530_100725C.1.pep
LGWTLLFILPCISSLDRYSHQPPSRSPLPFEIDHQVTVEVQIGASDRSRKKKR

SEQ ID NO: 103281 - protein, 175 aa, Oryza sativa
  Clone ID: PAT_MRT4530_100726C.1.pep
TVAACRSTSRQLQGDPWLAARREGTRSSVRLPFVPRHQVRPHPASRAVRVAATAAVADVQELKAKFGKPGAVELKEGRGGLPTVVLKHPDGSSAEVTLFGGCVTSWKTSGGTEILYIRPDAVFDKSKPISGGIPHCFPQFGPGPIQLHGFCRKLDWELVGASGDGKPQVQLQLTD

SEQ ID NO: 103282 - protein, 35 aa, Oryza sativa
  Clone ID: PAT_MRT4530_100727C.1.pep
QLNRAIGRVVMCDSSHIDLFSSTAPSGISNFPDLA

SEQ ID NO: 103283 - protein, 269 aa, Oryza sativa
  Clone ID: PAT_MRT4530_100728C.1.pep
MSAAVCGKRASSFFEDLPHSPSSPPSKRACFRGGSSPSRPLADPALVAQIRPRFPSVGLEVIENALEECENDFDSAIKFLFNLHVGPTECNVDPIYQSPSGMSTELQVADEGILAGNEAAVPIGNAPCADNFPSSSTQWVEILVNEMTNASNMDDAKARASRVLEVFEKSMTAHVGAMGSFQKESSVYKEQFEAITRENTILKKAVAIQHERQKEHDGRNQEIQQLKQLVAQYQEQIRSLEVNNYALSMHLRQAQQANSIPGHFHRDIF

SEQ ID NO: 103284 - protein, 62 aa, Oryza sativa
  Clone ID: PAT_MRT4530_100729C.1.pep
AIQRRRCQPEQWLVKACVCYSLSEVTPPHPHKQDSPGPITLSLIIRRCHHPQLFLLKVAQGL

SEQ ID NO: 103285 - protein, 264 aa, Oryza sativa
  Clone ID: PAT_MRT4530_10072C.1.pep
MAMATTSSKNERWSLAGATALVTGGSKGIGRAIVEELASLGATVHTCARTEAPLNRCREELTAKGLAVTVSVCDVSLRADREALAGTVRELFGGKLSILVNCAGMSFLKPAVELTPDDCSQVMGMNFESCFHLSQLAYPLLKASQRGCIINISSIASVVAFCSLPNAVYSAAKGAMNQVTRNLAAEWANDGIRVNCVAPGFIRTPLLSEFVEGNELGRAEFSRVPMGRLGEPEDIASLVAFLSMPASSYITGQVICADGGRCLS

SEQ ID NO: 103286 - protein, 282 aa, Oryza sativa
  Clone ID: PAT_MRT4530_100730C.1.pep
MSAAVCGKRASSFFEDLPHSPSSPPSKRACFRGGSSPSRPLADPALVAQIRPRFPSVGLEVIENALEECENDFDSAIKFLFNLHVGPTECNVDPIYQSPSGMSTELQVADEGILAGNEAAVPIGNAPCADNFPSSSTQWVEILVNEMTNASNMDDAKARASRVLEVFEKSMTAHVGAMGSFQKVTKVSLFLLGNLVESSVYKEQFEAITRENTILKKAVAIQHERQKEHDGRNQEIQQLKQLVAQYQEQIRSLEVNNYALSMHLRQAQQANSIPGHFHRDIF

SEQ ID NO: 103287 - protein, 86 aa, Oryza sativa
  Clone ID: PAT_MRT4530_100731C.1.pep
MTEENSRGSGTKISDSAKAEPSKWSEAPQLFDVTGEPPPLPAAAGPADGEAFGQSGSAVGGARRRREAAAAAAARDGRVVLGLGGV

SEQ ID NO: 103288 - protein, 47 aa, Oryza sativa
  Clone ID: PAT_MRT4530_100732C.1.pep
DGKDKIYVFRWLGTRNRAVDAARRRGIDWRGRFRSFNTCDRDGPAPR

SEQ ID NO: 103289 - protein, 57 aa, Oryza sativa
  Clone ID: PAT_MRT4530_100733C.1.pep
TVVLFPSLRSHPSGIDAGWYYYYLRTSRRSYITDITHIKISTLGLTPNARCLIQTAN

SEQ ID NO: 103290 - protein, 1428 aa, Oryza sativa
  unsure (1)..(1428): unsure at all Xaa locations
  Clone ID: PAT_MRT4530_100734C.1.pep
MALRKERYPSGSRKPNPSIHPSHTALTIELFDIRADERILRGSCCGRALVGRFTLDANSELKVTLNPAPQGSVVEINLEATNTSGSLILHWGALRPDRGEWLLPSRKPDGTTVYKNRALRTPFIKSGDNSTLKIEIDDPAVQAIEFLIFDEARNNWYKNNGQNFQIQLQASQYQGQGTSTATSSTVVPEDLVQIQSYLRXEYEAARTELIEELNKGVSLEKLRAKLTKTPEATDSNAPASESTVTTKVPEELVQVQAYIRWEKAGKPNYAPEKQLVEFEEARKELQSELDKGTSVEQLRNKILKGNIETKVSKQLKDKKYFSVERIQRKKRDIVQLLKKHKPTVMEAQVETPKQPTVLDLFTKSLQEQDNCEVLSRKLFKFGDKEIXGKTKVHLATNYMEPLILHWALSKENGEWQXAPPSSILPSGSSLLDKACETSFSEYELNGLHCQDTGDAGKGTAKALLERIADLEEDAQRSLMHRFNIAADLVDQARDNGLLGIIGIFVWIRFMATRQLIWNKNYNVKPREISKAQDRFTDDLENMYRTYPQYQEILRMIMSAVGRGGEGDVGQRIRDEILVIQRNNDCKGGMMEEWHQKLHNNTSPDDVVICQALLDYIKSDFDIGVYWDTLKKDGITKERLLSYDRPIHSEPNFRSEQKDGLLRDLGNYMRSLKMEGTLIQSLRMAVHSGADLESAIATCMGYKSEGEGFMVGVQINPVKGLPSGFPKLLEFVLDHVEDKSAEPLLEGLLEARAELHPLLLGSPERMKDLIFLDIALDSTFRTAVERSYEELNNVEPEKIMYFISLVLENLALSTDDNEDILYCLKGWNQALEMAKQKNNQWALYAKAFLDRTRLALASKGEQYYNLMQPSAEYLGSLLNIDQWAVNIFTEEIIRGGSAATLSALLNRIDPVLRNVAQLGSWQVISPVEVSGYIVVVDELLAVQNKSYDKPTILVAKSVKGEEEIPDGVVGVITPDMPDVLSHVSVRARNCKVLFATCFDPNTLSELQGHDGKVFSFKPTSADITYREIPESELQSGSLNAEAGQAVPSVSLVKKKFLGKYAISAEEFSEEMVGAKSRNVAYLKGKVPSWVGVPTSVAIPFGTFEKVLSDEINKEVAQTIQMLKGKLAQDDFSALGEIRKTVLNLTAPTQLIKELKEKMLGSGMPWPGDEGDQRWEQAWMAIKKVWASKWNERAYFSTRKVKLDHDYLSMAVLVQEIVNADYAFVIHTTNPSSGDSSEIYAEVVKGLGETLVGAYPGRAMSFVCKKNDLDSPKVLGFPSKPIGLFIKRSIIFRSDSNGEDLEGYAGAGLYDSSLKNLFGITTKLTACFSVPMDEEDEVILDYTTDPLITDQGFQKSILSSIARAGHAIEELYGSPQDVEGAVKEGKLYVEIKEAYRKLQKRHHILILLATRVMHDYTLLLNEAYKVLMRN

SEQ ID NO: 103291 - protein, 121 aa, Oryza sativa
  unsure (1)..(121): unsure at all Xaa locations
  Clone ID: PAT_MRT4530_100735C.1.pep
SIAHNRRHGYSNSFTLAKGAQLYPXDTIHRHVTASGXHVTMSSDCDKTLHITPPDQVHHTSGFAPTPQQAAGTPLSCRGESGSRSTGHPGRPNSITPTLAWVRRLEKSYTISPAVAHAGLW

SEQ ID NO: 103292 - protein, 324 aa, Oryza sativa
  Clone ID: PAT_MRT4530_100736C.1.pep
KLFKFGDKEILGITTVALGKTKVHLATNYMEPLILHWALSKENGEWQAPPSSILPRPIIADKACETSFSEYELNGLHCQVVEIELDDGGYKRMPFVLRSGETWMKNNGSDFYLDFSTKVAKNTKDTGDAGKGTAKALLERIADLEEDAQRSLMHRFNIAADLVDQARDNGLLGIIGIFVWIRFMATRQLIWNKNYNVKPREISKAQDRFTDDLENMYRTYPQYQEILRMIMSAVGRGGEGDVGQRIRDEILVIQRNNDCKGGMMEEWHQKLHNNTSPDDVVICQALLDYIKSDFDIGVYWDTLKKDGITKERLLSYDRPIHSEP

SEQ ID NO: 103293 - protein, 175 aa, Oryza sativa
  unsure (1)..(175): unsure at all Xaa locations
  Clone ID: PAT_MRT4530_100737C.1.pep
HDYLSMAVLXQEIVNADYAFVIHTTNPSSGDSSEIYAEVVKGLGETLVGAYPGRAMSFVCKKNDLDSPKVLGFPSKPIGLFIKRSIIFRSDSNGEDLEGYAGAGLYDSVPMDEEDEVILDYTTDPLITDQGFQKSILSSIARAGHAIEELYGSPQDVEGAVKEGKLYVVQTRPQM

SEQ ID NO: 103294 - protein, 141 aa, Oryza sativa
  Clone ID: PAT_MRT4530_100738C.1.pep
LQASQYQGQGTSTATSSTVVPEDLVQIQSYLRWERKGKQSYTPEQEKEEYEAARTELIEELNKGVSLEKLRAKLTKTPEATDSNAPASESTVTTKVPEELVQVQAYIRWEKAGQPNYAPEKQLVEFEEAREELQSELDKGP

SEQ ID NO: 103295 - protein, 321 aa, Oryza sativa
  Clone ID: PAT_MRT4530_100739C.1.pep
MRSTPPRFSLLSALLLTDDGRAPVPVSSSSLLPASPLFQNIATATAAAAAARRPRPPPAHLHLRRISQPRSPHWREIRSSAWILLNPMLLTEPVNQRNVVGHASGAELASHATQADEATELASSCDCAEVPASQQIVSESSTAGSSTEHLVSCEIKPLGVDEDIETIDANEETHLVIQDCPQCRICLDNEGDDLIAPCHCKGTQKYVHRSCLDNWRSTKVVALLGMLVYRFYGDELREMFGYEEHPYAFYAMAILAIVLVGLLYGFFIAIICGQRITERHYHVLAKQELTKEYIVEDLEGTDGVPDLDPNHVTELRILGLY

SEQ ID NO: 103296 - protein, 143 aa, Oryza sativa
  Clone ID: PAT_MRT4530_10073C.1.pep
MAPERPRREALFRHAPTHARCSTSCAVKRLGKGTFQCRISSFATPFSTFPLFPALGVAYHWHPDVDAVNNNIVLWSLLELGTTSNNLRQMPLAPDLPSRPALTDYPKPNCPNAFPFSSNMSLVISIQRTTFTTRKSIFADRQK

SEQ ID NO: 103297 - protein, 64 aa, Oryza sativa
  Clone ID: PAT_MRT4530_100740C.1.pep
MTVTYVLLPLPATGSGTTVYRLLTNHAICRAVNANPPFDADPVALVPPPRHPPTIGALPPQLPV

SEQ ID NO: 103298 - protein, 223 aa, Oryza sativa
  Clone ID: PAT_MRT4530_100741C.1.pep
YRALPSDHMYSEKHQILFSESSTAGSSTEHLVSCEIKPLGVDEDIETIDANEETHLVIQDCPQCRICLDNEGDDLIAPCHCKGTQKYVHRSCLDNWRSTKEGFAFSHCTECRAAFLLRANVPPDRWWLRLKFQLLVVRDHTLIFFIVQLVVALLGMLVYRFYGDELREMFGYEEHPYAFYAMAILAIVLVGLLYGFFIAIICGQRITERHYHVLAKQELTKVG

SEQ ID NO: 103299 - protein, 317 aa, Oryza sativa
  Clone ID: PAT_MRT4530_100742C.1.pep
MGCKSCEKPRPNYRKGLWSPEEDQKLRDYILRHGHGCWSALPANAGLQRNGKSCRLRWINYLRPGLKHGVFSPEEEETVMSLHAALGNKWSRIARHLPGRTDNEVKNYWNSYLKKRVESGGGKTSQGPPTTPASAASSPADSDDSHSLQQKPHEPANSDSSEPAHESSSASADSSCLTVTTDHPPVSRPHAAVTPKVMFADWLDMEYICGQVAAAPGLDAAGFAVVGGAAGDQQQQQQQVMSQDGSVHQADGPSCGVDDSSLQQQQQEGFGGNGGCWDFQEQFDSIDQMQASGGGGGFCDLLSMSDFDLWAELERTA

SEQ ID NO: 103300 - protein, 67 aa, Oryza sativa
  Clone ID: PAT_MRT4530_100743C.1.pep
EPQHAITTIDGGACIHASRRSFKAMKHELLAAVPIHEVARRSHWSEVKLTLDHTDHQPCTPAKDAGP

SEQ ID NO: 103301 - protein, 89 aa, Oryza sativa
  unsure (1)..(89): unsure at all Xaa locations
  Clone ID: PAT_MRT4530_100744C.1.pep
TPSPSPPLSLPPLFSLPPPARQPPVVAASFPRPRHCHVRSPLASRSSRPPPPSPTTAQGRRPPXSPPPHAPPPSSSAPRSSAAASCVWM

SEQ ID NO: 103302 - protein, 173 aa, Oryza sativa
  Clone ID: PAT_MRT4530_100745C.1.pep
MGPLSFFLFLLPSLSFSLSPISLCLHLQAAAGPSGRGERKGRRRPGGGDTGGVSCLLGQSKKKKARNAINDDRILLRISGIGLACGGGMNPSDESVQVERVVVGEELKGVILWDGASPDERRLLLPPLGSRLRSRSPLRPLGPSSAHRRLQTKKKRNRREKGQEGRRKRKKER

SEQ ID NO: 103303 - protein, 201 aa, Oryza sativa
  Clone ID: PAT_MRT4530_100746C.1.pep
MAESLGLGALCRGGGWCYAVIWRSDRRDPRLLTIGEFHSEDGTRNVVEKMLNQVHVVGEGIIGRALVSGECQWISDTSFSFAQTSDADNQDLFQGYTWWQHQFLCGIKTIAVIPIADLGVAQFGSMQKISECLEFLDQVKGIFCQREIVPWDLSAEEIQRNVLPYHQQFQLSSLSSADGLTNIKTDPEKQETSGELSKCRV

SEQ ID NO: 103304 - protein, 72 aa, Oryza sativa
  unsure (1)..(72): unsure at all Xaa locations
  Clone ID: PAT_MRT4530_100747C.1.pep
AKAKXNXHQTATRTAAAXRAQRXRXXMAGXQKPXKRLGGMAEAXSIAXDLXFXXXXXXEXQGXXDKSDDLVR

SEQ ID NO: 103305 - protein, 229 aa, Oryza sativa
  unsure (1)..(229): unsure at all Xaa locations
  Clone ID: PAT_MRT4530_100748C.1.pep
MGDITRQEKPTGSGIHYSIGLLVSDRSLRLKNETAPIRSAPNWTIVAARSYDDDCHPTAKADPSPVSSGELDPXPADSVGGRGRGAEERERRRRWVVEEGDRRRRRASLSGGGEERKPRGKNERKEVAEGGRRWIHREHLSTTRRNMEKVTLPPTGTRRPSRARPPPPPPLPPPPASPPPANDGDEHGGGWIDARKQQPRLGPVVDLAGPSPSTAEPQDPGEHHCRPPW

SEQ ID NO: 103306 - protein, 173 aa, Oryza sativa
  Clone ID: PAT_MRT4530_100749C.1.pep
MCPGGRYAGLDVPACAAAGDLRPAFDVLDADRDGRISREDLKSFYASGAATSERFDDEDIAAMIAAADVDNDGFVQYDEFERLLGRAAAGAGCRPAMEDVLRVMDRDGDGKVGFDDLKAYLGWAGMPAADEEIRAMIRVAGGGDGDGCVGLEELAIVLGCSPTNWTASSQTLH

SEQ ID NO: 103307 - protein, 87 aa, Oryza sativa
  Clone ID: PAT_MRT4530_10074C.1.pep
VSPPLIRLLPSGGSPFWVSFTPCNLCSSAPLYGIYVAVMVCLGSLFSFFWDGTCFLSSYLGFGGRVLFASMPSSVLAIVFFYKKKKK

SEQ ID NO: 103308 - protein, 342 aa, Oryza sativa
  Clone ID: PAT_MRT4530_100750C.1.pep
MEDITRQEKPTGSCIHDSIGLLVSDRFLRLKDETAPICSAPNWTIVAARSYDDECHPTAKADPSPASSGELDPSPAGSVGGRGRGAEERERRRRWVVEEGDRRRRRASLSGEGEERKPRGKNERKEVAEGGRRRIHREHLSTRRRNMEKVTPPPMGTRRPSRAQPPAPLPPPPASPPPANDGDEHGGGWIDARKQQPRLGPVVDLTGPSPSTAEPRDPSEHHCRSPWTLARPVDGRAVPVPARHACGPPCQYGPVNEKWAVDGARLAQEPKWRGGMRCGLAEVAGGLGHQLGGVLNGLAEAASGLGRRAGYRFRRASGRPFWPGPFGHLYVEQVEGQNWTFA

SEQ ID NO: 103309 - protein, 71 aa, Oryza sativa
  Clone ID: PAT_MRT4530_100751C.1.pep
MAQADKLEDSRAIELEDGRVSELRGRCGVQARRNRLTSSRARPGELEVWLVFRLKNGGAPGLWHGRLSELT

SEQ ID NO: 103310 - protein, 74 aa, Oryza sativa
  Clone ID: PAT_MRT4530_100752C.1.pep
LAARHDEGALCWPRPVEHEFHQLHATKMEELLRQVATAVASSPDRARGYNLVPRCTILDPYHDLQRPWPQRDPH

SEQ ID NO: 103311 - protein, 115 aa, Oryza sativa
  Clone ID: PAT_MRT4530_100753C.1.pep
MVLVAGIIMFVLWLSLRPHRPRFFLDDFTIPNLNRQSGAVNLPVRFTVDERNPNQKIGIHYGTIFGSVYYNDLLVASGPMWDTREHHMKVDCEFGLRGDGTLQQGDKNKQCTLYF

SEQ ID NO: 103312 - protein, 52 aa, Oryza sativa
  Clone ID: PAT_MRT4530_100754C.1.pep
MVFRMTFTKRHIYARCSHQVTLDADVAESARSSSAALPCCRCRQMHILFHRE

SEQ ID NO: 103313 - protein, 200 aa, Oryza sativa
  Clone ID: PAT_MRT4530_100755C.1.pep
MPPYRLPMYRERPAVRCINFLCAVLLTMVLVAGIIMFVLWLSLRPHRPRFFLDDFTIPNLNRQSGAVNLPVRFTVDERNPNQKIGIHYGTIFGSVYYNDLLVASGPVVQPFYQQPKGDTPLAGELTASGPTPGDPAWQRFAGDAAAGSVALRLLLNSTVRFQVQMWDTREHHMKVDCEFGLRGDGTLQQGDKNKQCTLYF

SEQ ID NO: 103314 - protein, 315 aa, Oryza sativa
  unsure (1)..(315): unsure at all Xaa locations
  Clone ID: PAT_MRT4530_100756C.1.pep
KTLAGVVGKVFYGGRCIPGRVAARLPRGGTRAELPPRPPRRCPRGGCCPRAKVDPPAATGSPAPAAGGPGFRRPLPPRDPGGTRPGSPPPLLLSSGSAPPTPSPPPSQPLPHPQIDPPXSPLHSPPLPPPSPGDGXAAPPSFPFPPPSPPPPSFLXPPPSPPPPSFLXPPPSPPRRSSSSPPPSLRRRRRHCPVPYPPPPVSPLPPPARSGREGGGEPPPXPHCRPGSXPPPASPFPPPARFGGGGEGSRRPAPSPPPPPRAIVAXSPPPVSPLPPPTRSGREGGGEPPPGRIVAASAGRHCRRRPTAFRAAPRA

SEQ ID NO: 103315 - protein, 546 aa, Oryza sativa
  Clone ID: PAT_MRT4530_100757C.1.pep
MQPVRIQAHDDKIIWAKSHGEDYEVEMAKAEESRWYLARPNASLGEGCMLKDGGFAITSPTLKRPKGPSQPLRPIPDSKATADSPVMDRGLLKAATSGVKPALHDPSLLLGRTVQGNTCLHIASAHGHEEFCKDILMLNPSLLCTVNADGETPLLATVKSGNVALASFLLSYYCRRHDDLDTREAMVRQDKQGCNALHHTIRRGHRKLAFELIEKEPALTKAVNKHDESPMFIAVMRNFTDVFDKLLEVPDSAHGGTSGYNALHAAFRNNNTDIAKKIIETRPKLAREENSARVNPMQFGVLENKIDVLKVLLEHDFSLGYIISTSGIPLLGSAAYQGHVGVAMEILKHCPDAPFLVENDGTTCLHIAVQKGHIKFVEFVLQSKELRKLINMRDRNGETALHYAIRKCHPKIVALLLQCKAQDVTVLDSNGNPPIWVPNDAADHAKTLNWSEVSMRMLKADPEDKGEIYNLIKTIKDQVTEKARKDIRTLTQTYTSNTSLVAILLATITFAAAFTLPGGHSNNAGSEGLPNMGRKLAFQAFLISDT

SEQ ID NO: 103316 - protein, 81 aa, Oryza sativa
  unsure (1)..(81): unsure at all Xaa locations
  Clone ID: PAT_MRT4530_100758C.1.pep
TEQFKLVCFKHCFILINISFYTFXQTTDPPMHCINGPTCYYNTPNKNFHTINDMLQYIPPYFTNKKWSQRTIKHSTLLEKT

SEQ ID NO: 103317 - protein, 629 aa, Oryza sativa
  Clone ID: PAT_MRT4530_100759C.1.pep
MNAAGADTDTVLRKRQLTVRTTSSNGGNGFRVGGGKGAAAATPPEPVSPSARLLEDFFIVVVIGIATPVNDPVARAGIAAQFARYPRFRSIQVTDEDGGNPRWVRTTLNVDDHIIYPELDMDAVAADPDKAVEDYVASLSTKPMDESRPLWEFHVLDFPTSEAAATTAIRVHHSLGDGMSLLTLLMACTRSAADPARLPAMPPQPTRTGAIYARPRPPASAGALAFAAWLWSFVALAWHTVVDVASFFATTMFLKDPHTLFKRVKHGEFQRKRIVHRGLSFDDVKLVKNAMNCGARRLPLEAAAEGGGQRPEGGVRAVATSAAAAVAGGWRRREEGGRDDVRGTDGLVGARKERSSRRPSAPRCAQGGGGGQEERRRLWAPTSFPPDADGGGGADSTGHSPPRSGRKRGAGQQRRQRRRSPRPRVTAPDGGDTDTDEDIRLRTILLVNLRPTTSLHAYVDMINSGREDEVKWGNALGFIILPFFIGMHKDPLDYVRKAKKVVDRKKSSLEVVFTHLAAEVILKLFGLKAAAAIFHRMISHTTISFSNMIGPVEQVEFCGHPVVFIAPSGYGPPEALTVNFQSYVNTMMVNLAVDEAQFPDCHELLDDFSESLRQIKDAALSLGKHHTKA

SEQ ID NO: 103318 - protein, 77 aa, Oryza sativa
  Clone ID: PAT_MRT4530_10075C.1.pep
MVMVAVRDVNREATRDDISVGKQHTEHTETQPAKLGETQVRQLYTVDATTTTKSNTSWRQDCRSGGQLLALELFRMR

SEQ ID NO: 103319 - protein, 159 aa, Oryza sativa
  Clone ID: PAT_MRT4530_100760C.1.pep
TRTESPAPTGLPPLHSPPFPSPRRAPLLRAYGGDGGDFSRHATVASPTCDNHRRRQRLLPSCGDDRRRRLLSCAMTTGGAGLFRLWQRREMVAASPAGGSGDHQRRLSRADPTTVAASASPSTDLADDDMSSGGVRLFPCCSLFLVVSSLSAMLIWVLG

SEQ ID NO: 103320 - protein, 645 aa, Oryza sativa
  Clone ID: PAT_MRT4530_100761C.1.pep
MNAAGADTDTVLRKRQLTVRTTSSNGGNGFRVGGGKGAAAATPPEPVSPSARLLEDFFIVVVIGIATPVNDPVARAGIAAQFARYPRFRSIQVTDEDGGNPRWVRTTLNVDDHIIYPELDMDAVAADPDKAVEDYVASLSTKPMDESRPLWKFHVLDFPTSEAAATTAIRVHHSFGDGMSLLTLLMACTRSAADPARLPAMPPQPTRTGAIYARPRPPASAGALAFTAWLWSFVALAWHTVVDVASFFATTMFLKDPHTLFKRVKHGEFQRKRIVHRGLSFDDVKLVKNAMNCGARRLPLEAAAEGGGQRPEGGVRAVATSAAAAVAGGWRRREEGGRDDVRGTDGLVGARKERSSRRPSAPRCAQGGGGGQEERRWLWAPTSFPPDADGGGGADSTGHSPPRSGRKRGAGQQRRQRRRSPRPRTVNDVLVGITYSALSRYYYRKSGDTDTDEDIRLRTILLVNLRPTTSLHAYVDMINSGREDEVKWGNALGFIILPFFIGMHKDPLDYVRKAKKVVDRKKSSLEVVFTHLAAEVILKLFGLKAAAAIFHRMISHTTISFSNMIGPVEQVEFCGHPVVFIAPSGYGPPEALTVNFQSYVNTMMVNLAVDEAQFPDCHELLDDFSESLRQIKDAALSLGKHHTKA

SEQ ID NO: 103321 - protein, 67 aa, Oryza sativa
  Clone ID: PAT_MRT4530_100762C.1.pep
VGRLDISEPVLVDMSSQCVAAKCSRVYEVAGLSPCAGIKPVLAMMISSHVSVLNIRAPACNGAVLCS

SEQ ID NO: 103322 - protein, 154 aa, Oryza sativa
  Clone ID: PAT_MRT4530_100763C.1.pep
DFFLLLLLGLRRRRPDLSSPSIPSGHGVNIGQEMESSLKEEKAAGESGDDEKAERSSPINLNSLPATAACAATAPDEDGLHSAVESGAKDSNTTKGVESLGTGHKKIPKREVVDEVDVQTCAERKNDSVVPSSSKNPINDKNAKANVAENGQSA

SEQ ID NO: 103323 - protein, 518 aa, Oryza sativa
  Clone ID: PAT_MRT4530_100764C.1.pep
MDAGAGAATALRKRQLTVRTMSSNGGNGFRVGDGGGGGSKGAAAATPPEPVSPSARLVEDFFIVVVIGIATPVNDPVARAGIAAQLARYPRFRSIQVTDEDGGNPRWVRTTVNLDDHIIYPELDMDAVAADPDKAVEDYVASLSTKPMDESRPLWEFHVLDFPTSEAAATTAIRVHHSLGDGMSLLTLLMACTRSAADPARLPAMPPLPTRAGAIYARPRPPASAGALAFAAWLWSFVALAWHTVVDVASFFATTMFLKDPHTLFKRVKHGEFQRKRIVHRGLSLDDVKLVKNAMNCTVNDVLVGITYSALSRYYYRKSGDMDTDEDIRLRSILLVNLRPTTSLHAYVDMINSGREDEVKWGNALGFIILPFFIGVHKDPLDYVRKAKKVVDRKKSSLEVVFTHLAAEVILKLFGLKAAAAIFHRMISHTTISFSNMIGPVEQVEFCGHPVVFIAPSGYGPPEALTVNFQSYVNTMMVNLAVDEAQFPDCHELLDDFSESLRQIKDAALSLGKHHTKA

SEQ ID NO: 103324 - protein, 53 aa, Oryza sativa
  unsure (1)..(53): unsure at all Xaa locations
  Clone ID: PAT_MRT4530_100765C.1.pep
GLGRGDREEFVFATNFGREATDAPDLMEEEAAAQXARLWLELEDDTVAAGRET

SEQ ID NO: 103325 - protein, 652 aa, Oryza sativa
  Clone ID: PAT_MRT4530_100766C.1.pep
MPVLRSAARRAREAQENPAAAAAAAPAPPPARRRRAARRKEPEVAVEAAPEAEEGREEEIEVADLGREGGGEKKMEGPDSGARSADKQAVEDEGNTTPVPDTVQVGSSPKYRVDKKLGKGGFGVVYVGRRMLANGPGASEVALKFEHRTSKGCNHGPPYEWQVMDMLGPSLWDVWNNNSHTMSVEMVACIAIEAISILEKMHSKGYVHGDVKPENFLLGPIGTPEEKRLFLVDLGLATKWRDASTGLHVDYDQRPDVFRGTVRYASVHAHLGRIGSRRDDLESLAYTLVFLLRGRLPWQGYQGENKGFLVCKKKMATSPESLCCFCPQPFREFVEYVVNLKFDEEPNYAKCIFLFDTCISLFDTVVGPNPDIRPINTDGAQKIRLVMPAKQRLIVLMETDEQPKKKIRMGMPATQWITVYNARRPMKQRYHYNVADSRLVQHIDKGNEDGLFISCITSCSNLWALIMDAGTGFTSQVYELSPHFLHKEWIMDQWERNYYITALAGANNGTNLVVMSKGTMYTQQSYKVSDVFPFKWINKKWRDGFYVTSMATAGSRWAVVMSRNAGFSDQVVELDFLYPSEGIHQRWDNGYRITATAATWDQAAFVLSVPRRKPTDETQETLRTSAFPSQHVKEKWSKNLYLASVCYGRTVS

SEQ ID NO: 103326 - protein, 42 aa, Oryza sativa
  Clone ID: PAT_MRT4530_100767C.1.pep
QVFHVLWNLNLSWYTTIQDYSSKHDEWFLRDEAGTISNRTIF

SEQ ID NO: 103327 - protein, 235 aa, Oryza sativa
  Clone ID: PAT_MRT4530_100768C.1.pep
LRIAARRAREAQENPAAAAAAAPAPPPARRRRAARRKEPEVAVEAAPEAEEGREEEIEVADLGREGGGEKKMEGPDSGARSADKQAVEDEGNTTPVPDTVQVGSSPKYRVDKKLGKGGFGQVYVGRRMLANGPGASEVALKFEHRTSKGCNHGPPYEWQVYNAIGGIHGVPRVHYKGRQGEYYVIVMDMLGPSLWDVWNNNSHTMSVEMVACIAIEAISILEKMHSKGYVLGCET

SEQ ID NO: 103328 - protein, 40 aa, Oryza sativa
  Clone ID: PAT_MRT4530_100769C.1.pep
LLALVSAQSAAAYVMLASSECDLAYPDYRAVVKIFNGYRS

SEQ ID NO: 103329 - protein, 80 aa, Oryza sativa
  Clone ID: PAT_MRT4530_10076C.1.pep
LQFTASLRFIFQASTPDQTRIVMMPHYDLCDDSVVTAEKTDQSMQSCNLDLGLRPQLLLPTIPYPWKATNDLLKGMAWKR

SEQ ID NO: 103330 - protein, 184 aa, Oryza sativa
  Clone ID: PAT_MRT4530_100770C.1.pep
GDGDEKAAQSLHPADHAARDDRAQWSRDPPRPNAGETLLEARGEPPPPPDPTTPRRRSDGVLRFVGRVRQQVRRALPQPPRHRKPATTILSSPPLRSSLPAFLPARSNLPLRPRAPRRKIWGENWQGETLLEARGEPPPPPDPTTPRRRSDGVLRFVGRVRQQVRRALPQPPRHRSICQLQCTS

SEQ ID NO: 103331 - protein, 59 aa, Oryza sativa
  Clone ID: PAT_MRT4530_100771C.1.pep
MAKALELTGEVVQDPVRLFWDAVETGDPLHGGGGKGRGRMYLKKSFLEGSRRDFANRDI

SEQ ID NO: 103332 - protein, 56 aa, Oryza sativa
  Clone ID: PAT_MRT4530_100772C.1.pep
RREFLGCSASLLLMGKTKIGINGFHPHREAGEQRGPPHPGYLAHLPSTIPRSPRRP

SEQ ID NO: 103333 - protein, 1445 aa, Oryza sativa
  unsure (1)..(1445): unsure at all Xaa locations
  Clone ID: PAT_MRT4530_100773C.1.pep
PPPATPLSGQSTPDKLTRSNFLLWKAQVLAVIRGARMEGYLTGATKAPSETITVVPEKEGGRPTXTVNPAYEAWLAADQQVLGYLLSSFSKEILTQVVTMEMAAQVWKGITEMISTRSRSQCLNTRLALSMTRKGDLSVSDYINKMKMLADEMTAAGKPMDDEELMGYVLAGLDDNYEPVVSSLVGKSEPVSISEVYSQLLSFESRGKLRQMTANHGYSSANAAKRGGKGGDFSRGGGGGGRGGPRNNNGRGERGGFSGRGRDGNNTGGCYNSKPRPVCQLCGKIGHVVTDCRHRFDDSFVPDPKMAAAASYHVDPNWYIDTGATDHITGELEKLATREKYNGKDQIYTASDEGMEIKHIGHSIIRTPTRNLHLNNFLHVPHAQKNLVSAHRLALDNHAFIEVHSRFFAIKDQVTKNLLLRGPRRNGLYLLPRSSLPSSKQALGVIKPSLKQWHSRLGHPSFSIVQKVINNNNLPCLGDLHESGFCDACXKAKSHQLPYPKSISVSSVPLELMFSDVWGPAPDFVGGRKYYVSFIDDFSKFTWVYLLKKKSEVFKKFLDLQQLVERLFDLKIISMQTDWGGEYEKLHSXFFFTKIGISHHVXCPHAHQQNGSAEHKHRHIVEVGLSLLAHASMPLKFXDEAFLAATYLINRTPSKVIQFATPLERLLNQKPNYSSLRTFGCACWPNLRPFNTRKLQFRSKQCVSLGYSNIHKGFKCLDVSTGRVYISRDVVFDEQIFPFSKLHSNASARLRAEINLLPHTLLNPTSPYIEVVMTVVXGNCPKYPATAIRRRSGASLPNPTSNNGEMGSAEPGAGPTSSPGVSTEDPDDAVLSPAPSASSGSPHPSGAGADAGSASDASSASAASHSGGDSSPVQPGAADSTSQGDSMQGDSMAADVQRQQSQQQSRPVTSXRGIRKEKVYTDDTLRYNFLTTSGEPHDLDEALSNHNWKNAMDLEYNALMNNKTWHLVPPCKGHNIIGCKWVYEIKRKSDGTLDRYKARLVAKGFKQRYGIDYVDTFSPVVKAAIIRTILSIAVSRGWSFRQLDVQNAFLHGHLEEEVYMAQPPGYEDKRKPNHVCKLDKALLYGLKQAPRAWYSRLSSKLCDIGFKLSKADTSLFFYSKGGVTVFVLIYVDDIIVASSTQNATDALLSDLKQDFALKDLGDLHYFLGVDVNKIRDGILLTQEKYASDLLKRAGMENCKSSTTPLSTVEKLSAYNGSVLGVNDATKYKSIVGALXYLTLSRPDISYAVNKVCQFLHTPTVQHWWMAVKRILRYIKSSIDLGLRITKSSSTLVSAFSDADWAGSMDDRRSTGGFSVFLGSNLISWSARKQATVSRSSTXAEYKAVANATAEVMWIQTLLKEIGIHSPQSACLWCDNLGATLSVNPVFHARTKHIEVDYHFVRERVARKQLEIKFISSGDQVADGFTKPLLIQQFQKFRYNLNLDKL

SEQ ID NO: 103334 - protein, 73 aa, Oryza sativa
  Clone ID: PAT_MRT4530_100774C.1.pep
TEGGGAVNRPVYFADNPNQSWAGAHPVYLDWFTWIRTPSCLTSRVKSSFGEPLRSPGSLLLMGDFGSGPDLLF

SEQ ID NO: 103335 - protein, 463 aa, Oryza sativa
  unsure (1)..(463): unsure at all Xaa locations
  Clone ID: PAT_MRT4530_100775C.1.pep
LVAREDPKTAFQTHFGHXEYKVMSFWLTWAPATCQGAINDILSPVFRKYALVFFDGILISSPDYNTHGQDLRIVLQLLLNHQWKVKLSKCSFTQQELTYMGHTIGFKGGSTDASKIQDILDWAAPTTLKKLRGFLXIVGYYRRFVRNFGILSKPLTNMLRKGVDFXWTVEAELAFQSLKQALVSAPVLALFDFQKTFVIETNASELGIGVVLSQDKYPIAYYVSKALGPRTXGLSTYEIMCLAILLGMDHWRYYLQYAEFTILTDHKSLMNLTDQRLHTSWXXKAYTKLLGLKLKFCXKKRIHNGXADALSRCDHGDTIDTWLEENYSICQQAKPDXYKYPGLFQPLLVASGACQTVTIDFIKGLPTSRRFNCIMVVVHKLSRYAHILALAHPFSAQDVAQLYMEGVFKLYGLPLAIISDRDKIFTSHFWEQLFXRQKVGTKLHLSTAYHPLYILLSSMQMLV

SEQ ID NO: 103336 - protein, 52 aa, Oryza sativa
  unsure (1)..(52): unsure at all Xaa locations
  Clone ID: PAT_MRT4530_100776C.1.pep
XQRDPXXVERXXCXARXRTXXVQLXXHPXSMGXRPXXTXTSDXXXRAXPRRX

SEQ ID NO: 103337 - protein, 66 aa, Oryza sativa
  unsure (1)..(66): unsure at all Xaa locations
  Clone ID: PAT_MRT4530_100777C.1.pep
SRMRKLARTIKXHCKQLMSKRRDCFFYGPSVCLXHLLLKGKKVYSAYALLQKINQIKLPSTPPKPQ

SEQ ID NO: 103338 - protein, 37 aa, Oryza sativa
  unsure (1)..(37): unsure at all Xaa locations
  Clone ID: PAT_MRT4530_100778C.1.pep
ASLVRGLRVTDQISSLASATIHMHNLINFFRRFYHRX

SEQ ID NO: 103339 - protein, 1035 aa, Oryza sativa
  Clone ID: PAT_MRT4530_100779C.1.pep
MAAVLLRKLLSPTPSSDASSAAAAPVWPHLSPAGQAALKQHLLSALQSDPPKPIAKKNAWAELLPFLFRAASGPEAPNLQESALLIFARLADYIAESLLDHLMTIHNLLASALAHPTSPDVRIAALSAAVNLVQCLPTNADRDKMQDLLPAMMRALTDCLNSGQEASAQEALELLVELAGAEPRFLRRQIADVVGAMLQIAEAAQLEDGTRHLAVEFVITLAEARERAPGMMRRLPQFVGRLFAVLMQMLLDVEDDPAWHTAETEDEDAGEGNNYGVAQECLDRLAIAIGGNAIVPIASELLPQYLSAPEWQKHHAALITLAQIAEGCAKVMLKNLEQVVSMILNGFQHPHARVRWAAINAIGQLSTDLGPDLQVNYHQQVLPALANAMDDFQNPRVQAHAASAILNFSENCTPEILTPYLDGIVTKLLVLLQNGKQMVQEGALTALASVADSSQEHFKKYYDAVMPYLKAILMNATDKSNRMLRAKSMECISLVGMAVGKDKFRDDAKQVMEVLMSLQGTTMENDDPITSYMLQAWARLCKCLGQDFLPYMNVVMPPLLQSAQLKPDVTITSAESDDDIESDDDSIETITLGDKRIGIRTSVLEEKATACNMLCCYADELKEGFFPWIDQVAPTLVPLLKFYFHEEVRRAAVAAMPELLRSAKLAVEKGLAQGRDESYVKQLSDYIIPALVEALHKEPETEMCSSMLDSLNECMQLSGRLLDENQVRAVSDEIKNVIIASATRKRERSERSKAEDFDADEGELLKEENEQEEEVFDQVGECLGTLIKTFKASFLPFFDELSVYITPMLGKDKTAEERRIAICIFDDIAEQCRESALKYYDTYLPFLLEASNDENSDVRQAAVYGVGVCAEFGGHVFRPLVGEALSKLNNVITHPEAKHADNIMAYDNAVSALGKICQFHRDGIDAAQVIPAWLGCLPIKDDKIEAKVVHDQLSSMVERSDADILGPHSQYLPKIVSIFAEVLCNGTELATDETTKRMVNLLRRFQQTLPPDFLASTFSSLQPQQQLLLQSILST

SEQ ID NO: 103340 - protein, 114 aa, Oryza sativa
  Clone ID: PAT_MRT4530_10077C.1.pep
MLHFIYRTFGRAVESEKQVARFAIAEYQLPRNGQNISNSINISYAILFQKNYFICDILGVRANFTLAYHICYISWGDHLAFKYGKLGGVAAVTENGMLMQPHCPAADLRLDTQY

SEQ ID NO: 103341 - protein, 602 aa, Oryza sativa
  Clone ID: PAT_MRT4530_100780C.1.pep
MATNPGLFTEWPWKKLGSFKYVLLAPWVAHGWYEVATKGWREVDLGYIAILPSLLLRMLHNQAWITISRLQNARGRRQIVRRGIEFDQVDRERNWDDQIILSGILLYLGALYVPGGQHLPLWRTDGAGLIALLHAGPVEFLYYWFHPVIHPFAELVAYELLFSIPLIACALTGTASIIAFEMYLIYIDFMNNMGHCNFELVPSWLFTWFPPLKYLMYTPSFHSLHHTQFRTNYSLFMPFYDYIYNTMDKSSDTLYENSLKNNEEEEAVDVVHLTHLTTLHSIYHMRPGFAEFASRPYVSRWYMRMMWPLSWLSMVLTWTYGSSFTVERNVMKKIRMQSWAIPRYSFHYGLDWEKEAINDLIEKAVCEADKNGAKVVSLGLLNQGKGLVIKAHTLNKSGEQYLLKYPKLGARIVDGTSLAAAVVVNSIPQGTDQVILAGNVSKVARAVAQALCKKNIKVTMTNKQDYHLLKPEIPETVADNLSFSKTGTAKVWLIGDGLDSAEQFRAQKGTLFIPYSQFPPKMVRKDSCSYSTTPAMAVPKTLQNVHSCENWLPRRVMSAWRIAGILHALEGWNEHECGDKVLDMDKVWSAAIMHGFCPVAQG

SEQ ID NO: 103342 - protein, 67 aa, Oryza sativa
  Clone ID: PAT_MRT4530_100781C.1.pep
KNLGKRNQLCPRQISPTTRLKWGQPPGLGDPWSNHAPTLQLQFQQGMYVWPLIGGGGGIEQENFQIN

SEQ ID NO: 103343 - protein, 622 aa, Oryza sativa
  unsure (1)..(622): unsure at all Xaa locations
  Clone ID: PAT_MRT4530_100782C.1.pep
MATNPGLFTEWPWKKLGSFKYVLLAPWVAHGWYEVATKGWREVDLGYIAILPSLLLRMLHNQAWITISRLQNARGRRQIVRRGIEFDQVDRERNWDDQIILSGILLYLGALYVPGGQHLPLWRTDGAGLIALLHAGPVEFLYYWFHRALHHHFLYTHYHSHHHSSIVTEPITSVIHPFAELVAYELLFSIPLIACALTGTASIIAFEMYLIYIDFMNNMGHCNFELVPSWLFTWFPPLKYLMYTPSFHSLHHTQFRTNYSLFMPFYDYIYNTMDKSSDTLYENSLKNNEEEEAVDVVHLTHLTTLHSIYHMRPGFAEFASRPYVSRWYMRMMWPLSWLSMVLTWTYGSSFTVERNVMKKIRMQSWAIPRYXSFHYGLDWEKEAINDLIEKAVCEADKNGAKVVSLGLLNQAHTLNKSGEQYLLKYPKLGARIVDGTSLAAAVVVNSIPQGTDQVILAGNVSKVARAVAQALCKKNIKVTMTNKQDYHLLKPEIPETVADNLSFSKTGTAKVWLIGDGLDSAEQFRAQKGTLFIPYSQFPPKMVRKDSCSYSTTPAMAVPKTLQNVHSCENWLPRRVMSAWRIAGILHALEGWNEHECGDKVLDMDKVWSAAIMHGFCPVAQG

SEQ ID NO: 103344 - protein, 49 aa, Oryza sativa
  Clone ID: PAT_MRT4530_100783C.1.pep
TFLEISLKNVLSLSKFTREACFPLMWWWSRGSTHQGSNPSVHRHGCMCS

SEQ ID NO: 103345 - protein, 246 aa, Oryza sativa
  Clone ID: PAT_MRT4530_100784C.1.pep
GDPSRLLSLSPPPSLLPASHYRTPTTRLGPTRELRGGANAVRCSAAVHEIPAPIPLKPERKYAPRGPNRTRTHCHVGPMRAWDPPVRVGNLSPTRVYSDVLALVSPPPSSLSLRDTVLSLPPPLLTMRGLMRCASTGACRVAPGAVAARASAAAVGGGTTKVPAGHVPVEVGAEGEETERFVVPAELLGRPPIAELLRRAAQEYGYARRGPIRIPCPAAAFRRLLGALTGGSGEGGLALSYFSVVV

SEQ ID NO: 103346 - protein, 365 aa, Oryza sativa
  unsure (1)..(365): unsure at all Xaa locations
  Clone ID: PAT_MRT4530_100785C.1.pep
MKCSRHPYEGGVGVCAPCLRDRLLALAAAQNEASSLPPPPEPVPVFPRSVSPYVCRRKSDASGARRRTPSLLFFRTPQVGPAYGGGGGGGGGAGGFEEGDIEFEIRRRSSKFSVLAALFGAHRQHGSEEKRSSKERKHRSWLAAIMAPWGPRKKDPAVASPPRHSCHVISNRGLSPAMRYADEGGEEGSSPAESPWRPSPMRKTPCRRRPGGATGAGGVSGFAVCISPLVRPSPARHHRGGGXRRTPPPSPAXLGPSPLHRLSSGSSLPHCRSWKLADGGRFRMRYSNRYEVLVNKSSKSSDWSSNRRRLALPFSQLQVFSQALTGAPLRSTGFIILIDAFKNAVVVAVAVVVVVLPKACDFTES

SEQ ID NO: 103347 - protein, 117 aa, Oryza sativa
  Clone ID: PAT_MRT4530_100786C.1.pep
MASACGLPFRGLTTLCQVGNAQMQVARSAKRGTAHTGTTRPMIGSRAERAAKTTRAKLSFGGLLPVRRAKSDRWRWMDSARSTRKPPILTDPTYTTQQNHTKLTAAAAACRTAVPVS

SEQ ID NO: 103348 - protein, 149 aa, Oryza sativa
  Clone ID: PAT_MRT4530_100787C.1.pep
HETLSLSLSLSLYLSLSLSVSLYLSLALASGQGSPQQGAHKRTRARIHVLRSHGGGAELAQSAHLYDIQRRCERHLAEYHPHDERITPGRQGDQVHHRRGEGLTGSRRRARKRTQPDKESILTRTSWDMRMDQSACHTEKDYDRKSLTK

SEQ ID NO: 103349 - protein, 163 aa, Oryza sativa
  unsure (1)..(163): unsure at all Xaa locations
  Clone ID: PAT_MRT4530_100788C.1.pep
ILPTHYILKRWTWDARHVTIRDTXNDIIENPKLEAMLHYKFLSHKFLTLAHQAASFPECCLLVDNALNILEDAQPDEMLSDARLKKKDVRTRRTRHQRNWLDKNHKGENRANKNIKGMLKNEPRFSAKEEIGPCKKVLEIKLGLXKWIEGEEWREGDTFTNLL

SEQ ID NO: 103350 - protein, 122 aa, Oryza sativa
  unsure (1)..(122): unsure at all Xaa locations
  Clone ID: PAT_MRT4530_100789C.1.pep
DWLIPWLEQARKKYPQAQLIGPIPRDTMWVGPGKAWLTDGQTTXVSDAYLALYHDQGLIPVKLLAFDQAINTTIGLPFVRTSPDHGTAFDIAGQGIARADSLIAAIKLAAELVEQRCRPRAQ

SEQ ID NO: 103351 - protein, 59 aa, Oryza sativa
  Clone ID: PAT_MRT4530_10078C.1.pep
SLMTIRVDFFVVALMTAMVAIYYAQLNESEMRFRHRQKTLGCARLNRWNRTERCSTRSS

SEQ ID NO: 103352 - protein, 218 aa, Oryza sativa
  Clone ID: PAT_MRT4530_100790C.1.pep
MVKGKGRAGRKKVEIKRIEKKDARDVCFSKRRQTLFNKAGELSLLCNANIAAVVISPAGRGFSFAHPSVDDVADRLASMAMGIPNNHSLGGGYHDSGEVTNIAQQQKIEYVELQKSLEKSEKKKRVQEAMEKERAGHLMQSLTSEVNLLGQDELEELHNKLSALPYTSIAKFYQVLQDAKGTRMPLPQPHIEIACQSQFLFEEQAVTPANADFPGSST

SEQ ID NO: 103353 - protein, 370 aa, Oryza sativa
  Clone ID: PAT_MRT4530_100791C.1.pep
MGSSDLSSEMRRTVLGLTLWVWIAIGVVALLVAILLMICIWMASRRKTKRTMDNLRQTQIPIFSKEIPVDRVGGRSLAQTMHEREQPSFPPQDKHTNREPGKTLGHMALSKSSEPDNMSQGSSVCNVDRAGSVHSGEDGSTGHGRKPYSPAAFVSASPLVGLPEFSHLGWGHWFTLRDLELATNRFSRENVLGEGGYGVVYRGRLVNGTEVAIKKIFNNMGQAEKEFRVEVEAIGHVRHKNLVRLLGYCVEGVNRMLVYEFVNNGNLEQWLHGAMRQHGVFSWENRMKVVIGTAKALAYLHEAIEPKVVHRDIKSSNILIDEEFNGKVSDFGLAKNARPATSTTFPFTPSSLSLRLGRYFHRHCWHRFFA

SEQ ID NO: 103354 - protein, 169 aa, Oryza sativa
  unsure (1)..(169): unsure at all Xaa locations
  Clone ID: PAT_MRT4530_100792C.1.pep
IPRHLLLLDVAYYSISELQRPSAEESFFLVLQGLVSPHXGINMYTQGHCKSSPRSIQFGASPXFYLFYFILSSGWTWHLTRGCIGVRSPVKGXVQCSASPGNCLVYVGVVQGCISIXISWIAPVWMIYLPNYLSYVLVNIVLVSQFSSIGCLSLXGFCRYRLNCFTILD

SEQ ID NO: 103355 - protein, 293 aa, Oryza sativa
  Clone ID: PAT_MRT4530_100793C.1.pep
MATATATAAAAAPAAVPALVSPLSRRAFFPLPRRAGPKSLRVFASAARRRGLVVVAADAAAAAGGAEFSDEENPYEILGITPLDSFDHMKLAYKRKHKEADENGDQYYLSKLEKAYDTVMMQQLQYRKKGVTYGSVQVSKDIKYADDQPIVPWGPRSSKSTVKDMRINLGISAAIVVWIAIMGNADWKPLQFLCFAFFYRILQKLRATEPPITPIYNEYGEVEGRGIRMAKRVVRALGLIFGCVFAASLGYTAAVNVIEFSWQYTPRIVYYYQELIVTAATAALLYITASYYR

SEQ ID NO: 103356 - protein, 148 aa, Oryza sativa
  unsure (1)..(148): unsure at all Xaa locations
  Clone ID: PAT_MRT4530_100794C.1.pep
MSMACTKVWRSTMYTPRRLKRTTPASRVSSTAMAAANGDASHGANGGIQIQSKEMKTAIHSNDSPKTLLKSESLHEYMLNTMVYPRENEFMRELRLITSEHTYGFMSSPPEEGQLLSLLLNLTGAKNTIEVGVFTGCSXLRTGLAIPD

SEQ ID NO: 103357 - protein, 74 aa, Oryza sativa
  Clone ID: PAT_MRT4530_100795C.1.pep
TSRSVLPGRLSPSAVHRRLQADRQRHSSDRSQSAPGHLIADDGQCPASPAEVVRRAYRIRPAATHRELVRWSPE

SEQ ID NO: 103358 - protein, 115 aa, Oryza sativa
  unsure (1)..(115): unsure at all Xaa locations
  Clone ID: PAT_MRT4530_100796C.1.pep
MAAANGDASHGANGGIQIQSKEMKTAIHSNDSPKTLLKSESLHEYMLNTMVYPRENEFMRELRLITSEHTYGFMSSPPEKGQLLSLLLNLTGAKTPXRVGVFTGCSVLATALAIP

SEQ ID NO: 103359 - protein, 398 aa, Oryza sativa
  Clone ID: PAT_MRT4530_100797C.1.pep
MGAAISCCGCPPRRRAGAADDAAAGLTDDILAEIFLRLPPHPACLRRVSLVSRRFRRVVTSRRFLRRFSDLHGGAPGAPLVGFFSNHNHGPWADTRFIPVGVDGTGDSRRSRCRSRRATAARNPGGVLALGDDAEWHVIGCRGGRVLLLSPTRLRLLVLEPMLGRRQYIPAPPAPEYRPAYFSNAAVVSAAGGHDELRLRPHLFRVVFVSSNAATKRSTAFVYNSATFRWTKAAATEMSSVIDGRPSVLIGQTLYWHLISHGLVAFNLETHELHEILVPADAFDDVHDANLSIVVPRSGGGGVGLAAVSGYILQLWTLRDYTHGASTWDLRNIVVLDALLPLRNARLPPPPQLPASAKPMPLVWLMALDEDENVGWKCSHDYVILLLPGKSGNGKVMT

SEQ ID NO: 103360 - protein, 118 aa, Oryza sativa
  unsure (1)..(118): unsure at all Xaa locations
  Clone ID: PAT_MRT4530_100798C.1.pep
PGTSFQLWTLRDYTXHGASTWDLRNIVVLDALLPLRNARLPPPPQLPASAKPMPLVWLMALDEDENVGYVWTAAGVFAVQLDTMNYHKVLGPVCRGMQFVFPYKSFFLPQGGSAAMIM

SEQ ID NO: 103361 - protein, 417 aa, Oryza sativa
  Clone ID: PAT_MRT4530_100799C.1.pep
MPVAAAAQKALLAQPVLILIILIVSSCPCVSSLAPSRTHNTSEADRQALLCLRSQFSDPLGALDSWRKESLAFCDWHGVTCSNQGAARVVALRLKSLSLTGQIPPCIADLSFLTTIYMPDNQISGHIPPEIGRLTQLRNLNLGMNSITGMIPDTISSCTHLEVIDMWSNNIEGEIPSNLANCSLLQEIALSHNNLNGTIPPGIGSLPNLKYLLLANNKLVGSIPRSLGSRTSLSMVVLAYNSLTGSIPPILANCSSLRYLDLSQNKLGGVIPSALFNSSSLLSLDLSSNNFIRWSIPSAPLISAPILHVILTNNTIFGGIPAALGNLSSLSSLLVAQNNLQGNIPDSITKIPYLQELDLAYNNLTGTVPPSLYTISTLTYLGLGVNNLFGRIPTNIGYTLPNIETLILEGNHFDGPL

SEQ ID NO: 103362 - protein, 391 aa, Oryza sativa
  Clone ID: PAT_MRT4530_10079C.1.pep
MASKNPTKTLLLLLLLVFFLSLACSQPLHSEPMSTTTTATQPAPPPPPPQSKIPHAEAGGAARLRRIVLGVLFGSLTGFLLSLAFLYAIRVAILHAKYAPAIVRGPVSFTPQISPKNLHSALPSAQPLAHGPNGKYYKLVLDNDVTVAVKRLEASRPEASPSSMPNVSKSDMRRVQRQLELLARVRHQNVMGLKAYVREADRLSLAYDFVPGGSLEDVMKRVRSLQVNLNWDARNRIAIGVAKGLSLKPSNVMLDEDFEPRLADCGVSRLIASGSADPELASSLYSAPECYQSSRYTDKSDVYSFGMILGVLLTGRDPTDHFFSGETGRGGLARWLRHMQQSGDAKDALDSSVLGEEGEEDEMAKAAERRNSTVKGRQSGEGHCRIAIDME

SEQ ID NO: 103363 - protein, 231 aa, Oryza sativa
  Clone ID: PAT_MRT4530_1007C.1.pep
MRLAKIPIDNDCIQLYGYIAVRDDLDKLLNYVVNYSRDNPIIMRQGDLIEMTGPKRGISMCCSVLLEFDMRIKKGEQEKDDLQLIDGAIDYIGLITATFPFTKRINGDCGAVDITLARVYWAVEATIQVIISDVQSGFNLYLSSLCFVSDVWKEIQLFNGPIGKSQTTYVIIIGGSTYQCSSSTETTDGQRDYYRQTGKRNKKSRLYFGDRVAVQNDFLYEYLYEYGGSTL

SEQ ID NO: 103364 - protein, 66 aa, Oryza sativa
  Clone ID: PAT_MRT4530_100800C.1.pep
NALNLLVGNLNYSMELIKSSNVIGTSRRSLKSHLFGYESKLTKANIYSQINPTQPNPIPFVARCGW

SEQ ID NO: 103365 - protein, 82 aa, Oryza sativa
  Clone ID: PAT_MRT4530_100801C.1.pep
REHYLHSPRTLSQKLVKLTWVNRSPMPHKKRGSAGFSVCSFTHNRGDRFIRSFHFAPKDVCLGEGGPPNAGSHCRIGLRKGA

SEQ ID NO: 103366 - protein, 132 aa, Oryza sativa
  unsure (1)..(132): unsure at all Xaa locations
  Clone ID: PAT_MRT4530_100802C.1.pep
FXXXYSPXVLYQXXXHKAYRRSSPXFPFHLQXXNHXSSSLSVKMALNVLPXTCXSFXSVRKLRNLAGXVGPCENARKXTYXXPXXGIVXMRNLPNRMIPXAXXXDPXXQEEXRPXMDXSSLSLRXXTAEXDS

SEQ ID NO: 103367 - protein, 33 aa, Oryza sativa
  Clone ID: PAT_MRT4530_100803C.1.pep
MAARILFRSATDVVSAVNAHLRSRRSTASKNTL

SEQ ID NO: 103368 - protein, 579 aa, Oryza sativa
  Clone ID: PAT_MRT4530_100804C.1.pep
MGTCVERELALDLHSLGLCPAQLGELDGPFRRCGRWLSLCLLTRRLVPMGSRGFSSLNDALISLLPKKDEAVDVQDFRPISLIHSFGKLFSKILASRLSPLLDGLVEANQSAFVKGRSLHDNFRYVQLAARALHARRTPRLLLKVDIAKAFDTVSWPFLLEVLAHLGFSQCWRDWISLIISASSSRVLINGVPGPRFLHRRGLRQGDPLSPMLFILVMEVLNAMLRKASDSGGFLPLNDRALRHRASLYADDLVLFLSPVRQDLEFIQGILSVFGAASGLRTNFAKCSITPIRSSDEDLELVHSCFPCSISDFPCTYLGIPLSVRKLPKAALQPLVDRVAHRLPPWKGRLTTLAGRSMLVQSVLSSIPVHVSMAIGLPAWVVKAIDKKRRAFLWTGIPNLRLAGFALRVRWLWLQRSGHPYWDGLKAPVEQSVSDMFEASTFFVPEDGESMLFWTDHWIDGGHSVASLAPDLLFAVPQRLRSRTVASGLANNSWVSDIRGALTVPVISQFLLIWDAALRIQLLPGVRDRLVWRWTSDQRYSARSAYQAFFFGQHSFACADLLWHAKGPAKCKFFLWFAF

SEQ ID NO: 103369 - protein, 109 aa, Oryza sativa
  Clone ID: PAT_MRT4530_100805C.1.pep
CYIPSSIFYIIYDDQGCLSSSASVSGLRGSIPLVSWFIPYSMNILPFTSGHSSVLLASGRHVILVFSPRPRGHGSGRFGPSTVLSGDPRLSPLSRGQPLVVSPSRTSFT

SEQ ID NO: 103370 - protein, 335 aa, Oryza sativa
  Clone ID: PAT_MRT4530_100806C.1.pep
MCLNYVHLEDLEFIQGILSVFGAASGLRTNFAKCSITPIRCSDEDLELVHSCFPCSISDFPCTYLGIPLSVRKLPKAALQPLVDRVAHRLPPSKGRLTTLAGGSVLVQSVLSSIPVHVSMAIGLPAWVVKAIDKKRRVFLWTGTDAVHGGQCQLSPGVRDRLVWCWTSDQRYSARSAYQAFFFGQHSFACADLLWHAKGPAKCKFFLWFAFQRRCWTADLLLKRGLDSHSASPFCGQELETANHILLDCIFARQVWLRVLSPLGWTTLSPPRGSCLQDWWPSSRVGLPGHLRASFDSMVLLVSWQLWKERNSRVFDSALSSVSEVLESILSEGHL

SEQ ID NO: 103371 - protein, 114 aa, Oryza sativa
  unsure (1)..(114): unsure at all Xaa locations
  Clone ID: PAT_MRT4530_100807C.1.pep
VASPSVPFTINLLSKVHHRSLNXYYCVILVPKLANRSFRFSNLFDCVIPVPKLADHSFRSSNLFSCVTPVPKQDGLKTLYQKFRDQDDTVEQVXGPERSICEFRDRDDITVQIY

SEQ ID NO: 103372 - protein, 600 aa, Oryza sativa
  unsure (1)..(600): unsure at all Xaa locations
  Clone ID: PAT_MRT4530_100808C.1.pep
MGTCVERELALDLHSLGLCLVQLGELDCPFSEEEVWAVVKSLPSDKAPGPDGFTGQFYKTCWPVIKSVVLVALNSLFLANGQGFSSLNDALISLLPKKDEAVDVRDFRPISLIHSFGKLFSKIMASRLSPLLDGLVEANQSVFVXRSLHDNFCYVQLVARALHARRTPRLLLKMDIAKAFDTXSSSRVLINGVSGPRFLHRRGLRQGDPLSPMLFILVMEVLNAMLCKASDSGGFLPLNDRTLRHRVSLYADDLVLFLSPVQQDLEFIQGILSVFGAASGLRTNFAKCSITPIRCSDEDLELVHSCFPCSISNFPCTYLGIPLSVRKLPKAALQPLVDRVAHRLPPWKGRLTTLAGRSVLVQSVLSSIPVHVSMAIGLPAWVVKAIDKKRRAFLWTGTDSVHGGQCRVSWTNVCRPKAFGGLGIPNLRLAGFALRVRWLWLQHSGHPYWDGLKAPASTFFVPGDGESMLFWTDNWIDGGRSVASLAPDLLFAVPQRLRSRTVAFGLANNSWVSDIRGALTVPVISQFLLIWDAALRIELLSGVRDRLVWRWTSDQRYSARSAYQAFFFGQHSFACADLLWHAKGPAKCKFFLWFAFQRCC

SEQ ID NO: 103373 - protein, 250 aa, Oryza sativa
  Clone ID: PAT_MRT4530_100809C.1.pep
SCFPCSISDFPCTYLGIPLSIRKLPKATLQPLVDRVAHRLPPWKGRLTTLASRSVLAIDKKQRAFLWAGTDLVHGGQCRVSWTNGSPCAFAGFGFSVPGIPIWDVLKASVERSVSNMFEASTFFVPGDAPPFAHGYFWPGEQLLVYQAFFFGQHSFAYADLLWHAKGPAKCMFFLWFAFQRCCWTADLLLKRGLDSHSACPFCGQELETANHILLDCVFARQVWLRVLSPLGWTALSPPRGSWVCLVTFF

SEQ ID NO: 103374 - protein, 77 aa, Oryza sativa
  Clone ID: PAT_MRT4530_10080C.1.pep
PRVRPRVGLAAFIKKVTIEYSLLTLVKRQLSIVKRNYNLATRATGTCEVLLLPLAYLQRTTTNSAPLGCCSCYANKH

SEQ ID NO: 103375 - protein, 83 aa, Oryza sativa
  Clone ID: PAT_MRT4530_100810C.1.pep
YGPPSSFFFFFFFFFFFFFFFFFFFFRITRFSSINIYQENVTVYSLTLKFSTSFALVQKHSSPVMFLMINVSLMISNLLHMNG

SEQ ID NO: 103376 - protein, 133 aa, Oryza sativa
  unsure (1)..(133): unsure at all Xaa locations
  Clone ID: PAT_MRT4530_100811C.1.pep
MLHLLHKRGIDSHSAXCPFCAXELETANHILLDCVFAQQTXHRLLSPHGWTALSPSHGSLLLDWWLSSRXPEYLRSSFNSLVLLVSLAAXKEQNSRVFDSALSSVPVVIDSIHSEGCPCSATGIAVSGDLLRA

SEQ ID NO: 103377 - protein, 121 aa, Oryza sativa
  unsure (1)..(121): unsure at all Xaa locations
  Clone ID: PAT_MRT4530_100812C.1.pep
WRSFPSSPLSPLARRSLSPFPSHLACTARRWRGAEETTVIVVPPPPPPPSPRRPRWPSLPLRDGTLSTLKIRRRXGFPRADPVPTASCGGSNGNVEIADPASPMAPRGRIWWRRRCWWLSR

SEQ ID NO: 103378 - protein, 58 aa, Oryza sativa
  Clone ID: PAT_MRT4530_100813C.1.pep
PFSVGCSQSSCSAFVMQGPPRPFQVPSCRVSPNGLHVVLCCVNFIFGRLGLSVLWLRI

SEQ ID NO: 103379 - protein, 552 aa, Oryza sativa
  Clone ID: PAT_MRT4530_100814C.1.pep
MELKPQVASRPHAPKKWQLPSHSQFEPRIIVHLVHKPIQSDVTTPHKYATYKVVSREPGPRCFFRGKVHEASWLRASPYYKRGTRTRRATRFPHLSDSELRRRLCAAAAAALVVCFPNSLIPQRAITMGLHKEASSSSSRLDAAPLLPHHGHGGGGAGHHLSSQPKTFANVFIAVVGSGVLGLPYTFSRTGWVAGSVLLLAVAALTFHCMMLLVACRRRLAYDHPKIASFGDLGATVCGPAGRHVVDAMLVLSQASFCVGYLIFISNTMAHLYPVGDSSPSSPLLTAKAIFIWVMLPFQLGLNSIKTLTLLAPLSIFADVVDLGAMGVVLGQDVSTWLANKPPVFASAGPTEILYGLGVAVYAFEGIGMVLPLEAEAADKRKFGGTLALSMAFIAVMYGLFGAMGYLAFGAATRDIITTNLGTGWLSVTVQLGLCINLFFTMPVMMNPVYEVAERLLCRKRYAWWLRWLLVMVVGLMAMLVPNFADFLSLVGSSVCVLLGFVLPAAFHLKVFGAEVGWPGLAGDVAVIVVGTALAVSGTWTSLAQIFSSSDV

SEQ ID NO: 103380 - protein, 55 aa, Oryza sativa
  Clone ID: PAT_MRT4530_100815C.1.pep
YSLFLNSEFQLFLKCISIWTLVSSSNIPYFFNSEFQLFLNCISIWTLFFLFLRLI

SEQ ID NO: 103381 - protein, 993 aa, Oryza sativa
  Clone ID: PAT_MRT4530_100816C.1.pep
MAGDWACHRLSFLCQFKALSWFLRLLPGKSPLALPLASDCSLGKSPLALGTLLLSALDIWIKYPLEVSGITSLFPATIYRGNSPLALALYTHWFYHNIDLSERLNTRKSRTIQGLGKMDLYAIDSDTESYAETSDSEEDQEECELTYCGHAQNILSSLDESIGKIDNFLSFERGFLHGDIVCSAADPSGQLGRVVGVDMLVDLETSSGDIIKHVNSKKLSRVRSFVSGDCVVMGPWIGRVIRAFDLVTVVFSDGARCEMLLRDSEVLKPIPPILFEDAPYFYYPGQRVRIVHPSISKSGTWLCGSWKASRDEGVVSHVDVGLVHVNWITSVTNVWGGQSSSPPNFQDPKKLTLLSCFPYANWQLGDWCTLSDCEGSLWENSDKSCFMSMTWKSSSDTQTAIGTYGSDYSQTYVVAKTKSSVDVLWQDGSTSLGLEPQSLVPVSTLGDHDFWPGQFILEKLTVEDNGRCQRTGIVTSVDALERTVKVKWAVSVDSDTVSYGDGLTEETVSAYELVLHPDFSFFTGEVIIRSAVNIENSEANLTNGTVAVSRESLDTSSAFLSCIGNVLGYNDEGLEVQWASGAISRVQHFEIIALDRILDDSLESMIEEHTTDDLVDMAEQEKMHLEDTKSALEESAGDCTGSLRKATAFLFSKTAFNFLTNVASSLFGAHDSTSSSSVNADSQYQIVTTAELQPSAEDISEEKQTMELITQFEKPTLASENAMTKGFDVVTDCSDHHFVKEIGHENVKRGWVKKIQQEWSILQNDLPDGIHVRVYEERMDLLRACLVGAAGTPYHDNLFFFDIFFPPDYPHEPPSVHYHSGGLRLNPNLYESGKVCLSLLKTWAGTGSEVWDPENSTVLQLLLSLQALVLNEKPYFNEAGYDKFMGKADGEKNSITYNENAFLLSCKSMTYILHKPPKHFENFVKEHFTCCAPHILDACKAYLGGDLVGHARDSAYISDDGCKNSSTGFKIMLAKLLPKLVTTFSEAGIPCSP

SEQ ID NO: 103382 - protein, 58 aa, Oryza sativa
  Clone ID: PAT_MRT4530_100817C.1.pep
MVYFPLLLDLYGFSTRSPPHDGRREQEEMLRKHLKEQKSEVEEPILEDDDDDDVDDED

SEQ ID NO: 103383 - protein, 144 aa, Oryza sativa
  Clone ID: PAT_MRT4530_100818C.1.pep
SETTTPHIVLFEIPASRPAGDEEDGVLLLLGGPEEEGPEQQAGGGDLLAVRRVRERGGHGDGDALLLPAHRAQGHVARHHLHLLRRHAQVLPPLQALRQLALRYLRSPAAGGDGRREREEEATYLLRTSLCSLRGVLVALGLGY

SEQ ID NO: 103384 - protein, 120 aa, Oryza sativa
  unsure (1)..(120): unsure at all Xaa locations
  Clone ID: PAT_MRT4530_100819C.1.pep
YAKPSTVLSSLHIMVGLVTRITNLXAENGHKIEDNRHQNRRSINRTMLRIRLINEWAKKAKMTRPIGPKFTSLHLGAKEEATCRNWARPDQPMVRPNPPQLRSIQVLVGRLGLIPNDGWR

SEQ ID NO: 103385 - protein, 92 aa, Oryza sativa
  Clone ID: PAT_MRT4530_10081C.1.pep
LSVPMIEPSPCAVQLDPAAGAPDLATAVPDPRPPSPSSAPPSARLTALRASPRLPRASDDASPRYGPARHPGSPHGCSAVNSGGGEAERREE

SEQ ID NO: 103386 - protein, 71 aa, Oryza sativa
  Clone ID: PAT_MRT4530_100820C.1.pep
PLNEHGFDFGIPWIYDVGRIMTESLICKKNSWVHIALNTVIPDINYSELRNFRKKNAATILACLHNMLISS

SEQ ID NO: 103387 - protein, 40 aa, Oryza sativa
  Clone ID: PAT_MRT4530_100821C.1.pep
WGFFFFFLPAEGEARTLSGGALGTKSGFTKNGVGPRTRPY

SEQ ID NO: 103388 - protein, 124 aa, Oryza sativa
  Clone ID: PAT_MRT4530_100822C.1.pep
MSLWYSPMATATEEVAAAAAAAGEAPPSPPPAVVEEVKEAVEAPKPEEAPKAEEGEEKMAVGEKEKEMANREMEQRKSLALTLEILETSVLPLRRVVNKTLNSLLSSLFSSNRTKVKTTFEGIN

SEQ ID NO: 103389 - protein, 87 aa, Oryza sativa
  Clone ID: PAT_MRT4530_100823C.1.pep
MDLNFRGEGDWHLSIRAGGQRERAAAGGEARAVAAGEGSEVERENPGELKQSAIRVIGGGGGEVVVSGKGGGARSRRGGGSPESADA

SEQ ID NO: 103390 - protein, 142 aa, Oryza sativa
  Clone ID: PAT_MRT4530_100824C.1.pep
MAEQLGGVGSPQLSLSSCSSFLSISSAGTSAADGAPHLSLGVGGAEELDLLLQVGIGGGGGGGGDEEEEERKTIRMMKNRESALRSRARKRAYVQELEKEVRRLVNENLKLKRHCKQLKTEMAALIQQPTNKQSSHRRSSST

SEQ ID NO: 103391 - protein, 94 aa, Oryza sativa
  Clone ID: PAT_MRT4530_100825C.1.pep
SWHTQIGYLVQSAKDCSLVGLRLLSRRWTPVCSFTYLTLVGSGGQIKGIYWFRKILALAPTFWRTRVNFHVTLLFIQLFLFQRKTASLPLSLIA

SEQ ID NO: 103392 - protein, 107 aa, Oryza sativa
  unsure (1)..(107): unsure at all Xaa locations
  Clone ID: PAT_MRT4530_100826C.1.pep
MVGVTTRAVAAAVLEVVVVVAAAELEGAEPPASERLALMELLHTTPYERTLGWNXSTRWCGWVTVTCHPRKPTVVHVRLPXTTLYGAIPAGTLGRLTNLQVLSLRST

SEQ ID NO: 103393 - protein, 163 aa, Oryza sativa
  Clone ID: PAT_MRT4530_100827C.1.pep
VFGRSPSPQSTGVAPPSRFRRHRHCLCRFTSRLDDAGLLPQSQPPPLASPLESGQTPRSHVSPSFPVPAASSRPRSQSPEASIGRSSRAAPTPRARPARSTSAQASSSQSPAPFVLPSPPSLPQVIPAVAERRWMGKMVADPRLDAGEEVADQPSFIPSHRRN

SEQ ID NO: 103394 - protein, 357 aa, Oryza sativa
  unsure (1)..(357): unsure at all Xaa locations
  Clone ID: PAT_MRT4530_100828C.1.pep
MSSLRGLGNIARRWRELNGVSYWKGLLDPLDVDLRNNIINYGELSQAAYTGLNRERRSRYAGSCLFSRKDFLSRVDVSNPNLYVITKFIYAMCTVSLPDAFMIKSWSKAAWSKQSNWMGFVAVATDEEIVGPGSAXDPCVHGGWLSVYTXADPESQYNKQSARYQVLNEIKRLQDMYEHEETSITITGHSLGAALATINATDIVSNGYNKSCPVSAFVFGSPRVGNPDFQKAFDSAPDLRLLRIRNSPDVVPNWPKLGYSDAGTELMIDTGKSPYLKAPGNPLTWHDMECYMHGVAGTQGSNGGFKLEIDRDIALVNKHEDALKNEYAIPSSWWVVQNKGMVKGTDGRWHLADHEDV

SEQ ID NO: 103395 - protein, 69 aa, Oryza sativa
  Clone ID: PAT_MRT4530_100829C.1.pep
NFFRWCKHAGFFFEPEKQSPNTIPVSGPGNGNLLNLKQHPSKHVQPQFTTLLYQQGYLLGHTMLAQQND

SEQ ID NO: 103396 - protein, 1334 aa, Oryza sativa
  unsure (1)..(1334): unsure at all Xaa locations
  Clone ID: PAT_MRT4530_10082C.1.pep
MGAATADEDFATPPPPARAPGGRVYQVGGVPVEFPYKPYGTQLAFMGRVIATLDRARRQGRSHALLESPTGTGKSLSLLCSALAWQRHYXRTHAQITQVVREYRKTSYRVRMAILVTIAPISICFLLYXCVASRKHYCVNKNVCMSGNIDELCKSLLDDSAQGCPEYKNAQKLSRHPSLQIGGCYEVHDIEDLVRVGRKVKGCPYFAAQTMAEAAQLVFCPYNYLISPIVRRAMDIDIRGSIIVLDEAHNIEDIARDAGSFDVDEESLLFLRQELEGLVTDEAVAKIYEPLHEVIQGLNGWIDEQGNNLQKNEFEHPASFWTGEEAMKELKYAGITPVNFPVLQECATKAIKAASDAESEGVHLSGGSAMTLESLFSSLSYFFAENGRHSNDYQLALQRFAKREGANVMSYDLIICNSVTSFIGWKCVMSLWCLNPAVVFRDIADLTLSVILTSGTLSPMGSFASELGVQFEACMEAPHVINADSQVFATVLSSGPTGRRLNASYRTANEYSFQDELGATLEEICRVVPGGALVFFPSYNLLEKLQRRWSQTEPRGSTEELEPVLKGYYNAILGKAPPKKGRGGAKQIVKNRVTKDSSQESAKGGAAFLAVCRGKVSEGIDFSDDKARVVVSFVFSSYVFYAPERINDVQVKLKKRYNDSYKSSKDLLSGNEWYCHQAFRALNQAAGRCIRHKFDYGGIILIDERYQEERNIVYISKWLRNSIRNCGTFQETMDGLTRFFQNAEEQIKIKAQGVSPKDRLDACVLPSQGDKRKLPWPEPNFSNQTVLQNNKDVKSESHIDGAGVDRMKLSDTSSESWHLSSKHSGLVKKQISPEPENVPMACQLPPSYKVQYNLEGEADNGTNYEVNINFIDLEECDTKPRYVKLTIFNPSEHITQQSTVMEETYAEVPIASPSNRNGENASTVMNEGDPVLDLPISLSAANRNISCVSTSAATPERSGSISHLEHESWTNRSVNSHCQKRRKLSSPMSCCTYTERSCSPSKPYLHGGCDVSMLPGDLRTDGMCCKSMKMSRCENVKVERNSKLAEFPSRESTQEKLFICCARCKTALGLQEDGFLVSCSSSLSSKFYLTYLWRHGPSADILPGKDFLASPPLKIKVMVCNVSSVNKMMLGNLSNEGSAHNSSFWSEKDGCVYKPVTCQTCSCKNACVTTLGAQVVATDSSNQQFCDKVILFDDLLHVKHGPSKDQALSAPIGTVKPISPPPVIDLESFAYKPLKKDPVPVNTRRSKFFVVYVSSLGYLAQPNPGMVHNMKDSSAICSERTGKSSTLHKRMGCQLLWVLFVLFSPFCKEIWACLFWVNLFMDEISMFLVLLLKG

SEQ ID NO: 103397 - protein, 135 aa, Oryza sativa
  Clone ID: PAT_MRT4530_100830C.1.pep
MWKRGAIDNLESTEAPVNVFDRVADNRSPLKPSIQPPARPCQGGKGLGAWSWTLVSKVAAVEQTRHRAEGDPHDGQVGVLGDRGHAQAAGRTQHYELSPHEHYELNTRNIPGSQLSQFLSDRSKNCTKTRTYSIN

SEQ ID NO: 103398 - protein, 106 aa, Oryza sativa
  Clone ID: PAT_MRT4530_100831C.1.pep
MEIQHELDSDRDPNRSPTGLGGPSDGSYIFVRGVTGGGIASPWEYGEENARGGEGRAGAIDYFLYTDARYFARVPSTSQCFLPLRRASSGNAQFCRKNYPSKHMLN

SEQ ID NO: 103399 - protein, 81 aa, Oryza sativa
  Clone ID: PAT_MRT4530_100832C.1.pep
SLKSIDTLMDTFVKKDREILDYSTPDRIMSNGHWNFVYPFLSLLPCVCRWFNYQHRMLLRIKANKAKNFSSCISMPYKGKS

SEQ ID NO: 103400 - protein, 103 aa, Oryza sativa
  Clone ID: PAT_MRT4530_100833C.1.pep
KRETFHNNFFKTFLLVFFDHPAIKFCFIGGPTPRQEKVGGIFFLVLLNTAFTFFEPSGPYVVVLHPFTSMSGDLIPLTLSLALGFTRDFRSGSWGRSSFPFGG

SEQ ID NO: 103401 - protein, 116 aa, Oryza sativa
  Clone ID: PAT_MRT4530_100834C.1.pep
DKRNTLMDTFVKKDREILDYSTPDRIMSNGHWNFVYPSILQNNSDLLAKMRRNRFAIPLQYHQEQAKEPISCFGISIEIPFMGVLRRNTIVAYFDNPRYKKDKKVLRIVKFRYRTT

SEQ ID NO: 103402 - protein, 55 aa, Oryza sativa
  Clone ID: PAT_MRT4530_100835C.1.pep
MGANFPGFIGVVLSVDLPAQSSLVFEDAHRGRVYFVNLSRICRPSPAQSLKMLIG

SEQ ID NO: 103403 - protein, 107 aa, Oryza sativa
  Clone ID: PAT_MRT4530_100836C.1.pep
MDSGGNSVNSAVESVAESPAPASPASNPTAPAAVTKGRGLRRWRRIPREHHEEGSPGSGGGGGGGGSVAAAAADEDLAQLHKRRHPLGADAPKGKEEAAFLSFSFSP

SEQ ID NO: 103404 - protein, 81 aa, Oryza sativa
  Clone ID: PAT_MRT4530_100837C.1.pep
NSSLWSSGHVGAQAERQRTRSKRHRRKCPEETRATSPSSAEHSISLTTHGTASGRAIDRWRHRAMTCHQRTDDIWTAGAFH

SEQ ID NO: 103405 - protein, 179 aa, Oryza sativa
  unsure (1)..(179): unsure at all Xaa locations
  Clone ID: PAT_MRT4530_100838C.1.pep
ATGTASWFDQSXPRRGKGSRPRPDATASTWGLAAGRAGAEKIILFGVKHADSRVVIRSWEVDGDSLSLSHGAAAAHDTMPSEMSERLFPHGDDGEEETSSPSIGVCGNTAGGYVYNAAVPATGAVLYELRRGGVEGGGVERWAWVACAPVVAEAEALGRVILACSPVGLHELADERLAH

SEQ ID NO: 103406 - protein, 155 aa, Oryza sativa
  unsure (1)..(155): unsure at all Xaa locations
  Clone ID: PAT_MRT4530_100839C.1.pep
KFPGPEPRLPLAESPGGGGTFRASIQKLFGKTFPAXPXAVPLXGAPEXXXRRIXXGRRXGRRRRRHPXRFXLXGXGLXXXXVCWFFVHLSCNXEQGLXLXXLFLFFXFHGFTXNPSXMVLMEQVINQFNFLXKKKKKKKKKKKKKKKKKKKKKKK

SEQ ID NO: 103407 - protein, 1366 aa, Oryza sativa
  Clone ID: PAT_MRT4530_10083C.1.pep
MGAATADEDFATPPPPARAPGGRVYQVGGVPVEFPYKPYGTQLAFMGRVIATLDRARRQGRSHALLESPTGTGKSLSLLCSALAWQRHYPLRAPPAAAPDPFLHGGGFVPDDTQKQATPGVPEKATRKKNVPTIYYATRTHAQITQVVREYRKTSYRVRMAILASRKHYCVNKNVCMSGNIDELCKSLLDDSAQGCPEYKNAQKLSRHPSLQIGGCYEVHDIEDLVRVGRKVKGCPYFAAQTMAEAAQLVFCPYNYLISPIVRRAMDIDIRGSIIVLDEAHNIEDIARDAGSFDVDEESLLFLRQELEGLVTDEAVAKIYEPLHEVIQGLNGWIDEQGNNLQKNEFEHPASFWTGEEAMKELKYAGITPVNFPVLQECATKAIKAASDAESEGVHLSGGSAMTLESLFSSLSYFFAENGRHSNDYQLALQRFAKREGANVMSYDLIICNSVTSFIGWKCVMSLWCLNPAVVFRDIADLTLSVILTSGTLSPMGSFASELGVQFEACMEAPHVINADSQVFATVLSSGPTGRRLNASYRTANEYSFQDELGATLEEICRVVPGGALVFFPSYNLLEKLQRRWSQTEPRGSTEELEPVLKGYYNAILGKAPPKKGRGGAKQIVKNRVTKDSSQESAKGGAAFLAVCRGKVSEGIDFSDDKARVVVSFVFSSYVFYAPERINDVQVKLKKRYNDSYKSSKDLLSGNEWYCHQAFRALNQAAGRCIRHKFDYGGIILIDERYQEERNIVYISKWLRNSIRNCGTFQETMDGLTRFFQNAEEQIKIKAQGVSPKDRLDACVLPSQGDKRKLPWPEPNFSNQTVLQNNKDVKSESHIDGAGVDRMKLSDTSSESWHLSSKHSGLVKKQISPEPENVPMACQLPPSYKVQYNLEGEADNGTNYEVNINFIDLEECDTKPRYVKLTIFNPSEHITQQSTVMEETYAEVPIASPSNRNGENASTVMNEGDPVLDLPISLSAANRNISCVSTSAATPERSGSISHLEHESWTNRSVNSHCQKRRKLSSPMSCCTYTERSCSPSKPYLHGGCDVSMLPGDLRTDGMCCKSMKMSRCENVKVERNSKLAEFPSRESTQEKLFICCARCKTALGLQEDGFLVSCSSSLSSKFYLTYLWRHGPSADILPGKDFLASPPLKIKVMVCNVSSVNKMMLGNLSNEGSAHNSSFWSEKDGCVYKPVTCQTCSCKNACVTTLGAQVVATDSSNQQFCDKVILFDDLLHVKHGPSKDQALSAPIGTVKPISPPPVIDLESFAYKPLKKDPVPVNTRRSKFFVVYVSSLGYLAQPNPGMVHNMKDSSAICSERTGKSSTLHKRMGCQLLWVLFVLFSPFCKEIWACLFWVNLFMDEISMFLVLLLKG

SEQ ID NO: 103408 - protein, 1271 aa, Oryza sativa
  unsure (1)..(1271): unsure at all Xaa locations
  Clone ID: PAT_MRT4530_100840C.1.pep
MRSQLDAAAVSSPPRAPAARRCLRPALPLALRFHAFPGQVRVYRGGGIGVGVRSAGHLPSKRGLVRVFDSAMGMNEKVTNGNLEQPTTSTSGNNQSFPPEGRGEDIIFRALLKGRFCVVKLRLAMFKXRSPYINPTTKLELLSFEMTDQLIVISEFEGEQPVVRXVETLPHKISSLMXAEISVASSIMMRSCITLDVNHSFPWVQREIKKNFSFIYLQLNCRIFSVYCKXLIHIVNLSDVAILHKKMERKVLXKKKKKAQQQVIEDDHIIICGVNSHLPSILNQLNKFHESSIRLGTATARKQRILLLSDLPRKQIEKLGDSFAKDLNHIDVFTKSCSLSLTKSFERAAANKAKSIIILPAKNERYEVDTDAFLSLLALQSLPQIASIPTIVEASNSTTCDLLKSITGLNVQPVEMAASKLFVQCSRQKENVFNLFSFREVVGMKYVDVRRRIPDAVVCGIFRSGMMHFHPCEDEVLTEKDKLLLIAPVSWRRRAQSTFSNSPNGAQNSSHYSESTEGQRSSSMALEVNETRLNSIRKRPSKTLSKSNDYTLGPREHVLIVGWRPKVTDMIREYDNYLGPGSVLEILSETPIKERSSIVNPLMQKQLKNIKVNHQVGCPMNYDTLKEAIIKFKKSRKHDQNVPFSVVVISDKDWLGGDTAQVDKQLAYTLLLAENICQKHDIKVEHLVSEIVDTGLGKQMSRIKPSLSFIGAEEVMSLVTAQVAGSSELNEVWKDILNAEGDEIYIKEIGFYMKEGEKISFSELTERAILRREVAVGYVKGKKQYINPTNKLELLSFEMTDQLIVISEFEGQNTRMRKMTASANGDTDETSGLTTPRSCEVPLCSSYENGITRIPEETRLRDPEAYHPKAVCIGPYFHSGRNSPSFRRMEQHKHWCVNRLLERSNHSLEPLVQAFLLRLSKTIKTKSFQQLYAKPVDMTEEGIGMMLLFDGCFILHFLLRHDPNKGAEHEYWTKLDAGLLDHEYETLQWERPWEWSLVAIDMLLLENQIPFVAVRILFDILKTEHDKAVDLTACARNMFNKYLPAGMCTSTRPIRCQDVRCLLQLLYRSLLPNPKLHSDLMKTPPKPPRTGIDPAKKLDTDGVRITRRQQWYWWPLSHFQEPFTFLDIVFSHGKVRIPQLEVSDASIQLLQNLIAFEKCYQGTTSHVANYAAFMDALNSDHHDTELLRKRSIFDVQFTPAQPELSLRRRCKQDVDPSSENYLSRMMVDVVLYKEARASRKKTQTPISDTAFFAVLAVTAYVLLAFCWYIVS

SEQ ID NO: 103409 - protein, 97 aa, Oryza sativa
  unsure (1)..(97): unsure at all Xaa locations
  Clone ID: PAT_MRT4530_100841C.1.pep
XLAAALQHXVTSYECPQGGPNGRFRVKIPMPNLTLMITGSYRLQFIFLLHTRVLSTLLTLVVVWGWSILRIVDMSGAPICNLENCPATLVDYFSYSR

SEQ ID NO: 103410 - protein, 981 aa, Oryza sativa
  Clone ID: PAT_MRT4530_100842C.1.pep
MELVTGVLGSLLPKLGELLKDEYDLQRGTREKIKSLSRELESVHAVLRIVGEVPSEQLDELVKLWARDVRELSYDMEDIVDTFLVRFNDGHEPDDPRVLRRLRKKMSKLFKKAKDRREIAGAIRRINEKLQEVATRRARYRVDSIVTKPAGPVSIDPRIQALYKRSTELIGVDGPMDKIINMLSPRNDIHLSDKKKIISIVGFGGLGKTTLAKAVYDKLKPDFDCGAFVPVGRNPDMKKVLRDILIDLDKQNYMHSNTTTTLDERQLINGIMALAVGQRSIVIIDDIWDKKSWELIRCALQDSNCGSRVVVTTRISEVATHAGCVYNMEPLSRDDSEKLLYTRIASAEGKCLTRPSAVACEKILNKCDGVPLAIITIASLLANKPEEDWSEVYNSIGFGHGGNNDVENTIKILSFSYYDLPSYLKACLLYLSIFQEDVEIDKNLLIWKWIAEGFVQEKQAVRIGLFELAEGCFNELINRNMIQPEVSQYEWYGPKFQSDQVYEEGYVYGCRVHDMILDMIRSLSKEENFVTVLDSHEQSELPLSHARRLALHGMSIEQQNRCQMANMAAEQARSFFANKCDDISLVFPYFRAVRVLGLEYSADYGIWRHFRSLFHLRYLGLVGVNIKDLPKEVGDLKFLQTLDVKRTSISKLPDTVGMLTQLLCLHAYAAAPVGLIGKLTSLQELWIIKPSAAAYMHHDENADDMCFSEKDAGDMYSDEKNAARQFVKDLGRLRELRVLRTKIDVMDDSIARDLLESLDNLHKIRYLEILGILWGMNVTWTRTGFISPWHLRRLCLVCIEFSRLPAWINSSALPNLSFINVTVQVIQEQDMETLGMLPELYCLKLYSRYTNVVSIKHTGNGGYFQKLKSFKIVGSSVRFDLSCCDCSGGEIKSSFMPSLETFETDVHVRFLEDANMLGFDKLGLENLPSSLKRIIVVICCRDACDAEVEEAQAALEHAADIHPNNPTLKIDRYGEEIKRPL

SEQ ID NO: 103411 - protein, 577 aa, Oryza sativa
  Clone ID: PAT_MRT4530_100843C.1.pep
MATSTPNCARGGPESVDLCILIIISLFPFPDSAGKQLTERRAATLSLYSVADLPIYSAAVLCRFAPPPPLYSAAVAVHERGDCGKGGGDGWNGDGSAAVSYSWEEAELVDGWMDAWAGGATATGDPPPQRIARRCTLPLCRIQVQERGDLQFKVETRPPHGHRPLLSASGRDGPVIQGVVPLPVSGAFGLYWWQCGRFLVGCLVEGSGMGCTGSRHAFRGGVRGGKTAYARSRSGPAAVHHTVSLKSSTLGSLSLERDRDEEMMKWRDDGGAAKTTPPPQQMARRQRQLVLATTAPAKTPAREPEVINVWELMEGLDDKDEEGDVRGEERRGQSTPGSPEFDPDIIAAFRKALDEVPAAGECPGDEVCVKKREIQRFPGIVRERVSAFQKRIDAKLAKMAPPPPSPSPPPEPEPQLPPPPPDSDRKVVLYLTSLRGIRKTYEDCWATKSILQGYGVLVDERDLSMHAGFKEELHAALGAPGSLPQVFADGRHLGGAEEVRRMHESGELSKALGDCEMAPPAAAGKGIALDACSGCGGVRFVPCEECSGSCKVFLEELDTFRRCPDCNENGLVRCPLC

SEQ ID NO: 103412 - protein, 263 aa, Oryza sativa
  unsure (1)..(263): unsure at all Xaa locations
  Clone ID: PAT_MRT4530_100844C.1.pep
LHPLRFLPSLSRGRLSHGVPVTARTPVAALRSSASLKSTFLGQSSTRLARAPTTRRNVRAEAKGEWLPGLPSPTYLNGSFAXGDNGFDPLGLAEDPENLRWFVQAELVNGRWAMLGVAGMLLPEVLTKIGLIDAPQWYDAGKGTYFASSSTLVVIEFILFHYVXEIRRWQDIKNPGCVNQDPIFKSYSLPPHECGYPGSVFNPLNFEPTLEAKEKELANGRLAMLAFLGFLVQHNVTQKGPFDNLLQHLSDPWHNTIIQTLSG

SEQ ID NO: 103413 - protein, 111 aa, Oryza sativa
  Clone ID: PAT_MRT4530_100845C.1.pep
GREPTNVASSPVTTLFSHNIRGLPGIPLYINPPSYYFSIQTFHLFLSLSCALYPVLNFFTNHPQLHHSKNGRHRPHYSDWRPDLWQPDRWRSREDLQKTLMISLSPPPAEA

SEQ ID NO: 103414 - protein, 49 aa, Oryza sativa
  Clone ID: PAT_MRT4530_100846C.1.pep
DVQALQRGAPGGDLGETGVGEERYISTAPSEHRFGSPRATASRPRSNKK

SEQ ID NO: 103415 - protein, 55 aa, Oryza sativa
  unsure (1)..(55): unsure at all Xaa locations
  Clone ID: PAT_MRT4530_100847C.1.pep
LYYCVILCQLAMWQSMNCQLSVSSTSTVGVNLEVLNMVXTLGPIGCTIADAWSTG

SEQ ID NO: 103416 - protein, 196 aa, Oryza sativa
  unsure (1)..(196): unsure at all Xaa locations
  Clone ID: PAT_MRT4530_100848C.1.pep
MSRYRGPRFEKIRRLGALPGLTSKRPRSXSIFKNQLRSGKRSQYRIRLEEKRKFRFHDGLTERQLLRYVHIAGKAKGSTGRVXLQLLEMRLDNILFRLGMASTIPGARQLVNHRXRHILFHGRLVDILSFRCKLRDIITMKDNQRSKXLIQNSIASSAHEELPKHLTSDSFQYKGLVNKIIFSKWXKINEFLVVEY

SEQ ID NO: 103417 - protein, 225 aa, Oryza sativa
  Clone ID: PAT_MRT4530_100849C.1.pep
MSFLFGKRKTPAELLRENKRMLDRSIREIERERQGLQAQEKKLITEIKKTAKEGQMGAVKVMAKDLIRTRHQITKFYQLKSQLQGVSLRVQTLKSTQAMGDAMKGVTKAMGQMNRQLNLPGLQRIMMEFERQNERMEMTSEVMGDAIDDALEGDEDQEEETEELVNQVLDEIGIDINQELVKAPSAAVAQPAAAGKVAQAESAGGNGDGGIDADLQARLDNLRRM

SEQ ID NO: 103418 - protein, 279 aa, Oryza sativa
  Clone ID: PAT_MRT4530_10084C.1.pep
MSPGVSAKKRHAGVRFTLGCGCKDAKSVSVSAPVVGTPSTTATRRRSAGMNPSGSTTTDTLTITSALSSFLWERSVVEFDDDGGDYGPESFSGLLRELSELEQSVASWGRKSHHQNHDKKHSPPSSSPLPSQEDRKEKNGSNGDATDKPGDCRDGDDGVGVGLDGSVAVVKQSDDPLGDFRQSERARRRRGPSTPRRVPLRRRTDAATRSWLGPRRRRRELPCSHAAVTAAAALLPCSRVVVAVAVAAAAATSPAAGPPLPHRPVGRRRRSAQSTKREE

SEQ ID NO: 103419 - protein, 250 aa, Oryza sativa
  Clone ID: PAT_MRT4530_100850C.1.pep
MSFLFGKRKTPAELLRENKRMLDRSIREIERERQGLQAQEKKLITEIKKTAKEGQMKLDNLPMKWWKVVDEQFHFAAKNGQGAVKVMAKDLIRTRHQITKFYQLKSQLQGVSLRVQTLKSTQAMGDAMKGVTKAMGQMNRQLNLPGLQRIMMEFERQNERMEMTSEVMGDAIDDALEGDEDQEEETEELVNQVLDEIGIDINQELVKAPSAAVAQPAAAGKVAQAESAGGNGDGGIDADLQARLDNLRRM

SEQ ID NO: 103420 - protein, 83 aa, Oryza sativa
  Clone ID: PAT_MRT4530_100851C.1.pep
KPGPRRGGRSPWSTVGERGNRASDIKILNIRNPQCCYPIVEPPGSPPLRSDGDRRPALPLFSRDSSWRRRKKASSCRRQRKIS

SEQ ID NO: 103421 - protein, 104 aa, Oryza sativa
  Clone ID: PAT_MRT4530_100852C.1.pep
MPNVCGPQCPVVSADMAADHHSRLLIRSGIDLSTLACLTRFVLKHGVTGDNAAILSLRLLHVHLQINQQPKLANKRSPEQTCNMPAMCDPGNGEAYRGVASAND

SEQ ID NO: 103422 - protein, 85 aa, Oryza sativa
  unsure (1)..(85): unsure at all Xaa locations
  Clone ID: PAT_MRT4530_100853C.1.pep
KWWPGGVALMPSMIXXFLCGPCGSKLEDPGLDFLEFXVVRGSCVLLXLVLFLYWLGGIPIIGRYAKXTGHVQGILVCQYLKTXVG

SEQ ID NO: 103423 - protein, 48 aa, Oryza sativa
  unsure (1)..(48): unsure at all Xaa locations
  Clone ID: PAT_MRT4530_100854C.1.pep
DPSDTVLPSFRITADRHLILSHKIMPDCAVLRTGESRPRPHFXERSVH

SEQ ID NO: 103424 - protein, 198 aa, Oryza sativa
  unsure (1)..(198): unsure at all Xaa locations
  Clone ID: PAT_MRT4530_100855C.1.pep
AGIARGLHVVTTVPEGVVMFXASYEYERFVYDAWAASGMISKISKKKHVFREPKNSVDVEMTLNKYKEAIQSCSKSSQDTGVTGALLLAVVGGKISEGINFSDGMGRCVVMVGLPYPSPSDVELTETIKYIENISKPVLVGGDNSSSSKYDDECKLQPGFDILRKCNKGGREYYENLCMKAVNQSIGRAIRHANDYAA

SEQ ID NO: 103425 - protein, 65 aa, Oryza sativa
  Clone ID: PAT_MRT4530_100856C.1.pep
MAMMAAERSCARAVGKERRAGGGQRSAEHASPIVFLGIICHIGLYHLDSFAFFGLCTCSCQLDLL

SEQ ID NO: 103426 - protein, 173 aa, Oryza sativa
  unsure (1)..(173): unsure at all Xaa locations
  Clone ID: PAT_MRT4530_100857C.1.pep
ILDLDGILLFFPVNKKSFPRKYLSLLLHTIKLMKVDLQPLVDKIRLRIPSWKGRFFTSASPEVLVKSTLSATPIYHLTVLPXNEWLYKRIDHFRRAFLXKEDDSDNVCAGSCLLNWNYVCKPKDYGGLGILNLEKIARTLRLCWLWFGWKDESKPGANMDCPPPEMNGSLESV

SEQ ID NO: 103427 - protein, 102 aa, Oryza sativa
  Clone ID: PAT_MRT4530_100858C.1.pep
MTASVSSSDWASMSVRLVFDVSEVTGSHFFNLIYLCGSVCFNDAGGREAGCGGWLTAGEEGECGGRLTAGEERGAAGGRRRERSGVRPPTGFGGRGAGCGGR

SEQ ID NO: 103428 - protein, 46 aa, Oryza sativa
  Clone ID: PAT_MRT4530_100859C.1.pep
VFTVRVAPRDGAATIFSCVAPWLAVAILWIIPLNGIRQQEGLNFKS

SEQ ID NO: 103429 - protein, 87 aa, Oryza sativa
  unsure (1)..(87): unsure at all Xaa locations
  Clone ID: PAT_MRT4530_10085C.1.pep
GGGGDPGGGRSGAAVAGSGPPVDGAPPAAPHXGGGRRARGELEATDGEREAADCECEVADGGGEHGTGGGGRARRAVAGSRRRHPRA

SEQ ID NO: 103430 - protein, 481 aa, Oryza sativa
  Clone ID: PAT_MRT4530_100860C.1.pep
MTGACEAAPARRRGLTVLPLVALIFYDVSGGPFGIEDSVRAGGGALLPILGFLVLPVLWSLPEALVTAELASAFPTNAGYVAWVSAAFGPAAAFLVGFSKWASGTLDNALYPVLFLDYLRSGGGLVLSPPARSLAVLALTAALTYLNFRGLHLVGLSALALTAFSLSPFVALAVLAAPKIRPSRWLAVNVAAVEPRAYFNSMFWNLNYWDKASTLAGEVEEPRKTFPKAVFGAVGLVVGAYLIPLLAGTGALPSETAGEWTDGFFSVAAAAMSNMGLFEAEMSGDSFQLLGMAEMGMIPAIFARRSRHGTPTYSILCSATGVVILSFMSFQEIVEFLNFLYGLGMLAVFAAFVKLRVKDPDLPRPYRIPVGAAGAAAMCVPPVVLITTVMCLASARTLVVSAAVAVAGVAMYYGVEHMKATGCVEFLTPVPPDSLRGSSSSSSSSAASDNGGDDDVEDVCALLLAAGEHAGEGVSVSKENY

SEQ ID NO: 103431 - protein, 496 aa, Oryza sativa
  Clone ID: PAT_MRT4530_100861C.1.pep
MTGACEAAPARRRGLTVLPLVALIFYDVSGGPFGIEDSVRAGGGALLPILGFLVLPVLWSLPEALVTAELASAFPTNAGYVAWVSAAFGPAAAFLVGFSKWASGTLDNALYPVLFLDYLRSGGGLVLSPPARSLAVLALTAALTYLNFRGLHLVGLSALALTAFSLSPFVALAVLAAPKIRPSRWLAVNVAAVEPRAYFNSMFWNLNYWDKASTLAGEVEEPRKTFPKAVFGAVGLVVGAYLIPLLAGTGALPSETAGEWTDGFFSVVGDRIGGPWLRVWIQAAAAMSNMGLFEAEMSGDSFQLLGMAEMGMIPAIFARRSRHGTPTYSILCSATGVVILSFMSFQEIVEFLNFLYGLGMLAVFAAFVKLRVKDPDLPRPYRIPVGAAGAAAMCVPPVVLITTVMCLASARTLVVSAAVAVAGVAMYYGVEHMKATGCVEFLTPVPPDSLRGSSSSSSSSAASDNGGDDDVEDVCALLLAAGEHAGEGVSVSKENY

SEQ ID NO: 103432 - protein, 225 aa, Oryza sativa
  unsure (1)..(225): unsure at all Xaa locations
  Clone ID: PAT_MRT4530_100862C.1.pep
MAPTLLPASAPRRPPPREPPPPPTAPPPTDLKEEKGEGGRERGGKRPLGEGGNWRASSTTAATSRCVRWPPPHEPPPPPPPLPPMXSRGGEGGERRRGGGRATGRERGLAPPPRQPPPSLPPQPGRACADLRVDRPHLGQPLDVVASEDSGGRRRHGEGATGCGQGGWWRRWATPRRMVEGTGSGVAGRARQAVVRTEEDGGVDGQRCRWERTEYMGIWYYKFRG

SEQ ID NO: 103433 - protein, 193 aa, Oryza sativa
  Clone ID: PAT_MRT4530_100863C.1.pep
MHHPTGTELDGFSSWNSAAVDVGVGAEAVRLCCRTCGTDCIDLGGGGPIGNTGDFVVPSRQCSRFLPPPGSILTAPHSSPSYPFHQSEDGHRNSQGRRQLQGQIAPGRLAATGYGEATRKLEADKAFHSRSSSREANINPRISEASCQGGTMIKSKGGDSRQMKATAPCGCSRKDKESETAMGGSRGTLPRGG

SEQ ID NO: 103434 - protein, 104 aa, Oryza sativa
  Clone ID: PAT_MRT4530_100864C.1.pep
PVLAPPRGLGATTENSRARYAPCHTTASATATPAIPTAFHVALRSAAPSVTRRSILRAPSPGSPLSASTPNTRSLRPATAPTVRRISVWNPEKHPLSFLREGVF

SEQ ID NO: 103435 - protein, 128 aa, Oryza sativa
  Clone ID: PAT_MRT4530_100865C.1.pep
MHSNHNFGIEGERVREKMEPGCLDDVFREQIDGNTVVVVRRGLKGEPRLSFHPAKPLEVMGRHDNALKRESDARKRCCCWLGQAKARLGFHLSFTTCLFTNVATMLRYHRNLHQLVGTEPAPTAGQPH

SEQ ID NO: 103436 - protein, 82 aa, Oryza sativa
  Clone ID: PAT_MRT4530_100866C.1.pep
KKKGGKEKRRKAKRLERDARFHVAVMAAPRRRRQVCVDAHHKDTLQAASLVDTLLLVIDGLAGVVRRPHGLRCSRCVLSSGS

SEQ ID NO: 103437 - protein, 137 aa, Oryza sativa
  unsure (1)..(137): unsure at all Xaa locations
  Clone ID: PAT_MRT4530_100867C.1.pep
GAAPATPHRDGGGADGGHIDDGAVILNRAXPTXPPLLTLPSSLRRQAAALRRRWXHRRWPHRRWRRRLLHSARRRRLPPRPPFFSSAASSASALPLTRGPVTERRWVEEEIEALWCVASRTYVRNGLLRPVPLEKAI

SEQ ID NO: 103438 - protein, 1972 aa, Oryza sativa
  Clone ID: PAT_MRT4530_100868C.1.pep
MAEQGKTHDISPSVSGDDGEPNPRRRARTPPPPPRQSPKQGEALERVDKSAASPAAGDAGERRDGERRLLVYGDGSTPQGALQAAGALLRHPPVVHDPESPAQRWLEDVANLVMTAQQRLGAGGRSATTKTSGAATTGSMSSRRRARRAAAAARHSAATPSSTPSTREDQHGEPDARLNIERRRNSRRTPCATEGASSSRVSPRHGREDQPSVPPAGGVGCRAFVASLRNVRWPPRFRPAITEKYDGSVNPTEFLQVYTTGIEAAGGDDRVMANFFPMALKGQARGWLMNLPPASVHSWEDLCQQFTMNFQGTYPRPGEEADLHAVQRGDNESLRSYIQRFCQVRNTIPCIPAHAVIYAFRGGVRHNRMLEKIASKEPQTTAELFQLADRVARKEEAWTWNSSGSGVAASAAPGSAAQTGRRDRRRKKRSDRSGDEGHVLAVEGTPRATRKGRPASDKKKEAGTPSRERPAGRWCSVHNTSLHDLADCRAVKNLAERTRKWEEDRRQERREGKSPAVPSGKRRSEAKQKAPAVDIDDGDDDLGFQEPGATIATVDGGACAHVSRRSFKAMKRELLTMAPTHEAMRRARWSEVALTFDQTDHPPCIARGGQVAMVVSPTICNVKLGRVLIDGGAALNILSPAAFDAIKAPGMVLQPSQPIIGVTPGHTWPLGHIDLPVTFGGPANFRTERVSFDVADLSLPYNAVLGRPALVKFMAAVHYAYLQMKMPGPGGPISVRGDLKVALACMEQRADHLAAATKPEGGDERLGTSAPTAPRQRIATCDEVPEDALVSFLRANADVFAWRPADMPGVPREVIEHRLAVRPGARPVRQKVRRQAPERQAFIREEVARLLEAGFIREVIHPEWLANPVVVPKANGKLRMCIDYTDLNKACPKDPYPLPRIDQIVDSTAGCDLLCFLDAYSGYHQIRMAREDEEKTAFITPNLAETFENLRSARIKLNPDKCVFGVPAGKLLGFLVSARGIEANPEKIRAIERMRPPSKLRDVQCVTGCMAALSRFISRLGEKALPLFKLLKRSGPFTWTEEAENALAQLKAYLSSPPVLVAPEPNESLLLYLAATPQVVSAALVVERDEDNPHSAHPHSVPTWPGSRQGGEAPESNGGLRPLTTGDGPLPACQTVLGVPDPQEGPEATAGRPHLTPFDPEANPVLSRPGKEQGEEAPEPNGGQRPLTTGVGPLPACPTMPGAPDPQDGPEATVGRPLLSSSDPEVIGTEDECAPRGHLDEERPGGTAPSKEDRPHRRVQRPVYFVSEALRDAKTRYPQAQKMLYAILMASRKLRHYFQAHRVTVVTSYPLGQILHNREGTGRVVKWAIELSEFDLHFEPRHAIKSQALADFVAEWTPAPETVSMPEASANPSQLPHAAHWVMQFDGSLSLQGAGAGVTLTSPNGDVLRYLVRLDFRATNNMAEYEGLLAGLRVAAGLGIRRLLVLGDSQLVVNQVCKEYRCSDPQMDAYVRQVRRMERHFDGIELRHVPRRDNVIADELSRLASSRAQTPPGAFEERLTQPSARPDPLGETDAPDRPPRPVGVQASGPEGSAPSSLRLIAWISEIQTYLTDKTLPEDREGSERVQRISKRYVLVEGTLYRRAANGILLKCIPQEQGVELLADIHEGECGAHSASRTLVGKAFRQGFYWPTALNDAVDLVRRCRACQFHAKQIHQPAQALQIIPLSWPFAVWGLDILGPFKRAPGGFEYLYVAIDKFTKWPEAYPVVKIDKHSALKFIKGITARFGVPNRIITDNGTQFTSELFGDYCENMGIKLCFASPAHPRSNGQVERANAEILKGLKTKTFNILKKHGDSWIEELPAVLWANRTTPSRATGETPFFLVYGAEAVLPSELTLRSPRATMYCEADQDQLRRDDLDYLEERRRRAALRAARYQQSLRRYHQRHVRARSLCVDDLVLRRVQTRAGLSKLSPMWEGPYRVIGVPRPGSVRLATGDGTELPNPWNIEHLRRFYP

SEQ ID NO: 103439 - protein, 38 aa, Oryza sativa
  Clone ID: PAT_MRT4530_100869C.1.pep
IKTHGFNLFFMRQHTNHTPLGGFYWGLIKGGISPAGNI

SEQ ID NO: 103440 - protein, 96 aa, Oryza sativa
  unsure (1)..(96): unsure at all Xaa locations
  Clone ID: PAT_MRT4530_10086C.1.pep
GFVFLLLLTRQASGAXYSGWQSAHATFYGGGDASGTMGGGCGYGNLYRQGCGTNTEALRTELFNDGAGCGGRYELWLDNRXSSCLMDYITVTGTNF

SEQ ID NO: 103441 - protein, 1700 aa, Oryza sativa
  Clone ID: PAT_MRT4530_100870C.1.pep
MAEQGEAHDLSPSVSGDDGEPNPRRRARTPPPPPRQSPKQGEALEKVDKSMASPVAGGAGGRQDGERRLLVYGDGSTPQGALQAAGALLRHPPVVHDPESPAQRWLEDVANLVMTAQQRLGAGGRSATTKTSGAATTGSVSSRRRARRAAAAARHSAATPSSTPSTREDQHGEPDARLNIERRRNSRRTPRATEGASSSRVSPRHGREDQPSVPPAGGVGCRAFVASLRNVRWPPRFRPAITEKYDGSVNPTEFLQVYTTGIEAAGGDDRVMANFFPMALKGQARGWLMNLPPASVHSWEDLCQQFTMNFQGTYPRPGEEADLHAVQRGDNESLRSYIQRFCQVRNTIPCIPAHAVIYAFRGGVRHNRMLEKIASKEPQTTAELFQLADRVARKEEAWTWNSSGSGVAASAAPGSTAQTGRRDRRRKKRSDRSGDEGHVLAVEGTPRATRKGRPASDKKKEAGTPSRERPAGRWCSVHNTSLHDLADCRAVKILAERTRKWEEDRRQERREGKSPAVPSGKRRSEAKQKAPAVDIDDGDDDLGFQEPGATIATVDGGACAHVSRRSFKAMKRELLTMAPTHEAMRRARWSEVALTFDQTDHPPCIARGGQVAMVVSPTICNVKLGRVLIDGGAALNILSPAAFDAIKAPGMVLQPSQPIIGVTPGHTWPLGHIDLPVTFGGPANFRTERVSFDVADLSLPYNAVLGRPALVKFMAAVHYAYLQMKMPGPGGPISVRGDLKVALACMEQRADHLAAATKPEGGDERLGTSAPTAPRQRIATCDEVPEDALVSFLRANADVFAWRPADMPGVPREVIEHRLAVRPGARPVRQKVRRQAPERQAFIREEVARLLEAGFIREVIHPEWLANPVVVPKANGKLRMCIDYTDLNKACPKDPYPLSRIDQIVDSTAGQIGRNVEAYVDDLVVKTRNQETLLSDLAETFENLRSARIKLNPDKCVFGVPAGKLLGFLVSARGIEANPEKIRAIERMRPPSKLRDVQCVTGCMAALSRFISRLGEKALPLFKLLKRSGPFTWTEEAENALAQLKAYLSSPPVLVAPEPNESLLLYLAATPQVVSAALVVERDEDNPHSAHPHSVPTWPRSRQGGEAPESNGGLRPLTTGDGPLPACQTVLGVPDPQEGPEATAGRPHLTPFDPEANPVLSRPGKEQGEEAPEPNGGQRPLTTGVGPLPACPTMPGAPDPQDGPEATVGRPLLSSSDPEVIGTEDECAPRGHLDEERPGGTAPSKEDRPHRRVQRPVYFVSEALRDAKTRYPQAQKMLYAILMASRKLRHYFQAHRVTVVTSYPLGQILHNREGTGRVVKWAIELSEFDLHFEPRHAIKSQALADFVAEWTPAPETVSMPEASANPSQLPHAAHWVMQFDGSLSLQGAGAGVTLTSPNGDVLRYLVRLDFRATNNMAEYEGLLAGLRVAAGLGIRRLLVLGDSQLVVNQVCKEYRCSDPQMDAYVRQGITARFGVPNRIITDNGTQFTSELFGDYCENMGIKLCFASPAHPRSNGQVERANAEILKGLKTKTFNILKKHGDSWIEELPAVLWANRTTPSRATGETPFFLVYGAEAVLPSELTLRSPRATMYCEADQDQLRRDDLDYLEERRRRAALRAARYQQSLRRYHQRHVRARSLCVDDLVLRRVQTRAGLSKLSPMWEGPYRVIGVPRPGSVRLATGDGTELPNPWNIEHLRRFYP

SEQ ID NO: 103442 - protein, 2027 aa, Oryza sativa
  Clone ID: PAT_MRT4530_100871C.1.pep
MAEQGKTHDISPSVSGDDGEPNPRRRARTPPPPPRQSPKQGEALERVDKSAASPAAGDAGERRDGERRLLVYGDGSTPQGALQAAGALLRHPPVVHDPESPAQRWLEDVANLVMTAQQRLGAGGRSATTKTSGAATTGSVSSRRRARRAAAAARHSAATPSSTPSTREDQHGEPDARLNIERRRNSRRTPRATEGASSSRVSPRHGREDQPSVPPAGGVGCRAFVASLRNVRWPPRFRPTITEKYDGSVNPTEFLQVYTTGIEAAGGDDRVMANFFPMALKGQARGWLMNLPPASVHSWEDLCQQFTMNFQGTYPRPGEEADLHAVQRGDNESLRSYIQRFCQVRNTIPCIPAHAVIYAFRGGVRHNRMLEKIASKEPQTTAELFQLADRVARKEEAWTWNSSGSGVAASAAPGSTAQTGRRDRRRKKRSDRSGDEGHVLAVEGTPRATRKGRPASDKKKEAGTPSRERPAGRWCSVHNTSLHDLADCRAVKILAERTRKWEEDRRQERREGKSPAVPSGKRRSEAKQKAPAVDIDDGDDDLGFQEPGATIATVDGGACAHVSRRSFKAMKRELLTMAPTHEAMRRARWSEVALTFDQTDHPPCIARGGQVAMVVSPTICNVKLGRVLIDGGAALNILSPAAFDAIKAPGMVLQPSQPIIGVTPGHTWPLGHIDLPVTFGGPANFRTERVSFDVADLSLPYNAVLGRPALVKFMAAVHYAYLQMKMPGPGGPISVRGDLKVALACMEQRADHLAAATKPEGGDERLGTSAPTAPRQRIATCDEVPEDALVSFLRANADVFAWRPADMPGVPREVIEHRLAVRPGARPVRQKVRRQAPERQAFIREEVARLLEAGFIREVIHPEWLANPVVVPKANGKLRMCIDYTDLNKACPKDPYPLSRIDQIVDSTAGCDLLCFLDAYSGYHQIRMAREDEEKTAFITPVGTYCYTSMPFGLKNAGPTFQRTTRISLGSQIGRNVEAYVDDLVVKTRNQETLLSDLAETFENLRSARIKLNPDKCVFGVPAGKLLGFLVSARGIEANPEKIRAIERMRPPSKLRDVQCVTGCMAALSRFISRLGEKALPLFKLLKRSGPFTWTEEAENALAQLKAYLSSPPVLVAPEPNESLLLYLAATPQVVSAALVVERDEDNPHSAHPHSVPTWPRSRQGGEAPESNGGLRPLTTGDGPLPACQTVLGVPDPQEGPEATAGRPHLTPFDPEANPVLSRPGKEQGEEAPEPNGGQRPLTTGVGPLPACPTMPGAPDPQDGPEATVGRPLLSSSDPEVIGTEDECAPRGHLDEERPGGTAPSKEDRPHRRVQRPVYFVSEALRDAKTRYPQAQKMLYAILMASRKLRHYFQAHRVTVVTSYPLGQILHNREGTGRVVKWAIELSEFDLHFEPRHAIKSQALADFVAEWTPAPETVSMPEASANPSQLPHAAHWVMQFDGSLSLQGAGAGVTLTSPNGDVLRYLVRLDFRATNNMAEYEGLLAGLRVAAGLGIRRLLVLGDSQLVVNQVCKEYRCSDPQMDAYVRQVRRMERHFDGIELRHVPRRDNVIADELSRLASSRAQTPPGAFEERLTQPSARPDPLGETDAPDRPPRPVGVQASGPEGSAPSSLRLIAWISEIQTYLTDKTLPEDREGSERVQRISKRYVLVEGTLYRRAANGILLKCIPQEQGVELLADIHEGECGAHSASRTLVGKAFRQGFYWPTALNDAVDLVRRCRACQFHAKQIHQPAQALQIIPLSWPFAVWGLDILGPFKRAPGGFEYMYVAIDKFTKWPEAYPVVKIDKHSALKFIKGITARFGVPNRIITDNGTQFTSELFGDYCENMGIKLCFASPAHPRSNGQVERANAEILKGLKTKTFNILKKHGDSWIEELPAVLWANRTTPSRATGETPFFLVYGAEAVLPSELTLRSPRATMYCEADQDQLRRDDLDYLEERRRRAALRAARYQQSLRRYHQRHVRARSLCVDDLVLRRVQTRAGLSKLSPMWEGPYRVIGVPRPGSVRLATGDGTELPNPWNIEHLRRFYP

SEQ ID NO: 103443 - protein, 108 aa, Oryza sativa
  Clone ID: PAT_MRT4530_100872C.1.pep
MALDKLSTWQLPCDGRLAEADRASVKDELLKSAAVMEKLSQVLEPDETDDHHAKILQPSPPKRTANMSRRESATSSCSTDEKAMIAAKRKLREVYQEAEDAKRQLAHN

SEQ ID NO: 103444 - protein, 1700 aa, Oryza sativa
  Clone ID: PAT_MRT4530_100873C.1.pep
MAEQGKTHDLSPSVSGDDGEPNPRRRARTPPPPPRQSPKQGEALEKVDKSVASPVAGGAGGRQDGERRLLVYGDGSTPQGTLQAAGALLRHPPVVHDPESPAQRWLEDVANLVMTAQQRLGAGGRSVTTKTSGAATTGSVSSRRRARRAAAAARHSAATPSSTPSTREDQHGEPDARLNIERRRNSRRTPRATEGASSSRVSPRHGREDQPSVPPAGGVGCRAFVASLRNVRWPPRFRPTITEKYDGSVNPTEFLQVYTTGIEAAGGDDRVMANFFPMALKGQARGWLMNLPPASVHSWEDLCQQFTMNFQGTYPRPGEEADLHAVQRGDDESLRSYIQRFCQVRNTIPCIPAHAVIYAFRGGVRHNRMLEKIASKEPQTTAELFQLADRVARKEEAWTWNSSGSGVAASAAPGSAAQTGRRDRRRKKRSDRSGDEGHVLAVEGAPRATRKGRPASDKKKEAGTPSRERPVGRWCSVHNTSLHDLADCRAVKNLAERTRKWEEDRRQERREGKSPAVPSGKRRSEAKQKAPAVDIDDGEDDLGFQEPGATIATVDGGACAHVSRRSFKAMKRELLAMAPTHEAMRRARWSEVALTFDQTDHPPCIARGGQVAMVVSPTICNVKLGRVLIDGGAALNILSPAAFDAIKAPGMVLQPSQPIIGVTPGHTWPLGHVDLPVTFGGPANFRTERVSFDVADLSLPYNAVLGRPALVKFMAAVHYAYLQMKMPGPGGPISVRGDLKVALACMEQRADHLAAATKPEGGDERLGTSAPTAPRQRIATCDEAPEDALVSFLRANADVFAWRPADMPGVPREVIEHRLAVRPGARPVRQKVRRQAPERQAFIREEVARLLEAGFIREVIHPEWLANPVVVPKANGKLRMCIDYTDLNKACPKDPYPLPRIDQIVDSTAGQIGRNVEAYVDDLVVKTRNQETLLSDLAETFENLRSARIKLNPDKCVFGVPAGKLLGFLVSARGIEANPEKIRAIERMRPPSRLRDVQCVTGCMAALSRFISRLGEKALPLFKLLKRSGPFTWTEEAENALVRLKAYLSSPPVLVAPEPNESLLLYLAATPQVVSAALVVERDEDNPHSAHPHSVPTWLGSRQGGEAPESNGGLRPLTTGDGPLPACQTVLGAPDPQEGPEATAGRPHLTPFDPEANPVLTRPGKEQGEEAPEPNGGQRPLTTGVGPLPACPTMPGAPDPQDGPEATVGRPLLSSSDPEVIGTEDECAPRGHLDEERPGGTAPSREERPHRRVQRPVYFVSEALRDAKTRYPQAQKMLYAILMASRKLRHYFQAHRVTVVTSYPLGQILHNREGTGRVVKWAIELSEFDLHFEPRHAIKSQALADFVAEWTPAPETVLMPKASTNPSQLPQTAHWVMQFDGSLSLQGAGAGVTLTSPNGDVLRYLVRLDFRATNNMAEYEGLLAGLRVAAGLGIRRLLVLGDSQLVVNQVCKEYRCSDPQMDAYVRQGITARFGVPNRIITDNGTQFTSELFGDYCEDMGIKLCFASPAHPRSNGQVERANAEILKGLKTKTFNILKKHGDSWIEELPAVLWANRTTPSRATGETPFFLVYGAEAVLPSELTLRSPRATMYCEADQDQLRRDDLDYLEERRRRAALRAARYQQSLRRYHQRHVRARSLCVDDLVLRRVQTRAGLSKLSPMWEGPYRVVGVPRPGSVRLATGDGTELPNPWNIEHLRRFYP

SEQ ID NO: 103445 - protein, 97 aa, Oryza sativa
  Clone ID: PAT_MRT4530_100874C.1.pep
NGLARRCIVQVSYAIGVPEPSSVFVHPYGTGKILLKEVLQIVKENFVFRPGMIPFNLVLNRGGHRFLKTAAYGHFGRDDPDFTWEVVNPLKFYKPQV

SEQ ID NO: 103446 - protein, 2027 aa, Oryza sativa
  Clone ID: PAT_MRT4530_100875C.1.pep
MAEQGKTHDLSPSVSGDDGEPNPRRRARTPPPPPRQSPKQGEALERVDKSAASPAAGDAGERRDGERRLLVYGDGSTPQGALQAAGALLRHPPVVHDPESPAQRWLEDVANLVMTAQQRLGAGGRSATTKTSGAATTGSVSSRRRARRAAAAARHSAATPSSTPSTRKDQHGEPDARLNIERRRNSRRTPRATEGASSSRVSPRHGREDQPSVPPAGGVGCRAFVASLRNVRWPPRFRPTITEKYDGSVNPTEFLQVYTTGIEAAGGDDRVMANFFPMALKGQARGWLMNLPPASVHSWEDLCQQFTMNFQGTYPRPGEEADLHAVQRGDDESLRSYIQRFCQVRNTIPCIPAHAVIYAFRGGVRHNRMLEKIASKEPQTTAELFQLADRVARKEEAWTWNSSGSGVAASAAPGSAAQTGRRDRRRKKRSDRSGDEGHVLAVEGAPRATRKGRPASDKKKEAGTPSKERPAGRWCSVHNTSLHDLADCRAVKNLAERTRKWEEDRRQERREGKSPAVPSGKRRSEAKQKAPAVDNDDGDDDLGFQEPGATIATVDGGACAHVSRRSFKAMKRELLTMAPTHEAMRRARWSEVALTFDQTDHPPCIARGGQVAMVVSPTICNVKLGRVLIDGGAALNILSPAAFDAIKAPGMVLQPSQPIIGVTPGHTWPLGHIDLPVTFGGPANFRTERVSFDVADLSLPYNAVLGRPALVKFMAAVHYAYLQMKMPGPGGPISVHGDLKVALACMEQRADRLAAASKPEGGDERLGPSAPTAPRQRMATCDEVPEDALVSFLRANADVFAWRPADMPGVPREVIEHCLAVRPGARPVRQKVRRQAPERQAFIREEVARLLEAGFIREVIHPEWLANPVVVPKANGKLRMCIDYTDLNKACPKDPYPLPRIDQIVDSTAGCDLLCFLDAYSGYHQIRMAREDEEKTAFITPVGTYCYTSMPFGLKNAGPTFQRTTRISLGSQIGRNVEAYVDDLVVKTRNQETLLSDLAETFENLRSARIKLNPDKCVFGVPAGKLLGFLVSARGIEANPEKIRAIERMRPPSKLRDVQCVTGCMAALSRFISRLGEKALPLFKLLKRSGPFTWTEEAEHALTQLKAYLSSPPVLVAPEPNESLLLYLAATPQVVSAALVVERDEDNSHSAHPHSVPIWPGSRQGGEAPESNGGLRPPTTGVGPPPACQTVPGAPDPQEGPEATAGRPHLAPFDPEANPVLSRPGKEQGEEAPEPNGGQRPLTTGVGPLPACPTMPGAPDPQDGPEATVGRLLLSSSDPEVIGTEDECAPRGHLDEERPGGSAPSKEDRPRRRVQRPVYFVSEALRDAKTRYPQAQKMLYAILMASRKLRHYFQAHRVTVVTSYPLGQILHNREGTGRVVKWAIELSEFDLHFEPRHAIKSQALADFVAEWTPAPETVSMPEASTNPSQLPHAAHWVMQFDGSLSLQGAGAGVTLTSPNGDVLRYLVRLDFRATNNMAEYEGLLAGLRVAAGLGIRRLLVLGDSQLVVNQVCKEYRCSDPQMDAYVRQVRRMERHFDGIELRHVPRRDNMIADELSRLASSRAQTPPGAFEERLTQPSARPDPLGETDAPDRPPRPVGVQASGPEGSAPSSLRLIAWISEIQTYLTDKTLPEDREGSERVQRISKRYVLVEGTLYRRAANGILLKCIPQEQGVELLADIHEGECGAHSASRTLVGKAFRQGFYWPTALNDAVDLVRRCRACQFHAKQIHQPAQALQIIPLSWPFAVWGLDILGPFKRAPGGFEYLYVAIDKFTKWPEAYPVVKIDKHSALKFIKGITARFGVPNRIITDNGTQFTSELFGDYFEDMGIKLCFASPAHPRSNGQVERANAEILKGLKTKTFNILKKHGDSWIEELPAVLWANRTTPSRATGETPFFLVYGAEAVLPSELTLRSPRATMYCEADQDQLRRDDLDYLEERRRRAALRAARYQQSLRRYHQRHVRARSLCVDDLVLRRVQTRAGLSKLSPMWEGPYRVVGVPRPGSVRLATGDGTELPNPWNIEHLRRFYP

SEQ ID NO: 103447 - protein, 319 aa, Oryza sativa
  Clone ID: PAT_MRT4530_100876C.1.pep
HEERLEDDPRNIWFEAATLVAGPPPVEISAARPRAAAGAGGLASALSTSVMHPIDSMKTRVQASSLSFPDRVSTLPQIGLRGLYRGSIPAILGQFSSHGLRTGIFEASKLVLKSVAPTLSDIQVQSLSSFCSTILGTAVRIPCEVLKQRLQAGIFNNVGEAIVGTMQKDGPKGFFRGTGATLCREVPFYVAGMCLYAEAKKAAQHVLNRDLEPWETIAVGALSGGLAAVVTTPFDVMKTRMMTAPPGTPVSMQLIVFSILRNEGPLGLFKGAIPRFFWIAPLGAMNFAGYELAKKAMIQTESDSTDSVHEKRTTVGSRG

SEQ ID NO: 103448 - protein, 222 aa, Oryza sativa
  Clone ID: PAT_MRT4530_100877C.1.pep
PPHHDGRPRVAARVARIWTPGHKPPSSSPDIYLVRRTPKLPVTRPPRTKQAPPTAPAPAPPPPPPQPASPKTKTKAKAKKPKRKRSCVHCGSTETPQWREGPTGRGTLCNACGVRYRQGRLLPEYRPKGSPTFSPSVHAANHRQVLELRRQQRQSTNPSTPPPPPVSAAEPIPDEQKEEVVSVPVAAAAPATDGGAASSLDALLLDGPSAPLIVDGDDFLVS

SEQ ID NO: 103449 - protein, 2027 aa, Oryza sativa
  Clone ID: PAT_MRT4530_100878C.1.pep
MAEQGKTRDLSPSVSGDDGEPNPRRRARTPPPPPRQSPKQGEALERVDKSVASPVAGDAGERRDGERRLLVYGDGSTPQGALQAAGALLRHPPVVHDPESPAQRWLEDVANLVMTAQQRLGAGGRSATTKTSGAATTGSVSSRRRARRAAAAARHSAATPSSTPSTREDQHGEPDARLNVERRRNSRRTPRETEGASSSRVSPRHGREDQPSVPPAGGVGCRAFVASLRNVRWPPRFRPTITEKYDGSVNPTEFLQVYTTGIEAAGGDDRVMANFFPMALKGQARGWLMNLPPASVHSWEDLCQQFTMNFQGTYPRPGEEADLHAVQRGDDESLRSYIQRFCQVRNTIPCIPAHAVIYAFRGGVRHNRMLEKIASKEPQTTAELFQLADRVARKEEAWTWNSSGSGVAASAAPGSAAQTGRRDRRRKKRSDRSGDEGHVLAVEGALRATRKGRPASDKKKEAGTPSRERPAGKWCSVHNTSLHDLADCRAVKNLAERTRKWEEDRRQERREGKSPAVPSGKRRSEAKQKAPAVDIDDGNDDLGFQEPGATIATVDGGACAHISRRSFKAMKRELLAMAPTHEAMRRARWSEVALTFDQTDHPPCIARGGQVAMVVSPTICNVKLGRVLIDGGAALNILSPAAFDAIKAPGMVLQPSQPIIGVTPGHTWPLGHIDLPVTFGGPANFRTERVSFDVANLSLPYNAVLGRPALVKFMAAVHYAYLQMKMPGPGGPISVRGDLKVALACMEQRADRLAAASKPEGGDERLGPSAPTAPRQRMATCDEVPEDALVSFLRANADVFAWRPADMPGVPREVIEHRLAVRPGARPVRQKVRRQAPERQAFIREEVARLLEAGFIREVIHPEWLANPVVVPKANGKLRMCIDYTDLNKACPKDPYPLPRIDQIVDSTAGCDLLCFLDAYSGYHQIRMAREDEEKTAFITPVGTYCYTSMPFGLKNAGPTFQRTTRISLGSQIGRNVEAYVDDLVVKTRNQETLLSDLAETFENLRSARIKLNPDKCVFGVPAGKLLGFLVSARGIEANPEKIRAIERMRPPSKLRDVQCVTGCMAALSRFISRLGEKALPLFKLLKRSGPFTWTEEAENALAQLKAYLSSPPVLVAPEPNESLLLYLAATPQVVSAALVVERDEDNPHPAHPYSVPTRPGSRQGGEAPESNGSLRPPTTGVGPLPACQTVLGAPDPQEGPEATKGRPHLPPFDPEANPVLTRPGREQGEEAPEPKGGLRPLTTGAGPLLACLTTPGAPDPQDGPEATVGRPLLSSSDPEVISTEDECAPRGHLDEEHPGDTAPSEEDRPRRKVQRPVYFVSEALRDAKTRYPQAQKMLYAILMASRKLRHYFQAHRVTVVTSYPLGQILHNREGTGRVVKWAIELSEFDLHFEPRHAIKSQALADFVAEWTPAPETVSIPEASTNPSQLPHTAHWVMQFDGSLSLQGAGAGVTLTSPNGDVLRYLVRLDFRATNNMAEYEGLLAGLRVAAGLGIRRLLVLGDSQLVINQVCKEYRCSDPQMDAYVRQVRRMERHFDGIELRHVPRRDNMIADELSRLASSRAQTPPGAFEERLTQPSARPDPLGETDAPDRPPRPVGVQASGPEESAPSSLRLIAWISEIQTYLTDKTLPEDCEGSERVQRISKRYVLVEGTLYRRAANGILLKCIPQEQGVELLADIHEGECGAHSASRTLVGKAFRQGFYWPTALNDAVDLVRRCRACQFHAKQIHQPAQALQIIPLSWPFAVWGLDILGPFKRAPGGFEYLYVAIDKFTKWPEAYPVVKIDKHSALKFIKGITARFGVPNRIITDNGTQFTSELFGDYCEDMGIKLCFASPAHPRSNGQVERANAEILKGLKTKTFNILKKHGDSWIEELPAVLWANRTTPSRATGETPFFLVYGAEAVLPSELTLRSPRATMYCEADQDQLRRDDLDYLEERRRRAALRAARYQQSLRRYHQRHVRARSLCVDDLVLRRVQTRAGLSKLSPMWEGPYRVIGVPRPGSVRLATGDGTELPNPWNIEHLRRFYP

SEQ ID NO: 103450 - protein, 77 aa, Oryza sativa
  Clone ID: PAT_MRT4530_100879C.1.pep
MGERKAGICLVLVLLLSTLAQHAYADHQPSEIINNGAGMKFPCRRSVPVSLASSTAGFSPKSTKPKSSLTSAWEKDL

SEQ ID NO: 103451 - protein, 620 aa, Oryza sativa
  Clone ID: PAT_MRT4530_10087C.1.pep
MDDEDLVEDLLVTVRSARAFVEFRRTQRKECANLLRWLELVLPLLEELRDSAPPLTEDAYHRLALLGRAFSAARRLLRSCHDGSKIYLALESEAVQGRFRAVYEKMNSALDGMPYSELAISDEVKEQVELMNAQLTRCKKRADTQDIELSMDLMVILDNKEGERNADRAILERLAKKLELQTLADLRAETMAIKKLISERNGQSGDSTKQIIELLNKFKEVAGVDEKNVLGEVSVTKSLDKCPSLMIPNDFLCPITLAIMRDPVIVATGQTYERRSIQKWLDSGERTCPKTRQRLSHMSLAPNYALKNLILEWCDKNKVELQKREPEPVAEQDDEHQRGAEDIPSLVEGMSSIHLDVQRKAVKRIRMLSKECPENRTLIADSGGIPALIGLLACPDKKVQENTVTSLLNLSIDESNKRHITKGGALPLIIEILRNGSAEAQENSAATLFSLSMIDENKLTIGRLGGIAPLVELLQNGSIRGKKDAATAIFNLVLNQQNKVRATQAGIVPALLKIIDDKALNMVDEALSIFLLLSSNAACCGEIGTTPFIEKLVRLIKDGTPKNKECALSVLLELGSKNKPLLVHALRFGLHEDLSKIAKNGTSRAQRKATSLIQLARKCY

SEQ ID NO: 103452 - protein, 61 aa, Oryza sativa
  Clone ID: PAT_MRT4530_100880C.1.pep
IKLELVLVLSKRAHFSKFPRQIPPFFHQKVALFRGPRNRFPLIALGGPFCNCPNLVSSPQN

SEQ ID NO: 103453 - protein, 51 aa, Oryza sativa
  Clone ID: PAT_MRT4530_100881C.1.pep
LKQLNINHNNSTSSLLNNYGGKQPISQSSRAMYLSICSSLHFKNNQGLALN

SEQ ID NO: 103454 - protein, 73 aa, Oryza sativa
  Clone ID: PAT_MRT4530_100882C.1.pep
MAAPPRAPSPARACTRSGGCGRSRRGRGAAVAFPVTGCAPSIGLGFCGVELAAVVNFVPCAVPASTPLLYGAV

SEQ ID NO: 103455 - protein, 69 aa, Oryza sativa
  Clone ID: PAT_MRT4530_100883C.1.pep
MAATSFPNPFFPSGGEGMDLGKPATRRRSVRGSELEMRSKRHRSELPSDNELAGEGPHARVSGGRDVAA

SEQ ID NO: 103456 - protein, 46 aa, Oryza sativa
  unsure (1)..(46): unsure at all Xaa locations
  Clone ID: PAT_MRT4530_100884C.1.pep
GYLIHTNYMNECHALVKLTXKSYFRPCFDKLDKFTNKKHFRRSPPK

SEQ ID NO: 103457 - protein, 122 aa, Oryza sativa
  Clone ID: PAT_MRT4530_100885C.1.pep
LKYPLKDAPKETEKTNTTLRRRTRPHRPHHGGRRTRRRGMAAEGGERIGGGPGRPRRRPPGEGGGGRAASRQIRPVGLPLAAGRRRRMGGAPLVAGAARLPLRSVPAHTSLPPPGREKGTKR

SEQ ID NO: 103458 - protein, 62 aa, Oryza sativa
  Clone ID: PAT_MRT4530_100886C.1.pep
MVRLMSPLRNSAGKWRRWQLAEEGSCGRGEEGGDEVEGGGLSVGVAASGGNGGVEVGDGSWR

SEQ ID NO: 103459 - protein, 1344 aa, Oryza sativa
  Clone ID: PAT_MRT4530_100887C.1.pep
MESMNSFLEHLARTAPPDGSHDEQVQTWMKQVRYLAHDYSNCIDHYLQRGDPAIHRARGGLRGYFWWAYWFVLEKVAQHKAAARLCELKERASDVDKRRMSDIVSEGLTKAGVQFKHTVRINLPSVHYPSDYLGPNEVLCYILRVCTIQKDNKDPNYVDNGIVRFKAWRQREQMIRIVSNKFEEHVPRRIQDLISKIEDMESKINVKTVGSEKTRQTYEEDSMNEGTDGGSKTIEGNAGGGRNTAGEKGGVTKSEEKGGGSKTVEQRGGSTETQEKTGGGKTTEEAVDTECSLVLQTDKPLCVLYLALLSEEKWKQAKDVLALEEQTLINNTAKEFKQHMEGDMKTPTIKLLDTQYQAILWEVFLTSNPEEATTAASATSSSTNRRAAPATLGDDQTKEIMEQIKGIIHLVKQDILEEIQAIKSHGPREQKLGHDQVVSAIQDAKNKITQIGLKIKEQMIIKGMIDRINLYLKDGDTLFIIVEDENRRHELKWEDIMNALELLKCAKGSAVIVTTKNTQKASEFCYPPSEPITYSLVGLYHDIVLKLTQQLVNNEDDNNNSQILRDILDKCHPHEFCMKMFARALYANPNRSNKELGRLRDTLQISENSLDTKAKKIFKFSYRDLHREHKTCLLYLAIFPQGTNIRRSTLIARWLTEGLITKEDWPTAVRHAERCFDALIDRCLVSPGDISAKGEFKSCMVGDLIHGGLRLRASDSIDMFVKKLHNYSSQLSLLKLLDLQGCQCFDKSSYLKAICNNIALLKYLSLRRTNITHLPSEINNLHDLEILDIRQTKVPEKETKLVLLLKLRRLLAGYTDPSPSFNDKGTNNRTFSCVRIPSKIEKMENMEVLSNVTASWYGYELKDIRKLWQLRKLGVVIKDKDRHLQNLFQAVGDLNECLQSISITITDTRSETTSKDSKILSDELYNRLIHPPKLLESVSINGSTNLRILSLLAKVSGSDNDAYNDPSLTFKKEMFEHLKCLLVDGDNLKCMTDIIFEEGAAVELEKIVLSSTNVRSLRGVGRLPMLKELELKGNKSLFSFHGGVPLSGDGGAHQESNEPVSHSKDGAAPQKNNDVHVSPSEDGAAPHTSTDGQVPPSAEGPAPQINTEVKITFKKGEFQQLKYFLFEDSKIVDIIIENGAVPELERIILLLTRKESQLTVSGSRAKLKEIEVKGDKSILLSLLKNANKIEKENSYEESELTFKKDEFPKLNLLTVRSYKLHGLYGMKKFQNNAEITNIASIVHRSASLEKIIFNKGSAPNLEKIIWSRPSFAELEPLPGIGNVEKLKELDLDCDNVPKQFSACARRGQKQMTDQVNPEEKHSVSSISKCHYHRENIKTMLDNDI

SEQ ID NO: 103460 - protein, 937 aa, Oryza sativa
  Clone ID: PAT_MRT4530_100888C.1.pep
ASSLCVSAVLSGAASWPGRLASQGHQGKRAVAQPLAASAVTEAAPPAPVVAPPARPVDAPRRRGGRGGGGGGGELVAWKSVRQERWEGALEVDGELPLWLDGTYLRNGPGLWNLGDYGFRHLFDGYATLVRVSFRGGRAVGAHRQIESEAYKAARAHGKVCYREFSEVPKPDNFLSYVGQLATLFSGSSLTDNSNTGVVMLGDGRVLCLTETIKGSIQVDPDTLDTVGKFQYTDKLGGLIHSAHPIVTDTEFWTLIPDLIRPGYVVARMDAGSNERQFVGRVDCRGGPAPGWVHSFPVTEHYVVVPEMPLRYCAKNLLRAEPTPLYKFEWHLESGSYMHVMCKASGKIVASVEVPPFVTFHFINAYEETDEEGRVTAIIADCCEHNANTAILDKLRLHNLRSSSGQDVLPDARIPLDGSQFGELETALDPEEHGRGMDMCSINPAHVGREYRYAYACGARRPCNFPNTLTKVDLVERTAKNWHEEGSVPSEPFFVPRPGATEEDDGVAISMVSAKDGSGYALVLDGKTFEEVARAKFPYGLPYGLHCCWVPRKRNSNLVLPTQPADRWSDRREVGASGCHVMPLGPLHRFAPRPSPSRHVAEGSSEEGAQAEPPLMHTTPQLPHAAFNAVRQTCGPFQPPCAVASAVADQLHHLPRLRKVELYPGRWFFCAKSNRRLAVIVNRSAAVPPTASSVIAFGRRRLHWICSCEEKPIRHLSSAEDHRKVIAGHLLRRSSLPTVAICRRHRVRTAEEHPVHPFAAAEDHRSAVAVGDPSRAEPPSNLVAGSDYDPGTVRCGGLCYARGTVTAPFRGTVVANGKLRMCIDYTDLNKACPKDPFPLPRIDQIVDSTTGCDLLCFLDAYSGYHQICMAREDEEKTAFITPIGCNIEAYVDDLVVKTRHQDTLLQDLAETFDISSRGIEANPEKICAIERMRPQQA

SEQ ID NO: 103461 - protein, 50 aa, Oryza sativa
  Clone ID: PAT_MRT4530_100889C.1.pep
PLLWPAAAGGARLLEPGAMPPPFTGDQQRATSAARSATRTPSAFGSGREK

SEQ ID NO: 103462 - protein, 142 aa, Oryza sativa
  Clone ID: PAT_MRT4530_10088C.1.pep
TAPDGSKYVSGSNYIYRVDEKDGSLCELTLVAKGPVVVTVDPPVDSTATQLTYDGTFESPMVFFDGTVLLPGPQDVAEEVENCMRGGRCARRGGGGGNNNAGPISAVIIEKTLERIDAMCKQNDIPYANIGSITLDVALRPV

SEQ ID NO: 103463 - protein, 801 aa, Oryza sativa
  Clone ID: PAT_MRT4530_100890C.1.pep
MSPAMLQASSLCVSAALSGAASRPGRLASQGHQGKRAVAQPLAASAVTEAAPPAPVVAPPARPVDAPRRRGGRGGGGGGGELVAWKSVRQERWEGALEVDGELPLWLDGTYLRNGPGLWNLGDYGFRHLFDGYATLVRVSFRGGRAVGAHRQIESEAYKAARAHGKVCYREFSEVPKPDNFLSYVGQLATLFSGSSLTDNSNTGVVMLGDGRVLCLTETIKGSIQVDPDTLDTVGKFQYTDKLGGLIHSAHPIVTDTEFWTLIPDLIRPGYVVARMDAGSNERQFVGRVDCRGGPAPGWVHSFPVTEHYVVVPEMPLRYCAKNLLRAEPTPLYKFEWHLESGSYMHVMCKASGKIVASVEVPPFVTFHFINAYEETDEEGRVTAIIADCCEHNANTAILDKLRLHNLRSSSGQDVLPDARVGRFRIPLDGSQFGELETALDPEEHGRGMDMCSINPAHVGREYRYAYACGARRPCNFPNTLTKVDLVERTAKNWHEEGSVPSEPFFVPRPGATEEDDGVAISMVSAKDGSGYALVLDGKTFEEVARAKFPCEEKPIRHLSSAEDHRKVIAGHLLRRSSLLSDVPEESVFVEEAPGLEWYISGLEIDLYSRWLANPVVVPKANGKLRMCIDYTDLNKACPKDPFPLPRIDQIVDSTTGCDLLCFLDAYSGYHQICMAREDEEKTAFITPVGTFCYTTMPFGLKNAGPTFQRMTRITLSNQIGCNIEAYVDDLVVKTRHQDTLLQDLAETFDSIRSTRVKLNPDKCVFGVPADKLLGFLVSSRGIEANPEKICAIERMRPQQA

SEQ ID NO: 103464 - protein, 91 aa, Oryza sativa
  Clone ID: PAT_MRT4530_100891C.1.pep
GSSHPPVKRWKAQYWNPFLLRGAPALSKKTQWSHGSIFVLRSNWRFFSTFINLAREELFHLSYPLLSGCLPRHETPHITWMGSEVGNGYKW

SEQ ID NO: 103465 - protein, 197 aa, Oryza sativa
  Clone ID: PAT_MRT4530_100892C.1.pep
MAKFGQPKLPCHSWARCWRCFSLTPYYLLESAPTPSAQLPPAMAATDGDGAQAAEDGGDEPGWQRIAAEPEQRWTRRPTQVPPPITAVSFLPPLVPATAMGRRRVVARSHPPPELAVNGSPALKIGGNGMSASHLPEERIPASLLPTFHLLPTPVLPLSTSSCRRMCPSHIHLHPRPSGAACHLLLPCHGKVGKEKK

SEQ ID NO: 103466 - protein, 144 aa, Oryza sativa
  unsure (1)..(144): unsure at all Xaa locations
  Clone ID: PAT_MRT4530_100893C.1.pep
LQTVERRSASHHRDGXGHTWRTPPNTWPEHACLSAVPSVIRPVTHRSXASQAFSTPRRGAPALASLNAVKWALVGVHPTSLAXRPRGDXPRGQGSPSPRAREGRLSPIHGPDPLGGXRHVDVRXRPLPFKHATPGPYHRQKSWM

SEQ ID NO: 103467 - protein, 488 aa, Oryza sativa
  Clone ID: PAT_MRT4530_100894C.1.pep
MRKVCPNLDREDGLDTVLEVPVPELHRQAPRRRGRRGGGGTVKSWVRARMEHGRRRDGAAPSRAEVQLMLGVVGAPLVPQAVEARKAMVAGRGVGGEGEEPLDLEASKARYIVEQYVAAAGGEAALGAATSMYAMGKVRMRTTTTSKANKGKVMGVAAGGEVAGGFVVWQKKPDLWCVEMVVAGGVKMSAGSDGKVAWRQTPWQEAHASRGPPRPLRRCIQGLDPKSTADLFSSAAWVGERCVDGDDCFVLRVDADHAALRARSSGDVEVVRHAVLGYFSQRTGLLVRLEDSHLLRIGLAHAAAESAYWETTMESSIGDYRAVDGINIAHAGRTAVSLSRFESADDAAAAARGSNKRSWGTTTMEETWSIEEVDFNVVGLSMDCFLPPRDLVLNDCSKQQQKEDAAAAVVVKDAAAAVDVKDAAGAAANAKGGSDDGKTNGGDVGRGVVVKKALVPAVTGLGWFGPAKVVAVDDTVDDGVAAAADDDK

SEQ ID NO: 103468 - protein, 377 aa, Oryza sativa
  Clone ID: PAT_MRT4530_100895C.1.pep
MVQRTSSDSAASAEAMVMDLSPKRPAKSYGGEGGSYFDWSPSELPMLRAASIGAAKLSLAAGGLALPFYSDSAKVAYVLQGKGTCAVLLPETPSEKILPIKEGDALALPFGVVTWWHNLHAATTELVVLFLGDTSKGHTAGRFTNMQLTGSTGIFTGFSTEFVARAWDLPQDAAASLVSTQPGAGIVKLKDGFRMPEGCDKDREGMVLNCLEAPLDVDIKNGGRVVVLNTQNLPLVKEVGLGADLVRIDGHSMCSPGFSCDSAYQVTYIVRGSGRVQVVGIDGTRVLETRAEGGCLFIVPRFFVVSKIADDTGMEWFSIITTPNPIFSHLAGRTSVWKAISPAVLQASFNTTPEMENLFRSKRLDSEIFFAPNSNSI

SEQ ID NO: 103469 - protein, 57 aa, Oryza sativa
  Clone ID: PAT_MRT4530_100896C.1.pep
MRAGAASSAAENDEEEEEADDDDEEAAAAPDSSGMRGGGELRSAGTAGIMVERVRDC

SEQ ID NO: 103470 - protein, 101 aa, Oryza sativa
  Clone ID: PAT_MRT4530_100897C.1.pep
AVLKYNIARCLHLCRYPCYLFDFLVVSLRYVSCMYLMPPFSSSPYVSSPFSTLQIFPLDVKIVVSPRFLTLLFIRVDGRCFSSSQHLCTFYRSPWFMDRGV

SEQ ID NO: 103471 - protein, 871 aa, Oryza sativa
  unsure (1)..(871): unsure at all Xaa locations
  Clone ID: PAT_MRT4530_100898C.1.pep
MRTHSLTLLLVATALSYQPSIADDSINQAASITGNQTLVSANGIFKLGFFSPDGGTYYLAIWYAKISPQTVVWIANRQNPVLIKPGNVRLLADGRLVIRDGQNNTVWSSAAPTGTVAQGATARLLGTGNFVVSSPQGMAWQSFDYPTDTLLPDMKLGVDLKNGITRNITSWRSPTDPSPGKYTFGLVLGGLPEFFLSENSRRIYASGPWNGEVLTGVPLLKSQQAXFTFTVLSSPDETYYSXSWSDNNGQSWSENSYFYPPDPCDNYAFCGPFSYCVSSVDQSRQCSCLPGFESQSQPGPFQDSSKGCARMANLTCGDGDGFWRVNRMKLPEATKATVHAGMTLDQCRQACLRNCSCNAYAAANVSGGDSRGCVFWTVDLLDMREYTVVVQDLYIRLAQSEIDALNAPARRRRLIKNTVIAVVTTICGILGVVGCYCFWRNKARRKQHTEMEKSSDADDLPFRVRKSPALSPARDQWFDENRGAEDDLDLPLFDLEMIFNATDRFAAHNKIGEGGFGPVYMGRLEDGQEVAVKRLSKRSVQGVVEFKNEVKLIAKLQHRNLVRLLGCCIDDDERILLYEHMHNKSLDTFIFDEGNRKLLSWNKRFEIILGIARGLLYLHEDSRFRIIHRDLKASNVLLDRNMVPKVSDFGIARMFEEYAMDGVFSMKSDVFSFGVLVLEIVAGRRNRGFCESEINLNLLRYAWMLWKEVVMMLASENATLPQPNEPGVNIGKITLDTESSHGLTSNGYSQPKREVYKEGLVQHHEEAQILAQFKPEIDTKKLIADLKKSDKLAADALLYFKKTRHIILYYEDVVSNDTKLMDVLDFLRLPKRKLSSRHVKIHTKLLRDHIDNWAEVNSTLMGTQYESFLNG

SEQ ID NO: 103472 - protein, 155 aa, Oryza sativa
  Clone ID: PAT_MRT4530_100899C.1.pep
VDENPLERITWKFRNLRTSNLSVDFGKISSIMSIFSLLRCAPQSGQLNIEVDLKEAQGDDEIHEGILEAYMSEDLVRSLKRVTLSFIKCFPGEMSFIKLLLSKAASLESLKVMMFWHHIMPVSDACLLFTTYKKESSTQVKFIVEHGMDTFDIGS

SEQ ID NO: 103473 - protein, 46 aa, Oryza sativa
  Clone ID: PAT_MRT4530_10089C.1.pep
RLARDNMRSSAAAIAIGPWPIAIALFPHLCMLIGQREAMTIIPKIY

SEQ ID NO: 103474 - protein, 168 aa, Oryza sativa
  unsure (1)..(168): unsure at all Xaa locations
  Clone ID: PAT_MRT4530_1008C.1.pep
KKRFPWRRRWAAAATHXPGGTKLADXAPQSGKDRWPRFGVXAXGXKSXRPXKXAXXXRPLTDXPLXXFPGAVAXGXYLDXSSXGXYRFDPFXLRXPAXLLQFQLDSLDXNLAXXXXAXIXRXRFETXEXKFTXFXPYXXXXSGSNRFPXXXLXHXGRWAXLXTXXASP

SEQ ID NO: 103475 - protein, 68 aa, Oryza sativa
  Clone ID: PAT_MRT4530_100900C.1.pep
CYLKQEQEECFCKLTDANIILNFSSNNPKHPILPVPSSLLLVTCNASSHRQERDVHAISLIRVWTKAC

SEQ ID NO: 103476 - protein, 426 aa, Oryza sativa
  Clone ID: PAT_MRT4530_100901C.1.pep
RGTTGIPKRGYYGPLISAISVVPNFEVPLAVEPPQIGGSKKLSRISKAFLVAMPILAMCAALFVGIYWIKWRRKNSMHKDLRAFDLQTGSFTLRQIKVATRNFDAANKIGEGGFGSVYKLSSRSKQGNREFVNEIGMISALQHPNLVKLYGCCTEGNQLLLVYEYMGNNCLARALFGTVEQYRLSLDWPTRRKICLGIARGLAYLHEESAIRIVHRDIKASNILLDKDLSAKISDFGLAKLNDDDHTHISTRIAGTIGYMAPEYAMRGYLTDKADVYSFGVVALEIVSGKSNTSYRPKEDFVYLLDWACVLHERGNLLELVDPELGSDYSTEEALLMLNVALLCTNAAPTLRPKMTKVLSLLEGHIPLQPFLSDLSLAANSLSSSGQRRNFWQTLSDQSQSMTAAQASSSNTNESSSLDIAGSLRP

SEQ ID NO: 103477 - protein, 999 aa, Oryza sativa
  Clone ID: PAT_MRT4530_100902C.1.pep
MPWRLVPCGRGQLFLVVLGLLLLLLGEVHHGSGARTASLPRLLPAEVRTLRRIAQKMGILRWNFSVDPCNSGGNGGFGGTVNCDCSFYNHTFCHVTNITLEGQNFTGELPPDFAEFPNLLQLDLSRSLLHGGVPDQWARMKLQGLSLMGNNLSGPFPIALTKITTLTNLSIEGNNFYGPIPSDIGHLMQMEKLILSANEFSGPLPAALARLTNLTDLRISGNNFSGRVPVFLGKLKKLGKLQIEGSLLEGPIPSEFSKLINLYDLRISDLRGRGSVFPDLRELVSMKTIILRNCSINGSIPSYIGNMDNLKHLDLSFNKLTGEIPASFANMGHVDHIYLTGNSLTGSIPDWILKRNKIANMVESYSPEMSSLTNVESCLKRNFPCGSSNGKYRYSLNINCGDKEVTINGTKYETDVEPKGASLLYQSPGSNWAFSSTGNFMDNNINDDSYIATSASKLTVPNSELYAKARLSPLSLTYYGLCMHNGSYTVKLHFAEIVFTNDSTYCSLGKRRFNVFIQGRMVLEDFDIEQSAGGAAKAVIKTFTANVTNHTLEIHFYWAGRGTTGIPKRGYYGPLISAISVVPNFEVPLAVEPPQIGGSKKLSRISKAFLVAMPILAMCAALFVGIYWIKWRRKNSMHKDLRAFDLQTGSFTLRQIKVATRNFDAANKIGEGGFGSVYKGLLSDGTIIAVKQLSSRSKQGNREFVNEIGMISALQHPNLVKLYGCCTEGNQLLLVYEYMENNCLARALFGTVEQYRLSLDWPTRRKICLGIARGLAYLHEESAIRIVHRDIKASNILLDKDLSAKISDFGLAKLNDDDHTHISTRIAGTIGYMAPEYAMRGYLTDKADVYSFGVVALEIVSGKSNTSYRPKEDFVYLLDWACVLHERGNLLELVDPELGSDYSTEEALLMLNVALLCTNAAPTLRPKMTKVLSLLEGHIPLQPFLSDLSLAANSLSSSGQRRNFWQTLSDQSQSMTAAQASSSNTNESSSLDIAGSLRP

SEQ ID NO: 103478 - protein, 32 aa, Oryza sativa
  Clone ID: PAT_MRT4530_100903C.1.pep
DSGQPPFSRGYNLKRRKTIYTVVKWFRSKSSS

SEQ ID NO: 103479 - protein, 76 aa, Oryza sativa
  unsure (1)..(76): unsure at all Xaa locations
  Clone ID: PAT_MRT4530_100904C.1.pep
LPAKFTIFXXGXQXEVTNWGXXSXVAIXLWXVLIXXXVTEYYXSNXYSPXQXXXDSXQNXWXPLMSYCGLALGYKA

SEQ ID NO: 103480 - protein, 125 aa, Oryza sativa
  unsure (1)..(125): unsure at all Xaa locations
  Clone ID: PAT_MRT4530_100905C.1.pep
PGDPQACPTVIDQLXEMLKETGIPVQVIFSSGKDVDLLPQRSNKGNATQYLQQHLAMEPSQTLVCGDSGNDIGLFETSARGVIVRNAQPELLHWYDQWGDSRHYRAQSSHAGAILEAIAHFDFLS

SEQ ID NO: 103481 - protein, 45 aa, Oryza sativa
  Clone ID: PAT_MRT4530_100906C.1.pep
YYQNFQSLMLLVVTIYYKKFQLFNMILENSTNSGSAFPYKYFSCK

SEQ ID NO: 103482 - protein, 92 aa, Oryza sativa
  unsure (1)..(92): unsure at all Xaa locations
  Clone ID: PAT_MRT4530_100907C.1.pep
KPNPPKPGAXPKPKPPKPGANGKPGPPQPWGPIPFPKPPCPPGPKGFFFGVFPKNNWSRGNPYFSPCFFWGPRVFRVKSPRGGVPFGQLNIV

SEQ ID NO: 103483 - protein, 151 aa, Oryza sativa
  Clone ID: PAT_MRT4530_100908C.1.pep
MASERKAAAVDGRGDPDAIIIFSPSLCRLAVWRFVAIVAVFSSEANEEEVTWIHSIALALRVLSEISGGGSSDLLELHSSPTTTTGSPLSSTTTPNSGKSSSSQAEVLVVDGWGYGTNNVAPRLYLHRAALRRPISCACGWIDLPEREASG

SEQ ID NO: 103484 - protein, 268 aa, Oryza sativa
  unsure (1)..(268): unsure at all Xaa locations
  Clone ID: PAT_MRT4530_100909C.1.pep
TISIGNGNKISFWTDHWLDGRAPQHIAPSILKLAKRKGNNLRMELKDNYWIAMLNLITSILEIEELVQLGSKIQDVVLDKQRTNDISWXRTANGEYSANSAYQMQFQGEITYANLSTLWTAHSEPKHRXFFGWLILHQRTLTAENLLKRHWPCDWICSPCRSAFEHSNHLEKECLFTSRVWHHVSSXMGYSSFFPQHMTHESTADXWDSLSSITPTAMRKQILGVVLTTWWNVWLERNRKNFQHVSQNELQVAFTIKENIGHLISSRL

SEQ ID NO: 103485 - protein, 823 aa, Oryza sativa
  Clone ID: PAT_MRT4530_10090C.1.pep
MSGLSRLTLSSNNLTGLIPSSIWNNMSALMAFTVQQNSLSGTIPPNAFSNFPSLQLIGMDHNKFHGSIPTSIANASHLWLVQLGANFLSGIVPPEIGGLRNLKILQLSETFLEARSPNDWKFITALTNCSQFSVLYLASCSFGGVLPDSLSNLSSLTNLFLDTNKISGSIPEDIDNLINLQAFNLDNNNFTGHLPSSIGRLQNLHLLSIGNNKIGGPIPLTLGNLTELYILQLRSNAFSGSIPSIFRNLTNLLGLSLDSNNFTGQIPTEVVSIVSLSEGLNLSNNNLEGSIPQQIGNLKNLVNLDARSNKLSGEIPTTLGECQLLQNIYLQNNMLTGSLPSLLSQLKGLQTLDLSSNNLSGQIPTFLSNLTMLGYLNLSFNDFVGEVPTLGVFLNASAISIQGNGKLCGGVPDLHLPRCTSQAPHRRQKFLVIPIVVSLVATLLLLLLFYKLLARYKKIKSKIPSTTCMEGHPLISYSQLARATDSFSATNLLGSGSFGSVYKGELDKQSGQSKDIIAVKVLKLQTPGALKSFTAECEALRNLRHRNLVKIITACSSIDNSGNDFKAIVFDFMPSGNLEGWLHPATNNPKYLNLLQRVGILLDVANALDYLHCHGPTPVVHCDLKPSNVLLDAEMVAHVGDFGLAKILFEGNSLLQQSTSSMGLRGTIGYAPPEYGAGNTVSTQGDIYSYGILVLETVTGKRPTDKKFIQGLSLREYVELGLHGKMMDVVDTQLSLHLENELRTTDEYKVMIDCLVSLLRLGLYCSQEIPSNRMSTGDIIKELNAIKQTLLGIDNILEPLVRFWSSSLECSFPTLPLLDYAWH

SEQ ID NO: 103486 - protein, 72 aa, Oryza sativa
  Clone ID: PAT_MRT4530_100910C.1.pep
GVHLKKYSSKEGESLVSCRDGPLRDGVVSHHRTCLSCRYCYWSHCLACSPFLCCPPSTRPMDLSTVDRIPYC

SEQ ID NO: 103487 - protein, 428 aa, Oryza sativa
  Clone ID: PAT_MRT4530_100911C.1.pep
VVGTPSYMCPELLADIPYGTKSDIWSLGCCIYEMTALRPAFKAFDMQALISKITKSIVSPLPTRYSGAFFASFFSLQAAELLKHPHLQPYVLQVHLKSSPARNIIPSHQSPIDKVKKMTFPTESMCRSKGRRNSLGNERIVTFSKPSPERKFTSSIQSIKDYSTTRSVKDLSIDVSLVEEVSSKTTFTTRTSSIVKTPKRTPSKTITTPQLEPPKVSYNRVNRSELLSRTPVNRSARVIRRASLPLPLPSSETPKRGVSSISILEQLESPDVSVNSPRIDRIAEFPLASSEDPPFLKLHGRRSPTPTPQHCVIDQSITKDKCMVEAFHIIDVDDDDGRSDSSSGRNNAAAAASSRAGSSESTRQRRFDTSSYQQRAEALEGLLEFSAQLLQQERYDELGVLLKPFGPEKVSPRETAIWLTKSFKETGL

SEQ ID NO: 103488 - protein, 44 aa, Oryza sativa
  Clone ID: PAT_MRT4530_100912C.1.pep
GYLYFLLSLSFSHYEFNAYFLKLVCISSCMRPNTLHFYLSLSST

SEQ ID NO: 103489 - protein, 379 aa, Oryza sativa
  Clone ID: PAT_MRT4530_100913C.1.pep
MSEKETLHHHHHRRRLPSTAPSPSPSPLDDDDLLQEILLRLPPDASTLPTASAVCKRWRRLAFEPGFRRRFVARHEPPFLGFFFPYDFDPVFSFNAGFRSTTAQHHLPAHRFLPEREIGLRWEIVNCCKGLALFRITFRGGCKCKEFMVVDPISGDRRLLPFPLVDGKFLSATVVPAAADRRSFRVVAVFAERNTFTSVFASVYSSDAGVWSDYVSRLCLPWEVWVLRPSVLAGNAVHWFLDGYNVLMFDLESQKLGFSELPLDAKDDEDFPHRCRCQIIPAGDGRLGLAVIVGSTMQLWEREIGDGSDATWLLRRTLQLNFLPLEAEGRKLIVGVAEENSSILLWTRVGLFMVHLKFLQVRKVYGEISVDNYYPYSSF

SEQ ID NO: 103490 - protein, 151 aa, Oryza sativa
  Clone ID: PAT_MRT4530_100914C.1.pep
MVDDETTTNRAVVREALPKNLITRLPGADLRRRNSNNEDTVYDKEYEKDGSPTENINVYDKIRACTHPWYTALQISMNALVMVELDGETDPLEEYEKDGSPIENINVYDKIRVCTHPWYTALQISMNALVMVELDGETDPLEIKIKIKCFT

SEQ ID NO: 103491 - protein, 132 aa, Oryza sativa
  Clone ID: PAT_MRT4530_100915C.1.pep
MGIQKTARPEVRPKAGPAESNGAAALAEGWTTGQRRGCGTNETLDQRARLRWRRRSRPGGSDTYGALGRCGASSLFRCEDEGGPALRWCIVAGLAVRDASALARRMDALHKETNTALRQVSVRHSGPREVLK

SEQ ID NO: 103492 - protein, 61 aa, Oryza sativa
  Clone ID: PAT_MRT4530_100916C.1.pep
FWHPHQKKRGEFGLPPTNSRMQYAAKRIGGGHREDLAKLVQFAFGHMLATTLYEELDLITG

SEQ ID NO: 103493 - protein, 175 aa, Oryza sativa
  Clone ID: PAT_MRT4530_100917C.1.pep
MGSVSVTHAAEAGGSRWSLVTAVVVVAGSATRTVKISHRSESLYAVGRSLRRYVKIVSILHSAGGACRCDESVDHGMHEGQGLPYTHVPTPIHPGNVRASLRLTAPPCHLGESTPHHQRCQAVARPAIRKPFAPRAGGVRASNRQPKALCCRAVPRPRNNFTAPRKRVSYLAPRH

SEQ ID NO: 103494 - protein, 76 aa, Oryza sativa
  Clone ID: PAT_MRT4530_100918C.1.pep
WDYYLTCLLNEISDNCSNARKLTNTPAVASVPNWFVRFDSYENAHPYQRYLYHEHSLEKIADYIDESRLLERSTSN

SEQ ID NO: 103495 - protein, 66 aa, Oryza sativa
  Clone ID: PAT_MRT4530_100919C.1.pep
MAPAARDQHTETAPSRPYGWSVRPARTRRSDRPRPCGQTGCPGRSDRHLGRGQTGPGQAENSHYPS

SEQ ID NO: 103496 - protein, 110 aa, Oryza sativa
  unsure (1)..(110): unsure at all Xaa locations
  Clone ID: PAT_MRT4530_10091C.1.pep
DKPNIDIRDKPKXTLSGACGGRQEGSSAISDLGEFIFEEENYPVVDYVLMNIEQYRLRPTGCKAITCQIRGPNLYKNPCLRLFYFNLAYTLVPTIHIXAKYRCRGLKRRH

SEQ ID NO: 103497 - protein, 70 aa, Oryza sativa
  Clone ID: PAT_MRT4530_100920C.1.pep
VQPFFQKIWEKLELPWKKFFPGFTFTHWGLLGQGNKFQGGKQIPPSLQNFGGGFFRFLGVGKIWGCFTKN

SEQ ID NO: 103498 - protein, 72 aa, Oryza sativa
  unsure (1)..(72): unsure at all Xaa locations
  Clone ID: PAT_MRT4530_100921C.1.pep
NPRSDRSVTGHRPDKRARPYTRRKTHKGSGRLGPRGRGGSGPTPXGETKRRANTSPSGPTXPRVPGHVGDCV

SEQ ID NO: 103499 - protein, 59 aa, Oryza sativa
  unsure (1)..(59): unsure at all Xaa locations
  Clone ID: PAT_MRT4530_100922C.1.pep
PLSFAIADGSQPAYEGTIYVLRRILMRADHFGHQKLXAKQGFFNSLVHVFVQLVGDVLP

SEQ ID NO: 103500 - protein, 37 aa, Oryza sativa
  Clone ID: PAT_MRT4530_100923C.1.pep
MHHPRARYPPGYTSGGGGGGGGGGGGGRGNGGGGFGG

SEQ ID NO: 103501 - protein, 105 aa, Oryza sativa
  Clone ID: PAT_MRT4530_100924C.1.pep
MACPSAYASWRVAATPGQTATAGLSPEVGRRADPSTPTPDGRTPKAARATPRSIGDRELAKLLLLRGERTANARVTPLCVARCSSRPQLATRPRAMHVRCTGSSR

SEQ ID NO: 103502 - protein, 201 aa, Oryza sativa
  Clone ID: PAT_MRT4530_100925C.1.pep
MRLIGRGKSSKAKKGSSTPLQSKEKIAANVETVAVGSNNRQVAPDDNMPLGEAGYASSRDEVFFEACPWLESDCEDEFYSINGDGTPARSFRTNSSNHAIQPEPRKLPTLGAILKAEPLRPPPPPQETQPTPPSPATTMRLADLLRERQESFTCYDGPACAISRTGSSCGAGNGEQWSHCCIPSFVPRTSVSYAKGRRKRR

SEQ ID NO: 103503 - protein, 88 aa, Oryza sativa
  Clone ID: PAT_MRT4530_100926C.1.pep
LLLQYTSRWTLSETLHILNNYHPKNHLISLHTLSIDRFFTCASSSPSRSSHWYAGRSSECSNGSTARRCRRRRRSPSGRWRRQGRRSK

SEQ ID NO: 103504 - protein, 98 aa, Oryza sativa
  Clone ID: PAT_MRT4530_100927C.1.pep
AIPPATPQKAGRHSLCAATIRAGSPPCSEHLLLFSDMINNVYPEIESLSNGRPKKMLGVYMRLGLGVGLRENNASFSQSFSNKTRAAGIRMLASLKNS

SEQ ID NO: 103505 - protein, 53 aa, Oryza sativa
  Clone ID: PAT_MRT4530_100928C.1.pep
GSGFGRQLMVHRVHGPGKGGAPRGTHVAPMWHRRSSHAGDHAGGGTGSPDPLG

SEQ ID NO: 103506 - protein, 1274 aa, Oryza sativa
  Clone ID: PAT_MRT4530_100929C.1.pep
MDAAANGGRDGKEKKAKNGRDGEDKKKEEDGDAGKKVSFTGLFRYADGTDLLLMAVGTVAALANGVSQPLMTVIFGQVINAFGEATNGDVLHRVNQAVLNFVYLGIATAVVSFLQVACWTMTGERQATRIRSLYLKSVLRQDIAFFDVEMTTGQIVSRMSGDTVLVQDAIGEKVGKFLQLVATFAGGFVVAFVKGWLLSLVMLACIPPVVIAGGAVSKMLAKISSKGQASYSDAANVVEQTIGAIKTVVSFNGEKQAVASYNKLINKAYKAAVEEGLTNGFGMGSVFFIFFSSYGLAIWYGGKLVVSKGYSGGDIINILFAVMTGAMSLGNATPCMAAFAEGQSAAYRLFKTIKRKPQIDPDDITGKQLEDIRGDVELKDVYFSYPARPEQLIFDGFSLHVSSGTTMAIVGESGSGKSTVISLVERFYDPQAGEVLIDGINIKSLRLNWIRGKIGLVSQEPLLFMTSIKDNITYGKEDATIEEIRRAAELANAANFIDKLPDGYDTMVGQRGAQLSGGQKQRIAIARAILKNPKILLLDEATSALDVESERIVQEALNRIMVDRTTLVVAHRLTTVRNADCISVVQQGKIVEQGPHDELVMNPNGVYSQLIRLQETHEEEEKKLDHHISDSRSKSRSLSFKRSISRDSAGNSSRHSLALPFGLPGSVELLEGNDSTVGEQTEQGGDGEVQQKAPIGRLARLNKPEVPILLLATLAAGVHGVLFPMFGVMISNAIKTFFEPADKLKKDASFWGLMCVVLGIISIISIPVEYFMFGIAGGKLVERVRALSFRSIIHQEVAWFDDPRNSSGALGARLSVDALNVRRLVGDNLALAVQVVSTLITGIVIAMIADWKLTLIILCVIPLVGLQGYAQVKFLKGFSEDAKMLYEDASQVATDAVSSIRTVASFCSEKRVMTMYDNKCEASKNQGVRTGMVGGLGFGFSFLMLYLTYGLCFYVGAQFVRHNKTTFGDVFKVFFALVLATIGISQTSAMASDSTKAKDSAISIFALLDRKSQIDSSSDEGRTLANVKGNIDFRHVSFKYPTRPDVQIFSDFTLHIPSGKTVALVGESGSGKSTAIALLERFYNPESGTILLDEVEIKNLKVNWLRDQMGLVGQEPVLFNDTIRANIAYGKHGDVTEEELIKAAKASNAHEFISSLPQGYDTTVGERGVQLSGGQKQRVAIARAILKDPKILLLDEATSALDAESERIVQDALDNVMVGRTTIIVAHRLSTIKGADIIAVLKDGAIAEKGRHEALMNIKDGVYASLVELRSGSS

SEQ ID NO: 103507 - protein, 117 aa, Oryza sativa
  Clone ID: PAT_MRT4530_10092C.1.pep
HASGFLVVVASLFPLIKSQDRVNKGKRDSKKKTLPCRSDRQIASKQTFDSSTDRASKQLDLPIYGSPRARTDRARITYLLIDFVRSLRLCASMLELLLVGCSIVVLLLHGANFLFRA

SEQ ID NO: 103508 - protein, 147 aa, Oryza sativa
  Clone ID: PAT_MRT4530_100930C.1.pep
MALLHPPPPLQASSLSQHFSLSSSRQRCRRRVDAIVAAVVVVIVVASAPPSSRVSSPYPQAAPSSSHVAGRGRSQVAVAERGRIRAPGLAGGGSIGVGAIRYSWWRRRRAAGDPHSQGEPAVDPQASAPSWPAAEAAPRPATEAATS

SEQ ID NO: 103509 - protein, 153 aa, Oryza sativa
  Clone ID: PAT_MRT4530_100931C.1.pep
MAPKADSSKKADPKAQALKTAKAVKSGANFKKKTKKIRTSVTFHRPRTLKKDRNPKYPRISAPPRNKLDHYQILKFPLTTESAMKKIEDNTTLVFIVDLRADKKKIKDAAKKMYDIQAKKVNTLIRPDGTKKAYVRLTPDYDALDVANKIGII

SEQ ID NO: 103510 - protein, 129 aa, Oryza sativa
  unsure (1)..(129): unsure at all Xaa locations
  Clone ID: PAT_MRT4530_100932C.1.pep
CLNSYQYPESSSYILTWHLALKKLPTGIRFESNCMRCRARRLSLQHHGQSPACRLSNRLNNWLQWSTCHVRLSDRETDGFIHXCFCRCYPIIRLRRWVQRAYAQGARVQPGERVSEPGEVEGDVLAAEV

SEQ ID NO: 103511 - protein, 113 aa, Oryza sativa
  Clone ID: PAT_MRT4530_100933C.1.pep
MAFSGGGRQQGDGPSDGDDGVPRSLIGGRPRPILEQIKLNATQMHNLRGTNSPAVGTPGMSLAAAAEVAVAAVLAAAAARAASAAADNANEAEGSGGNKQEAAVTTAPTSPEN

SEQ ID NO: 103512 - protein, 154 aa, Oryza sativa
  unsure (1)..(154): unsure at all Xaa locations
  Clone ID: PAT_MRT4530_100934C.1.pep
WQAYATQQQPRWPRRRARLAGGQGNGGVTAIAELTISSLPLETRCAPFPLRQHGGFWLPETFLPGLEAARARFEPRPSDVLLASFPKSGTTWLKALAFATLNRAAYPPSGEGHPLRRRGPHDCVQFLXSALVVSDDMFASLPSPXLLSTHLPYS

SEQ ID NO: 103513 - protein, 89 aa, Oryza sativa
  Clone ID: PAT_MRT4530_100935C.1.pep
VTPAAYTGVHRQLPSSLLAVGSQVLGTPWSGCQPSGTGRFTCCVVLLALLLLMQACYDASHGMRIARALFFRWHGQNRRSEPSLHWRRS

SEQ ID NO: 103514 - protein, 431 aa, Oryza sativa
  unsure (1)..(431): unsure at all Xaa locations
  Clone ID: PAT_MRT4530_100936C.1.pep
FFDLRFSITEAKFYLGNWSSWHGNPLRSQATQLPCPLENLRHVKRXKSELSIILCLATGPEHCSEMFPQDVKKIVGTYELNTFIAKVILPVTRNVWTSANESYDILKNTAYHITFIVDSFLAQVARFPATSKEEWEEQCKLWPTSYHPPHDLDGVSGFKECELPSIFNCMRTALRLSEVGNAAVVVNPSTMQIIAKATDQTLQHDSLKSNKCAELNSDSPFSSLEVTEKKGSRLFLSNSNVSKCNSLNMEASCLNPWGWMKPRPSEQKSLPCEGGFPWHPLRHAAIVAIENAAERDKVMFPSIISSTKPNSDGNMEYYSVNESAKRLKVDRNVSFVTPIFYLSNVALISIHSPRFXLNIYLVWEPCSMCAMALVHQRFKRIFYAFPNPITGALGSVYRLHGEKSLNHRYSVFRVKVPESYSNSSGDCSDKC

SEQ ID NO: 103515 - protein, 47 aa, Oryza sativa
  Clone ID: PAT_MRT4530_100937C.1.pep
PWLSSLANPAFLCYVNLHETKCLYAKLIKWKLLLESVKCLVGLVSEL

SEQ ID NO: 103516 - protein, 213 aa, Oryza sativa
  Clone ID: PAT_MRT4530_100938C.1.pep
RAVPSQPTCRAAGPSTARGWPGRARAGTACVWPAVSVRARTVAVPCRAGPRARPAAQARHGYSCRAGTARYCSRPCRAVPATGSAVPRAARFGLARLATSTMPLDLGERSGKGGGGWVYLAKRAARPSTARARWRHGPLGHGPLGTTPVAGRAVPAHVPTPRPKHGPREHRAVPCRHGHVNGPWVVVGPLARSTAGKLASGTIQIKEKGPKVN

SEQ ID NO: 103517 - protein, 114 aa, Oryza sativa
  Clone ID: PAT_MRT4530_100939C.1.pep
MATTAAAPRAREADSAGGGGSPAREADNGEGDKDSGVEWRPRQRRRRRGGLGSRGQPAAVSTVDNGAPAMDDDAAASAANEGRAPSPSSSPLGCRRPLCCLCHAPPHRRYGRLR

SEQ ID NO: 103518 - protein, 189 aa, Oryza sativa
  Clone ID: PAT_MRT4530_10093C.1.pep
MRIKSIVQAASTVTEKPLTVKVRTAFFEGRNRADSIVSDIYDWGCSKISTSMIARGALIKPWIFTEVKEQRHWDITSGERFNILKDFVSFGLEHWGSDSKGVETTRYFLLEWLSYTCRYIPVGLLDVIPQRLNWRPPSYCGRDDLETLMISDSAADWIRISEMLLGKVPEGFTFTPKHKSNAYDRAENG

SEQ ID NO: 103519 - protein, 64 aa, Oryza sativa
  Clone ID: PAT_MRT4530_100940C.1.pep
KLQPKTNLMCRDHYAGGDKNSTRIEAAGASDGVWQWGWPIRLGPLLLWRRQRRPRRSTWERRGL

SEQ ID NO: 103520 - protein, 219 aa, Oryza sativa
  Clone ID: PAT_MRT4530_100941C.1.pep
MKVTAAPKGQWERRLQTDIHTARQALRDALSLDLDPSPTAKTEPACAAPGRRHQARRRRLDAAGRRRRRQGPRGVGVDLHDGDDAASATVLRLGRGVRVGEPERWWRRQAGCSCLRQGRCIAMWSKSGFSSSAFCEAALVDMYAKCGDVPNARKVLDGITCPDTICSSSMVACYHRVGRYQEALALFSRMDKMGSATDQVSKMATGGAGPAPAFSMLES

SEQ ID NO: 103521 - protein, 69 aa, Oryza sativa
  Clone ID: PAT_MRT4530_100942C.1.pep
RRHIFPHFVCRLCTLKKLPCTVRGGLKKMLTTNVTIHMNHLCRSCTDYNCMELAVQPDLNGLFGSGASL

SEQ ID NO: 103522 - protein, 75 aa, Oryza sativa
  Clone ID: PAT_MRT4530_100943C.1.pep
RRPALAAAGWSVAVVSSSSGEPRAVSASVVARCSCCRFSWWMSSAGPSPHRFLSDLSFFCLWAPLLCGLAARSYR

SEQ ID NO: 103523 - protein, 110 aa, Oryza sativa
  Clone ID: PAT_MRT4530_100944C.1.pep
MAQVTQVENNFLTALFSEEELKEAIFAMEHNKAPGSDAPASNGGRRRHKLVPKLQLSPGHHFVVLDEELVDFYLRGEIEQQKYKGYGENIWYFFTVRKPSKTKKQDKPNK

SEQ ID NO: 103524 - protein, 92 aa, Oryza sativa
  Clone ID: PAT_MRT4530_100945C.1.pep
MRHPLELTYPFPIERIAKPPPPPRGTSSKQARALAGGIDEPPPQPTSPLPIVSNILLASACHASSSFLAIDVVYLSFKDVALGIGGRGEKKA

SEQ ID NO: 103525 - protein, 132 aa, Oryza sativa
  Clone ID: PAT_MRT4530_100946C.1.pep
MAQVTQVENNFLTALFSEEELKEAIFAMEHNKAPGVPHKILRRRQMKTESNGGDCSVVAAPASNGGRRRHKLVPKLQLSPGHHFVVLDEELVDFYLRGEIEQQKYKGYGENIWYFFTVRKPSKTKKQDKPNK

SEQ ID NO: 103526 - protein, 94 aa, Oryza sativa
  Clone ID: PAT_MRT4530_100947C.1.pep
MANATGGKHSVQIRGEQVEAAGKMATPEKWLNRFVRVVALIERTGNALGTLAFTWATVILLGGYPTVLDSKKDYRFITVIVFLEATRLKALQLI

SEQ ID NO: 103527 - protein, 39 aa, Oryza sativa
  Clone ID: PAT_MRT4530_100948C.1.pep
KITYLNSIHVKKKKKKKKKKKKKKKMKKKKKKKKKIHKK

SEQ ID NO: 103528 - protein, 90 aa, Oryza sativa
  Clone ID: PAT_MRT4530_100949C.1.pep
MVTRLAAMCSGSGLDRGGAGLCPREFSGCYKNRVCIGCEGIGWSLHRLRRIGQRTADTADRGGAADCDEDGFRAVSGIDQSASRGLPRWR

SEQ ID NO: 103529 - protein, 685 aa, Oryza sativa
  unsure (1)..(685): unsure at all Xaa locations
  Clone ID: PAT_MRT4530_10094C.1.pep
MAATAAAAAAAPPADPPDSSPAASSPPRPSPEELVARAVAPVKPAFLRPPPXATPPKDEGKANGGGAVVAEKKSKRQLKRERKQEQKSSSHLCIEVGKSGNVSSCKYGDSCRFSHDIDAYLAQKPADLEGTCPFTNLDQLCPYGLTCRFLGTHKDIHAASGNLSEKHEINALNKDIQKLLWKNKYKFPKASAQIKLLGLKEVIKSKPDAANDDKKVNHDNLDGNDDENKEPLCNPPVNAECDSTLCEELDRSEGEPLIDNSIPCVEPRPTKKSKVESDEIDKHGAGTLNTNTESEDPNLSNGLEPSNNSSSCRTDLITTPHLREKKIIDFREKLYLAPLTTVGNLPFRRLCKTLGADITCGEMAMCTNLLQGQASEWALLRRHSSEDLFGVQICGAYPDTVARTVELVDNECSVDFIDINMGCPIDIVVNKGAGSSLLTKPMRIKSIVQAASTVTEKPLTVKVRTAFFEGRNRADSIVSDIYDWGASAITVHGRSRQQRYSKLADWDYIYQCAQKAPDQLHVVGNGDVFSFTDWNKHVSGCSKISTSMIARGALIKPWIFTEVKEQRHWDITSGERFNILKDFVSFGLEHWGSDSKGVETTRYFLLEWLSYTCRYIPVGLLDVIPQRLNWRPPSYCGRDDLETLMISDSAADWIRISEMLLGKVPEGFTFTPKHKSNAYDRAENG

SEQ ID NO: 103530 - protein, 58 aa, Oryza sativa
  unsure (1)..(58): unsure at all Xaa locations
  Clone ID: PAT_MRT4530_100950C.1.pep
SVFFLMRFGGGVRQIWLRRSDYGGCGMQVQIINXIRETGRSAQGSGFSDSSQSRAATG

SEQ ID NO: 103531 - protein, 48 aa, Oryza sativa
  Clone ID: PAT_MRT4530_100951C.1.pep
RVTQVSFLFVRLFKGLNNEFFYCYSLSGSIFSRNIVFAGVYLAIFPPN

SEQ ID NO: 103532 - protein, 38 aa, Oryza sativa
  Clone ID: PAT_MRT4530_100952C.1.pep
LIVLLGLSSTWHREVLFQGFNWESWKENGGWYNCLWAS

SEQ ID NO: 103533 - protein, 67 aa, Oryza sativa
  Clone ID: PAT_MRT4530_100953C.1.pep
VLQSQGPIIILQVCFDVQVDLIITHLSFGKSIEAGCPRSLFGDILSGDPDLSIFLQRRRRRRRGHGD

SEQ ID NO: 103534 - protein, 52 aa, Oryza sativa
  Clone ID: PAT_MRT4530_100954C.1.pep
LYLLMSVSRETNYYMKAVNYIQIPQNLGKQESETMPDDNFSPVWHMYAIHKT

SEQ ID NO: 103535 - protein, 90 aa, Oryza sativa
  Clone ID: PAT_MRT4530_100955C.1.pep
AWTTTGLDGPVRSPQSQGIVGHMARGPIAWPKAWEFGPAQARHGLTRVGSLLARPDSRAMPRLLPRHGGPARHDTRPRLVVSGPSRARQP

SEQ ID NO: 103536 - protein, 168 aa, Oryza sativa
  Clone ID: PAT_MRT4530_100956C.1.pep
MVMKMPMTSAAGTSIHQSLSDGARWPRPSMMASLHTVAKSAAGVPTVAQGSGDSELMDTSYLILQFEDEFPTGRQIERSKGALFARPGGRACHAVKEGGVAALASDEADAMVDRLRGLWHDRVAAEEQSSRVVVAAAVSPVVSSSLASPGGLLPSCRPAYPENRRREE

SEQ ID NO: 103537 - protein, 55 aa, Oryza sativa
  Clone ID: PAT_MRT4530_100957C.1.pep
PFQIHCSIRYCWFVYGFVPSPSLCITMSPFRPIIKPFNALYICIIKVNQAPNTLI

SEQ ID NO: 103538 - protein, 93 aa, Oryza sativa
  unsure (1)..(93): unsure at all Xaa locations
  Clone ID: PAT_MRT4530_100958C.1.pep
GEYYHSRQWIPRKNSNHKINAVGRNLDGPGPSCIRKIALXTTEAERCNMATLPAYNNNNDXYYSXTSMRSNDDVNVFRVNKIGGCTNSVTCGG

SEQ ID NO: 103539 - protein, 50 aa, Oryza sativa
  unsure (1)..(50): unsure at all Xaa locations
  Clone ID: PAT_MRT4530_100959C.1.pep
TLHKWAGAHCDQSDTTSLCLYTYSWPILTTTKQSXCLCGISTAYSYQVHT

SEQ ID NO: 103540 - protein, 106 aa, Oryza sativa
  Clone ID: PAT_MRT4530_10095C.1.pep
PRVRSILVDHIKGRLVEIQASLLQKAIAFRDSNIVDVSSYGELKEAIAEGKWARGPWSASDADELKVKEETSATIRCFPFEQPEGAKKCFMTGNPAEEVAIFAKSY

SEQ ID NO: 103541 - protein, 228 aa, Oryza sativa
  Clone ID: PAT_MRT4530_100960C.1.pep
MPRYYCDYCDTYLTHDSPSVRKQHNAGYKHKANVRTYYQQFEEQQTQSLIDQRIKEHLGQAAAFQVGAPFNQHLLSFPGGVPRPRLPILPTPGMPLGVPQVPGAPLMPGVRPPILPAPGIPGYPGAPNVPTMPQTGAPPGSMPPGSMPPGSMPMQMAPLPRPPTLPPPTSGAPGAPIPNSGAPPAMYQTNPPQPAGPTSGAPPPVSAPPPAAPPQAPFSYAQPPEGNH

SEQ ID NO: 103542 - protein, 70 aa, Oryza sativa
  Clone ID: PAT_MRT4530_100961C.1.pep
MALYQMSMSAYPCCTDAINRREPGVRRNCGAGAGDDSARLAGGGRLAAPNWGRVCSDVLGGRAVPGPLRG

SEQ ID NO: 103543 - protein, 148 aa, Oryza sativa
  unsure (1)..(148): unsure at all Xaa locations
  Clone ID: PAT_MRT4530_100962C.1.pep
KSTASRAPFAKLVEGKSSPPYPLPFPXCSEINFARINXESNSFSSLSLQXLTLGFSGSNPLPPPLPAILRPRCAAAVAVAAAVRRRRRVRTEERNPVRPFAAAEDHWSTVAVVEQSRAAVEPRRRPSFVVVRRCSLHRFRRSGGERFR

SEQ ID NO: 103544 - protein, 84 aa, Oryza sativa
  Clone ID: PAT_MRT4530_100963C.1.pep
MEQGRINTLGTSGSDGHIGASGTSGGQQVGMAMKALPRNGNAMGRGLCSAGGTVGGVAAAAAEDDAQHGGSVASWACLSCGVVG

SEQ ID NO: 103545 - protein, 402 aa, Oryza sativa
  Clone ID: PAT_MRT4530_100964C.1.pep
MMQPPPPPQWAMGPPPPPQYFQAGPPPPPPQYFQGAHPPAAMWGQPPPPQAAPPPAPAGGAAGDEVRTLWIGDLQFWMEENYLYNCFSQAGELISAKIIRNKQTGQPEGYGFIEFGSHAIAEQVLQGYNGQMMPNGNQVFKLNWATSGAGEKRGDDGSDYTIFVGDLASDVTDLILQDTFKAHYQSVKGAKVVFDRSTGRSKGYGFVKFGDLDEQTRAMTEMNGQYCSSRPMRIGPASNKKNIGGQQQPSATYQNTQGTDSDSDPNNTTVFVGGLDPSVTDEVLKQAFSPYGELVYVKIPVGKRCGFVQYSNRASAEEAIRMLNGSQLGGQSIRLSWGRSPGNKQPQQDQNQWNAGYYGYPPQGYDPYGYVRPPQDPAMYAYAAYPGYGNYQQPAPQQPPQQ

SEQ ID NO: 103546 - protein, 47 aa, Oryza sativa
  Clone ID: PAT_MRT4530_100965C.1.pep
YGTMWFKHLVCFPFPQRNCEFAPSLLIGGKFFFPANWGVCSYSLIIR

SEQ ID NO: 103547 - protein, 67 aa, Oryza sativa
  Clone ID: PAT_MRT4530_100966C.1.pep
FYIFHKVNYISHKVFNKTNGQIFLKKSTALNTLRMEGVVQSTTSSTSSSIANLIPIHIIVAYYTINI

SEQ ID NO: 103548 - protein, 547 aa, Oryza sativa
  unsure (1)..(547): unsure at all Xaa locations
  Clone ID: PAT_MRT4530_100967C.1.pep
MGNYYSCGASSTSSPTSPSLVDYYYCYHRYPSSCSSTSTATSSGGRMPIRSHQQRLSSPTAVLGHETPALREVYTVGRKLGQGQFGTTYLCTQVSTGAEYACKSIAKRKLLSPEDVEDVRREIQIMHHLAGHGSVVTIQGAYEDNLYVHIVMXELCEGGELFDRIVERGYFSERKAAXEITRVIVGVVEACHSLGVMHRDLKPENFLLKESSSSSSLKAIDFGLSVFFKPGQVFSDVVGSPYYVAPEVLCKHYGPEADVWTAGVIVYILLSGVPPFWAETQQGIFDAVLRGSLDFDSDPWPTISDSAKDLIRRMLRSPPRERLTAHQVLCHPWVCDDGVAPDRPLAPAVLSRLKQFSAMNRLKKMALRVIARNLSEEELAGLKEMFKAMDTDASGAITFDELKEGLRRYGSNLREAEIRDLMDAADVDKSGTIDYDEFIAATVHLNKLEREEHLLAAFAYFDRDGSGYITVDELEHACRDHNMADVGIDDIIREVDQDNDGRIDYGEFVAMMKKGAIDIIGNGRLTIGRPTTATSDDPSPTISSSSR

SEQ ID NO: 103549 - protein, 80 aa, Oryza sativa
  Clone ID: PAT_MRT4530_100968C.1.pep
RSMGSMGNCFKHSDKRLPIFYMSSINPCIMRGSSVALSAGDIDEDVLFRFVKVCFLLNGNSISYLLANTTIKIENNKGCK

SEQ ID NO: 103550 - protein, 34 aa, Oryza sativa
  unsure (1)..(34): unsure at all Xaa locations
  Clone ID: PAT_MRT4530_100969C.1.pep
XKFRVPNRARIKLFWLIIPHAAIIVTRPQHHYDL

SEQ ID NO: 103551 - protein, 103 aa, Oryza sativa
  unsure (1)..(103): unsure at all Xaa locations
  Clone ID: PAT_MRT4530_10096C.1.pep
LXXLXXILXXXGIXXYWWFPNXXXNXFXSXXFLXXXXXPPRXXTFXIXXRPXLFWDCFWXLTPXVXPCXLXKTXXXXXXXFXWPHXTQXPXFFXYPPLXXXGN

SEQ ID NO: 103552 - protein, 87 aa, Oryza sativa
  unsure (1)..(87): unsure at all Xaa locations
  Clone ID: PAT_MRT4530_100970C.1.pep
MAAPPIPANLFVYIHAYTLHYVLPFPYMICHLDTXLTSLVARMHWPHRVSLPLPTVPSASILLKPPLSAHPXVGYLGLNAVIYFPDN

SEQ ID NO: 103553 - protein, 200 aa, Oryza sativa
  unsure (1)..(200): unsure at all Xaa locations
  Clone ID: PAT_MRT4530_100971C.1.pep
MCPKEIAPNLFQLATGKNKNLATELDDNHWVFSLRQIDNGEAIHELVQLGNLLSNIQLSIQNEDSIIWKRTSTGNVISLEELGTCSGNTGHTGDNKPNLLGTLDDGFSTGNQILQGVCLEGLGDLHYVLSIEVKXRSTRGFAIFLGSKVSWSAKKQATVSRSSTAAEYKALADETAKIMWLPTLLCEIGIDAPKVANHVV

SEQ ID NO: 103554 - protein, 72 aa, Oryza sativa
  Clone ID: PAT_MRT4530_100972C.1.pep
NTFGPHKIKACKVPGVQDPPPHSPKFYTGPLGGCSTTPSWGLKASKGNGRLAHMLASQGRGNPLWVWGKFKL

SEQ ID NO: 103555 - protein, 77 aa, Oryza sativa
  unsure (1)..(77): unsure at all Xaa locations
  Clone ID: PAT_MRT4530_100973C.1.pep
FSHQAVAARRSRPATGPLSARQSRRRDXSARALALLAGATXAVXLKVAXXPXXYGEAANVXXKPKTNKEFIAYSGEG

SEQ ID NO: 103556 - protein, 129 aa, Oryza sativa
  Clone ID: PAT_MRT4530_100974C.1.pep
MASATASLLTCFFALALFMLHSNAASSAAAAPSLYHSQSSKTWCVANPAASEDALRANLEFACSESDCAAIQGTGGCSFPDDDGSLPTRASVTMNAYYQARGRNSWNCFFNGTGLITITDPSSGNCKYA

SEQ ID NO: 103557 - protein, 110 aa, Oryza sativa
  Clone ID: PAT_MRT4530_100975C.1.pep
MEHARPILAERECGSGGEEALSPHTETKAAAAEKGDTSGASAPLHRQNSTGLRSTTLLKRGNNSKVEYNHRTQQATPTMQTCKGIQEWLVAICIKAVVKHFVEQNSKTVE

SEQ ID NO: 103558 - protein, 37 aa, Oryza sativa
  Clone ID: PAT_MRT4530_100976C.1.pep
NASSIPSQWLPARAKIAEGQDHHAVRLRRSHKPPPPK

SEQ ID NO: 103559 - protein, 100 aa, Oryza sativa
  Clone ID: PAT_MRT4530_100977C.1.pep
RPHWEIQWPQIPVNTPVEVIPADASASNSSDSGNSSLEGFQWLNTWNHMKQLTNISDGLPHANEAIDNARTCGLIVGSSVTIIGTPGSLSGNFMIARGLA

SEQ ID NO: 103560 - protein, 62 aa, Oryza sativa
  unsure (1)..(62): unsure at all Xaa locations
  Clone ID: PAT_MRT4530_100978C.1.pep
MEEGVDRALACTATAGREAGAAVLSEAEIRQLYVEVKRVLLSQPKCXNLLRIHAPVKICGPL

SEQ ID NO: 103561 - protein, 546 aa, Oryza sativa
  unsure (1)..(546): unsure at all Xaa locations
  Clone ID: PAT_MRT4530_100979C.1.pep
MAHAADTAIMLVFVFRLLAFTLTILLSPLMWVTKRLGITVLIVLFPLLIVHHLIVNSPVSGPSRYQVIHSNLLGWLSDSLGNSVAQNPDNTPVEVIPADASASNSSDSGNSSLEGFQWLNTWNHMKQLTNISDGLPHANEAIDNARTAWENLTISVHNSTSKQIKKERQCPYSIHRMNASKPDTGDFTIDIPCGLIVGSSVTIIGTPGSLSGNFRIDLVGTELPGGSGKPIVLHYDVRLTSDELTGGPVIVQNAFTASNGWGYEDRCPCSNCNNATQVDDLERCNSMVGREEKRAINSKQHLNAKKDEHPSTYFPFKQGHLAISTLRIGLEGIHMTVDGKHVTSFPYKAGLEAWFVTEVGVSGDFKLVSAIASGLPTSEDLENSFDLAMLKSSPIPEGKDVDLLIGIFSTANNFKRRMAIRRTWMQYDAVREGAVVVRFFVGLHYKPXVNKELWNEARTYGDIQVLPFVDYYSLITWKTLAICIYGTGAVSAKYLMKTDDDAFVRVDEIHSSVKQLNVSHGLLYGRINSDSGPHRNPESKWYISPE

SEQ ID NO: 103562 - protein, 559 aa, Oryza sativa
  Clone ID: PAT_MRT4530_10097C.1.pep
MASLLRLPSLLKPSAAAARPSALLRRRCRAGTAASVSASRSQAAAATTGAAAPAPPETRGGGDREGQVTPRSVDFNAWYTDVIAAAELADYGPVRGTMVIRPYGYAIWEAIQDYLNVKFKETGHSNMYFPQFIPYSFIEKEASHVEGFSPELALVTIGGGKELEEKLVVRPTSETIVNHMFTKWIQSYRDLPLMINQWANVTRWEMRTKPFIRTLEFLWQEGHTAHATLEEAEKEAMQMIDVYTKFAYEQAAIPVIPGRKSRVETFAGANRTYTIEAMMGDRKALQAGTSHNLGQNFSRAFGTQFMDENSQIEHVWQTSWAISTRFVGGIIMTHGDDAGLMLPPNIAPIQVVIVPIWKKGDEKSAVMEAVSSVQNTLKEAGIRVKVDDSELRTPGWKFNFYEMKGVPIRLEIGPRDVTNKSVVISRRDIPGKQGKEFGVSMDPSILVDHIKGRLVEIQASLLQKAIAFRDRQTSSELNGALFTFSNIVDVSSYGELKEAIAEGKWARGPWSASDADELKVKEETSATIRCFPFEQPEGAKKCFMTGNPAEEVAIFAKSY

SEQ ID NO: 103563 - protein, 158 aa, Oryza sativa
  unsure (1)..(158): unsure at all Xaa locations
  Clone ID: PAT_MRT4530_100980C.1.pep
LXXXXXXXXRRGFLXCCFLLLPFSAVWXFYXXGVPXGXXPLLLLLLAFAAXGAXXFRPFVLXPVGSPRFFPFPRPLXPSRGSFRSRXLPPSVGLLWXRPAGLXAXVXXXVXWXVAVQHKXPGGGGXXNLSFVDDPAQQPXALVVRSHMSLLDISAVIL

SEQ ID NO: 103564 - protein, 192 aa, Oryza sativa
  unsure (1)..(192): unsure at all Xaa locations
  Clone ID: PAT_MRT4530_100981C.1.pep
MPIDIIGKTAFGIEFGLSGSGPTPPPATTETATXDDDVKEFLREYKKSMEFIKMDLSSSLSTILGLFLPCVQTPCKRLLRRVPGTADYKMDQNERRLCRRIDAIIAGRRRDRDAGDGAALDFIAALLDARESGGGGHGGFALEDRHVRALAYEHLIAGTKTTAFTVSSVVYLVSCHPRVEERLLREIDGFAP

SEQ ID NO: 103565 - protein, 1090 aa, Oryza sativa
  Clone ID: PAT_MRT4530_100982C.1.pep
MENSDRLFSSDECLAQDASPLFSMNDGFEAFALDQEAVSFAPASPGELQEPTKFLVEELISDEKVNEDDACPSAIVQNFWSDVGFPSAASRWWESDASRMETARSTTKTLEQNVTDDPVSRPLEKPVNRRKGWAVRPWKGPLPRPRRSPPVILADFLPHVITVVGSSISPDFPETARSRGLRVDSEHRSVIPHLGPVGQRKFGGPRGRDRDQPRPGSIKAETQSQLNHRPHQGAGHQQPHQNPVIAVPAKAKKPRPPHCHRCKVSGHTMLECKADLDYFVCNKKNSHRAERCPVLKLPKPTGNLFGFGKTETGFLQIPDFDFKFDTPSPVPTALVSIGGGHLSADNVQGELARLVRADWKWEAIPHEQNSYLVTFPSAEELKRMDDVEFRLKNHGVSLSISDWKSSTDVTPAYQLDEVWVHITGVPHKWRHYLAFWALGCVVGVTQEVDMLTFRQKGIIRVRVALLSRADLPITTDLLFGTMGYPVTFALEEEGFEPAIPLHDDPMDHDDDGVGDKDDTNNGGDDQIAKCPKKSEASSSSQGQQPISDVSSMQLALTPFGSCRPPPSKLSVVDRKSDSINFGTAGSVARPEAIQANPTAAVHGAVGVDVKPLTGDSARAARPALSRDQVVRRDKSPVLEAMMDRVANVKQQPVQSAVLIAASATTRGAKQRVHTAAADVDQQSAQPAALVAASVAIESIKQPVQAATTTVRVARHQPSTEQLGAVAAGNIQMLSRAAASPPEGAQHVHDNEGDDYDNGLLTHLVKDISEVDLDENHLPTLLGGDFNILRRSTEKSNDRYSSRWPFLFNAVIDSFDLRVDLTGRQFTWANSLSSPTFEKLDRVLMSTEWESKYPLVSVHALDRGLSDHTPLLLDTGVQAFTGNTNLNFGVITLIPKVKEANRIQQYRPICLLNVSFKIFTKNATNRINSVVDRIVRPSQTAFMRGRNILDGLVVLHETIHELHRKKHSGIILKIDFEKAYDKVKWPFLLQTLRMKGFSPKWISWIESIISGGSVAIKVNDDVGRFFQTKKDLRQGDPLSPILFNLIADMLAIMIQRAQLAGQIDGIVPHLIDGGLSILQYADDTILFGNMI

SEQ ID NO: 103566 - protein, 643 aa, Oryza sativa
  Clone ID: PAT_MRT4530_100983C.1.pep
MPVANQLVDAASGYKILSFMDGNAGYYQIFMAEEDINKTAFRLRHYLLSNECTVICKADVVKYMLSGPILKGRVEKWIFSLTEFDLRYESPKAVKGQAIADFIVVHRDDSIGSVEVVPWTLFFDGSVCTHGCGIGLVIISPRGASFEFAYTIKPYATNTQAEYEAVLKGLQLLKEVEADAIEIMEDSLLVISQLAGEYECKNYTLMIYNEKCRELMKEFRMVTLKHVSREQNIEANDLAQGASGYKPMIKDVKVEIVALTADDWRYDVHQYLQNPSQSASWKLRYKALKYTLLDDELYYRTIDVVLLKCLSADQAKVAIGKGCQDCQKFGAIQRAPASAMNPIIKPWPYRGWGIDMIGMINPPSSKGHKFILVATDYFTKWEEAIPLKKVDSRDAIQSVQEHIIYRFGIPQTITTDQDSIFVSDEFVQFADSMGIKLLNSSQYYAQANGQAEASNKSLIKLIKRKIFDYPRQWHTRLAEALWSYRMASHGSIQVPPYKLVYGHGVVLPWEVRIGSRRTELQNDLTADEYYNLMADEREDLVQSRLRALAKVTKDKERVARHYNKKVVSKTFSEGELVWKLILPIGTRDNKFGKWSPNWEGQFQIYKVVSKGAYMLQGLDGEVYGRALNGKYLKKYYPSVWVNA

SEQ ID NO: 103567 - protein, 112 aa, Oryza sativa
  unsure (1)..(112): unsure at all Xaa locations
  Clone ID: PAT_MRT4530_100984C.1.pep
MWRGERAGRRPRLSRHQCAXPNRLNAVGADVWCGPIDPRQXGRNQTVTGLLPVTSDRTGDRAPTFAPVPSGVEAEGMTGLSPMLSGGRRWVPLKDGLLLDFRAKARIVVRSR

SEQ ID NO: 103568 - protein, 473 aa, Oryza sativa
  Clone ID: PAT_MRT4530_100985C.1.pep
MDEVGGRWTFSRANEGYTSCGPGFKQATPKDEYPMPVANQLVDAASGYKILSFMDGNAGYYQIFMAEEDINKTAFRCPGAIGLFEWVSKEIEDHIADLRKVFERTRKYGLKMNPTKCAFGVSAGQFLGFLVHERGIEIAQRSVNAIKKFQPLENKTELQDMIGRINFVRRFISNLSGRLRHYLLSNECTVICKADVVKYMLSGPILKGRVEKWIFSLTEFDLRYESPKAVKGQAIADFIVVHRDDSIGSVEVVPWTLFFDGSVCTHGCGIGLVIISPRGASFEFAYTIKPYATNTQAEYEAVLKGLQLLKEVEADAIEIMEDSLLVISQLAGEYECKNYTLMIYNEKCRELMKEFRMVTLKHVSREQNIEANDLAQGASGYKPMIKDVKVEIVALTADDWRYDVHQYLQNPSQSASWKLRYKALKYTLLDDELYYRTIDVVLLKCLSADQAKVAIGKVHEGICGTHQSAHKIK

SEQ ID NO: 103569 - protein, 1114 aa, Oryza sativa
  unsure (1)..(1114): unsure at all Xaa locations
  Clone ID: PAT_MRT4530_100986C.1.pep
MAEKPPSSPSSAGSSKDGEVQQVPAGTAESGGKGAAKGSGDKGDSSQRVQVEDLGPYGNIAQLQFNNFQDRIDYAVQHALINQSGVLVNTLSNMVKSMVDGSIVEYQVIGPVNLPGGVFPNYRPLVTNNQPSTSNMPPAQLTASVSAPAPSSASRQLTNPRLLTRDKPQHAGQNVNRLTQKQQQSLLNASVGFRTPDNQPRQHIATQVVPEHLVHNVQPDQSVIPQVIPEHLYQQGGSAQPQFAPQFNQFEAVPQQTQGVPQQRPWVDLIADVMREQFGLKPKDTGNLYRHPYPEWFERVQLPNRYKVPDFSKFSGQDNVSTYEHVSRFLAQCGEASAVDALRRLAKAKKSFKKINHVYPYMYGSDDDDDDDPEVAAAEWVRSKKIIPCQWVKNSGKEEMYDFDIXRLVRFLICYFGKNRFNSLLVAIEGGKNKFDDSKKLMKRKYDKQQQERYYEEDDDGFDPHWDCEFFRFCWNEGIRLPSTEDCPGCNNVAESSSRSYNRSNRLRQARVSVHQRLGPMNQDRDQEGDEDRKTQRCSSAKQADVDEVEEASARLVLSPEQAVFEKLEGTENRHLKTLYVNGFVNWKPMSTMMVDGGATVNLMPYATFRKLRRNAEDLIKTNMVLKDFGGNPSETKGVLNVELTVGSKTIPTTFFVIDGKGSYSLFLGRDWIHANCCIPSTMHQCLIQWQGNKVEIVPADKSVIVANADLALWEMDGIDCLSGKTESINYYFEDVVEGSNVYTKDTIDDLDDKQGQGFMSADDLEEIDIGPGDRPRPTFISKNLSLEFRTKLIDLLKEYRDCFAWEYYEMPGLSRSTVEHRLPIKPGVGPHQQPPRRCKADMLEPVKAEIKRFYDIGFIRSCRYAEWVSSIVPVIKKKGKVRLVEVYIDDVVVKSKEIEDHIVDLRKVFERTRKYGLKMNPTKCAFGVWAGQFLGFLVHERGIEITHRSVNAIKKIQPPEDKTELQEMIGKINFVRRHYLLLNECTVICKADVVKYMLSAPILKGRIGKWIFSLTEFDLQYESPKEIKGQAIADFIVDHRDDSIGSVEIVPWTLFFDGSICTHGCGIGLVIISPRGASFEFAYTIKPYATNNQAEYEAVLKGLQLLKEVEACC

SEQ ID NO: 103570 - protein, 75 aa, Oryza sativa
  unsure (1)..(75): unsure at all Xaa locations
  Clone ID: PAT_MRT4530_100987C.1.pep
KXXCKTMLARLQVDSRGSPTAGSETSLSSVGVNNLLRGGTLYPHDVSSLGHPARAEPPPLVTLGLSRQGFSKADH

SEQ ID NO: 103571 - protein, 738 aa, Oryza sativa
  Clone ID: PAT_MRT4530_100988C.1.pep
MAQKYFWYIRVTEFIRKRTDIPFGVHEMKLSDLTAIKQRHDEPVQDYIPREKFSSQDFDSLSHLAQKVTLHEQRFAEASKSFKKVNNVCPYMYGSDDDGDDDDDSEIAAAEWVRSKKVIPCQWVKSSGKEERYDFDITKADKIFDLLLREKQIQLHTIPSAEELGKRRYCKWHNSGYHSTNDCKVFRQQIQAAIEGGKIKFDDSKRPMKVDGDPFPVNMKVEQEINHRLKETKPKQEWRVKNQIPIANEATADEAKRLVKGKSVVTASVNMVFTLPAEIGAKQADVDDVEEESAKLILSPEEAVFEKPEETENRHLKPLYVNGYVNGKPMSKMMVDGGAAVNLMPYATFRKLGRNAEDLIKTNMVLKDFGGNPSETKGVLNVELTVGSKTIPTTFFVIDGKGSYNLLLGKDWTHANCCILSTMHQCLIQWQGDKIEIVPADSQLRMESPSYYFEGIVEGSNVYTKDTVDDLDDKQGQGFMSADDLEEIDIGPETALLRSIMRCQDSTDRLLNIGYLSNQGDLNKATPKDEYPTPVADQLVDAASGHKILSFMDGNAGYNQIFMAEEDIHKIAFRCPGAIGLFEWVSAEATYQRAMNYIYHDLIGWLVEVYIDDVVVKSKEIEDHIANLRKVFERTRKYGLKMNPTKCAFGVSAGQFLGFLVHERKIEITQRSVNAIKKIQPPENKTELQEMIGKINFVRRVFLADNAGGLFQILQGMSRLSKVWSNSKGIGVGYESYH

SEQ ID NO: 103572 - protein, 959 aa, Oryza sativa
  Clone ID: PAT_MRT4530_100989C.1.pep
MVKSMVDGSIAEYQATGPVYLPGGIFPNYRPLITNNQPTAQPIAPNVPSAQPTAPVSAPAPAGPSSAPGQLINPRLLVREQSQHSGQNVNRLTQEQVAAMFLPTQPTADPVQQQPIQQTPPRQQVAQPIQQQGFLNASAGFRTPDNQPRQHAANQVVPEHLVHNVQPDQSVIPQVIPEHLEPWADMIADVMREQFGIKPKDTGNLYRHRYPEWFERVPLPSRFKVPDFSKFSGQDSVSTYEHASRFLAQCGKASTVDALRGMIAPIREKFSSQDFDSLSHLAQKVTYIYGSDDDDDDSEVAAAKWVRSKKVIPCQWVKSSGKEERYDFDITKADKIFDLLLREKHIQLPAGHTIPSAEELGKRRYCKWHNSGSHSTNDCKVFRQQIQAAIEGGKIKFDDSNKPMKVDGNPFPVNMNQKRRVQRLRNREEVEQEINHRLKKTKPQQEWRVKNQVPTADEATADEAKRLAKGNSVVTASVNMVFTLPAEFGVKQADVDEVEEASAKLVLSPEQAVFEKPKGTENWYLKPFYVNGYVNGKPMSKMMVDGGAVVNLMPYATFRKLGRNAEDLIKTNMVLKDFGGNPSETKGVLNVELTVGSKTIPTTFFVIDGKGSYSLLLGRDWIHANCCIPSTMNQCLIQWQVDKIEIVPADRSVNVASADLALWEMDGLDCLSGKMESPSYYFEGVVEGSNVYTKDTVDDLDDKQGQGFMSADYLEEIDIGPGDRSRPTFISKNLSLEFRTKLIELLKEFRDCVDWEYYEMSGLSRSIVEHRLPIKPGFRPHQQPPRRCKADMLEPVKAKIKRLYDAGHKILSFMDGNAGYNQIFMAEEDIHKTAFRCPGAIDLFEWVTMTFGLKSAGATYQWAMNYIYHDPIGWLVEVYIDDVVVKSKEIEDHIADLRKVFERTRKYGLKMNPTKCAFGVSAGQFLEFLVHERGIEIPQRSVNAIKKIQSPENRRNCRR

SEQ ID NO: 103573 - protein, 100 aa, Oryza sativa
  unsure (1)..(100): unsure at all Xaa locations
  Clone ID: PAT_MRT4530_10098C.1.pep
NYLQHKQLLSNKCYARAAGGAVADGPCGGRAVAGDTRTAGXARAAGGRWPAPLHGVTEAGRRRVAGGRQDGAFGRRTAGRWLARQEGGGMSARDCRLAAH

SEQ ID NO: 103574 - protein, 92 aa, Oryza sativa
  Clone ID: PAT_MRT4530_100990C.1.pep
MGQCALMDAAEYEAVLKGLQLLKEVEADAVEIMGDSLLVHVSREQNVEANDLAKGASGYKPMMKYVKIEVATLTADDWRLRLQLAKFMKGFV

SEQ ID NO: 103575 - protein, 542 aa, Oryza sativa
  Clone ID: PAT_MRT4530_100991C.1.pep
MGPRESSTVAAAAPFPQLDPAGGEAAAAASPPPDPAGGEPAAAADPTGSVLWPLPRFGAATVARHGSSWVCETPTESMIHSGGRRRRHRRGSKGPYERGGDGEVDGSPREAKGCMDAAATDAQAGSTLGSGCCAAMAHAWMEEFSGDKLSINPLKETDMILLERGFCHCEKGEELPKKNQQEPPPHQLLQQKNHQQCQQQAAHTPKSMVQKPEWNTHEEVKEVHLKQNVPEPSSYLHKSSNTQEEVKEVHVKENVPAPSSYLLKSSGLKSLFVKASGVSVSIQVDVSNTKVDYLINSACEKLGVKAQDTYAVLCGKVLDYDKSLSEYLLYQNSTVEIRYRGRAGQLNWDQKFNVNDTVLYYDVNLDPALQNAGIQAFQYARFFSDFSSYNIFRRMKQLMILDNVVHRHPAHLQANIKAMAAYASHASLRASMGPYAYAWKGSAQLVPELNNVLIYQPSGKPLQWKNPLYTDNAKGCLHFANNFLKHARNRFPEEQIEAAFALHMKNFLPKILQGLAELADRTPNRQYINDIMVGWRHAGMQR

SEQ ID NO: 103576 - protein, 79 aa, Oryza sativa
  Clone ID: PAT_MRT4530_100992C.1.pep
HHTVELCDDDDFLVLACDGIWDGMSSQQLVDFIHEHINTESSLSAVCERVLDRCLDAWALGGEGCDNMTMILVQFKNAN

SEQ ID NO: 103577 - protein, 727 aa, Oryza sativa
  unsure (1)..(727): unsure at all Xaa locations
  Clone ID: PAT_MRT4530_100993C.1.pep
DSRTLSVLVNTLSNMVKSMVDCSIAEYQATGPVYLPGGVFPNYRPLVTNNQPAVQPIPHSAPSAQPTAPVSAPAPAAPSSAPGQLINPWLLPTVDTIXQQPIQQMPPRQQVVQPIQHQGLVNASAGFGTPDNXLRQHAANQVVPEHLVHNVQPDKMVVPQVIPEHLVRNIQLNFQNYQGGNLNYQYQPPSPQVQYQXGGSTQPQFAPQYNQFEPMPQQAQGVPQQRPWADMIADVMREQFGLKPKDAGNLYRHPYAEWFERVPLPNRFKVSYFSKFSGQDSVSTYEHKVTLHEQMFAEARKSFKKVNHVCPYMYGSDDDDDDDDSEIAAAEWVRSKKVIPCQWVKSSGKEEGHTIPSAEELGKRRYCKWHNSGSHSTNDCNVFRXQIQAAIKGGKIKFDDSKRPMKIDFVLGRDSRRGVMKKMMAVLVLIGVVSSLDFAGMKNKQSLRNXEGTENRHLKPLYVNGYVNGKPMSKMMVDGGAAVNLMPYATFRKLGRNAEDLIKTNMVLKDYGGNPSETKGVLNVELTVSSKTIPTTFFVIDGKGSYSLLLGRDWIDANCCIPSTMHQCLIQWQGDKIEIVPADRSVNVASADLALWEMDGFDCLSGKVWDGEFLKMESPSYYFEGIVEGSNVYNKDTVDHLDDKXEQGFLLADDLEEIDIGPGDRPRPTFISKNLSPEFRTKLTELLKEFKDCFAWEYYKMPGXADRLLNIGYCWSYISTGYELYIP

SEQ ID NO: 103578 - protein, 553 aa, Oryza sativa
  Clone ID: PAT_MRT4530_100994C.1.pep
LRHYLLSNECTVICKANVVKYMLSALILNGRVGKWIFSLTKFDLRYESPKATKGQAIADFIVDHCDDSIGSVEVVPWTLFFDGSVCTHGCGIGLIIISPRGACFEFAYTIKPYATNNQAEHEAVLKGLQLLKEVEADAIEIMGDSLLVISQLAGEYECKNDTLMVYNEKCRELMKEFWLVTLKHVSREQNIEANDLTQGASGYKPIIKDIKIEVAALTADDWRYDVHQYLQNPSQSASRKLRYKALKYTLLDDELYYQTIDGVLLKCLSADQAKVAIGWGIDMIGMINPSSSKGHKFILVATDYFTKWVEAIPLKKVDSGDAIQFVQEHIIYRFGIPQTITTDQDSIFVFDEFVQFADSMGIKLLNSSPYYAQANGQAEASNKSLIKLIKRKISDFPRQWHTRLAKAFWSYRMACHGSIQVPPYKLVYGHEAVLPWEVRIGSRRTELQSDLTADEYYNLMADDREDLVQSRLRALAKVTKDKERVAWHYNKKVVPKTFSEGELMWKLILPIGTRDNEFGKWSPNWEGPFQIYKVVSKGAYMLQGLDGEVMDER

SEQ ID NO: 103579 - protein, 86 aa, Oryza sativa
  unsure (1)..(86): unsure at all Xaa locations
  Clone ID: PAT_MRT4530_100995C.1.pep
GGGVCGGRGGRRGGWRRQGGERXGEGDGNERQQRRVGGRRIYSMGGSARTGGGRPRQSGQKMGSHASHRMQPAAAEAQHLRACVRV

SEQ ID NO: 103580 - protein, 236 aa, Oryza sativa
  Clone ID: PAT_MRT4530_100996C.1.pep
MDISRANEGYTSCGSVVEMSCHRAGVLLLGAQPWLPFSGIPAVARVGSVLLFMARMGWELCHVLRPYAVVWVSSIVPVIKKNSKVRVCIDFRDLHKATPKDEYPMPVADQLVDAASGHKILSFIDEIEDHIADLRKVFERTRKYGLKMNPTKCAFGVSAGQFLRFLVHERGIEVTQRSVNAIKKIQPPENKTELQEMIGKINFVRRFISNLSGRLEPFTPLLILKADQKFTWRAEQ

SEQ ID NO: 103581 - protein, 949 aa, Oryza sativa
  Clone ID: PAT_MRT4530_100997C.1.pep
MPQQAQGAPQQRPWADMIADVMREQFGLKPKDAGNLYQHPYPECRFKVPDFSNWADLEKHFHSYFYSGVHEIKLSDLTAIRQRHDEPVQDYIQRFRKMRNKCYSLSLNNAQLADLAFQGMVAPIREKFSSQDFDSLSHLAQKLTLHEQRFAEARKNFKKVNHVCPYIYGSDDDDDDDDDSEVAAAEWVRSKKVIPYQWVKSSGKEERYDFDITKADKIFDLLLREKQIQLPTGYTIPSAEELGKTRYCKWHNSGSHSTNDCKVFRQQIQAAIEGGKIKFDDSKRPMKVDGNPFPVNMVHTAGRSTDGGRTRGFQEVEQESNHRLKKTKPKQEWRVKNQVPTADEATADETKRLAKGKSVVTASVNMAFTLPAEFGIKQADVDEVEEESAKLILSPEQAVFEKPEGTENRHLKPLYVNGFVNGKPMSKMMVDGGAAVNLMPYATFRKQGRNAEVLIKTNMVLKDFGGTPSETKGVLNVELTVGSKTIPTTFFVIDGKGSYSLLLGRDWIHANCCIPSTMDYSRSIVEHRLPIKLGVRPHQQPPRRCKADMLEPVKAEIKRLYDAGFIRPCCYAEWVSSIAPVIKKNGKVRVCIDFRDLNKATPKDEYPMPVADQPVDAASGYKILSFMDVEVYIDDVVVKSKEIEDHIADFRKVFERTRKYGLKMNPTKFISNLSGRLEPFTPLLRLKADQKFTWGAEQQKALDSIKEYLISPPVLIPPQKGIPFRLYLSAADVVKYMLSAPILKGRVGKWIFSLTEFDLQYESPKAIKRQAIADFTVDHHDDSIGSIEVVPWTLFFDGSVCTHGCGIGLVIISPRGACFEFAYTIKPYATNNQAEYEAVLKVLQLLKKVEADAIEIMGDSLLVISQLVGEYECKKDTLVVYNEKCRELMKEFRLVTLRHVSREQNIEANDLAQGASGYKPMIKDVKVEVCHAQKFTSNFRTNLCIKTLV

SEQ ID NO: 103582 - protein, 145 aa, Oryza sativa
  unsure (1)..(145): unsure at all Xaa locations
  Clone ID: PAT_MRT4530_100998C.1.pep
ASDAAPPPPEQSPEPDGWRSHLTPPPXTSPRPRRRAHGGPPPPPPPPQGLTPXPPPGTCAPRSRRSTRSSSSPALGAPPPPPSTPRARPRPRPRPPRCSVSAPSPRTPPPPPPTHARWSTTGPPSPRRGAPSTSPPLPPRSSSWS

SEQ ID NO: 103583 - protein, 68 aa, Oryza sativa
  Clone ID: PAT_MRT4530_100999C.1.pep
CVKARDHGHFCTCHNTIIFMGTHWARTWSLLLKGTDEEIVKNYCKVLEKHVVEFFSVYGWNLRRRLEA

SEQ ID NO: 103584 - protein, 476 aa, Oryza sativa
  unsure (1)..(476): unsure at all Xaa locations
  Clone ID: PAT_MRT4530_10099C.1.pep
MEHGGRREMCGARSIGDLPLLTRRHGDATGEASSVTVMKRLSIRGLLAGARRTRHAVAAKATTSVPALVALLFFFAAATFSVFSLGSFRWPGAADDGGAAACDAALARGRGEWMRDAGAAPYYTNATCGFIQNYQNCMKHGRPSMEFLRWRWRPGDGGEGCEPLGPFDAARFFRLVRGRSMLFVGDSLASSHVTSLVCALSQVEAPARSRDAAAGFEHWRFPAHGFAVAYFWTPFQVRWRLTRGPPEGGGPERQGEVFAGPSDFHLDEPDERWTSAAKSHDYVVLSASHWFARPAVYYQHGRVVGCHDCGDSNATATAIVKQPEHAQRAAFRAVLGALARLDGFNGTAILRTVAPTHYENGGWFDGGECTATRPASESEDGAAPEMARRXAEFYRAQVEEFSRRRRRRRRGTAASGRXLRLMDVTRMMLLRPDGHPDRHGHGGGEHDGFEIDCLHWCLPGAIDVWNDLLLQIIASS

SEQ ID NO: 103585 - protein, 69 aa, Oryza sativa
  Clone ID: PAT_MRT4530_1009C.1.pep
PTRPPTRPPTRPPTRPPTRPPTRAKKKKKKKKKKKKKKKKKKKKKKKKKKKKKKKKKKKKKNSLAAHII

SEQ ID NO: 103586 - protein, 83 aa, Oryza sativa
  unsure (1)..(83): unsure at all Xaa locations
  Clone ID: PAT_MRT4530_100C.1.pep
STAASASEEGGRDRRPPPTSCSPRRRXGQSEDDGXSTAXSAQSEEGGGDRRXPPPTPCSPRXXALLPXPADVLSPAQRAPERE

SEQ ID NO: 103587 - protein, 47 aa, Oryza sativa
  Clone ID: PAT_MRT4530_101000C.1.pep
VLQPLKFSLREKGFLNLRGKFFYPLKNFYLDLGLFLLWMLILNGMGP

SEQ ID NO: 103588 - protein, 133 aa, Oryza sativa
  Clone ID: PAT_MRT4530_101001C.1.pep
SLKFAWCGSVGWCPLKGGLCVYIFLTTMSCCCVHDACMCCSLCTAAAVAAVLEVLLLHPFRSEMLRCCELCVLWLHAMLLLHSACTKVNPRILKPVRDVVPAGRVCACVRSCSVSQANAAGVKVPSHVVHMYR

SEQ ID NO: 103589 - protein, 119 aa, Oryza sativa
  Clone ID: PAT_MRT4530_101002C.1.pep
MARTSFKLEHPLERRQAESARIREKYSDRIPVIVEKADKTDVPEIDKKKYLVPADLTVGQFVYVVRKRIKLSPEKAIFVFVKNTLPPTASLMSAIYEENKDEDGFLYMTYSGENTFGSA

SEQ ID NO: 103590 - protein, 48 aa, Oryza sativa
  unsure (1)..(48): unsure at all Xaa locations
  Clone ID: PAT_MRT4530_101003C.1.pep
TDQGWSDRHCTTGLTGGNRRSDWHCMAGPTGXIGWPYRHCMAGLTGSG

SEQ ID NO: 103591 - protein, 50 aa, Oryza sativa
  Clone ID: PAT_MRT4530_101004C.1.pep
EQNGREGGSREQGDYGEGWTKEGNNGEQQQQPGMTRGRLPRERQEEGQLR

SEQ ID NO: 103592 - protein, 128 aa, Oryza sativa
  Clone ID: PAT_MRT4530_101005C.1.pep
MGGREVIPSVVLFDYCFVKLMSWKGFDCPCWVTLDYRQGHALLDEFPFSADFTVWHLRTGRRRRLPRPNLPYFRSYATAVLCSAVGCNHLDCRRSGPFLVVKTTHIYCPGTFRPPPAGHPELTEEEKI

SEQ ID NO: 103593 - protein, 478 aa, Oryza sativa
  Clone ID: PAT_MRT4530_101006C.1.pep
METMSYPCSLLIPFSTQFEEISSSSLLLWSPQAEENPHENANMYEFDADHSHDQIHQDHQFLDMMVIQESANEFDGDHSHDQIHQDHEFLETMVIQESANEFDGDHSHDQIHQDHEFLEMMAIQESANDLLQLQDDFSVPNADPLAASFEFDERLAVAGHENGNVVATQEESAGDLLLAGAMAVDAGDAVHASAIMSRLDDLLADIAGRRSCEATSPGDHLAYYFARGLKLRISGAATPASSPPPPAANWSSPAYRMLQELTPFVKFAHFTANQAILEATADDLDVHVVDFNVGEGVQWSSLMSDLAAAGRHRCSTSRTLKLLLLGTITILQPKLVILIEDELSRISKNPPSPSLAAPPPFPEFFSDAVAHFTAVMESTASCLVSYDDEAWLSLRRVGEEVVGPRVEDAVGRYGSLAGGAQMMEGLRAREVSGFSVAQGKMLAGLFGGGFGVVHQEKGRLALCWKSRPLISVSLWCPK

SEQ ID NO: 103594 - protein, 101 aa, Oryza sativa
  Clone ID: PAT_MRT4530_101007C.1.pep
MEPIATVKKMPDETIPVNDLHPKASYGNMVFLCVSPSAPARGEAAEVRINAGGDGGADRRGNDGSTGQRWQIDAAVLKAAKLSDPSGAGASIRLGQGETML

SEQ ID NO: 103595 - protein, 114 aa, Oryza sativa
  unsure (1)..(114): unsure at all Xaa locations
  Clone ID: PAT_MRT4530_101008C.1.pep
MAAAPSRCLLVTGPPAXVRESGERVGFEDVTLDVRTEPLDSFKVFSRXSDRWSTVERYKVYIAFLEALSLPXAXVKDDTDLFIIDEMVKMDLFNTKLLTALMKFIEWNNALLVT

SEQ ID NO: 103596 - protein, 293 aa, Oryza sativa
  Clone ID: PAT_MRT4530_101009C.1.pep
MAAQVTRLGGGGGGGVAVGVALHHAVADGRSVWRFIEAWAACCRGDDAWSAAPAPAFDRAAVALPDGEELARDVLRKYVPNLPVATVPKFLVKGRLQLSRRTFTVAAAQMLRLKQRIVVAGAGGLTPPSGFVALAALAWVYLFFFIDCRGRRAAFDPPVGEGFFGTCISGCLATATARDLLGGGDGGLVAAARPVQEEVRRAAEDPLAGWEWMSLVGRIALSRLVNMSGSTRFPAYEAADFGWGSPSRTELVTMNHGGQVVLVAAKGGGVQASVSMKPEHMDKFKSDFESYLE

SEQ ID NO: 103597 - protein, 404 aa, Oryza sativa
  Clone ID: PAT_MRT4530_10100C.1.pep
MVVSRARVQDPATGEHRDVMYKGMASELFVPYMDPTEAWYFETDMDAGEYGFGLQAMPLVPLNDCPRHARYLDAVFVAADGRPYVRENMICVFERYAGDIAWRHSESPITGMDIRESRPKVTLVARMAASVANYDYIVDWEFQMDGLVRIKVGLSGILMVKGTQYSHMNQVHQNDNMYGTLLSENVIGVIHDHFVTFRLDMDIDGADNSFVKVAMARQNTGAGESPRKSYLKATRHVARTEKDAQVRLKLYEPSEFHIVNPMKKTRVGNPVGYKVVPAGTAASLLDPEDPPQKRGAFTNNQIWVTPYNKTEEWAGGLFVYQSKGEDTLATWSERDRPIENKDLVLWYTLGFHHVPCQEDFPIMPTVSSSFDLKPVNFFESNPILGQRPTQENDLPVCAAAATTS

SEQ ID NO: 103598 - protein, 202 aa, Oryza sativa
  unsure (1)..(202): unsure at all Xaa locations
  Clone ID: PAT_MRT4530_101010C.1.pep
RRRGAARGTRRRGTWQRRGARGSGRAARGDGTARGAAAXHGSRRRWNAHAATGWRRRRRGSGDXARRQATMATARGGWGREAAARGDGGDRERGEKEELGCYNRSVCILPMEFWRKSRNCRPSSLALYLGGCFLYQTEKQKITGAKPGLELQREHHSTGTLDSTDEAYSSENPPSDTYSHSGVGKNRARLSTTHCTQQVILE

SEQ ID NO: 103599 - protein, 130 aa, Oryza sativa
  Clone ID: PAT_MRT4530_101011C.1.pep
QPWSSPSAADGADVVPIRRRRQTPSLPQVNRLLPSGHFHGQCSKLYIRTYCKARSIHSIFCFICKSVLQLTNWMRTDVTCMYCSYILISSRSRKILMVCFSNCFLLLNVFFVFCFIAICHILLIDLNLYC

SEQ ID NO: 103600 - protein, 469 aa, Oryza sativa
  Clone ID: PAT_MRT4530_101012C.1.pep
MAPPPSVTVIEDGRVAVPPPPPPASGDAAPPPQTTLFKLTALDAQWIPLPLIQRVLVFDGGEGRIPPFEDVVAALRASLAETVARLLPLAGRIVHLPETGEAAIDCSGRGVAGGGVRFVVAECGGADAARVARDADHDVALLEQLAPVLDADALPAETMAAQVTRLGGGGGGGVAVGVALHHAVADGRSVWRFIEAWAACCRGDDAWSAAPAPAFDRAAVALPDGEELARDVLRKYVPNLPVATVPKFLVKGRLQLSRRTFTVAAAQMLRLKQRIVVAGAGGLTPPSGFVALAALAWVSFVRSKHAAGAIAAGDEVYLFFFIDCRGRRAAFDPPVGEGFFGTCISGCLATATARDLLGGGDGGLVAAARAVQEEVRRAAEDPLAGWEWMSLVGRIALSRLVNMSGSTRFPAYEAADFGWGSPSRTELVTMNHGGQVVLVAAKGGGVQASVSMKPEHMDKFKSDFESYLE

SEQ ID NO: 103601 - protein, 155 aa, Oryza sativa
  Clone ID: PAT_MRT4530_101013C.1.pep
KPGRHRCRRTGPGRDQRRRRRAPTHEPPSSPRAGRSRSRSCTSAPRRCHRIAPGRGRCRRGRHRRGAPPARKRRRCSGSAARRRRRSGAARPPCPRPGSGRRRRGTAPGSPRGRRRRTHPRREGGPCTRRSRRRGSPPRPPSCTCLVPPPPPPAP

SEQ ID NO: 103602 - protein, 55 aa, Oryza sativa
  Clone ID: PAT_MRT4530_101014C.1.pep
AATPVGLVLMNRQVVFSHLFSLIYVVLFLCSLSSYNYTFISGVNSCFYSFSLIDK

SEQ ID NO: 103603 - protein, 174 aa, Oryza sativa
  Clone ID: PAT_MRT4530_101015C.1.pep
DEAKRLAKGKSVVIVSVNMVFTLPAEFGAKQADVDEVEVASARLVLSPEQAVFEKPEGAENQHLKPLYVNGYVNGKPMSKMMVDGGAVVNLMPYATFRKLGRNAEDLIKTNMVLKDFGGNPSETKGVLNVELTVADRLVNVASADLALWVMDGLDCLSGKVWEGDFLKVSDCDI

SEQ ID NO: 103604 - protein, 427 aa, Oryza sativa
  Clone ID: PAT_MRT4530_101016C.1.pep
FEKLEGTENRHLKPLYVNGYVNGKPMSKMMVDGGAAVNLMPYATFRKLGRNAEDLIKTNMVLKDYGGNPSETKGVLNVELTVSSKTIPTTFFVIDGKGSYSLLLGRDWIDANCCIPSTMHQCLIQWQGDKIEIVPADSQLKMESPSYYFEGIVEGYNQIFMAEEDIHQTAFRCHGAIGLFEWVVMTFGLKSAGATYQRAMNYIYHDLIGWLVEVYIDDVVVKSKEIEDHIANLRKFFERTRKYGQKMNPTKCAFGVSAGQFLGFLVHERGIDITQRSVIAIKKIQPPENKTELQEMIGKINFARRFISNLSGTLEPFMPLLRLKADQKFTWGLTELVAPHRETAQAPLCQFGRGLRVRAAEKHRIKGRAVLHCVQRDTLDQTAINAVRRRADTSPSGPTSPKVPGHVGDCVCLKPLVMILPVPYHRQ

SEQ ID NO: 103605 - protein, 81 aa, Oryza sativa
  Clone ID: PAT_MRT4530_101017C.1.pep
PRPPAPSPVATPRGPRALAHGPVRHGRSVTARVEGPSARVPTPQRPHSKRYRACNGIRSDPLTHRRHPASIRSIRCNLWQS

SEQ ID NO: 103606 - protein, 681 aa, Oryza sativa
  unsure (1)..(681): unsure at all Xaa locations
  Clone ID: PAT_MRT4530_101018C.1.pep
EWIYQDVTLRRTTRTCMDSWVSSIVSVIKKNSKVRVCIDFRDLNKXTPKDEYPMPVANQLVDAASGYKILSFMEGIEIAQRSVNAIKKFQPLENKTELQDMIGRINFVRRFISNLSGRLKPFTPLLRLKADQKFTWGTEQQKALDSIKEYLSSPPVLIPPQKGIPFRLYLLAGEKSIDSVLIQELEGXERVVFYLSHRLLDAETKYSPVEKLCLYLYFSCTRLRHYLLSNECTVICKADVVKYMLSGPILKGRVEKWIFSLTEFDLRYESPKAVKGQAIADFIVVHRDDSIGSVEVVPWTLFFDGSVCTHGCGIGLVIISPRGASFEFAYTIKPYATNTQAEYEAVLKGLQLLKEVEADAIEIMEDSLLVISQLAGEYECKNYTLMIYNEKCRELMKEFRMVTLKHGASGYKPMIKDVKVEIVALTADDWRVFLADNXEGCFKYYKGCQDCQKFGAIQRAPASAMNPIIKPWPYRGWGIDMIGMINPPSSKGHKFILVATDYFTKWEEAIPLKKVDSRDAIQSVQEHIIYRFGIPQTITTDQDSIFVSDEFVQFADSMGIKLLNSSQYYAQANGQAEASNKSLIKLIKRKIFDYPRQWHTRLAEALWSYRMASHVYGHGVVLPWEVRIGSRRTELQNDLTADEYYNLMADEREDLVQSRLRALAKVKWCPRLFRKVNLCGS

SEQ ID NO: 103607 - protein, 78 aa, Oryza sativa
  Clone ID: PAT_MRT4530_101019C.1.pep
MDSNSLPTFGKARRILADKRLHWRRPCSRRKPRGAENGWRGVESIAHKVFDRRAMEERMSSDTVIAMDELKLWIRLGR

SEQ ID NO: 103608 - protein, 152 aa, Oryza sativa
  Clone ID: PAT_MRT4530_10101C.1.pep
MSVWKPNLGGQVASRRSALAAKTATEADDAGGEVKRKKEGRKGACPLATLGKGGGREGDKEEPCLLSLEARTGRGGAESTTTAMTAGRCGAERRHGRQARTGAAEADGGGDQAVGHHEHAHEAMISMKPHDYRLIIVKSASASQLPEMRLTL

SEQ ID NO: 103609 - protein, 112 aa, Oryza sativa
  unsure (1)..(112): unsure at all Xaa locations
  Clone ID: PAT_MRT4530_101020C.1.pep
MALPSPSPHGIPTANDQAPPSPLSGHHAVSWRRTHHASTAGILEPSPAASTPSLSSAHHTFIMDVLAPLPXXRRPGHPGELRRHPRTRENPITVAAPISGEHKLQNLCITVF

SEQ ID NO: 103610 - protein, 1244 aa, Oryza sativa
  unsure (1)..(1244): unsure at all Xaa locations
  Clone ID: PAT_MRT4530_101021C.1.pep
MKVDGHPFPVNTVHTAGRTADGGKTRGFQVNLAKIINKYQRKYDFDEGMRLSSIEDCPRCSNVTEISNRSHNRGNPLRQARVPVHQRLGPMNQDCDQEDNEGRKTQWCPPAEFGAKQADVDEVEEASARLVLSPEQAVFEKPEGTENRHLKPLYVNGXINGKPMSKMMVDGGAAVNLMPYATFRKLGRNAENLIKTNMVLKDFGGNSSQTKGVLNVELTVGXKPSLQYFFVIDGKGSYSLLLGRDWIHANCCIPSTMHQCLIQWQGNKIEIVPADSRLNTESPSYYIEGIVEGSNVYTKDTVDDLDDKQGPGRHLLIELLKEYRDCFAWEYYGMLGLSRSIVEHRLPIKPRVRPHQQPPRRCKADMLEPVKAEIKRLYDAGFIRPCRYAEWVSSIVPVIKINGKVRVCIDFNDLNKATPKDEYPMLVAYQLIDAASGQKILSFMDGNAGYNQISMAEEDIHKTAFRCPGAIGLFEWVVMTFGLKSAGATYQRAMNYIYHDLIGWLVEVYIDDVVVKSKEIEDHIADLRKVFERTRKYGLKMNPTKCAFGVSAGQFLGFLVHERGIEITQRSVNAIKKIQPPENKTELQEMIGKINFVRRFISNLLRHYLLSNECTVICKADVVKYMLSAPILKGRVGKWIFSLTEFDLRYESPKAIKGQAIADFIVDHRDNSIGSVEIMPWTLFFDGSVCTHGCGIGLVIISPRGASFEFAYTIKXYATNNQAEYEAVLKGLQLLKEVEADAVEIMGDSLLVISQLAGEYECKNDTLIVYNEKCRELMKEFWLVTLKHVSRKQNVEANDLAQGASGYKPMMKDVKIEIATITTDDWRYDVHHYLQDPSQSASQKLRYKALKYTLLDDELYYQTIDGVLLXSLSADQAKVAIGEVHEGICGTHQSAHKMKWLLRRAGYFWPTMLEDCFKYYKGCQDCQKFGAIQRAPASAMNPIIKPWPFRGWGIDMIRMINPPSSKGHKFILVATDYFTKWVDAIPLKKVDFGDAVQFVQERIIYRFGIPQTITTDQGSIFVSNEFVQFADNMGIKLLNSSPYYAQANGQAEASNKSLIKLIKRKISDYPRQWHTRLAEALWSYRMACHGSIQVSPYKFVHGHEAVLPWEVRIGIRRTELQNDLTANEYYNLMADEREDLVQSRLRALSKVTKDKERVARHYNKKVVPKSFSEGELVWKLILPIGTQDNKFGKWSLNWEGPFQIYKVVSKGAYMLQRLDGEVYGGALNGKYFKKYYPXSVWVNA

SEQ ID NO: 103611 - protein, 65 aa, Oryza sativa
  Clone ID: PAT_MRT4530_101022C.1.pep
DRRDWSDSGHVDSRQPRFHVASAPGESGGVQSCWAADRSRAHNCITKGKRKPGLGPNNTGATWEL

SEQ ID NO: 103612 - protein, 105 aa, Oryza sativa
  Clone ID: PAT_MRT4530_101023C.1.pep
PRANQGCWWRAPTSQETLNICTRGSRSYMLGRSCLCGDWGAVMYCCWCRLLSAAAQTLYQSLKTIALLRWRTACTGCVDAKKLQAATPGQQAEQRGIATRRLGMN

SEQ ID NO: 103613 - protein, 1264 aa, Oryza sativa
  unsure (1)..(1264): unsure at all Xaa locations
  Clone ID: PAT_MRT4530_101024C.1.pep
MKLSDLTASKQRHDEPVXDYIQRFREMRNKCYSLSLIDAXLADLAFHGMVAPITEKFSSQDFDSLSHLAQKVTLHEQRFAEARKSFXKVNHVCPYMYGSDDDDDDDFEIAAAEWVRSKKVIPCQWVKNSGKEERYDFDVTKADKIFDLLLREKXLNFLPVAIEGGKIKFDDSKRPMKKKYDKQRERHYEEDDGSFNPHWGCEFFRFCWNEGMRLPSIEDCPGCSYVTESSSRSYNRGNRLRQIRVPVDQRLGPVNQDRGQEDNEDRKTQWCPSGIFTKNQKRRVQMLRNRERFQEVEQEINHWLKETKPKQEWRVKNQVPTADEATTDEAKRLAKGKSVVTASVNMVFTLPSEFGVKQANVDEVEEESAKLILSXEQEVFKKPEGTENRHLKPLYVNGYINGKPMSKMMVDGGVVVNLMPYATFRKLGRNAEDLIKTNMVLKDFGGNPLETKGVLNVELTVGSKTNPTTFFVFDGKGSYSLLLGRDWIHANCCIPSTMHQCLIQWQDDKIEIVLADKSVNVASADLALWEMPGLDCLSGKGVVEGSNVYTKDTVDDLNDKQGQGFMSADDLEDIDIGPGDRPRPTFISKNLSPEFRTKLIELLKEFRDCFAWEYYEMPGLSRSIVEHRLPIKLGVRPHQQPPRRCKADMLEPVKAEIKRLYDAGFIRPCQXWVSSIVPVIKKNGKVRVCIDFRDLNKATPKDEYPMPVADQLVDAASGHKILSFMDGNAGYNQIFMAEEDIHKTDFHGAIGLFEWVVMTFGLKSAGATYQRAMNYIYHDLIGWLVEVYIDDVVVKSKEIEDHIADLRKVFERTRKYDLKMNPTKCAFGVSAGQFLGFLVHERGIEVTQRSVNAIKKIQPPENKTELXEMIGKINFVRRFISNLSGRLEPFTPLLRLKADQKFTWGAEQQKALDSIKEYLRSPPVLIPPQKGIPFRLYLSAGEKLIGSVLIQELEGKERVVFYLSRRLLDAETRYSPVEKLCLCLYFSCTRLRHYLLSNECTVICKADVVKYMLSAPFLKGRVEKWIFSLTEFDLRYESPKAVRGQAIADFIVDHRDDSIGSVEVVLWTLFFDGSVCTHGCGIGLVIISPRGASFEFAYTIKPYATNNQAEYEAVLKGLQLLKEVEANAIEIMGDSLLVISQLVGEYECKNDILMIYNEKCRELMKEFRLVTLRHVSREHNIEANDLAQGASGYKPMIKDVKIEVAALTFDDWRYDVHHYLQNPSXSASQKLRYKALKYTLLDDELYYRTIDGGLLKCLSADQAK

SEQ ID NO: 103614 - protein, 599 aa, Oryza sativa
  Clone ID: PAT_MRT4530_101025C.1.pep
MESPSFYFEGVVEGSNVYTKDTVDDLNDKQGQGFMSADDLEDIDIGPGDRPRPTFISKNLSPEFRTKLIELLKEFRDCFAWEYYEMPGLSRSIVEHRLPIKLGKNGKVRVCIDFRDLNKATPKDEYPMPVADQLVDAASGHKILSFMDGNAGYNQIFMAEEDIHKTDFHGAIGLFEWVVMTFGLKSAGATYQRAMNYIYHDLIGWLVEVYIDDVVVKSKEIEDHIADLRKVFERTRKYDLKMNPTKCAFGVSAGQFLGFLVHERGIEVTQRSVNAIKKIQPPENKTELLRHYLLSNECTVICKADVVKYMLSAPFLKGRVEKWIFSLTEFDLRYESPKAVRGQAIADFIVDHRDDSIGSVEVVLWTLFFDGSVCTHGCGIGLVIISPRGASFEFAYTIKPYATNNQAEYEAVLKGLQLLKEVEANAIEIMGDSLLVISQLVGEYECKNDILMIYNEKCRELMKEFRLVTLRHVSREHNIEANDLAQGASGYKPMIKDVKIEVAALTFDDWRYDVHHYLQNPSQSASQKLRYKALKYTLLDDELYYRTIDGVLLKCLSADQAKVAISEVHEEICGTHQSAHKMKWLLRRAGYFWPTIVTP

SEQ ID NO: 103615 - protein, 1223 aa, Oryza sativa
  unsure (1)..(1223): unsure at all Xaa locations
  Clone ID: PAT_MRT4530_101026C.1.pep
MRGPRCTFSENHNQDGNTAQLQFNNFQDRIDYAVQHALINQSWVLVNTLSNMVKSMVDCSIAEYQATGPVYLPGGVFPNYRPLVTNNQPAVQPIPHSAPSAQPTAPVSAPAPAAPSSAPGQLINPWLLVREQPXHNGQNVNRLTQDQGLVNASAGFGTPDNXLRQHAANQVVPEHLVHNVQPDKMVVPQVIPEHLVRNIQLNFQNYQGGNLNYQYQPPSPQVQYQXGGSTQPQFAPQYNQFEPMPQQAQGVPQQRPWADMIADVMREQFGLKPKDAGNLYRHPYAEWFERVPLPNRFKVSYFSKFSGGVHEMKLSDLTAIRQRHDEPVQDYIQTFIKMRNKCYSLSLTDAQLADLAFQGXPIRKKFSSKDFDSLSHLVQKVTLHEQMFAEARKSFKKVNHVCPYMYGSDDDDDDDDSEIAAAEWVRSKKVIPCQWVKSSGKEERYDFDITKADKIXIFYFWRNRFSFLLAAIKGGKIKFDDSKRPMKKKYDKQQERRYEEDDGGFGPHWGCEFFRFCWNEGMRLPSIEDCPGCSNVAESSSQSYNRGNRLRQTRVPVHQRLSPVNQDCDQEDSEDRKTQWCPSGIFTNNQKRRVQRLRNRERFXEVEQEINHRLKKTNSKQEWRIKKQVPTADEVKRLARGKSVVTASVNMDFILPAEFGIKQADVDEIEEESARLILSPEQAVFEKLEGTENRHLKPLYVNGYVNGKPMSKMMVDGGAAVNLMPYATFRKLGRNAEDLIKTNMVLKDYGGNPSETKGVLNVELTVSSKTIPTTFFVIDGKGSYSLLLGRDWIDANCCIPSTMHQCLIQWQGDKIEIVPADRSVNVASADLALWEMDGFDCLSGKGIVEGSNVYNKDTVDHLDDKXEQGFLLADDLEEIDIGPGDRPRPTFISKNLSPEFRTKLTELLKEFKDCFAWEYYKMPGLSRSIVEHRLPIKPGVRPHQQPPRRCKADMLEPVKAEIKRLYDAGFIHPCRYAEWVSSIVPVIKKNGKVRVCIDFRDLNKATPKDEYPMPVADQLVDAASGHKILSFMDGNAGYNQIFMAEEDIHQTAFRCHGAIGLFEWVVMTFGLKSAGATYQRAMNYIYHDLIGWLVEVYIDDVVVKSKEIEDHIANLRKFFERTRKYGQKMNPTKCAFGVSAGQFLGFLVHERGIDITQRSVIAIKKIQPPENKTELQEMIGKINFARRFISNLSGTLEPFMPLLRLKADQKFTWGAYQRGGRGR

SEQ ID NO: 103616 - protein, 71 aa, Oryza sativa
  Clone ID: PAT_MRT4530_101027C.1.pep
SSCISCFHQPGAQVFCQRTYQDTCVLCCAAWGLGALCFELARLPQLDAFDASYVSLNYLNYLLSALAASLG

SEQ ID NO: 103617 - protein, 700 aa, Oryza sativa
  unsure (1)..(700): unsure at all Xaa locations
  Clone ID: PAT_MRT4530_101028C.1.pep
MIADVIREQFGLKPKDAGNLYRHPYPEWFERVPLPNXFKVPDFSKFSGGIHEMKLSDLTAIKQRHDEPVQEYIXRFREMRNKCYSLALTDAQLADLAFQGMIAPIREKFSSQDFDSLSHLAXKVTLHEQRFAEARKNFKKVNHVFPYIYGLDDDDDDSEIAVAEWVRSKKVIPCQWVKSSGKEERYDFDITKADKIFDLLLREKQIQLPAGHXEGGKIKIDDSKRLMKKKYDEQQGRHYGEDDGGFDPYWDCEFFRFCWNEGMRLPSIEDCPGCSNVIENSSRSYNRSNRLRQARVPVHQRLGPVNQGCDQEDNKDGKTQWCPSGIFTKNQKRRVQRLRNRERFQEVEQEINHRLKKEKPKQEWRVKNQVPAADEATADEAKRLAKGKGVVTASNMVFTLPAEFGVKQADVDKVEEESAKLILSPEQAVFEKPEGAKNRHLKPLYINGYVNGKPMSKMMVDGRAAVNLMPYAIFRKLGRNAEDLIXTNMVLKDFGGNPSETKGILNVELTVDSKTIPTTFFVIDGKGSYSLLLGRDRIHAICCIPSTMHQCLIQWXGDEIENVPADRSVNIASADLALWEMDGLDCLSGKGVVEGSNVYTEDTVDDLDDKQGQSFMSADDLEEIDIGPGDRPRPTFISKNLSSEFRTKLIELLKEFRDCFAWEYYEMPRLSXSIVEHRLPIKPGVRPHMDPHAQCATYKL

SEQ ID NO: 103618 - protein, 73 aa, Oryza sativa
  Clone ID: PAT_MRT4530_101029C.1.pep
AQYTGEAQAMLKVVTAHGMVFQRGTATAGPRCKIGHEATADNVHLLVRAASADHKRTHPTESSPPTQIARNPL

SEQ ID NO: 103619 - protein, 50 aa, Oryza sativa
  Clone ID: PAT_MRT4530_10102C.1.pep
KACQIGPVLAPVGPLFFGKIPFLPIPFFLKEGFFGRKPLISKGNKGLVWV

SEQ ID NO: 103620 - protein, 220 aa, Oryza sativa
  Clone ID: PAT_MRT4530_101030C.1.pep
MPQQAQGVPQQRPWADMIADVMREQFGLKPKDAGNLYRHPYAEWFERVPLPNRFKVSYFSKFSGQDSVSTYEHVSRFLAQCGEASAVDALRVRAAPIRKKFSSKDFDSLSHLVQKVTLHEQMFAEARKSFKKVNHVCPYMYGSDDDDDDDDSEIAAAEWVRSKKVIPCQWVKSSGKEERYDFDITKADKIFDFLLLEKQIQLPAGHTIPSAEDLGKTRYC

SEQ ID NO: 103621 - protein, 1123 aa, Oryza sativa
  unsure (1)..(1123): unsure at all Xaa locations
  Clone ID: PAT_MRT4530_101031C.1.pep
MLTTKFVKQIFQASCFSSTRFWHAWWDPSEVRITTAVFPMAEKLPASPSXAGPSSVKEKILKLGLSEIDEDNIVPITLDKLTPEQQKDLDTMMQQARNQFLSSFTESRKGTLVQKYKVKTEPQTKPYPLDMWKYGSALQQRPEDRSTEYKGAADGFQGNQGDGSQGVQGVGSQGIQGGGLNQDGNAAQLQFNNIQDQVDYAVHHALINQSGILVNTLSNMVKTRVDGSMAEYQATGPVYLPGGVFPNYRPLVTDNQPAVQPIPPNAPSAQPTAPVSALAPAAASSVPGQLVNPRLLVAADFATNSANTVKATSYSADSTTSLDECIGWHLVHNVQPNQTVVPQVVPEHLGGSAQPQFVPQYNQFELMPQQPQGAPQQRPWADMIADVMKEQFGLRPKDAGNLYRQPYPECWADLEKHFHSYFYSGRFREMRNKCYSLSLTDAQLADLAFQGMIAPIREKFSSQDFDSLSHLAQKVTLHEQRFAKARKNFKKVNHVCPYMYGSDDDDDDDSGIAAAEWVRSKKVIPCQWVKSSGKEERYDFDITKADKIFDLLLREKQIQLPAGHTIPSAEELGKKRYCKWHNSGSHSTNDCKVFRQQIQAAIEGGKIKFEDSKRLMKVDGNPFPVNMVQTAGRTADGGRARGFQDVRLPSIEDCPSHQLKKTKPKQEWRVKKQAPVADEAAADEAKRLAKGKSVVTASVNMVFTLPAEFGVKQADVDEVEEESAKLILSPEQEVFEKPEGIENRHLKPLYINGYVNGKPVSKMMVDGGAAVNLMPYATFKKLSRNVEGLIKTNMMENQSYYFEGVVEGSNVYTKDTIDDLDDKQGYGFMSADELEEIDIGLGLSRSIVEHRLPIKPGVRPHQQPPRRCKADMLEPVKAEIKRLYDAGFIRPCRYAEWVSSIVTVIKKNGKVRVCIDFRNLNKATLKDEYPMPVANQLVDAASGHKILSFMDTMNYIYHDPIGWLVEVYIDDVVVKSKEIKDHIADLRKVFERTRKYGLKMNPTKLRHYLLSNECTVICKADVVKYMLSAPILKGRVGKWIFSLTEFDLRSVCTHGCGIGLVIISPRGASFQFAYTIKPYATNNQAEYEAVLKGLQLLKEVEADAIEIMXGDSLLVISQLAGEY

SEQ ID NO: 103622 - protein, 161 aa, Oryza sativa
  Clone ID: PAT_MRT4530_101032C.1.pep
MGRKGFFGTRGGELAVAKASCHTANKPLTGKGEIGASAETVQTMWYVLSFAPFVRHCTHCSPLYTPFVMAPRKPNPSSAKGPDLERINDDSTAYLGISLIDDGELAKLVSSGALVEGQAFAPGKAVVPKPVDNRTVVFAVFFEAGLRFPCSALLPEILRLF

SEQ ID NO: 103623 - protein, 71 aa, Oryza sativa
  unsure (1)..(71): unsure at all Xaa locations
  Clone ID: PAT_MRT4530_101033C.1.pep
GFLGYERXLIIRSPEYRGQSSSVFKSAMRNGLVEKKGYRIRGNVGDQWSALQGDYVGDRVFKIPNPMYYVP

SEQ ID NO: 103624 - protein, 559 aa, Oryza sativa
  Clone ID: PAT_MRT4530_101034C.1.pep
MPRPPPLNLPQAAARNLPGVVAKSCRKSAVPHRFQSSCNGAAHSALDLFVSSSKTAANLESGEGSCDSYTSDAGTAKAGEDNVLHAANALTKVVPILQKRLSSSFSDRCRMAVSAGVIWSSACFWKVAWRKLQLTTSPPATPSRWHWTILAKKMYEKCRKKVNRSQIQYIWHGCWKRLNMWVWLESQAAGLGRDPHMSAIVVDGGKYKIGTIFSTQVGNGYSVNENYIHEYPWMKKGMSTFKNDPLKHIELHHAVFKGCTVVGNHSDVDGAASTVRRCSSVANSRCCSAHSRLQASMPSPIHLKLRQGIREIGQSLEVLLQRGLQRSPSDSTGMRFLAPYPHVRYHRDQLGAEGAPPPVGPEETFNHQHSSLRSIVERTFGIIKKQWKILKEISYFRGENVPTRIIYAAFAMHNFRMDSVDHVYYHQNNPLYNGYPVAPQHTSFDQMCYATNSEQTMSAWLDCIADVVFNQYQPNPPLILIAEAKVHGYSTIVSRHHRLALESDDDGYTPTELSDSGSGTPEPGDGGCASPDLAEGISVSPKLIAALAAVAVAVPALPY

SEQ ID NO: 103625 - protein, 85 aa, Oryza sativa
  Clone ID: PAT_MRT4530_101035C.1.pep
MGTRVHGIGAKENQKPMKPLGIKLKKKEIRGSARPIGGLDRASSRRKRKKINDVSAQSPHPQPVEMRAQPQPQPVHTYSNGILIT

SEQ ID NO: 103626 - protein, 70 aa, Oryza sativa
  Clone ID: PAT_MRT4530_101036C.1.pep
FYFATMPCFLFTTNEIKSLCSRTGNSTLPKKLWLDQPKRNKKGWKGHLSLSYKSIFKYIKLNLQSKFKVF

SEQ ID NO: 103627 - protein, 129 aa, Oryza sativa
  Clone ID: PAT_MRT4530_101037C.1.pep
MSPCPRRLLLLSILLVVLLLATKWMTMLKVVTHRFFTIVTSPVERLNPHIGDIYELSRKWLSRQTDSHIAGPTGQFRAGSTAIGPHWGPFHCLYPAPPSSSTPPPGAASGGGGRVGEGKMWWERKKYRD

SEQ ID NO: 103628 - protein, 95 aa, Oryza sativa
  Clone ID: PAT_MRT4530_101038C.1.pep
MGKGRGKEEGRMGGGEGGVVAMPTMARQGGTGEKRGRERKREGGGKKRVGVAIASGGDASGTWPANLLSGLVGSRVYLGERHDHPNSVRAIVWSD

SEQ ID NO: 103629 - protein, 325 aa, Oryza sativa
  unsure (1)..(325): unsure at all Xaa locations
  Clone ID: PAT_MRT4530_101039C.1.pep
MAARALGKGISSSNNGCEGGGDEPKAAWEIDLSRLRIRQGAPVKHGFRGSLFRADYDGRDVAVKLLDWGKEGFSTPEQIAHLRASLRGVAEAWHKIDHPNITKFVGASMATADLNIPQGQSTAPPLPPPPPDTPCCVVVEYLTGGTLKSYLIKHMERKLAYKDASAXAIADFGVARIEASDPREMTGVMWTLGYMXPEVLVGEPYNRKCDVYSFGICLWEIYCCEMPFMDLSLADVSSAVVHKDLRPEIPRCCPRDMALIMRRCWHANPAARPEMEEVVGMLEALDMKKGRGMVPLGETAGCFCISLRRRGSYITGGETLCSPGS

SEQ ID NO: 103630 - protein, 379 aa, Oryza sativa
  unsure (1)..(379): unsure at all Xaa locations
  Clone ID: PAT_MRT4530_10103C.1.pep
MADGSVRALSEPVSVAEKGKAGAPPPPGGKVAPLPADHVLGAGGVYVLLPATTRGKVSAEEARRALTAAAAAEAERREETAAAARPPPTHTLQYPHAFGTFSSRERGEERGGGRSESGAMGSPGHGDAAERDIDDLPRNDANYTALTPLWFLERAAVVHPDRAAVVHGPVRYTWAETYRRCRRLASALAQRSVGPGCTVAVIAPNVPALYEAHFGVPMSGAVVNCVNIRLNAETIAFLLDHSVAEVVMVDQEFFTLAEESLEILAEKRKCSFRPPILIVIGDPACVSEASAVRXMGDGAIEYAEFLXQNLKVSPQPVYRRMTFXWRWLGYTSGTTSSPKGVVLDHGGANGKAPGVAMVWGRPAGGGNPGPLPKNQRKGR

SEQ ID NO: 103631 - protein, 47 aa, Oryza sativa
  unsure (1)..(47): unsure at all Xaa locations
  Clone ID: PAT_MRT4530_101040C.1.pep
CILYYICRYTITSTXPEYLNQSHSTSINTSHTHTHPIYICQPPTQMV

SEQ ID NO: 103632 - protein, 97 aa, Oryza sativa
  Clone ID: PAT_MRT4530_101041C.1.pep
PSDLLLLFYPKLFAVHNKPTCLYCAKHKPHWWWVPLGSLYLLFWCKLTNIHGHQKIINDGIELKPRYLKCKLLNLSTKCFYTCIAWSSMPTIWTTVF

SEQ ID NO: 103633 - protein, 59 aa, Oryza sativa
  Clone ID: PAT_MRT4530_101042C.1.pep
LPLSIVLDLAPFSVSSGTPRNSAWILPIISVLVESVHCCCYKKHKPVCWHPLIYLAFWI

SEQ ID NO: 103634 - protein, 68 aa, Oryza sativa
  Clone ID: PAT_MRT4530_101043C.1.pep
MGCKASQAYSPSLQGPFCSSKGLLLHLIAFALSSDLAKWRFALWLQWFRQVRSKVLVTCLQQASHGQG

SEQ ID NO: 103635 - protein, 61 aa, Oryza sativa
  unsure (1)..(61): unsure at all Xaa locations
  Clone ID: PAT_MRT4530_101044C.1.pep
HASNKPLTGKGEXGASAETVQNIWYGMRRPLSADVPAETYLPPTKLNTCYLSGACGLSSRH

SEQ ID NO: 103636 - protein, 207 aa, Oryza sativa
  Clone ID: PAT_MRT4530_101045C.1.pep
FEISSSELVDWNNFPPIGELSLVNEHGHKSLDCTTDRSFPNLKRLELVAIPRLSKWAGNDACHVFSLLEVLIDKAENTVRYQFPVEKLRIFNCSCSGKELTLLSSHFPKLSMFVIRGCENIRGLGVAKQGMTAMSASSLPSAGSKLEDECLGQEQQEPGEEDEKAAADGGLLLLPQQLQYLTIGEMSELALVFDTAGGLRGVGEGLQ

SEQ ID NO: 103637 - protein, 431 aa, Oryza sativa
  Clone ID: PAT_MRT4530_101046C.1.pep
MAAAAAARRGCLVALLAVLFLACAAEGGAAAASAAQQQQQQLRRRRHLLRRQRQVHSHLRRLNKAPLASIESPDGDIIDCVHISNQPAFDHPFLKNHTIQMRPDYHPEGLYDESKVASQQNTQTITQMWHKNGVCPENTIPIRRTKKEDVLRASSIRRYGKKKHKSTPNPMSVDPDMLNESGHQHAIAYVEGDKYYGAKATINVWQPRIEQANEFSLSQLWILGGSFGQDLNSIEAGWQVSPDLYGDNNTRLFTYWTSDAYQATGCYNLLCSGFIQINNQIAMGASISPLSNYGGSQYDINILVWKDPKEGNWWLQFGNDYVLGYWPSFLFSYLADSASMIEWGGEVVNSEPDGSHTSTQMGSGHFPEEGFGKSSYFKNIQVVDSSNNLRAPSGIGSFTEQSNCYDVQNGNNGDWGTYFYYGGPGKNPNCP

SEQ ID NO: 103638 - protein, 388 aa, Oryza sativa
  unsure (1)..(388): unsure at all Xaa locations
  Clone ID: PAT_MRT4530_101047C.1.pep
PHQQPPRRCKADMLEPVKAKIKRLYDAGFIRPCRYAXYNQIFMAEEDIHKTAFRCPGAIDLFEWVTMTFGLKSAGATYQWAMNYIYHDLIGWLVEVYIDDVVVKSKEIEDHIADLRKVFERTRKYGLKMNPTKCAFGVSASQFLRFLVHEKGIEITQRSVNAIKKIHPPENKTELQEMIGKINFVRRFISNLSGRLEPFAQLLRLKADQKFTWGAEQQKAFDSIKEYLSSPLVLIPPQKGIPFRLRHYLLSNECTVICKADVVKYMLSAPILKGRVGKWIFSLTEFDLRYESPKGIKGQAIADFIVDHRDYSIGSVEVVPWILLFDGSVGTHGCGIGLVIISPRGASFHITMGDITIXAEYEAVLKGLQLLKEVEANAIEIMGDSLLV

SEQ ID NO: 103639 - protein, 114 aa, Oryza sativa
  unsure (1)..(114): unsure at all Xaa locations
  Clone ID: PAT_MRT4530_101048C.1.pep
ARGGWAKLPPTLPSCLPPPPPPPRXPETPPVASSPHQPPPLLSGPLPPPXSSRSRRPPRPPPRPSSXPETXPPPQPLPPPTSSPSRWPYRPLPPATSFPSFSTSLSTTAPPLSS

SEQ ID NO: 103640 - protein, 66 aa, Oryza sativa
  Clone ID: PAT_MRT4530_101049C.1.pep
QSSHMSDLRGEYSASNARKHVFICIYDAHHISEVVLPASSALEIVQLDRKARNLATSWKHPGDGAQ

SEQ ID NO: 103641 - protein, 67 aa, Oryza sativa
  Clone ID: PAT_MRT4530_10104C.1.pep
EGLVLDFMDIYLCVVTYIGTNPSGACTQIHTDRRGAYIHIRCTGILCKHICTCWHTHCYYSIYTWIR

SEQ ID NO: 103642 - protein, 148 aa, Oryza sativa
  Clone ID: PAT_MRT4530_101050C.1.pep
MGFVSGIDDFAFPPGQAYRFGSLNFITDDFDNISLLGSDSNQSGGDAIFAPLCLPNSAEIYSKTISSELDSNHSDEVSSTSSQSNQGEATYPSILMWLPDDLAAVFTTRASSPRRSRLNSASTSVQSGSREVGVILQRLGTHYKRNPL

SEQ ID NO: 103643 - protein, 353 aa, Oryza sativa
  Clone ID: PAT_MRT4530_101051C.1.pep
MEALHEEMPFDLAFHPSSPLVATSLITGELYLFRYAAESQPERLFAAKSHKESCRAVRFVESGNVILTGSADCSILASDVETGKPIARLEDAHENGINRLVCLTETTVASGDDEGCIKVWDTRERSCCNTFHCHEDYISDMTYVSDSTQILATSGDGTLSVSNLRRNKVKSQSEFSEDELLSVVVMKNGKKVVCGTPSGALLLYSWGFFKDCSDRFLGHAQSVDTMLKLDEETLISGASDGVIRLVGILPNRIIQPLAEHSEYPIEALAFSNDRNYLGSISHDKMLKLWDLQDLLNRQQLVQDDKLGEQDSDDSDDDGMDVDMDPNSSKGSRSTKTSKGQSSDRPTSDFFADL

SEQ ID NO: 103644 - protein, 526 aa, Oryza sativa
  Clone ID: PAT_MRT4530_101052C.1.pep
MSRRNSRTIYVGNLPGDIREREVEDLFYKYGRIVDIDLKIPPRPPGYAFVEFEDPRDAQDAIYGRHGYDFDGHRLRVELGDGGRGHYFDRSSSYSSARISGAGKRTDFRVMVTGLPSSASWQDLKQLLELLIIPTMRIETSDTPDKQFFVTLQIRKLDDSEFRNAFSRAYIRVREYDSAKRSRSRSRGRSHSRSISRSRSRSRSISRSRSRSYSRSRSPRSRSASRSHSPVKERSRSASQSRSPVKERSPSRSPPPATSPPREKSASKSPVKSRSLSRSPSPVRDINQKLCIFRLQQQRHVWDHDHPPYRCRHEDNIRAAPVLNPECGAPADWKGRYLGIIDYSAILLWVLENAEITAVALSAGSATVAGVGMGAVGAVGVAALGAIGAAVAGGLTAEKGVAKDGLTAADHLGEDFYKVLLQQEHFKSTTVRSIVESYRWSPSVSITLDTSMLTVLPLLPKYRQLTVMEFMKTIGSTVLDSGNGLVKPPLTCSPDASLGSVIDSIASRITHRIYTSWTVTSRLLVS

SEQ ID NO: 103645 - protein, 323 aa, Oryza sativa
  unsure (1)..(323): unsure at all Xaa locations
  Clone ID: PAT_MRT4530_101053C.1.pep
MGGQRRQRRHGFRDFSETAVSCDGIDNHIESFPPPGKKITIVFVIGGPGSGKGTQCAKIVKQFGFTHLSAGDLLREEAKYDTEQGTMIKNLMNEGKLVSSDLIVKLLFKAMRESGNDKFLVDGFPRNEENRHAYENIIHIEPEFLLFIDCSKEEMERRILNRNQAFYLLGRDDDNIDTIRRRFDVFQQQTLPVIQYYEKRGKLRKVDGNRQVDEVFEDVKAIFAQLNNQYKTINTTSQLYGYGYPLDTRYPHGCGYGDNFVPAMGVEERGGNAATPNAGNAGRYAXSRRGSPPRCRRHPYSLEPSPPPLFAGAAGALSRRRYS

SEQ ID NO: 103646 - protein, 451 aa, Oryza sativa
  unsure (1)..(451): unsure at all Xaa locations
  Clone ID: PAT_MRT4530_101054C.1.pep
MDRPDETVXKFPSCDAYFDTIQSKKKLPLSLQESLTAAFAQIPVSSFPDVPNGRVIEIPGDTSVLDAVRILSKHNIRAAPVLNPECGAPADWKGRYLGIIDYSAIILWVLENAEIAAVALSAGSATAAGVGMGAVGAVGVAALGATGPAAVAGLTAAAVGAAVAGGLTAEKGVAKDGLTAADHLGEDFYKVLLQQEPFKSTTVRSIVESYRWSPFVPITLDTSMLTVLLLLSKYRLRNVPVIEPDKPIIKNFITQTGVVKGLQQCKGRDWFDYISALPLSDLGLPFMSLDEVITVNSGDLILEAFKCMKDNKIGGVPVVEGPNKKLVGSVSIRDIRFLLLRPDLFSNFRQLTVMEFMKTIGSTVSDSGNGLVKPPLTCSPDASLGSVIDSIASRITHRIYVVDGDFEVVGVVTLRDVISCFIYEPPGYCDNYLASAMDKLEEKGAGSVDTS

SEQ ID NO: 103647 - protein, 111 aa, Oryza sativa
  Clone ID: PAT_MRT4530_101055C.1.pep
AQRKKALRRQRNPRKVAHVDVEEVVDRTGSIFSSSCVLLAVIPRRSAPQSSGTSTSIHTYRDRILRADMLVPACGSYTLGYNPKTLFRSTCQQRSLVEHIDPLGIHKDHIG

SEQ ID NO: 103648 - protein, 167 aa, Oryza sativa
  Clone ID: PAT_MRT4530_101056C.1.pep
MSRRNSRTIYVGNLPGDIREREVEDLFYKYGRIVDIDLKIPPWPPGYAFVEFEDPRDAQDAIYGRHGYDFDGHRLRVELAHGGRGPSFDRSSSYSSAGRRGAAKRTDYRVMVTGLPSSASWQDLKDHMRRAGDVCFSDVYREGGATIGIVDYTNYEDMKQANRKLDD

SEQ ID NO: 103649 - protein, 473 aa, Oryza sativa
  Clone ID: PAT_MRT4530_101057C.1.pep
MPAWWPRKSRSKAKGVGKPPGAGAASAASSPRKSLDLVDLSASPSVTPRAREKARSLDSPSAAAPRHGGGRCGGGFGEVGYKLPVPVGDAGPGGQGQGQEPELEPAPVRFEENGDVVGGVAGDASSEELSVCSHDSSDEATDQQVCRSTDPASFVRGRNMPSDSHKILNEDNHFMSYSMPREHRKFFEVPVTNMGELHLHCDDLSTSETSSRGRMLPEDFLAPRTRSLSPGPKGHTFAVNNVNSREFGFSPRSPVKMMDGLKSPPHPLPLPPGPATCSPLPPSPTAYSPHPLGPTTCLQSESQWKKGKLLGSGTFGQVYLGFNSENGQFCAIKEVQVISDDPHSKERLKQLNQEIDMLRQLSHPNIVQYYGSEMTDDALSIYLEFVSGGSIHKSPRGYGPFKEPVIRNYTGQILSGLAYLHGRNTVHRDITGANILVGPNGEVKLADFGMAKHISSFAEIRSFKGSPYWMAPE

SEQ ID NO: 103650 - protein, 38 aa, Oryza sativa
  Clone ID: PAT_MRT4530_101058C.1.pep
MEKKAAIYADILRDPFELQRRFLLGLPNEDLPVEEKYC

SEQ ID NO: 103651 - protein, 375 aa, Oryza sativa
  unsure (1)..(375): unsure at all Xaa locations
  Clone ID: PAT_MRT4530_101059C.1.pep
PTYPGEVVKPRGPAVSFMSVRKSSQFEPQASCKEXEDQFRVVVLRRSTDGQCQRXDQLKSPINGSVESYKVTKIANLNSSVQXNLYKRLTCLPSFVSPLPEHPAPPRHLXHRAPSSRRSPAISSRPPPPLPSLPRCAAATYSITAPHRTPAFTPSPSSTAGTTLPSRGRATTATHRLQPAVAAALVVAAPRRLRRRQRRAKLYPGLRSVFPNRHRNHTSPVXPEPPPPLADSXPRRTAATVIADPRPSLTPPLPSXGAAAAHPPLPERRPSSERRCFRPSRALPSPPRVAISPPATSFRRMLLGELPLPFPAALRRSPVGRSTWPFGAARVGALVAPRRRHLCRXPPWPPRXVHVVRPRLCRGGPSPPWAAPLAR

SEQ ID NO: 103652 - protein, 991 aa, Oryza sativa
  Clone ID: PAT_MRT4530_10105C.1.pep
MMTKPPQSRGGGGGGGGALGRRGFAALLAAAVIALALLCLFYGAAFAPTLRSRRLPLQRRFEAVPADLALSSLPVCDARYSELIPCLDRGLHNQLRLRLNLSLMQHYERHCPPAHRRLNCLIPPPAGYRVPIRWPRSRDEVWKANIPHTHLASEKSDQRWMVVNGDKINFPGGGTHFHTGADKYIVHLAQMLNFPNGKLNNGGNIRNVLDVGCGVASFGAYLLPLDIIAMSLAPNDVHENQIQFALERGIPSTLGVLGTRRLPYPSHSFELAHCSRCRIDWLQRDGILLLEVDRVLRPGGYFVYSSPEAYAMDPINRNIWRKMSDLARRMCWQIASKEDQTVIWIKPLTNECYMKREPGTLPNMCDRDDDPDAAWNVPMKACVTPYSERVHKVKGSNLLPWPQRLTAPPPRLEELGISSNNFSDDSEIWHFRVIQYWKLMKSEIQKDSFRNVMDMNANLGGFAASLRKKDVWVMNVVPSTESGKLKIIYDRGLLGTIHNWCESFSTYPRTYDLVHAWLLFSEIEKQGCSVEDLLIEMDRIMRPQGYAIIRDKVAVINHIKKLLPAACWAVRPQPENLAQEAQRSQSNDTPVTADSGMAELRHATAAAAATRASSSPAKRDAESSASSSPFVASSSSPRGGGGGDGKDGAPRSSAPLHHQKYHLPSPLRSLLALEDPRSPTASASYRILVAVVACLFVAALVSAPSVWSRIVNERESLWENPHAAAASWKPCAERHLVPENETSGYIFIHAEGGLNQQRIAICNAVAIAKIMNATLILPVLKQDQIWKDQTKFEDIFDVDYFINYLKDDVRIVRDIPEWFTEKDELFTSIKRTVKNIPKYASAQFYIDNVLPRIKDKKIMSIKPFVDRLGYDNVPMEINRLRCRVNYHALKFLPEIEEMAEKLATRMRNRTGNVNPYMALHLRFEKGMVGLSFCDFAGTREEKAMKADYRPKQWPRRFNNGSHLWSLALEKRKEGRPPREPVELCTILRAMW

SEQ ID NO: 103653 - protein, 42 aa, Oryza sativa
  Clone ID: PAT_MRT4530_101060C.1.pep
FHWFVAKGMKKGEFSWARGALPPLEKDSKGVGSEFPDGNKGY

SEQ ID NO: 103654 - protein, 76 aa, Oryza sativa
  Clone ID: PAT_MRT4530_101061C.1.pep
PKAIPQVCQARHYHVRRQAISILAWMGVNIRLSGLGEYGHLYQVLTQVSQIGLLPPCTPSQGPSLYGATPIDVLMA

SEQ ID NO: 103655 - protein, 81 aa, Oryza sativa
  Clone ID: PAT_MRT4530_101062C.1.pep
MRLCSKQRSRGGEAHARQRSGAALAWWSGACRAVRHTRGGEAHSQSFDLDAKVQMEANAARHKEHMGVIGKQKDTGNANLL

SEQ ID NO: 103656 - protein, 137 aa, Oryza sativa
  unsure (1)..(137): unsure at all Xaa locations
  Clone ID: PAT_MRT4530_101063C.1.pep
FLLHAAATELLLGLDDEDITPSDTYNNPPPVIQGPITRARARQLNLEVSSFLYSSLYDFENRLLPNEYIVIRNKGEDKDLXEGLRGMEDHQGRPSQYGGPNQVDFXTIQSPGPVCTKTGAQVAYVHGLGRSLYGWKT

SEQ ID NO: 103657 - protein, 67 aa, Oryza sativa
  unsure (1)..(67): unsure at all Xaa locations
  Clone ID: PAT_MRT4530_101064C.1.pep
MSYVFSGDETAPFFGFLGAGCALMFWXMGAAYGTANSGVCVAYMGVMRPALATESISPTSTAGVPSI

SEQ ID NO: 103658 - protein, 389 aa, Oryza sativa
  Clone ID: PAT_MRT4530_101065C.1.pep
MADLGFGDARSGNGSRSQCSRGKAMLLALGKGLPEQVLPQEKVVETYLQDTICDDPATRAKLERLCKTTTVRTRYTVMSKELLDEHPELRTEGTPTLTPRLDICNAAVLELGATAARAALGEWGRPAADITHLVYISSSELRLPGGDLFLATRLGLHPNTVRTSLLFLGCSGGAAALRTAKDIAENNPGSRVLVVAAETTVLGFRPPSPDRPYDLVGAALFGDGASAAIIGAGPIAAEESPFLELQFSTQEFLPGTDKVIDGKITEEGINFKLGRDLPEKIENRIEGFCRTLMDRVGIKEFNDVFWAVHPGGPAILNRLEVCLELQPEKLKISRKALMNYGNVSSNTVFYVLEYLRDELKKGMIREEWGLILAFGPGITFEGMLVRGIN

SEQ ID NO: 103659 - protein, 49 aa, Oryza sativa
  Clone ID: PAT_MRT4530_101066C.1.pep
RPRSSGYRHARSYIHRARRPCRLCGNRMPLQQLNITASLVLKLVLINFA

SEQ ID NO: 103660 - protein, 193 aa, Oryza sativa
  Clone ID: PAT_MRT4530_101068C.1.pep
MLAAGHRASAVRRYPPGCGRDHRAAHPPGQPGPSTTATNLLRPPPNASARAATKSPKLARQPLLAVATEGPDHGEGNGLVAGIEVPAATTEVVLVRRASAVRRYPPGCGRGAAASKPSKAQSAPRNGEAESIAGDQKVEMDAGSNGWMDCGGDAGGVRQEEGGGRPWDLTGLMLPPFLPWARHGRRSQRQKLL

SEQ ID NO: 103661 - protein, 137 aa, Oryza sativa
  unsure (1)..(137): unsure at all Xaa locations
  Clone ID: PAT_MRT4530_101069C.1.pep
PSGSPVGCXRPARASXRPRRGRECDAAQTARALFYAKPGAGDRSLRETLQLQSIGYVDIYGVLDDMIXDPGKYGFDVSTRGCCGTGXVRVTLLCNQLTATTCADDRKFVFWDSFHPTERAYSIMVDYLYQRYVDKLL

SEQ ID NO: 103662 - protein, 164 aa, Oryza sativa
  Clone ID: PAT_MRT4530_10106C.1.pep
EDPRSPTASASYRILVAVVACLFVAALVSAPSVWSRINAPYLCRKDGIRLHCPRVNERESLWENPHAAAASWKPCAERRSDEISDLVPENETSGYIFIHAEGGLNQQRIAICNAVAIAKIMNATLILPVLKQDQIWKDQTKFEDIFDVDYFINYLKDDVRIVRD

SEQ ID NO: 103663 - protein, 63 aa, Oryza sativa
  Clone ID: PAT_MRT4530_101070C.1.pep
AHIFIVQCPFRLSKFKLHYWGILLLIYENRGRNKSLKFKPFTGPLNFDLFIQKLEAFFPFFIY

SEQ ID NO: 103664 - protein, 106 aa, Oryza sativa
  Clone ID: PAT_MRT4530_101071C.1.pep
MGRNGREKNARGGERSIRVVCGWEEISVSSIPATHSACSCAGAAATRQRVVPTFTSNQDLGEVPAIPAAISLPHGWPRPSGYDSEKRHPADDSSHVSGERNMDGPT

SEQ ID NO: 103665 - protein, 240 aa, Oryza sativa
  Clone ID: PAT_MRT4530_101072C.1.pep
MGELGTPGNEQSLSVYTKTVNCSIIRAPAMTRLIVNHFNDTCIFHSLGAATESHYKRRGALSIPKEDFEVTLSIDDYVSQYNKMISGELGTEPGGGRGQSRMHVALRVLQEIGIAAEDPGLEGMRYKIYNWKMINKEDVKFKEIAEEIGIKARVMAAGFKISSNFRTTKPGEIYSYEPNKREKNEDGVTRSHCVLVVGFGRREGQEYLVYQNSAGIEFGEEGFGRVYLKDVLRMATLNVI

SEQ ID NO: 103666 - protein, 52 aa, Oryza sativa
  Clone ID: PAT_MRT4530_101073C.1.pep
RNAIYYYNNILCSSISLDQLDVITYPRTNYFKDLLTSLLQCLNWSDVPVSFL

SEQ ID NO: 103667 - protein, 908 aa, Oryza sativa
  Clone ID: PAT_MRT4530_101074C.1.pep
MAELVPQVVGAVSRSIAGRLLADIDLASSVGTNVEDVTDALTRLTSIRADLEASMGRLPQRRRPEEVTDWLSRVDGAEKRVAKLRREYQRRCCSCGGGGAFSLNLFASYAISRRACHERHRLAALLGECDRVRSLAAGAPRPSSGAMVVPSTVVGMEGYLEEALACLDDRDAGVVAICGMAGVGKSTLLRRINNVFVQDPDRRHEFDYVIWLDAPGDCAAVGKMQDAMAHRLGLCALPDGGAPDHRARPIFEVLRDSSFLLLLDGVTKPVDLVDIGVPHLVHDDRRRQKVAMTTRTRGVCGRMSSSRRIDMQCLDSDHSWRLFREIARDETINADPRIPDLAKEVAGRCGGLPLVLTAIGGAMRCRRQPEEWVSTVTALRNLELAKIPGMDAGEKPGAMLRSLQESYGDLRHPVLQKCFLATSLWPEGHAIDKGELVECWIGLGLVGESLPMDEAVRTGLAVLNELEEANLLLPGDATGEVKLHGVVRGAALWIARDLGKAPNRWVVCTGGVSLRSRQKLVEFFERARDAERVSAMRSSVERLRAMPPPSSPCRSLSVLMLQHNAALRDIPGGFLLGVPALAYLDASFTGVREVAPEIGTLASLRYLNLSSTPLESVPPELGRLRQLRHLLLRHTARLSAFPAGVLRGLPSLDVLDVCPSRYTEWCGAGGGGGGASLDELRSSSAFVRSLGISVATLAGLRALRGLDNVRTRRLTVTRVAATAPSVALRPSMLGLLEALHELTVAKCSGLQELEVVAGEEDNAWWRLPELRKLEIDELHELAAVRWTRTDVGAFLPALRWVKISHCNRLRNVSWAVQLPCLEQLELRHCSEMVHVVDIDGDDEEQRREHPETRTFRCLRRLLLVELPSMGSIGGGAALSFPWLETLEIAGCDSLGELPVELQKKLKEI

SEQ ID NO: 103668 - protein, 66 aa, Oryza sativa
  unsure (1)..(66): unsure at all Xaa locations
  Clone ID: PAT_MRT4530_101075C.1.pep
TSSRSXSXXSLCPXXFSXXFMXPAHIHHRLQPXPTVAEPLXLPRRPSLRAPASSCLCXSAXASSHR

SEQ ID NO: 103669 - protein, 83 aa, Oryza sativa
  unsure (1)..(83): unsure at all Xaa locations
  Clone ID: PAT_MRT4530_101076C.1.pep
TTXIERERGXMQIFXXTXTXKSITLEVESSDTIDNXKXKIQDKEGIPPDQQXLXFXGKXLQDGRTLXDYNIQKESTLDLVLRL

SEQ ID NO: 103670 - protein, 150 aa, Oryza sativa
  Clone ID: PAT_MRT4530_101077C.1.pep
MAATKTVDDESVESYVTQMMHGPLVDVRHGEAEPRRAERRHLIAHLERFHGRHAGWDRHRLEVNGDAGDAEVIGAIPGVLEEGHGVAAETFGDLHGQRCKELEWSADGHAIAAAASRWGSPLPTLCPSSREDGVGEVDRELSWPRSRENE

SEQ ID NO: 103671 - protein, 577 aa, Oryza sativa
  Clone ID: PAT_MRT4530_101078C.1.pep
MPKASPFLSLLLLLLLITIYIAHGAAGDAIGGDPWQEPEVAQQPAVVLAGEWQLLHQNTGVSAMHMQLLPGDYVLMFDRTDSGPSNISLDALSPCAAAATTALAAGGGGAVDCTAHSVLLDLRSNALRPYPLATNPWCSSAALLPNGTLLQTGGFSNGDRIARLFSPSTGWVDLPSFLAVRRWYATDILLADGRVLILGGRRQFNFEFFPHDDAPAPQPTLFPFLEETTDMDAEDNLYPFLHLLPDATVFVFANDRAVVFDPYNRAPLRRLPAIPGGVPRNYPSSGSSVLLPLRPDSPSHAEVLVCGGAPRGAYRLALRNGTFAPADRTCGRIAPTDANPVWAMEEMPLPRAMGDMVLLPTGDVLIVNGAAAGTAGWELGREPVTYPVLYKPDMQLGARFEVLAASTIPRMYHSSATLDTLGRVLVGGSNPHVGYVFDNVTYPTELSLEAFLPPYFDARLDGVRPRLVAAPSEVGYGEAAAVRFEVPGGAVSGGPEEVRVAAVAPAFATHSFGMNQRVVSLAVGTVAQLAAGLYEAQVAAPPSPSVAPPGYYLWFVLHAGVPSTAAWVRMRPLGAAT

SEQ ID NO: 103672 - protein, 42 aa, Oryza sativa
  Clone ID: PAT_MRT4530_101079C.1.pep
RTANATPSYRLILSSKDQANNSLECRVKLKRWLEGLLQEQCD

SEQ ID NO: 103673 - protein, 274 aa, Oryza sativa
  Clone ID: PAT_MRT4530_10107C.1.pep
PGLQARGARERETRAGSLPRPAPPRLGDLRPAPYRRSVPLFVPIPCWYLSVEKARYVYVRLFPEPGRVAKERPPLARFLLRACWSGPPRRSCVSPVHEHLLRSSEDFFWQLDTMYAGRFTIDVEFLDLKIASNNAAESSTSIWPNESIAVQNIASKSSLGCLSRMLTESIHADVTINTTDGVLKAHKAILASCSPVFESMFLHDLKEKESSTININDMCLESCSALIGFIYGTIKLDQFWKHRLSLLAAANKYSISDIKDCCEESLLEDINSSN

SEQ ID NO: 103674 - protein, 917 aa, Oryza sativa
  Clone ID: PAT_MRT4530_101080C.1.pep
MGGVSGKLVWVLLVMCSSWLIAAVHAQQAATTDPIEVAALEAILGRWGKTTSPLWRMSGEPCRGVPVDGSTDLDGNPKNNPGIKCDCSYNSGTVCHITQLRVYALNVVGQIPAELQNLTYLTYLNLDQNYLSGPIPSFIGQLTALTELHVGFNPLSGSLPKELGNLTNLNLLGISLTNFTGELPEELGNLSKLKYLGISLTNFSGQLPEELGNLTKLRQLYTDSAGLSGPFPSTLSRLKNLKLLRASDNNFTGTIPDFIGSLSNLEDLRIGDIVNGSSSLAFISSLTSLDTLVLRNCKISGDLGAVDFSKFANLTFLDLSFNNISGNVPKSILNLQKLIFLFLGNNSLTGELPDGISPSLTNLDFSYNQLTDYSFAVDCGSNRSIRVSDNTMYELDSTNLGDSSYYVTSQTRWGVSNVGKLFQAPNDSKIIHSGEKIQNAVDSELFQTARMSPSSLRYYGLGLENGNYTVLLKFAELGFPDTPTWQSLGRRFFDIYIQGELKEKDFNIRKMAGGKSFTAVYKSYTTTVSKNFLEIHLFWAGKGTCCIPIQGYYGPLISALSITPNFSPTVRNGVPKKKSKAGAIVGIVIAASVLGSAILFGIFMVIKKRRRMAKQQEVYEYLKNGSLDKALFGNGSIKLDWATRFEIILGIARGLTYLHEESSVRIVHRDIKASNVLLDTDLTPKISDFGLAKLYDEKKTHVSTGIAGTFGYLAPEYAMRRHLTEKVDVFAFGVVALEIVAGRSNTDNSLEESKIYLFEWAWSLYEKEQALGIVDPRLEEFSRDEVYRVIHVALICTQGSPYQRPPMSKVVAMLTGDVEVAEVVTKPNYITEWQFRGGNTSYVTSHSGSTTPKLSRQKEIDPLTQSPTITGVSHEHEGRSRLDQFVEPCRLLSMAKQGVAAKLDHVRASTVSDVDVL

SEQ ID NO: 103675 - protein, 106 aa, Oryza sativa
  Clone ID: PAT_MRT4530_101081C.1.pep
MAPPTPGLSAAARLVIRRFLTTGAEAAEAVAPHAARAKGKKDKRPLGRRLLELGDAAGEGSVSRVLDEWVREGREEAIAAADLAKCARDLHKVKRDAHALEGPFES

SEQ ID NO: 103676 - protein, 57 aa, Oryza sativa
  Clone ID: PAT_MRT4530_101082C.1.pep
FFFFWRSEWIQSMEMSSTTNLNGICMPSILRPPSAVSISSPDPSIHISILAAFTNSG

SEQ ID NO: 103677 - protein, 58 aa, Oryza sativa
  Clone ID: PAT_MRT4530_101083C.1.pep
GKLYSQHVPVPDISKSTHLVRLLMSKNRACLEAFDNHRTGMFREKKKKKKKKKKKKKI

SEQ ID NO: 103678 - protein, 105 aa, Oryza sativa
  unsure (1)..(105): unsure at all Xaa locations
  Clone ID: PAT_MRT4530_101084C.1.pep
RNTKTTRPEREKSQDDAATGGEARXKAAGGHPDTHGDGPRTKRRPRTREEKKAPDEKKRNDAQNKPDRXRKTSPEGKAPAXNGGDGKRTPDPDAITQATEEKHPT

SEQ ID NO: 103679 - protein, 799 aa, Oryza sativa
  Clone ID: PAT_MRT4530_101085C.1.pep
MEEDEAEKENIPDWAQFGGFDGNTTGELDEAIEDNDVADDLGQMLRDVKDDCESCEQGHKKLGTTLEFLQWKAKKNGVSDKAFGKLLKLLKNILPEGNKLFETTYEAKKLVYSLGLEVQKIHACPNDCILYRCEEYENLEVCPVCKALRYKIKRDDPGKVDGQPSKKRVPAKVMWIKSAGTPLALEPSLGHALELSRSPRLRVFLHRHAFLARPVGLRLSLTMSTTKVSEKNIILVKVEDLSEEQRADMEQIIQQFRDTYLNSYFINPQGEVVQKGKFTLLKQEEEETNDVKVEVKMEEELHTFQDRVDSTIFGGNIPTIWNVQGQHGNWPASRKPSIGSRKNNALFSNLSKADVWGTRLEDPQSRTIGASFTDAVRRRNWNIGSSATSKPTDVGQSADGASNTNNAQPGQSQQTHQPQLPIGNVPIGPQYVNVDPNITPYQQIPGFNIGGQYQPLSPMQYWQASSPFAQVHPQPVYNQYEQQYQGGAQQQMADVIAEVVREQFGIKPKDSRDQINWYACIPEGEFSTCTGVKQISQASCFTSTPEYFDKVPLPNRYKIPGFSKFSGQDNVSTYEHISQCLAQCDFESLAHLAQKVLAHEQHFQEAKRFKKVNYVYRYASDSDDDQDTEIGLAEWSKFKKTMMCQWVKDTSKEEKYDFDINKADKIFDLLLQEKQIQLPVGHILPSAEELKKRKYCKWHNTGSHHTNECKVFRQQIQSSIEQGRIKFDDGKEPMKIDGHPFPVNVAHATVDSSRLISKYQRKHDRRVRSFRRHQDDNCHSFAVVGRDAFEKYPVCRLLV

SEQ ID NO: 103680 - protein, 98 aa, Oryza sativa
  unsure (1)..(98): unsure at all Xaa locations
  Clone ID: PAT_MRT4530_101086C.1.pep
HFIPHEXXXVXXLXLXXVSYXXXXXAXKTXXXQXXXCXXXGQMGLXXXXRXXXQXLFXTQGVXKITXXVVSFHXSXGXHTCXXNFSXHXXXXXAXSXX

SEQ ID NO: 103681 - protein, 44 aa, Oryza sativa
  Clone ID: PAT_MRT4530_101088C.1.pep
KRHCVNRYEPHKFVRSFFVVVSTRLSNNNTETRRTPRGSQKKKK

SEQ ID NO: 103682 - protein, 144 aa, Oryza sativa
  Clone ID: PAT_MRT4530_101089C.1.pep
WRRRRSSRGRGREMEVVGVETREPVQPWKLSITSTGCASATPSLGIETQPRRLMSPALGCASHAVVVGGGLAGGRQGDVLDGGGPVQDVLDGGTSAQFCRARIGATGSSVAHHHRQQRFTGTCASPAKNEKGLHCQQLLGLHQQ

SEQ ID NO: 103683 - protein, 137 aa, Oryza sativa
  Clone ID: PAT_MRT4530_10108C.1.pep
MPKRLDPELVHSLYLNCKKDQRQGVPCDPPLGDAAPAELRALLSIESIGFEARGDHQRRAEIVWQLVQDSRSIESVGFEARGSHQRRAEIVRQLTRDSRFVAPQAAADLTSGASSKGLAFEHIKLFGYKNYRLLILA

SEQ ID NO: 103684 - protein, 193 aa, Oryza sativa
  unsure (1)..(193): unsure at all Xaa locations
  Clone ID: PAT_MRT4530_101090C.1.pep
KKNSPRWPVGGDGGGGICASPASWRSDPAASAVGGVGEGGIGGVGGREVGGGTGGGGGIGGGRLSRAEAEAEARLEASPAEAAEVETVAAVGPRPPPLPPSAATAPRLXDPSSATAPPPAPVGSGGRAAAAPPLPPLPDLAAGPPLPPRLPPAPXRIWRLGRRHGPSRTRATSLSVQTLLDRERDSISIIFRI

SEQ ID NO: 103685 - protein, 95 aa, Oryza sativa
  unsure (1)..(95): unsure at all Xaa locations
  Clone ID: PAT_MRT4530_101091C.1.pep
TGFSSVLRIQWRRRRPKATTNGASGDQTMATTHGFTVTATXSGGIWRKRTGGRGRDQPCGAEGSGGTDRERPARREKAAGXAAGVGERRRAWGGG

SEQ ID NO: 103686 - protein, 90 aa, Oryza sativa
  Clone ID: PAT_MRT4530_101092C.1.pep
FIFLHIEYENINDVHNYICVYVQIIHTVRQHLSERTSYVRYGWHTNTNYNFPREYQTWPCLCSIEGRCLPLCQLHLGVLSQPTEFPETTA

SEQ ID NO: 103687 - protein, 136 aa, Oryza sativa
  unsure (1)..(136): unsure at all Xaa locations
  Clone ID: PAT_MRT4530_101093C.1.pep
SIWKLLAPPKVQVILXLVIQNTVWTTDRLERRGWQNQKVCPLCYMADEYADHLLAKYRXHTDIQLDKWDDRYSVKHWWNLVLESPNXPRLPFRTPVILVSWEVWCKRNATIFRHKASTPASILAKRLRRKLEHRRK

SEQ ID NO: 103688 - protein, 209 aa, Oryza sativa
  Clone ID: PAT_MRT4530_101094C.1.pep
MAGSSEQQLVANAAATTVAGNGSRFAVTCGLLRQYMKEHSGSNGGGGFLPAVTAMSLMTGGADAEEEAPEVRKTMELFPQQAGTLKDTQERKEITEKAQLTIFYGGSVVVFDDFPAEKAGELMKLAGSRDSTAAAAVSDAGAAAGQPCLPDMPIARKVSLQRFLEKRKNRIVVAEPLPESEKKEAESSKRAKKDDGGASWLQVNPTLSL

SEQ ID NO: 103689 - protein, 52 aa, Oryza sativa
  Clone ID: PAT_MRT4530_101095C.1.pep
MRIGAQDYRSSGDFLVEFGQIGELVTSSLSVKSFITDPSSMIFIMLPLCSRG

SEQ ID NO: 103690 - protein, 79 aa, Oryza sativa
  Clone ID: PAT_MRT4530_101096C.1.pep
MGRSGAANDEMRQGVGETTSEGECADSEEANEVVGDKARPMSCKAHRIVGGGGKGWDPVTGKKRSGGCRDGEGGDRVVG

SEQ ID NO: 103691 - protein, 63 aa, Oryza sativa
  Clone ID: PAT_MRT4530_101097C.1.pep
LGHLIILLASHEKCMHAWLVFFFLVFFCLRIYGKLIKRRLIYLKISYKFLDYRIKCTLARELD

SEQ ID NO: 103692 - protein, 107 aa, Oryza sativa
  Clone ID: PAT_MRT4530_101098C.1.pep
IPSGGKAGIYTLPPSRIGMKTERIVSVCSGQKRIRIPFGSDNSRIVWMWIRIFSPGYKYGYEVELVFVFREKIVSVFMSDYIRFLFIFEIIRICFRIRTIRIRFHIR

SEQ ID NO: 103693 - protein, 297 aa, Oryza sativa
  Clone ID: PAT_MRT4530_101099C.1.pep
METGGIAERFRDKTILITGATGFLGKLLVEKILRVQPEVRKLYLLVRAPDAIAAEERVLTEVVGKGLFDVLREQYGAGFNSFIKEKIYALPGDVMHENFGLESYEVLQLSQKVDIIVNGAATTNFMERYDVALATNAAGVMHLCQFAKQCDNLKMVLHVSTANVLLGGIYTKNYYEFNRDYNILMTVAKLFAPFDDTNLRKLWKATAMDQNDDASIFNFDPKCINWSSYLVNTHIPAAIKYANDQKAKARNSVFVVGGERSAGGEAGGGGQKREAEAAMAAASLVNSGKGWRPGEVH

SEQ ID NO: 103694 - protein, 139 aa, Oryza sativa
  unsure (1)..(139): unsure at all Xaa locations
  Clone ID: PAT_MRT4530_10109C.1.pep
PLVERDRKISEHLDDLIWRNDITCINMLRLRKSSFFRFCKLFRDRGLLEDTINVCVEEQVAMFLHTIGHNLRNRVVGATFRXSGEIVSRYFNLVLHAVGELXNDLIKPPSLDIAPKIAGNHRWDPYIRDCIXAIDGTHV

SEQ ID NO: 103695 - protein, 42 aa, Oryza sativa
  Clone ID: PAT_MRT4530_1010C.1.pep
MADKASTDQESTSPSLPTSRISGDMELGGTVWKSLTATKKGQ

SEQ ID NO: 103696 - protein, 78 aa, Oryza sativa
  Clone ID: PAT_MRT4530_101100C.1.pep
GGASPIFLMMCAIQAFLEAVRLDLDVRSASFFSLFSTNQCSFIYQIRTSNDKQGLSKSSDYICGSDMHRAPPSSCSPV

SEQ ID NO: 103697 - protein, 186 aa, Oryza sativa
  Clone ID: PAT_MRT4530_101101C.1.pep
MASLARAAASAARAALRPAPLAGRVLGSPLPTPLAPARAARILRRSAAAASAGLETLMPLHSAVAGARLRSCIAADSSCWSSLSQGWGGGGRRKRGEFAGFKGMAVGGDSPVARQRRHRRNRGVGSCGEAAAVPPKPWGRERAVDRRGAIAGAVDAFWPIGEAGGGGGSGGGGGMGDGREWRQWNE

SEQ ID NO: 103698 - protein, 152 aa, Oryza sativa
  Clone ID: PAT_MRT4530_101102C.1.pep
MDLHNQQPDALTDEDATVVAEERCTVPVKLIKRDINFSVAGVVLRVIFSHIKLGLIRSEWSLKMDCNMNNTICQDSFMMPAVLSMPCFPKVICTMVIAGGGKLCQRPKASKGVPFSPAADNRQHINIFAGGRHKVAVIKETNPLRLPFKGYQ

SEQ ID NO: 103699 - protein, 139 aa, Oryza sativa
  unsure (1)..(139): unsure at all Xaa locations
  Clone ID: PAT_MRT4530_101103C.1.pep
EGTGVLYIGTEGPIVAGVAAISPAELGEVGRRERRDSKIESRLSRARARVRERGSGCGRRGRMRRRGRRGPEQAGRGRGGGCGXRWRRLVVREGPVRWAPPVGDPGREEEGGRLSWASACGPAQREGRGEERMGRRPML

SEQ ID NO: 103700 - protein, 69 aa, Oryza sativa
  Clone ID: PAT_MRT4530_101104C.1.pep
MDEVEEDNKCGGKEEKRTLPPRTPSSSSLHLRMLLTLICSLPGGAALICTIEIAVQSLLADEGGEEGPT

SEQ ID NO: 103701 - protein, 75 aa, Oryza sativa
  Clone ID: PAT_MRT4530_101105C.1.pep
KQPRPTSGGPRQGKSPIKMGQGRAGRDNESKEKGAQMRLPEACLHTMCMRQSILCWCIQRTVFRLTGRRTYAMGS

SEQ ID NO: 103702 - protein, 69 aa, Oryza sativa
  Clone ID: PAT_MRT4530_101106C.1.pep
SRPGSHGPQYYESSVFAGPDAAACARAGSGPQASDGPIADRRPRHWQRSIFGLWAGWRRKRRHGPITPR

SEQ ID NO: 103703 - protein, 399 aa, Oryza sativa
  unsure (1)..(399): unsure at all Xaa locations
  Clone ID: PAT_MRT4530_101107C.1.pep
ELPEAVVGIATPSRSLSTPSPPLQTIGASSSLSTRGNLPSTRFQPCRSSPSIAAFARRRVDTATPPPQSRRRPSPIVVRGRADLGEGVSSSSPRWCSRIARPSFLVLQRRSLDEGRTRLTQGLTMRSRGRRQRRGCNRLDETRATNERGXQRDERHDDRERREDDNRNRRGGDEGSRQQLHECEDGAEHAAAMMTMEAAPRDDEPARMNGEDDDGHQRXGFGWRGGDAEDDVAGSPLRCRRWWXVADNTQEEEGQTREIPARRMERPARHDGVPVKYGRRHGLDGEEDGVSVLGEVVATSAGAQETRQRRPKAEQWRQRHCCRRGCTSGGLRGKRRACRGRGGDCDTGGGDGTAGRRAXRGGRAAGVGRQRRRERSGAGSKDGGARVRESDREERPAGG

SEQ ID NO: 103704 - protein, 181 aa, Oryza sativa
  unsure (1)..(181): unsure at all Xaa locations
  Clone ID: PAT_MRT4530_101108C.1.pep
FAGSGMYLDWKKRLRIALGSARGLAYLHELADPPIIHRDIKSTNILLDNNLKAKVADFGLSKLVADTEKGHVSTQVKGTXGKFPSLSAHANLLTELDPEYYMTQQLSEKSDVYSFGVVMLELVSGRQPIEKGRYVVREVRLAIDPADHDHHYGLRGIVDPAIRDAARTPVFRRFVQLAMRC

SEQ ID NO: 103705 - protein, 96 aa, Oryza sativa
  Clone ID: PAT_MRT4530_101109C.1.pep
QRVASALVSSRISCFSCWSPCIFFFCSPLLSFGFPRCISSSPICFPEARGLVYGNPRSTARAKLVVPGAAAYKRQAAGRRFTEVSRSVPISSPTRP

SEQ ID NO: 103706 - protein, 131 aa, Oryza sativa
  Clone ID: PAT_MRT4530_10110C.1.pep
MVLILLTFVDSQFNAIAGTGYHMAGCKPATQLAPAEELTDANHNFTLRRQPRSLGKPAGRGLHLHGDNVAVAGAAAGSGVRTGRDGWTESVKTSAHITVAFSRSLGALSSSFSLPLLWRHNKRFRQPEAPA

SEQ ID NO: 103707 - protein, 279 aa, Oryza sativa
  unsure (1)..(279): unsure at all Xaa locations
  Clone ID: PAT_MRT4530_101110C.1.pep
PPRSLLIPSAGQCCFLYDPSINRRLHFPIQSRRCHALTTQLPTFSISLAWRSRTLSSPSFPITSSCPHISGAPRADATAASTAGWWWCSNAAPATPRRRRRQPGDGSGGTARRSRPPRRPAPRPASKSPPPPPPPSNHPMPPPQCPLXSTPIVATPRRQPQHPPQRRPPSHPPPRRPPPCQPPRCPASHLPPPRPAPALPMRPPXARRRPPSRRPALPPPPRRPPPQRPSRRPAPPPSPHRPPPDLLSRLNPXDPLPTRQPAAHLPPRQIKPRSKPPND

SEQ ID NO: 103708 - protein, 215 aa, Oryza sativa
  Clone ID: PAT_MRT4530_101111C.1.pep
MAAHDWGILKGTEKKTEFCNSESTSLEMCTNSELPCHQIKISSESLQIFQKKTGTLVKGLDAFKKSQNWTPSAGADEEQQLAQRLRGVELPEHHELVERSRCSCRVVFLTELSHCAIHDMDDDAQVNYVTAGERMRSCALSSLQVRLRRGPDLPVASQRRRSHPLHLLVLVLSGSPIRTHSTTPLPASPVSWLGRSGWALALRDASWGRRVWRQG

SEQ ID NO: 103709 - protein, 59 aa, Oryza sativa
  Clone ID: PAT_MRT4530_101112C.1.pep
MRDLNGVGDGDYRVLLDAGGAKLFADGHAHYVILCAAMGLLGRLGHVVQRIVVEVGPAG

SEQ ID NO: 103710 - protein, 141 aa, Oryza sativa
  unsure (1)..(141): unsure at all Xaa locations
  Clone ID: PAT_MRT4530_101113C.1.pep
MGFRGVISGNQAAAKERDGGGSSSGGAAAGVRWQAAERRSVTLSGGQSDASLLLGLYVGAVGIGSPLIYQTESSLRLYDVPERGGIQRTDRDITTCHLPHFPWSTQQTKPSAETSFFTQSHSTRALNNNTKXQTPNNGNLT

SEQ ID NO: 103711 - protein, 42 aa, Oryza sativa
  Clone ID: PAT_MRT4530_101114C.1.pep
QDSWYQLLYLTQLIRLDHAAVKYLTEWFSLIFPPVVMQSALG

SEQ ID NO: 103712 - protein, 177 aa, Oryza sativa
  Clone ID: PAT_MRT4530_101115C.1.pep
MACRASKGGGNDIMRGRPQGLGRGGGWAAHYYLCCLGDIIVLFPLGELRTMAWLSRPALSQRNRESFGDELLDYSTGKLSPIGWWAWSGNNLDVGGLSLIRCYRVLIQWASASSRKNLGWYGPDNKLLGYVDVGRGGHLPLVLSLSPPPPHTEYRCHLCLLDMRSGRWLSRRPLMLL

SEQ ID NO: 103713 - protein, 219 aa, Oryza sativa
  Clone ID: PAT_MRT4530_101116C.1.pep
MKLVWCPEMASKAYIDGVRALAGHDLAGAAADVAELVSAMAGGWNARLIVEAPDSAAPAAAATSLALAAAARRTGGRYALVLPDRDAAAASAAETAEVVVGEADEAMAGLHGVDLLVVDARRRDAAAVLRAARPGARGMVVVRHGDGRQRGAKDLAASMAAGTRVVRSVYLPIGKGVEVLHVGVGKGPSLQNHRDRRSTSRWIRHVDHDTGEEHVFRRQ

SEQ ID NO: 103714 - protein, 96 aa, Oryza sativa
  Clone ID: PAT_MRT4530_101117C.1.pep
SGGGACASRRRRRHPAAEATRKRRQRTAATTQSDGERGRRRRTGKRGRRGEEVPHRGWPARRKMMANGDGKPREATATGGRAPACPRRGRGGRGRS

SEQ ID NO: 103715 - protein, 101 aa, Oryza sativa
  Clone ID: PAT_MRT4530_101118C.1.pep
RGRRRSSCLLRRRLRHANQLEVAVGCRRLLHGVVVRGVLAVAPGAHVVGGLGAEESAAGDAHGGAGAGAAGRLVIGALPLHRRHGAFLLRARTAAIERRVQ

SEQ ID NO: 103716 - protein, 389 aa, Oryza sativa
  unsure (1)..(389): unsure at all Xaa locations
  Clone ID: PAT_MRT4530_101119C.1.pep
RAGPLSAAREVEGAAAPRGGRTDGPDLPKGRSDGGGSSRSGRAGAAQAEPAXHGAGGAALTRRQRACGSGARRRPTATDRRRRAAARGGAAATQLGGGAAVKRCGRERENEEEGLTDNGRRRRASEDDDDGGTSSGASXTNKRRGVREGGKGARGRGRRPKAAAMASLTGARRGWVSGGEPQRRRGGRGRSRPREANGDDGARRRRAXRRLAAAEVAKTAAAGGCTARERWGARERGERAGRGRERRESPADAGEWGGERGGIRFSNPGHLGRGREREREGNGRGGRGARANVADVARGRRRRGRGGRYGCGGASGRGGRWETGPTGGSPCRRPQEGGRRAAGCRAGPRPAAGPTERGGGKERRNGPTAHLTKRRKKEKEKGKRIFPGI

SEQ ID NO: 103717 - protein, 43 aa, Oryza sativa
  Clone ID: PAT_MRT4530_10111C.1.pep
LMGFSVLARVRVLRVYAAWPFAYCVVGGARGGRGGPPSLNLYY

SEQ ID NO: 103718 - protein, 44 aa, Oryza sativa
  Clone ID: PAT_MRT4530_101120C.1.pep
SPFVVIGLKELLINGVHIHEARCLPSCATSPFPILVHMVQVELT

SEQ ID NO: 103719 - protein, 98 aa, Oryza sativa
  unsure (1)..(98): unsure at all Xaa locations
  Clone ID: PAT_MRT4530_101121C.1.pep
KAISRAIRRALVGLNIPNRPIASYIYHGPSGACYIRVXRALADYSFGSXWARIGLQMSVFIGRLTXSTLLGSPSGYVVYTEGXLLTYAFRRQPYIVVF

SEQ ID NO: 103720 - protein, 231 aa, Oryza sativa
  unsure (1)..(231): unsure at all Xaa locations
  Clone ID: PAT_MRT4530_101122C.1.pep
MRGPPVSGTGERERGGGATTMAPAAQRSRGGGAHAAAAQGXADGERGRRRAAARGGAAATQLGGDAAAKRCGREKTRRRAXRQRRRRRRKTAASLAAASGGRSAGRSGGGWLHGAGAMGSSGEVGAMGKKXEGVPAMLKXGEREPDVAGRGGNRRPTRGSGEEREAGFGFRIPAISGAGASGRERGMGAESAAHARTWPTWPGEGGGVGAAAVTGAAARAGEAGGGRRDRQ

SEQ ID NO: 103721 - protein, 196 aa, Oryza sativa
  unsure (1)..(196): unsure at all Xaa locations
  Clone ID: PAT_MRT4530_101123C.1.pep
ISTPRTRRRRRNGAAATLAVASGGRSSKNGGGGWLHGAGALGGSGEVGAMGKKREGVPAMLKXGERGPDVAGSGGNHRPTWGSGEEREAGFDFRIPAISGAGASGRERGMGAGDAAHARAWSTWPGEGGDVGAATVAGAAARRDRREEGDGPDRWVPPVGDPGREGGGRPAAGLGLGLRPAQQRGGGKRGEMGRRP

SEQ ID NO: 103722 - protein, 110 aa, Oryza sativa
  unsure (1)..(110): unsure at all Xaa locations
  Clone ID: PAT_MRT4530_101124C.1.pep
GFDLLRCAYSHKTNLPLIAIKGFIGVLADKLFRRCIGLQGLHTTDYLYIIIYSSVMIIFILLFTQXVRIYIGHIADCSKPYRHLLVSSNTLKIRRQNLNSNNTYLQKLFK

SEQ ID NO: 103723 - protein, 130 aa, Oryza sativa
  unsure (1)..(130): unsure at all Xaa locations
  Clone ID: PAT_MRT4530_101125C.1.pep
MEMRRLLVLFALLSVTAVVPVFLWPDKKGGASDVAVVVAAPPFNASSVTIISWKPRIFFYKGFLSDDECDHLVKLGKEKLKRSMVADNESGKSVMSEVRTSSGMFLDKQQDPVVSGIXGEIXAWTLLSER

SEQ ID NO: 103724 - protein, 299 aa, Oryza sativa
  unsure (1)..(299): unsure at all Xaa locations
  Clone ID: PAT_MRT4530_101126C.1.pep
MRGPPVSGTGRREEASARGPTGQRHGEGGLPWTGTTRVIHRRSTGPTARIXPRPIGRTAAAAAPGLGSASKPIGRPGASGGGACASRRRRRHPAAEATQKRRQRTAATTQSDGERGWRRRTGKRGRRGEEMPHRGWPARRKTMANGDGRPREGDGDRRTSFGVPRARGDEGSGDEPRRRRGGRGGPRPREGGRERRESPADAGEWGGERGGIRFSNPGHLGRGREREREGNGRGRRGARAGVVDVARGRRRRGRGDGCGRGGAXGIGGRRETGPTGGPHLSATPREEAAGRPGCRLGLG

SEQ ID NO: 103725 - protein, 72 aa, Oryza sativa
  Clone ID: PAT_MRT4530_101127C.1.pep
MAMARRRRGARKGGGAEQHAARRRAQMARLRARGVRRSAHRRRGTRRQSEARRHRGPRARGEPAMSRSRSGV

SEQ ID NO: 103726 - protein, 159 aa, Oryza sativa
  Clone ID: PAT_MRT4530_101128C.1.pep
MASLTGARRGWVSGGEPQRRRGGRGGERAGRGRERRESPADAGEWGGERGGIRFSNPGHLGRGREREREGNGRGGRGARADVADVARGRRRRGRGGRYGCGGASGKGGRWETGPTGGSHLSATPEGREAGGRLPGWASACGRPNREGGEKKGEMGRRPI

SEQ ID NO: 103727 - protein, 66 aa, Oryza sativa
  Clone ID: PAT_MRT4530_101129C.1.pep
TEKNKTSNLSYVPLQFNLGIIYTSLLVPIGANKSGKMSYELLLSAGSYVSSFLRNYFSPIFLKSTN

SEQ ID NO: 103728 - protein, 325 aa, Oryza sativa
  Clone ID: PAT_MRT4530_10112C.1.pep
MAAAAGGMSSRSSSLLAMVFVAVAVLARAQDERAATFTITNNCAYTVWPGLLSSAGSAPLSTTGFALAPGASQAVPAPSGWSGRMWGRTLCAADGAGAKFSCATGDCGSGDVQCNGGGAAPPATLAEFTLDGSGGLDFFDVSLVDGYNLPMLVTPSATSGSGKCAATGCVAELNGACPADLRVASASGPAVACRSACEAFGSAEYCCSGAYGNPNTCRPSAYSEFFKAACPRAYSYAYDDSTSTFTCAAGATDYAITFCPAAPTSVKSSGQNPQAAGLQQLNDTMVYFGGGGGSPQSSGATTTSAYSSIAAAVFSVAAVALAALL

SEQ ID NO: 103729 - protein, 289 aa, Oryza sativa
  Clone ID: PAT_MRT4530_101130C.1.pep
MESSGECGEMGKKRERRTAMLKKGEREPDVAGSGGIRRPTWGSGEEREAGFDFRIPAISGAGANGRERGKGADDSAHARTWPTWPGRGGDEGAAAVSARRRERDRREEGDGTDRPAELGRGRSTPGRPPQAGLPGPVLPFGPHLMDPQPSGMMVGPIFWYFKEFVGLRLLTTKFDMFGQKSAAKTYGILEFVRIFHEVFRQGHILYLRIKLTGTLMNLKARFWTCTEVKQIFQATANSRVLNIKAVVPINLDINSGNYTKWRRLLLVTLSKYALADHVLTDIYWSDRSG

SEQ ID NO: 103730 - protein, 522 aa, Oryza sativa
  Clone ID: PAT_MRT4530_101131C.1.pep
MPADAGRHGEDPRHSPFNRCGFGVWKCQERYPGGRGGPTPQAREGRLRPDPSGKSHVDVESDLSPLSMVPPGPYHRQTHPPYDNYMDGKNLHRVSVNAQRKKERKHEEIVTSAEKDRGGGTVRKRKKESKEDPSGPIQQHIQFQSIYFNIHASGKKKVTVHACTVLSKDTSSRRRLEREGREHRPASHLIGIGIVLVLGISSSKGREGFAAREVVASPSGFRPGFSMDGAADSGTAGAAAAAAKWRTDASRAFQYYLDRSTPHATGRWIGTLAVAAIYALRVYLVQGFYIVTYGLGIYLLNLLIGFLSPMVDPEAHAAASSDGPALPTRGSDEFKPFIRRLPEFKFWYAITKAFLIAFVMTFFSVFDVPVFWPILLCYWVVLFVLTMKRQIVHMIKYKYVPFSVGKQQLFCSSPFIPNCSARNMAGRRAQAAVLRKTDWQPTHSVVRQIVDPIALGGELLCWSNRALSACVDEKLSHLKLVNIFSLARCVCFFSDCGPVDYENDHFRFLEELEGVSLASCAY

SEQ ID NO: 103731 - protein, 77 aa, Oryza sativa
  Clone ID: PAT_MRT4530_101132C.1.pep
QQATKICVAEPSYQLVQESHNIQVYPILVQQTGENTCSTTKISSKKLLNQKISSKKVAGPSSGSPHQQDLQHLKRVV

SEQ ID NO: 103732 - protein, 150 aa, Oryza sativa
  unsure (1)..(150): unsure at all Xaa locations
  Clone ID: PAT_MRT4530_101133C.1.pep
MGSTGGVGDMGKKREGVPAMLKXGERGPDVAGSGGNRRPTWGVGEEREAGFGFRIPAISGAGANGRERGKSAGDAAHARAWLTWPGRDGGVGAAAVSARRRXRDRREEGDGPDRWANLEQGRGTSGRDKPTPLKQNLDPEIQKSWRRGAD

SEQ ID NO: 103733 - protein, 296 aa, Oryza sativa
  unsure (1)..(296): unsure at all Xaa locations
  Clone ID: PAT_MRT4530_101134C.1.pep
RPASHLIGIGIVLVLGISSSKGREGFAAREVVASPSGFRPGFSMDGAADSGTAGAAAAAAKWRTDASRAFQYYLDRSTPHATGRWIGTLAVAAIYALRVYLVQGFYIVTYGLGIYLLNLLIGFLSPMVDPEAHAAASSDGPALPTRGSDEFKPFIRRLPEFKFWYAITKAFLIAFVMTFFSVFDVPVFWPILLCYWVVLFVLTMKRQIVHMIKYKYVPFSVGKXRNMAGRRAQAAVLRKTDWQPTHSGRKNGRGKKIQSMIFDVLHTNCNISFISRARRIFTCISDSGSRFKLILW

SEQ ID NO: 103734 - protein, 37 aa, Oryza sativa
  Clone ID: PAT_MRT4530_101135C.1.pep
MFDDQDLGFFANFLGIFIFVLVIAYHFVMADPKYEGN

SEQ ID NO: 103735 - protein, 154 aa, Oryza sativa
  unsure (1)..(154): unsure at all Xaa locations
  Clone ID: PAT_MRT4530_101136C.1.pep
RQQGVGRRRHAGPTGGEGWGGGATWRPDRRPRSTXRVDRTAAAAAAPGLGSASKPIGRPGXSGGGACASRRRRRHPAAEATRKRRQRTAATTQSDGERGRRRRTGKRGRRGEEVPHRGWPARRKMMANGDGKPREATATGGRAPACPKEGEERG

SEQ ID NO: 103736 - protein, 365 aa, Oryza sativa
  unsure (1)..(365): unsure at all Xaa locations
  Clone ID: PAT_MRT4530_101137C.1.pep
MVSLPVVPGENTGAAAPALRAPPPAAASPRAAPAGPPRPAALAIRGPRAPASAALPSPRATPRNLAPPTRLASPRNPPTSAAGDHGALPRWRRHQTQTTRSPPSPRAAPPARAPPAPPAAPRPPPTPDGAADPGAASAPGSVDRWRTEASRAFQHYLDRAAPHTAGRWAGTLVGAAVYALRVYHVQGFYIVTYGLGIYRLNLLIGFLSPMVDPEAHAAGXSDGPALPTRGSDEFKPFIRRLPEFKFWYAITKAFLIAFVMTFFSVFDVPVFWPILLCYWVVLFVLTMKRQIVHRAWSSAASSRTSPRRVRLRLGGRPPAPPRRQARRPAAPRAPGRGGRALHRSRPSSPIPTRGEHGGLAQARRR

SEQ ID NO: 103737 - protein, 79 aa, Oryza sativa
  unsure (1)..(79): unsure at all Xaa locations
  Clone ID: PAT_MRT4530_101138C.1.pep
KXGSXXXXGXGXGILXNXXXXXXXXXGXXGXGKPXXIXKGXWXXXFSPFVSFSFINEEKKSGSIVHAASIXRQVGLVRE

SEQ ID NO: 103738 - protein, 44 aa, Oryza sativa
  Clone ID: PAT_MRT4530_101139C.1.pep
FRQHDWEWAIEKSPCLHALIAPPRFLKFWAITMKDWINRCGYLT

SEQ ID NO: 103739 - protein, 336 aa, Oryza sativa
  Clone ID: PAT_MRT4530_10113C.1.pep
MAQQQPRRVLRVAPPGRGGARAEAERGEEGEAVFATVQAAVDAVPVGNRVRTVIRLAPGTYREPVYVAKAKNLVTLSGEAGSPEATVITWDNTATRIKHSQSSRVIGTGTFGCGTIIVEGEDFIAENITFENSAPQGSGQAVALRVTADRCAFYNCRFLGWQDTLYLHYGKQYLRDCYIEGNCDFIFGNSIALLEHCHIHCKSAGYITAHSRKSSSETTGYVFLRCIITGNGEAGYMFLGRPWGPFGRVVFAHTFMDRCIKPAGWHNWDRSENERTACFFEYRCSGPGFRPSNRVAWCRQLLDVEVENFLSHSFIDPDLDRPWLIQMMAIKVPVSA

SEQ ID NO: 103740 - protein, 140 aa, Oryza sativa
  Clone ID: PAT_MRT4530_101140C.1.pep
MQVHARAALLRSRSISPLYITQLPPLAAVDVWRRGRWDPVMAMRGVDGSAMVRRGVSGMTRSGGGDQRRSDLILFPSPLVPPFLLLPSTPPPPSARASGERQERAGGGGRRGQAACGGGGGGHAAGAGGGPSGNGGGRRG

SEQ ID NO: 103741 - protein, 40 aa, Oryza sativa
  Clone ID: PAT_MRT4530_101141C.1.pep
IYVKLGSQCLQLNVSTGEGESNDRVISVFLPLPSNILLSF

SEQ ID NO: 103742 - protein, 86 aa, Oryza sativa
  Clone ID: PAT_MRT4530_101142C.1.pep
ERYLLPQPPVRKRTSPHGRTCLAYKRVHVHDPTQEHELRTSKLLPASLAFQAFGNRTHVGIGSLKNAKTQQNRPTRYDGIIPTGTP

SEQ ID NO: 103743 - protein, 276 aa, Oryza sativa
  Clone ID: PAT_MRT4530_101143C.1.pep
MLTLHGTALFIRPSAYQEVKSSPKHAIVPHNNLLGCSAFYNPVEGHHVQKPHIVPSCKVNFTRASHYLYRSLSERTTRHLLHRSEIYASSDEDFRSSRNIAISLFKRYKNVIDRGGGDNLKEFVSAGVNAYALGCTEEGLRKELMDIEDSGLEIEALRSNGGGTSLTFKVHSFEVRECILWLSIVFITILCTPQPTIIRWSTTPPVSADVLHQWKGFCALIANAYYTKGMAWLPVKTLQLEQMAVTGSSEEPSVVASRMQLVFSTLEVVSPQWPRV

SEQ ID NO: 103744 - protein, 193 aa, Oryza sativa
  Clone ID: PAT_MRT4530_101144C.1.pep
MAEPPMVDGTSRKGGTPNRRSSLMEQKESSLIITVDLCCCRSLTKIRKTLCKLQESEDIRAIMYDDKAGTVAISGGFDPLVLPCKLRRKAGSVIKDIHLKKEREKNRVPPPPPPPPPQPAPAARAAFGTICGAGVAPGRACLCLGQCRCHCGGGYGCRCCGAAPPCYCVPIGGGGCSVVQFTYDEPSPACSIM

SEQ ID NO: 103745 - protein, 443 aa, Oryza sativa
  unsure (1)..(443): unsure at all Xaa locations
  Clone ID: PAT_MRT4530_101145C.1.pep
FYDADIGGAPMNFRDVFLYSQALEGITLSMILQAPNEEEVXMLLEIFGLCLTGGKEINNAIMSSIQDLAKSFSNYHDEVLVKREELLQFTQSAISGLKRNSDIMRIDAEAVELWKKLNEKETSRVQQTQEDHAKTTERTSATTVESFKEALSEVRFCSRMEELLLKKKTSTAGDSLEIRSQKVDKLKVLATSLSNSSSKAEKRILDHRRQKEEALNFRAKKENEVSAVEKELTAEISELEKQRDELEARLKKVNISLNAAIGRLKQTREERDQFDEANNQMIFSLKAKDNELSKSITSCNVEAGVVKTWINFLEDTWQLQSSYNDQEGKGTPXDELERCTDNFLKLTKYHLSTFKEILSPSIERICTYVDNLAVLQSRDVSTEHDNEELSEKTRPQRSLAEESWATDKKIVIAFIITDHMKKLFYSEHGVKFKRDDEDDRILF

SEQ ID NO: 103746 - protein, 540 aa, Oryza sativa
  Clone ID: PAT_MRT4530_101146C.1.pep
MDATAFASAPNPSHAPSSSSSLSASYSRVLRFSVRDPWRRRRGQRLPLHALRSQRPEPAPASASHHDVVVVGAGIIGLSIARHLLLHTPLSVAVADAAVPCTGATGAGQGYLWMSHRTPGSDTWELAVRSKQLWEELAAEVDGLGGGGARERLGWMRTGSLLVGRTSEEMATLEERTKALSQAGIRAECLSAASLHALEPELYVGHDGGAMFLPEDCQIDAFQAVSLIEKTNGSYSSEGRYMEIYNDPAMSLVRSETTGTVQGVQTSKHILYGRKAIVIASGAWTRTLLRSFLEPNPTLDIPVMPRKGHLLVLDKFDKLKLNHGLMELGYVGHQVAKSSGTPLSSESSEDEHGALSISMTATMNTKGNLILGSSREFKGFSREVDMSILKCIWDRAAEFFPTLKNVHLDIDENTEIRIGHRPFMPDGKPVIGSVPDLPNVLIATGHEGSGLALALGTAEMVTDMILGNPGKVDFSPFSIKDRFSDVNEYRHIYMSRFIKIYMNMSNARKSYIVKRRKYEGILMNITVFFLRTGKTNITVK

SEQ ID NO: 103747 - protein, 62 aa, Oryza sativa
  Clone ID: PAT_MRT4530_101147C.1.pep
MADLHWRGARVAPWATDPSSGGARPMVPAAGGTLGNDNEWVARLPAADQRPNLGAAAGRWRS

SEQ ID NO: 103748 - protein, 589 aa, Oryza sativa
  Clone ID: PAT_MRT4530_101148C.1.pep
MAAAEVEHSGSSLPKKLVTFALCAIFTLSLIYFSSPPLIISSTTNLLSQFQTRARARTTDFSTHLPDSFPRFISQTHLPGVAVWKQCDYSDGKWVWDGDHGGAAAGGGSRYDSENCDMKMTYKCVINGKPDGGYLHWRWQPASCNLPALDPAAFLRLLRGKRLAFVGDSTARNQAEALVCHLATAARPGHSEDYGMAHEVVVLDALTEPWASDLAAMDVMVISAGHWFPHSAVYYDDGEIVGVHGRPDMNRTEMSAPSVYRKVLRRTLEHVINATMADKLELVVVETIAPAHFDGRYSWNHRDACSRQRPYDGDVDGEAKVGDTEAELRKAVLEEVAAAATAARRRCPGLRFEVLDVTRLAAMRPDAHPGVYIYKNAYGGGPVPETAANDCLHWRQHPYAPFRRTGCRQATSACLGMYLVGQAGIAVAEDGAGELVGGGGGRVDGESAAEGGGPGSGGRATEANINRSWHGFYVAAALFGGGFYVAAALFGGGFYVAAALFGGEVDGGGGGVVLLGGGGEAGEDVRRTWLGTEAAVPDVDTDGGNGGGCGRGRRRRGWAVREARAKEEGSETCGRDSAWGHSWPVPWDL

SEQ ID NO: 103749 - protein, 160 aa, Oryza sativa
  unsure (1)..(160): unsure at all Xaa locations
  Clone ID: PAT_MRT4530_101149C.1.pep
MKTTRTTRIVSILVSLVLLGQGDTYGYKYKTSXEESGDGTTEATTYKPTXAKTRRRISTSGISTASPLRCLRILSGETKALSLISPGTDSRRKTTLLSIRVXNFRPPSLQXLDRLPXILYWCDYTLVPTIPVPLKCRSRDIKRRQLRVSRCGCTVRCIHI

SEQ ID NO: 103750 - protein, 154 aa, Oryza sativa
  Clone ID: PAT_MRT4530_10114C.1.pep
GRVGGRVGHHHPLCPARTPLPSCLSHTHRHRRRRSVADSHLQIDATSARSRRKNAVASAHRSPTTPPRAHVDLTPQEQRHPASPSSSDDIPRQLIFRAIRDINFHLADIAAPLIPGTRERLFHLHCSCCHPRPHCINVLDLYLSLTTIQEGRPR

SEQ ID NO: 103751 - protein, 797 aa, Oryza sativa
  Clone ID: PAT_MRT4530_101150C.1.pep
MSSWLRSAVSKAVEAGGRSGVARAVLGYADAVAHHAGQAVAEGAKILNDRMSTQNYKSVKKMVKRLEEAAVSSRGEDRLQVLRHWLRALQEVEAQLGGLDGAAEQNAHSSEPNTSKPPFARVLFYDADIGGAPMNFRDVFLYSQALEGITLSMAMLFFAKALIEVKHSNPYHSQILQAPNEEEVPLLLEIFGLCLTGGKEINNAIMSSIQDLAKSFSNYHDEVLVKREELLQFTQSAISGLKRNSDIMRIDAEAVELWKKLNEKETSRVQQTQEDHAKTTERTSATTVEDTTLIPLALQVDKLKVLATSLSNSSSKAEKRILDHRDLHLAGCRYSGIYQHLLVSELYSLLATTQKHIMLVASVVKLCGELVVTFQVVLCHTDNRRQKEEALNFRAKKENEVSAVEKNISACTCNTYIAYVYIVKGMHMRELTAEISELEKQRDELEARLKKVNISLNAAIGRLKQTREERDQFDEANNQMIFSLKAKDNELSKSITSCNVEAGVVKTWINFLEDTWQLQSSYNEQKEKRTNDELERCTDNFLKLTKYHLSTFKEILSPSIERICTYVDNLAVLQSRDVSTEHDNEELSEKTSPQKSLEEEYLETEKKGCAEHIVVHSRLRRLGRHGTRYQGLIPRYQLDTQGTKYQSIPRYQGYQIVIAFSITDHMKKLFYSEQGVNSRRDDEDVRNLFSEIEKLRERFESVERPTLDIEVRRAKVPTKERAESSPSPVQVPSTPKAETVVSPKSPAKPDQPLDLDSELAKLELEFGQVNKYSPEEISGWEFDELEEELRADISKSQ

SEQ ID NO: 103752 - protein, 300 aa, Oryza sativa
  Clone ID: PAT_MRT4530_101151C.1.pep
MSVERDGRDQPNIDSFSQLPFIRQAAREKPPSSSSGGSVVVPPAPIRLFGFDVPPDASTTADVLGENKESAAAVVAAEGSKQTASGLDAIGGGGGSRKFECHYCCRNFPTSQALGGHQNAHKRERQRAKHAQFQTAMAMHHGHGQYYPLPDPYAAAFAAYPGHHHHHRFAATAAAAMPPPPHYPSWAAGSRYYSGPGSISQPINGSPVAPAGMWRLPAAASCVGLATTTTTAAPLPARRQERPAATIPSLLGGGEEPVVLGGAGSTSFSPSTSSSSSSASPHERRAQPARKENVSLDLSL

SEQ ID NO: 103753 - protein, 270 aa, Oryza sativa
  Clone ID: PAT_MRT4530_101152C.1.pep
MGADECRCSFALSDSRARLVPDHQCVDRIHAVYRCDADAVDTDLLRGTAFQASEHEQTRFPVVVIIGVVSAKKPTRSPLCLCGWRRAAGKRPVLSTRYLILLEEKNDTQVAFRIKLGDYQWSCDHCNHHATHPSLSPSTSPRTHRAGSILRLRLSTRVQWSSSNGKKKKKLSFTADVSVDREDLTPLVPAAVAEIRRRGISQSGEQISGTFAFDVLYREKAAIRFLESALRNCLLVFYDSSSSSMLEGCAPTITFGTARCSCSARCSSST

SEQ ID NO: 103754 - protein, 99 aa, Oryza sativa
  Clone ID: PAT_MRT4530_101153C.1.pep
SIIVICIRMIIEMTNTLPNVVIAPSGGHVMSHVHDSAALMCRQVLICTHDMICLPSLCTHHARLIQGSSSLNLETTSLPHHIGSAQESVAVHAASAEKA

SEQ ID NO: 103755 - protein, 86 aa, Oryza sativa
  Clone ID: PAT_MRT4530_101154C.1.pep
MRSCRGAWWRERIRSFASAAISSVEGADQELRLSCCLLRSSSNTVVWWCAKRQPSDRSTMAKSLAFELKRLFLGLALSALCFSFFR

SEQ ID NO: 103756 - protein, 62 aa, Oryza sativa
  Clone ID: PAT_MRT4530_101155C.1.pep
GYPLRNRICNLNIVYFVKISLWKSLCFQQNFPFLLPSLRLFLPSFFPSSFFSLFSAIAINVF

SEQ ID NO: 103757 - protein, 558 aa, Oryza sativa
  Clone ID: PAT_MRT4530_101156C.1.pep
MMPCFFLLVYVLTDACSGDTHSREDGLSKPRDKDREREKDKDRERHRDRDRDRGRDRDRDKDKEKDRDKERDRDRDRDKDRDRHHRHHRERREHRDRSDDHDRHRSHRSDDHDRHRSRDSERRRDHERDGRRRHRSRSRSRSRGRDRRSRSRSRSKSKRVSGFDMAPPAQAVVPQFPAIPTPSQFPGTAIPGMFPNMLPMGVGQFNPLVIQPQAMTQQATRHARRVYVGGLPPTANEQSVAIYFNQVMAAIGGNTAGPGDAVLNVYINHDKKFAFVEMRSVEEASNAMALDGILFEGAPVKVRRPTDYNPSLAAALGPSQPSPNLNLAAVGLTPGSAGGLEGPDRIFVGGLPYYFTEAQVRELLESFGPLRGFDLVKDRETGNSKGYAFCVYQDLNVTDIACAALNGIKMGDKTLTVRRANQGAAQPRPEQESILLQAQQQVQLQKLVYQVGALPTKVVCLTQVVSADELKDDEEYEDIMEDMRLEAGKYGNLIKVVIPRPDPSGLPVAGVGKVFLEYADVDGATKAKTAMHGRKFGGNPVVAVFYPENKFASAEYDA

SEQ ID NO: 103758 - protein, 754 aa, Oryza sativa
  Clone ID: PAT_MRT4530_101157C.1.pep
MADLAVAAPPPTDLFGEPIEAHPPWFKPDSFLRPDFDPDAYVADLRSYVPLDSLAAELRSHLASLRAELVGLINRDYADFVGLSARLKGVDAAAARMRPPLAELRDKVASFRAAAAAGLAALRSGLEQRAAATAARELLELLLDTSHVVSKVEKLIKELPSAPSDSSNVEAVSGDKGYSGNVATPPNMDDGTDVRETQSILLERIASEMNRLKFYISHAQNLPFIENMEKRAQGATKLLDGSLERCFVDGLEHRDDKVIYNCLRAYAAIDNTSSAEEIFRTTVVSPLIQKIVPQNYAKVVAGVSSDDLEDDYEQIMQCVEKDCKFILEISSLANSGLHVFDFLANSILKEVHLAIQKGKPGATSPGKPKQFLKNYKASLRFLDFLEGYCSSKPAVTKFRSEPAYADFMRQWHVAVYFTLKFQDIAGGLDSVLTATITPAGMHDNQAKPQTLLLKQSVKLLESLQACWSDDVLVFSHSDKFLRLSLQLISRYTTWLSSGLAARKASDGGSSSPADAEWALSVPVEDFIYVMHDVNAVISELLESGQFVEHVNQLLASCPTEVLALVKHSILQAVEPLKELLPAIMNVMIMVIVKRSNEDLKHLKGITATYRMTNKLPVRHSPYVSGILHPLKVFLEGDRIHYLSEDDKAKLRRGSTDKITSIYYDMVSEVVTVARKTESSLQRLRQGAQRRVGANTDTSDNIISDTDKICMQLFLDIQEYARNLRAIGIDAREIETFRALWQCVAPRDKQDNIQF

SEQ ID NO: 103759 - protein, 120 aa, Oryza sativa
  Clone ID: PAT_MRT4530_101158C.1.pep
MASTRQALIAFAVVLLAAAFLVAASAADETQANKKEDTKVDVQDYWRGGGGYPPRGGGYGYPGRGYGYPGRGGGGGYPGGGGGWHGCRCCGYGYRGGCRCCASPDEIPEPMYRPEVDPHN

SEQ ID NO: 103760 - protein, 80 aa, Oryza sativa
  unsure (1)..(80): unsure at all Xaa locations
  Clone ID: PAT_MRT4530_101159C.1.pep
PLFWGFFFFGGGKKRIXNVPCYLAVFKDPRPGHQPWAPPKMISPPGKCPNFGPLNPNLXXSGPLGGPLGPPLGRPLGPPG

SEQ ID NO: 103761 - protein, 87 aa, Oryza sativa
  unsure (1)..(87): unsure at all Xaa locations
  Clone ID: PAT_MRT4530_10115C.1.pep
XXXXXXXXXXNFXXXRRKXXHMVYXXTIXXREXXXKKTTXXAGXQHKXHXXXXXXXPXXTKAXAVSNVXVSXXLFQTXXRXXSCXQM

SEQ ID NO: 103762 - protein, 92 aa, Oryza sativa
  unsure (1)..(92): unsure at all Xaa locations
  Clone ID: PAT_MRT4530_101160C.1.pep
YAEANKKEDTKVDVQDYWRGGGGYPPRGGGYGYPGRGYGYPGRGGGGGYPGGGGGWHGCRCCGYGYRGGCRCCASPDEIPEAMYXPDVDPHN

SEQ ID NO: 103763 - protein, 465 aa, Oryza sativa
  unsure (1)..(465): unsure at all Xaa locations
  Clone ID: PAT_MRT4530_101161C.1.pep
MEAHGWMVLDRIVRCWSDDDDVVGGDDDPTSSEVAYTCSGHPIRVSLRVADPPAVFRLYXHRPGWPRXYDLXDAEAIAAHRGSILLSARVPFADLGTVAPGQFPVDYYVYTAAKGLRRPSLTRLPPCFIGGFSSPEVDRHFKPHRCQQQRVMVEQNVGFFCHGAGNFTVADINIHKGKAVELCVLNHYADCPQQPQWKVQILEMQQQPNQNHHLRGWWTDAVLPLHDSYLACVDCYHGIILIDVKTQRYFNYIPLPAEAKHGRRRVDKYSPDPARSASINSAGNITVVCIADDNAAAGGRNNNSTAGSAFIEIESWCLVDIHESRWILDFTMEAGKFWDICSAANQPLLPHAPPTFPLVSMANPFAISFLLYDKANNFLLEDKGNGLYWMIEVDMRNQILLSPATLYISEEEEELFINGKEEEQERCCDERYPPMKYFYGHNFIPSVVPLLLEERWRHRQVGYGV

SEQ ID NO: 103764 - protein, 325 aa, Oryza sativa
  Clone ID: PAT_MRT4530_101162C.1.pep
QNHHLRGWWTDAVLPLHDSYLACVDCYHGIILIDVKTQRYFNYIPLPAEAMRGRRVDKYNPDPARSVSINIAGDITLVCIDDNAAAGGRNNSSAGSAFIKSWCLVDIHESRWIRYFTMEAGKFWDICSAANQPLLPHAPPTFPLVSMANPFAISFLLYDKANNFLLEDKGNGLYWMIEVDMRNQALLSPATLYISEEEEAEFLLPPATFFINGKEEDDERYLPMKYFYGHNFVPSWFPSYLKGGDTTSRMRSLMMQQAKQESAIEKIGREMMQKEKQERAMQKNGLEMGSNSWELSKMKGKQQMATESRGMEAHLSRPLAGLKIA

SEQ ID NO: 103765 - protein, 61 aa, Oryza sativa
  Clone ID: PAT_MRT4530_101163C.1.pep
STVSRRPAYLNSALWTLRSSTFHRNNRCFVAYEISIGSPWCRARQPTLTVQLVDVLDTDVV

SEQ ID NO: 103766 - protein, 50 aa, Oryza sativa
  Clone ID: PAT_MRT4530_101164C.1.pep
KKKPGQGRFFLKKSCSCPRLKNHKACFNQPQTTRAPPPPPCKKKNPRKKI

SEQ ID NO: 103767 - protein, 50 aa, Oryza sativa
  Clone ID: PAT_MRT4530_101165C.1.pep
IWLNNTAQILSGHVYCSARVLWAVNGYTCILTNLRNSGDCPRWSPLSPSC

SEQ ID NO: 103768 - protein, 34 aa, Oryza sativa
  Clone ID: PAT_MRT4530_101166C.1.pep
LLLLYKLLHITASLHRFPLFILLIRRIRNLRRPS

SEQ ID NO: 103769 - protein, 81 aa, Oryza sativa
  Clone ID: PAT_MRT4530_101167C.1.pep
KSNLTTGRGRFPLYSGDPCYYYSYFCSYGVASSPSMDTVSESCISSWSRGEITLAIGCGRSSAAAWTRLVSSGVEDVLVVG

SEQ ID NO: 103770 - protein, 422 aa, Oryza sativa
  Clone ID: PAT_MRT4530_101168C.1.pep
MEDDAGNCGGLTAFALRLAKRLADDGDNSNRNVVFSPVSLYAALALVASGARGTTLDELVALLGAASLDDLEESVRRAVEVGLADESESGGPRVSYACGVWHDERLALKPAYRAAAAGTYKAVTRAANFQRQPKSSRKKINKWVSKATNKLIREILPDGSVHGGTALVLVNAIYFKGKWSNPFPRERTTTGKFHRLDGSSVDAPFMSSREDQYIGFYDGFKVLKLPYHRTMKNHGDGGDTITNSSITPAILKHYGENVGLSMYIFLPDARDGLPALVDKMAVASSGTASSSFLRDHRPGRRRIKVGDLRVPRFKVSFYSEMNEVLKGMGIGAAFDVGKVDLSGMIDGELVVVEKVMHRAVVEVNEEGTEAAAATACTMKFLCLTLTSPVDFVADHPFAFFVVEEKSDAVLFAGHVLDPTSLE

SEQ ID NO: 103771 - protein, 354 aa, Oryza sativa
  Clone ID: PAT_MRT4530_101169C.1.pep
MVVLAKPAALEQISLVRSPSVEDNFGAGLPVVDLAADGAAGEVVRACERFGFFKVVSHGVGEGVVGRLEAEAVRFFASPQAAKDAHGPASPFGYGSKRIGRNGDMGWLEYLLLAIDGASLSRSSPAPSSSLRDAANKYVGAMRGMARTVLEMVAEGLGVAPRGALADMVVGDGAASDQILRLNHYPPCPPLLQNLMPNCSPTGFGEHTDPQLISILHSNSTSGLQVALHHDADAGDHQWVTVPPDPASFLVIVGDSLQVMTNGRMRSVRHRVVANKLKSRVSMIYFGGPPLEQRIAPLRQLLVAGVGNGEEEEQSRYEEFTWGEYKKAAYLSRLSDNRLAPFHRQPPPVANPLA

SEQ ID NO: 103772 - protein, 396 aa, Oryza sativa
  Clone ID: PAT_MRT4530_10116C.1.pep
MVPVEMEVDDPRGWDFVDWVGPDASASIFRSLDDPADIVRAAAVSRSWRRFVVENEFSKSICLRICPEIANFTSAEEVSRSPPQPPHAESSHGVQRKALERDYRIYSYLSGALVSNSPSMDCILQCIGASSTDNFPDETIENTLIPHDRVKHRPSYWSSGGHDDPDTPETLTYRLNCDMCIVDEIKLQPFKAYFQYGHPIYSSKAVRFRMGHSKLPHGSDSFVTVEDENLMAIADENYVWTYTSPEFPMLQENVLQSFKLPRPVLCIGGIVKVELLGRVQKQEADDRYYICICHAQVRGRSLSPVFMVDTSDPAGYSVLKYLPDAKILRSEDAMLDDGSESLEWHSLVARYRRMRHLAIMNVLLGPEEFMDEDDIIGGVLMDEDDLGGMLEDDPFV

SEQ ID NO: 103773 - protein, 334 aa, Oryza sativa
  Clone ID: PAT_MRT4530_101170C.1.pep
MDDDASSYTYCCHSCDSFVHPHPHLDAAVLCPHCNAAGFLHDHEMPPAADHSPFNPPVIVLRRSASPDDATTFDLLYDDGASSALRPLFDRLLLRIPSASDNPNPPASKAAVDSMPTILIGACHLAADSHCAVCKEPFHLAAEAREMPCAHIYHHNCILPWLALHNSCPVCRHRMPTDDHDSTNAAAAQAAAGSSDEDATTVGTLTIWRLPGGGYAVGRFAAAGGTRAGERELPVLYTQMDDGGFNGGGGSGSPTMIGWSSRGSRSSQRQRSIIPRLFRNMFACFRHHDATADSGDYSSRAGRRSSSSVFTRSLRSQITSWRSEDGHPDAIATR

SEQ ID NO: 103774 - protein, 725 aa, Oryza sativa
  Clone ID: PAT_MRT4530_101171C.1.pep
MAAALAPGVSRKLKKVLETRTDNPDLLASLGALSTFYVQNTPQARRNLKSSVEQRGLTINRHFLDASLPAHKALDRVEGEVHALNDSWKKRFLLSTMSQAVRIEEALGSCSASTGDIISTTERLQQELEVITQRQEIVSCFLRDYQLSNEEIHALRDEEIDEKFFKALLHVQEIHSNCKVLLRTHHQRAGLELMDMMSVYQEGAYERLCRWVQVECKRLGDTDNPEVSELLKKAVRCLKERPVLFKYCAEEVANMRHNALFRRFISALTRGGPGGLPRPIEVHAHDPLRYVGDMLGWLHQALASERELIVVLLDPDAMTDSGPTTRRYSVREGDPSKGEHDITFVLDRIFEGACRPFKVRVEQVLQSQPSLIISYKLSNTLEFYGYTISDLLGGDAALCNTIWSLRDATQQTFFNILKSRGEKLLRYPPLVAVDLSPPPAVREGISLLLELINTYNSMMVPASGKRPNFDPVISAILDPIIQMCEQAAEAQKSKGTIARRGRTSSDPTGNNRDSISVDAILSKNSSTSFLSGESSSKIYLINCLSAIQEPLMGQDVATSYINNLRSMIETHLHTLVDKEADSILRKCGLSNKMPYIKDYSSTGSKDDARPLADIVETSPQMLLECLKAFYGLVTGTEGSLPEFEQLQKTTSNVPTNKVKLAVRLLICRLLSLWPLIVLSKLLFALIWRMDQLEWLTAARKENLKFGRLEISAANQGQPDKLHRFG

SEQ ID NO: 103775 - protein, 896 aa, Oryza sativa
  Clone ID: PAT_MRT4530_101172C.1.pep
MEGGKLLGVAHPEPANNIDADLRYDLGQSRMQVDGPVVLNRSAELEPSDSMAIDDVPVEASSQPAPAKQSPALMDTIVEVQKQLKRKRASSGPALAAADKDALVAGCCQELEGLLEYYREVSGHRMQFEVGNLSTNAAIGCLLEESSLGLSKLVDEIYEKLKGMEGVSATSVRSSVLLIGQRMMYGQSSPDADVLEDESETALWCWEVRDLKVIPLRMRGPLSTRRTARKKIHERITAIYSTLSVLEAPGAEAQVNDMRKASLKLSKALNLEGIKSLVERATQKSNIERGAKNTGSTAKEPMQEMVKSNNDTGIIENVDDSQLQKNTSTNEKDTQKAQKQVEKELKQKEKEEARMRKQQKKQQEEALREQKRREKEEAEMKKQQRKQEEEAQKEQKRREKEEAETRKQQKKQQEEAEKEQKRREKEAVQLKKQLAIQKQASMMERFFKNKKDSEKLEKPGGKDSGVQTTDPCTTNKEVVPLVTSIIDSSFSQKENWALEDLRRLQISGWQKLSSYNRSSRWGIRNKPKKEAFKELKLQKTSDNMLEEILSPNEDTCHNLSQENEPDKSANDVDMLPAVELQFHGTNHANPLPTRSIKRKLLQFDKSNRPAYYGTWRKKSAVVGPRCPLKMDPDLDYEVDSDDEWEEGIQIESLLDDKDEASSSPPDQCAEVEEFRALLRQQKVLNTLTEQALRKSQPLVISNLTHEKAELLTAGDLKGTSKIEQLCLQVLSMRICPGGATIDLPVIDSSSANAEETNQLNVKSSPAAASAIPDTDLAEIVKVIGSCRDGINKLVESLHQKFPNVSKSQLKNKVREISEFVDNRWQVKKEVLSKLGLSSSPASSKKPKSIATYFSKRCLPPEEAILASPELRLKSKTTQNVNGDTDIPRINLLPSSQ

SEQ ID NO: 103776 - protein, 61 aa, Oryza sativa
  Clone ID: PAT_MRT4530_101173C.1.pep
EKREEETRRVSEERNLRLRPCLVPGIINYLPLITDLPLSSSQQYQRTSQNRDRKSKIAIHH

SEQ ID NO: 103777 - protein, 72 aa, Oryza sativa
  Clone ID: PAT_MRT4530_101174C.1.pep
LAPSRNMTALENTENGALPLLLCFLQGPMQIMGKLTFQGWIMKHGRGGSKKAKSSGPWLALASCRPLSLPTA

SEQ ID NO: 103778 - protein, 93 aa, Oryza sativa
  Clone ID: PAT_MRT4530_101175C.1.pep
MNLDWDSTQDLVDFRVASTVSVDISLPSTYVKRTSTTAASTMGTDLDIMLINNVWFLCKSSRRRQIYAAKGKCDIYRGAGNRGLRVKRTSTAV

SEQ ID NO: 103779 - protein, 49 aa, Oryza sativa
  unsure (1)..(49): unsure at all Xaa locations
  Clone ID: PAT_MRT4530_101176C.1.pep
RGQRXRRRXRREEGTRPGXRRPPWQAQLFLDAIDGQVIRSSSVSGFQVS

SEQ ID NO: 103780 - protein, 267 aa, Oryza sativa
  unsure (1)..(267): unsure at all Xaa locations
  Clone ID: PAT_MRT4530_101177C.1.pep
SLLQLHLQSWQNYVYIESKGEYLRTQQGLLTSAEGVHFTHMTLLTRITQPVGISHVGRPPSFHDKAFPKPTQVYHMPTRRVPDQQQFYPRCLPYFKFDGDRRYSHRVHEYRGSTRWLQGNMAKVAPTWRLRGSHAGRARGGXDHRSSNQRRLTAGLXEARRGDSIEREFTGTKGSTRGDEPTDRILRRGAGDDESRRRTPATRKGGNGGGAMRIRFKAVGVSMGLGESVSGAGWGGEAPRRAGDGGGPRERAAMAARPCQAAAGLGG

SEQ ID NO: 103781 - protein, 43 aa, Oryza sativa
  Clone ID: PAT_MRT4530_101178C.1.pep
EGRGANISSVFSGDDTAPFFGSLGAGSGLILSCMGAAYWAANS

SEQ ID NO: 103782 - protein, 128 aa, Oryza sativa
  Clone ID: PAT_MRT4530_101179C.1.pep
ARHPPWRRSCTRSSTTTAGSSATSTGSSTSPASTSTSPSSPTSISPGSRGTCTTPTPSRGYATAPPPSSASPGGSAGHPPPPTPTSATASPSSPTTSRTPTARCWSSVAASARPPPASTYSGPATSIS

SEQ ID NO: 103783 - protein, 126 aa, Oryza sativa
  Clone ID: PAT_MRT4530_10117C.1.pep
FKSSASQLPSIPPILPPPAMSVPRPRRGQSEADAPYRPYRVPREIQAPSTELDRGQVTVWLGIGGIQTIPTMKMDGRSDEVPHASSVYALSIYSIFLWEQQSGMMRRRHLALLPAYPCTLACCHAS

SEQ ID NO: 103784 - protein, 62 aa, Oryza sativa
  Clone ID: PAT_MRT4530_101180C.1.pep
ACFFSCGASPHQGPVVSLAIGTMMLYSGSMDHTIREKKILVTLCPIYLYSFLDNMRGTSINI

SEQ ID NO: 103785 - protein, 36 aa, Oryza sativa
  Clone ID: PAT_MRT4530_101181C.1.pep
RMPAFQKLCSFLAALLFFFFGIQNVAQVFIEQLIFC

SEQ ID NO: 103786 - protein, 122 aa, Oryza sativa
  Clone ID: PAT_MRT4530_101182C.1.pep
MGGDWQELAQAAVIGLLFAFLVAKLISTVIAFKEDNLRITRSTPTSPCGVDTPVAPAPPAACLDGGHGDTSDGSGSDSDSYWEGVESTELDQEFSARSEFVVGSAASGTSVPEQAQLQLYGL

SEQ ID NO: 103787 - protein, 960 aa, Oryza sativa
  Clone ID: PAT_MRT4530_101183C.1.pep
MPSLRRFLELVVVGIVVCGVNGGSDGLEVAVARRQLHQPFFPDQSSSPPTPAPPGPAPPFFPALPVPPPPPATAGQEQPTYPALVLPNTGAGGAAATAAPDGGGGGGGGARKSKSSASKLVPAIVLPLLTVAVLGLSIAFFFTHRRGNAARGGGGGGGCVGGGDAKFLHPERASLFARDEFGGSGGAAAPPAAAMDYRYVGNAGIGRMDEKSSETTSSGDEASRSTGGSPELRPLPPLLARQCGPMGARSPGSGVGGFASPSSGDEEFYSPQGSSKMSTSHRTLAAAVEAAVAARDRSKSPSPGSIVSTPSYPSSPGATTTFPGSVASRDGTDSEPSILNPYSACECVRHTGQPPAPPPPPPFAPTLPPPPPPRRKPPSPSPPSSPLIENTSALRSTTTTDTTIPRNPFVQPPPPPTHTHGPPPPPPPPPPPPVGYWESRVRKPGTGTSKETRSPALSPPPQAASFKSGLPTDAFPGRLADNADHAAAAAAGGGGDKSEETTPRPKLKPLHWDKVRASSDRVMVWDQLKSSSFQVNEEMIETLFICNPANSAPPKEPATRRPVLPTPKTDNKVLDPKKSQNIAILLRALNVSKEQVCDALCEGNTENFGAELLETLLKMAPTKEEEIKLREFKEETSPIKLGPAEKFLKAVLDIPFAFKRVDAMLYIANFESEVNYLKKSFETLETACDELRNSRLFLKLLEAVLKTGNRMNVGTNRGDAHAFKLDTLLKLVDVKGTDGKTTLLHFVVQEIIRTEGSHLSASNQSTPRTQANPLRDELECKKLGLQVVAGLGNELSNVKKAAAMDSDVLSSYVSKLAGGIEKITEVLRLNEEVKSREDAWRFHDSMQKFLKRADDDIIRVQAQESVALSLVKEITEYFHGDSAKEEAHPFRIFMVVRDFLSVLDQVCKEVGRINDRTIASSVRHFPVPVNPMMPQLFPRIHALRAGISDDESSATSASSP

SEQ ID NO: 103788 - protein, 60 aa, Oryza sativa
  Clone ID: PAT_MRT4530_101184C.1.pep
ITKDVTSAQSANPHPYTYQNLIPHNSLPFLQITPDFPILTTIIAYRKLLTTPFLADNSIN

SEQ ID NO: 103789 - protein, 167 aa, Oryza sativa
  Clone ID: PAT_MRT4530_101185C.1.pep
WPWPAPEAGEPAAAASAPSSSASASPCSSTGPPTSPTASAPPSNPPSCPTSPSLSGTARPTAAAAAAWCTTASPSTSPCTTPAAARGSTTTPSAPASSSSSPAARRSAPPTPPSPGCSTSPGCPPPSWRSTSTGAAAAASLSPATWRRSWTRRSRVAAAAARSGSRW

SEQ ID NO: 103790 - protein, 518 aa, Oryza sativa
  Clone ID: PAT_MRT4530_101186C.1.pep
MAAPASPLHPLAAIAAALLLLLVAAPSAAAAASPVFPGVPPLQLQALQQRRPASSAGGSRYVVAAAAAAAGGNGTAAAAKPFTAHYFPQELDHFTFTPNASAVFYQKYLVNDTFWRRSAAAGETPAGPIFVYTGNEGDIECKQHRFYGESKPFGNESNSSPEKLGYLTSTQALADFAVLITSLKHNLSAVSSPVVVFGGSYGGMLASWFRLKYPHVTIGAVASSAPILQFDYITPWSSFYEAVSQDYKSESFNCFSVIKAAWDLIDERGSTDAGLLQLSKTFRACKTVKSVYSFRNWLWTAFVYTAMVDYPTPANFLMNLPAYPIKEMCKIIHGFPAGADIVDKAFAAASLYYNYTGDQTCFQLEDGEDPHGLSGWGWQACTEMVMPMTISNESMFPPFTFTYEGKSDDCFQSYGVRPRPHWITTEYGGNRIDLVLKRFGSNIIFSNGMRDPWSRGGVLKNISSSIIALVTEKGAHHLDFRSATKDDPDWVVEQRRQEVKIIQGWIDQYNEDLAQISK

SEQ ID NO: 103791 - protein, 193 aa, Oryza sativa
  Clone ID: PAT_MRT4530_101187C.1.pep
MAAALISKRSERNHFYNANVIGVVVQYNGANDIGVVPLAPDGSYTNVIGTDDIFVLRTNDIDAGLADLLAIWEASSHCDVSIYGGIERQSVSHSQPEARKGPVTEADGSKRRCSVHRKLVTILSYFNRSAEGGLKLRNDATVREILLPELPTFITTYVLAGRVQVHIRCLLRPKTKFTVAAISSPSISYSGPV

SEQ ID NO: 103792 - protein, 49 aa, Oryza sativa
  Clone ID: PAT_MRT4530_101188C.1.pep
WRAEFHSNGILKYQTGNTIMIIFFLAYNTFTHAGFSSSYLYGTMATLHH

SEQ ID NO: 103793 - protein, 283 aa, Oryza sativa
  unsure (1)..(283): unsure at all Xaa locations
  Clone ID: PAT_MRT4530_101189C.1.pep
MAAPASPLHPLAAIAAALLLLLVAAPSAAAAASPVFPGVPPLQLQALQQRRPASSAGGSRYVVAAAAAAAGGNGTAAAAKPFTAHYFPQELDHFTFTPNASAVFYQKYLVNDTFWRRSAAAGETPAGPIFVYTGNEGDIEWFATNTGFMFDIAPSFGALLVFIEHRFYGESKPFGNESNSSPEKLXGYLTSTQALADFAVLITSLKHNLSAVSSPVVVFGGSYGGMLASWFRLKYPHVTIGAVASSAPILQFDYITPWSSFYEAVSQDYKSESFNCFSVIKAA

SEQ ID NO: 103794 - protein, 68 aa, Oryza sativa
  Clone ID: PAT_MRT4530_10118C.1.pep
MARLLSTRLPRRCLLACGRCAVRVTEVTARPEGMVTVDAVGRTEEKEEKRRNERMGKKRKEGPTCQLV

SEQ ID NO: 103795 - protein, 54 aa, Oryza sativa
  Clone ID: PAT_MRT4530_101190C.1.pep
MECSFTLRRNASSFPAKNSCYLQCMTQHHLETLLKAEKRSNDLESLVIQLTLLL

SEQ ID NO: 103796 - protein, 89 aa, Oryza sativa
  Clone ID: PAT_MRT4530_101191C.1.pep
NGTLDFPEFFNLRARKMKAPYSKEKLKGAFRVFSKDQNGFISPVELPHVMTNFGEKLTSKEVDKMIREAYFYGDGQINYKEFFKVIMAK

SEQ ID NO: 103797 - protein, 71 aa, Oryza sativa
  Clone ID: PAT_MRT4530_101192C.1.pep
TTGLTGGPHLSAAARARARAAANWAGWAEEREKARTSVHAPIYRKKVERLIGWLTVKIQMKTIQVWRTDGS

SEQ ID NO: 103798 - protein, 100 aa, Oryza sativa
  Clone ID: PAT_MRT4530_101193C.1.pep
MVGTRRTSRDLHFMCDKLRIEARAAIQNMDVCSGYAALQRHRQAFVRGKKMTQNMVKDTEPRAITKKCASGESNPVSTVGGYYDTTTPDALLWCWKLVPL

SEQ ID NO: 103799 - protein, 193 aa, Oryza sativa
  Clone ID: PAT_MRT4530_101194C.1.pep
RLRRRSTRLKPHRKRGLITSDANGHNIQEHKLPAVSSEDPVASAPSSSFEPSTGVSSSGEKKCQDPHGLGYLTFNPLFSQITGSQNIQLEGPVSDQMHHAEGDFPCATHTNTRDVLNHEPLERKVLAPKHIVSNDNGENVAVSRIVLPIASLQREHLKIDLERQEPRKNALISSMPTKSSKEPSTSVIHIPRI

SEQ ID NO: 103800 - protein, 62 aa, Oryza sativa
  Clone ID: PAT_MRT4530_101195C.1.pep
CGGLNVNVYVLMNEYVSQPNDFFADATSHINTCVQKNGAGMDGIMTDVPATVHRYILSPCTS

SEQ ID NO: 103801 - protein, 152 aa, Oryza sativa
  unsure (1)..(152): unsure at all Xaa locations
  Clone ID: PAT_MRT4530_101196C.1.pep
GGARLRPLAACARSGGGRAMTTVMTXGGLERGDNTGDRRAQRLTASATGRSATRLARAACNRRRPRGRAHANTARGKRXASGELARGEGALGAGDSRACASSVRARLSGGKERARRGERERERERAPGREMGRAGFGXIEPGGGKLDFCGGN

SEQ ID NO: 103802 - protein, 224 aa, Oryza sativa
  Clone ID: PAT_MRT4530_101197C.1.pep
MARDVVEAAAAADGRHHHKAVVAADGGGGGGAGTAALVWDCGSALYDSYELTSFRRQLDAAVLSCGGRSLSMPHLLSSSSTQQQQMPAGRRRRRRRRLPAMLRRLFGKVLLRLRFPVASRAARGGWYDYGAHGDGRPGSPWSGALTSIPEESASPENGPSSSPLVDDDGPSALRKAQSERFVGSKTASSMVQFDVVLGGGRNVTKLMAEALRATMGKVGAKGDI

SEQ ID NO: 103803 - protein, 1354 aa, Oryza sativa
  unsure (1)..(1354): unsure at all Xaa locations
  Clone ID: PAT_MRT4530_101199C.1.pep
MSDVRSRRSIASSTRRQQDAELAAAEERRRAQAXTAQTAAAAARAARLAAAELAAARAEAEAEAAEDAACAAEVEVETLRSSINGSIAGDITADRELEELARGRARERAERWAAAHLQGGGGGPRDRAPADGNPRRQRGSPSPDRRHGHHGVQTVVRDFGPGGGWPTLTKTNYIEWAAVMRVRLQVRHMWEAVRYGDVDYDKDRRALDALIAAVPPEMQFSLSQKRTEKEAWDAIAAARIGSDRARKSTLQALRKEWENLAFKPGEDVDDFALRLNTLLQKMVQYGDDTYDEEKLFRCVPEKYRQIARXSLLDLSTMSIEEALGRLKVEEEPALLLAHASIELSSAAPAATAFLHLEEPKVHASSXNSSSNDKADGWYLDTGATHHMTGQRELFTELDSSVRGSVKFGDACSVEIKGVGSVTFTAKSGEHRLLTGVYYIPALRNSIISVGQLDENGSRVLVEHGVMRIWDRRRRLLAKVTRGTNRLYILNAQVAQPVCLTARRDDEAWQWHERFGHLHFEALKRLSAKEMVRGLPCLDHVEQLCDVCILTKQRRLPFPQQTSFRAKERLELVHGDLCGPVTPATPGGRRYFLLLVDDLSRYMWVMVLGSKGEAADAIRRAQAAAEADCGRKLRVLRTDNGGEFTAAEFASYCADEGIQRHYTTPYSPQQNGVVERRNQTVVGMARALLKQRGMPAIFWGEAVVTAVYILNRSPTKALDGRTPYEAWHGRKPGVSHLRVFGCLVFVKELGPIGKLDDRSTPGVFIGYAEGSKAYHILNPETACARDVVFDEGRGWVWDKAVDDGSTPTYDDFTVDPVEFATPLSHDGERIDAYHDGEQLRYRTMEDLLGDQPVPGLVPRNLEAQLHLACDDGEPRSFAEAEKHAAWRAAMQSEMDAVQENRTWELVDLPRGHHAITLKWVFKLKRDEAGAIVKHKARLVARGFVQQEGIDYDDAFAPVARMESVRLLALAPQEGWGVHHMDVKSAFLNGDLKEVYVHQPPGFVIPGKEGKVLRLHKALYGLRQAPRAWNAKLDSTLKGMGFEQSPHEAAIYRRGNGGNALLVGVYVDDLVITGTKDAEVAAFEEMKATFQMSDLGPLSFYLGIELSLRWRRLKLSRDSTTEEVDATQYRRLVGSLRYLTHTRPDLAFSVNYVSRFMQRPTTEHQRAVKRIIRYVAGTLDHGLYYPRCPGKAHFVGYSDSDHADDIDTSKSTSGILFFLGECLVSWQSVKQQVVALSSCEAEYMAASAASTQALWLARLLSDLLGRDTGAVELRVDSKFALALAKNPVFHERSKHIRVRYHFIRSYLEEGSIKASYINTKDQLADLLTKPLGRIKFLELCSRIGMAQLPHKTTHKT

SEQ ID NO: 103804 - protein, 56 aa, Oryza sativa
  unsure (1)..(56): unsure at all Xaa locations
  Clone ID: PAT_MRT4530_10119C.1.pep
DLLCCSRPFCHWNLXYGMDDDDVSEAQKDLSEMGKDYXEGGCLLCDGDKGDEGDYD

SEQ ID NO: 103805 - protein, 79 aa, Oryza sativa
  Clone ID: PAT_MRT4530_1011C.1.pep
FSRSLVICLFNFNAFVYVFLRLFVFVCCVLLSLVFFLDFLMYIKKKERNTYISTSGNEHMMNMYRMFFTLNIYFSSLES

SEQ ID NO: 103806 - protein, 2071 aa, Oryza sativa
  unsure (1)..(2071): unsure at all Xaa locations
  Clone ID: PAT_MRT4530_101200C.1.pep
MSDARSRRSVASSTRRQQDAELATTEERRRATAQTTAAAARAARLAAAELAATRVEAETEAAEDVARAAKVEVETLRSSINGSIAGDITADRELEELARGRARERAERWAAAHLHGGGPRDRAPADGNPDGRGRAGGSXGSLSPDRRHGHHGVQTVVRDFGPGXRTAKEAWDAIAAARIGSDRARKSTLQALRKEWENLAFKPGEDVDDFALRLNTLLQKMVQYGDDTYDEERAVEKLFRCVPEKYRQIARSIESLLDLSTMSIEEALGRLKVVDGDEPQPLSGPITIGGKLHLTREQWEASQGDGRKGESSSPTGGCKPRKAWGGVQLRLLTGVYYIPALRNSIISVGQLDENGSRVLVEDGLMRIWDRRRRLLAKITRGTNRLYILSAQVAQPVCLAARRDDEAWQWHERFGHLHFEALKRLSAKEMVRGMPCLDHVEQLCDVCVVTKQRQLPFPQQTSFRAKEQLELVHGDLCGPVTPATPGGRRYFLLLVDDLSRYMWVMVLGSKGEAADAIRRTQAAAEAECGPKLRVLRTDNGGEFTAAEFASHCADEGIQRHYTAPYSPQQNGVVERCNQTVVGMARALLKQRGMPAIFWGEAVVTAVYILNRSPIKALDGRTPYEAWHGRKPAVSHLRVFGCLAFAKELGHIGKLDDRSTPGVFIGYAEGSKAYRILDPETQRVRTARDVVFDEGRGWVWDKAVDDGSTPTYDDFTIEYVHFERAGGVGSSSSPSVSTPVPEPPPTPTPTHPRATTSTTTSSSSTPPQPVSPRAPAPTATPPGTSTPTPARVERSPVEFATPFSHDEERIDAYHDGEQLRYRTMQDLLGDQPVPGLVPRDLEAQLHLACDDGEPRSFAEAEKHAAWRAAMRSEMDAVQENRTWELADLPRGHRAITLKWVFKLKRDEAGAIVKHKARLVARGFVQQEGIDYDDAFAPVARMESVRLLLALAAQEGWGVHHMDVKSAFLNGDLKEEVYVHQPPGFVLPGKEGKVLRLHKALYGLRQAPRAWNAKLDSTLKGMGFEQSPHEAAIYRRGNGGNALLVGVYVNDLVITSTKDAEVAAFKEEMKATLQMSDLGPLSYLGIEVHQDDSGITLRQTAYAKRVVELAGLTDCNPALTPMEERLKLSRDSTAEEVDATQYRRLVGSLRYLTHTRPDLAFSVGYVSRFMQRPTTEHQQAVKRIIRYVAGTLDHGLYYPRCPGKAHFVGYSDSDHAGDIDTSKSTSGILFFLDECLVSWQSVKQQVVALSSCEAEFMAASAASTQALWLARLLGDLLSRDTGAVELRVDSKSALALAKNPVFHERSKHIRVRLSNMQRGSTTTTIGSCNLRWATGFGSVSLATPVKGKLGPRYYGLEIINKVAYHLALPAGARLHDVFHVGLLKPFVGSPPTTPPALPSTQHGAVLPALAQVLKSRVSHGVRQLLVRWDGLSASATSWEDLDDFRTQYTVFQLEDELFVEEGRDVMWGIPYRRRNRQGTLLSNSFSVPDVSCVPDLTMQHMSAGQLADRNYRVILDPNFCYIQDRCTGQLVGTGPRRRDSQRLWELDWIHLPSTASASLVGSVFAASSTSSFAQWHHRLGHICGSRLPTMIRRGLSGHVSGHESLHQCQGCRLGKQIQLPYHSREYLSGALRHVLYEYGTLAQFSCPGAHAQNGVVERKHRHLLETARALLLGSCVPPHFWAEAVFTANYLVNIQPSSALHGGIPYEHLCSKLPDYFGLRLFGYVCYVLLAPHTTSASLVDPLSFLFLPDASIASTRPESQLAMAEEIAALERTGMWDLVPLPAHVCPITCKWVYKQEHGRDYDETFAHVAHMTTVRTLFAVASIREWSISHLDVKNAFLNGELHEEVYMRPPPGYSIPEVETPMELNVHLCATYGEPLSDPTHYHHILHYTRVLRVLRYLRGTIVHRLFFPRSSSLQLQAYCDATWASDSSDRRSLSAFCVFLGGSLISWKTKKQTAVSHSSAEAELHAMALVIAEVTWLRWLLEDFGVSVSMPTPLLSDSTDAISMARDPVKHELSKHVGVDAFYTRAQVQDGVVAPRYVPSEIQLADLFTKAQTGAQHRFYLSKLSVLDPP

SEQ ID NO: 103807 - protein, 84 aa, Oryza sativa
  unsure (1)..(84): unsure at all Xaa locations
  Clone ID: PAT_MRT4530_101201C.1.pep
QQLQDVTRESHCTXPIPRMVRSYEESMPXMPLDQAWSSSSSEYYXGGRGVVCSETRGYLQADGSSRWSGYYXAMQQQQPGMTQR

SEQ ID NO: 103808 - protein, 1719 aa, Oryza sativa
  unsure (1)..(1719): unsure at all Xaa locations
  Clone ID: PAT_MRT4530_101202C.1.pep
MAKNPKAAKNRRPTTRRPRAAAAAATASASADIEDLAPPSGCRAAVGLTTAAAAVRAELLRWYDANRRDLPWRRAAEPAGSGSGSGRGEEKRAYAVWVSEVMLQHTRVPVVVDYYSRWMARWPTVDSLAAATQEEVNEMWAGLGYYRRARFLLEGAKQIVEKGEFPRTASALREVRGIGDYTAGAIASIAFNEVVPVVDGNVRVISRLYAIPDNPKESSTVKRFCTRRQQDAELAAAEERRRATARTGAAAARAARLAAAELAAARAEAEAEAAEDAARAAEVEVETLRSSINGSIAGDITADRELEELARGRARERAERWVAAHLHGGGGGPRDRAPADGNPNGRERAGGSPEPARGPRRQHGSLSPDRRHGHHGVQTVVRDFGPGGGWPTLTKTNYIEWAAVMRVRLQVRHVGGSPFSLSQKRTAKEAWDAIAAARIGSDRARKSTLQALRKEWENLAFKPGEDVDDFALRLNTLLQKMVQYGDDTYDEERAVEKLFRCVPEKYRQIARSIESLLDLSTMSIEEALGRLKVVDGDEPQPLSGPITIGGKLHLTREQWEASQGDRRKGESSSPTGGRKPRKARGGVQLRGAQGVATGNHKPARDDACRNCGKLGHWAKDCQQPRRGQAHVARVEEEPALLLAHASIELPPAAPAAAAFLHLDEPKVLVSLCNGSSNDKADGWYLDTGATHHMTGRREFFTEFDSSVRGSVKFGDASGVEIKGVGSVTFTAKSGEHRLLTGVYYIPALRNSIISVGQLDENGSRVMVEDGLMRIWDRRRRLLAKVTRGTNRLYILSAQVAQPVCLAARRDDEAWQWHERFGHLHFEALKQLSAKEMVRGMPCLDHVEQLCDVCVVTKQRRLPFPQQTSFRAKKRLELVHEDLCGPVTPATPGGRRYFLLLVDDLSRYMWVMVLGSKGEAADAIRHAQAAAEAECGRKLRVLRTDNGGEFTAAEFASYCADEGIQRHYTTPYSPQQNGVVERRNQTVVGMARALLKQRGMPAIFWGEVVVTAAYILNRSPTKALDGRTPYEAWHGRKPAVSHLRVFGCLAFAKELGHIGKLDDRSTPGVFIGYAEGSKAYRILDPETQRVRTARDVVFDEGRGWVWDKAVDDGSIPTYDDFTVEYVHFEGAGGVGSSSSPSVSTLAPESPPTPTPTHPRATTSTTTSSSSTPPQPVTPHAPVPTATPPSTSTLTPARVERSPVEFATPLSHDGERIDAYNDGEQLRYRTMEDLLGDQPVPGLVPRDLEAQLHLACDDGEPRSFAEAEKHAAWRAAMQSEMDAVQENRTWELADLPRGHRAITLKWVFKLKRDEAGAIIKHKARLVARGFVQQEGIDYDDAFAPVARMESVRLLLALAAQEGWGVHHMDVKSAFLNGDLKEEVYVHQPPGFVIPGKEGKVLRLHKALYGLQQAPRAWNAKLDSTLKGMGFEQSPHEAAIYRRGNGGNALLVGVYVDDLVITGTKDAEVAAFKEEMKATFQMSDQGPLSFYLGIEVHKDNSGITLRQTAYAKRVVELAGLTDCNPALTPMEERLKLSRDSTAEEVDATQYRRLVGSLRYLTHTRPDLAFSVGYVSRFMQRPTTEHQQAVKRIIRYVAGTLDHGLYYPRCPGKAHFVGYSDSDHAGDIDTSKSTSGILFFLGKCLVSWQSVKQQVVALSSCEAEYMAASAASTQALWLARLLSDLLGRDTGTVELRVDSKSALALAKNPXFHERSKHIRAAHW

SEQ ID NO: 103809 - protein, 183 aa, Oryza sativa
  Clone ID: PAT_MRT4530_101203C.1.pep
MPSLVTGTLLHPGLLIASVRDDMEASAADHHGGHHHQTTKKIISQGSDGIGGGGGGKSRVDLYAGAVAQRALYGPTTTSRCRGAARQRQQAVAGGKDSKQPSRLSKMVAIRRNAPSSSHPATVAPSSSGTSTAAPSSPRAATTAPPSPRAATAAPPSPRAGTTAASKKGLGKRGSRIMRKKVM

SEQ ID NO: 103810 - protein, 119 aa, Oryza sativa
  Clone ID: PAT_MRT4530_101204C.1.pep
GRCLTVSPSRSCFVHTADGSPLPVVGQGTLLSNSFSVPDVSCVPDLTMQHMSAGQLADRNGPRRRDSQRLWELDWIHLPSTASASLVGSVFAASSTSSFAQWHHRLGHICGSRLPNIYP

SEQ ID NO: 103811 - protein, 117 aa, Oryza sativa
  Clone ID: PAT_MRT4530_101205C.1.pep
MSAFYITFFLIILLPLFPKPFLLAAVVPARGDGGAAVAARGDGGAVVAARGDDGAAVLVPDDDGATVAGCDDDGAFLLMATLLLIARLPTRHPPSLFVPKILQTRLANNDGIVAAVV

SEQ ID NO: 103812 - protein, 1202 aa, Oryza sativa
  unsure (1)..(1202): unsure at all Xaa locations
  Clone ID: PAT_MRT4530_101206C.1.pep
MSDVRSRRSVASSTRRKQDAKLAAAEEHRRATAQTAAAAARAARLAAVELAAARAEAEAEAAEDAARAAEVEVETLRSNINGSIGDITADRELEELARGRARERAERAAHPHGGGGPRDRAPADGNPDGHGCAGGSPERARGGGAPSGGGWFDRERGPRRQRGSPSPDRRHGHHGVQTVVRDFGPGGWWPTLTKTNYIEWAAVMRVRLQVRHMWEAVRYGDVDYDENRRALDAPIAAVPPEMQFSLSQKRTAKEAWXSTLQALRKEWENLAFKPEDGAVRXTTYDEERAVEKLFRCVPEKYGQIARSIESLLDLSTMSIKEAIGRLKVIDGHEPQPLSGPITIGGKLHLTREQWEASQXNDKADGWYLXDTGASHHMTGRREFFIEFDSSVRGSVKFGDASGVEIKSGGSVTFTAKSGEHRLLTGVHYIPALRNSIISVGQLDENGSRVLVEHGVMRIWDRRHRLLAKVNRGTNQLYILSAQVAQPVCLAAHRDDEAWQWHERFGHLHFEALKWLSAKEMVRGLPCLDHVEQLCDVCVVTKQRRLPFPQQTSFRAKERLKPVHGDLCGPVTPATPGGRRYFLLLVDDLSRYMWAMVLGSKGEAADAIRRAQAAAEAECGRKLRVLRTDNGGEFTAAEFASYCADEGIQRHYTAPYSPRQNGVIERRNQTVVGMARALLKQRGMPAIFWGEAVVTAVYILNRSPSKALDGRTLYEAWHGRKPAVSHLRVFGCLAFAKELGHIGKLNDRSTPGVFIGYAEGSKTYRILDPEKACAHGARLVFDEGRGWAWDKADDASTLTYDDFTVEYVHFEGAGGVGSSSSPSMSTPAPEPPLTPAATHPRATTSTTTSSSPTPPQSATPRTPAPTATPPGTSTPTPARVEHSPVEFATPLSHDEERIDAYHDGELLQYRTIEDLLGDQPVPRLVPRDLEVQLHLACDDDEPRSFAEAEGHEAWHATMQSEMDAVEENHTWELADLPRGHRAITLKWSLVKLDSTLKGMGFEQSPHEAAIYQRGNGRNALLVGVYVDDLMITGTKDAEVAAFKEEMKATFQMSDLGPLSFYLGIEVHQDDSGITLRQTAYAKRVVELVGLTDCNPALTPMEETEAEPRQSDGGETGAVELRVDSKSALALAKNPVFHERSKHIRVRYHFIRSYLEEGSIKASYINTKNQLADLLTKPLGRIKFLELCSRIGMAQLPHKTTHKT

SEQ ID NO: 103813 - protein, 810 aa, Oryza sativa
  unsure (1)..(810): unsure at all Xaa locations
  Clone ID: PAT_MRT4530_101207C.1.pep
MSVGQSQRSVASSARLRQEAKLAAAEERERAAAETAAMVARVSRLAAAELAAARAEVEAAAAAVAELKALHDSSSSSSVSAYDIPADELMREIARERAEQWAAAQPHACGGGSQDGRGRAGGVPGGSARGVGSPDGLGHAACVSPSPDRYHEHHGIQAVIREVGPGGGWPTLTKTNYVEWAVVMRVRLQVQHMWEAVRYGNVDYDEDRWALDALIVAVPPVMQFSLSQKRTAKEAWDAIVAARIGSDRARKSTLQALRKEWENLAFKPGEDKMVQYDDDTYDEERAVEKLFCCIPEKYRQIARSIESLLDLSTMSIEEAKGRIKVVDGDEPQLLSGSITIGGKLHLTREQWEACQDDGRKRESSSSTGGRNVRGSVKFGDASGVEIKGVGSVTFTAKSGEHMMLTGVYYIPALRNSIISVGQLDENGSRVLVEHEVMRIWDRRRRLLAKQGRGCRRHQAWAGCCGRKLRMLRTDNGGEFASYCVDEGIQHHYSAPYSPQQNGVVEQRNQTVLVMARALLKQRGMPAIFWGEPVVTAVYILNRSPTKALDATSRSPRELGHIGKLHDRSTLGVFIGYAEGLKAYRILDPKTQRVRTARDVVFDEGRGWAWDKAVDDGSTPTYDDFTVEYVHFEGAGGVGSSSSPSVPTPVPKPPPTPAATHSRATTSAATSSSPTPPQPATPRTPAPTATPPGTSTPTPARVEHSPMEFATPLSHDEERIDVYHDGELLRYRTMEDLLGNQPVLGLVPRDLEAQLLLXCDDGEPRSFAEAEGHASWRAAMQSEMDAVEENRTWELADLPRGHRAITLKFDP

SEQ ID NO: 103814 - protein, 1247 aa, Oryza sativa
  Clone ID: PAT_MRT4530_101208C.1.pep
MELAAARAEAEAEAAEDAARVAEVEVETLRSSINGSITGDSTADRELEELARGRTVVRDFGPGCGWPTLTKTNYIEWAAMMRVRLQVQHMWEAVRYGDVDYDEDRRALDALIAAVLPEMQFSLSQKRTAKEAWDAIVAARIGSDRARKSTLQALRKEWENLAFKPGEDVDDFALRLNTLLQKMVQYGDDTYDEERAVEMLFRCVPEKYRQIARSIESLLDLSTMSIEEALGRLKVVDGDEPQPLSGPITIGGKLHFTREQWEASQGDGMKGESSPSTGGRKPRKACGGVQLRWARRRAEGGARRGAQGGAAGNHKPARDDTCRNCGKLGHWAKDCRQPRHGQAHVAQVEEEEPALLLAYASIELPPATPATAAFLHLDEPKVLVSLCNSSSNDKADGWYLDTGATHHMTGRREFFTELDPSVRGSIKFGDASGVEIKGVGSVTFIAKSGKHRLLTGVYYIPALRNSIISVGQLDENGSHVLVKHGVMRIWDRRRRLLAKRAGRTTSLLAARRDDEAWQWHERFGHLHFEALKQLSAKEMVRGLPCLDHVEQLCDVCVVTKQRRLPLPQQTSFRAKERLELVHGDLCGLVTPATPGGRRYFLLLVDDLSRYMWVMVLGSKGEAADAIRRAGMPAIFWGEAVVTAVYILNRSPTKALDGRTPYEAWHGRKPAVSHLRVFGCLAFAKELGHIGKLDDRSTPGVFIGYAEGSKTYRILDPETQRVRTARDVVFDEGRGWVWDKAVDDGSTLTYDFTVEYVHFEGAGGVGSSSSPSVPTPVPEPPPTPAATHSRASTSAATTSSPAPPQPATPRTPAPTATPLGMSTPTPARVERSPVELATPLSTTGSASTRTTTASSSGTVRWRTFSATSRCRDWCPATWRRSCTLRATTSEMDAVQENCTWELANLPRGHRAITLKWVFKLKRDEAGAIVKHKARLVARGFVQQEGIDYDDAFAPVARMESVRLLALAAQEGWGVHHMDVKSAFLNGDLKEVYVHQPPGFVIPGKEGNVLRLHKALYGLRQAPRAWNAKLDSTLKGMGFEQSPHEAAIYQRGNGGNALLVGVYVDDLITGTKNAEVYQDDSGITLRQTAYAKRVVELAGLTDCNPALTPMERLKLSRDSTTEEVDATQYRRLVGSLRYLTHTRPDLAFSVGYVSRFMQRPTTEHQQAVKRIICYVAGTLDHGLYYPRCPGKAHFVGYSDHAGDIDTSKSTSGILFFLGECLVSWQSVKQQVVALSSCEAEYMAASAAST

SEQ ID NO: 103815 - protein, 811 aa, Oryza sativa
  Clone ID: PAT_MRT4530_101209C.1.pep
MAARAARLAAAELAAARAEVEAAAAADAARAAVAELKALRDSSSSSSVSAYDIPADELTREAARERVKQWAAAHPDARGGGSPAGHGRAGGVPGGSARGDSSPNELGRFGGPPSRGAHNGSAPGGNGWVDEDRDRYKQRVSPSPDRYRGHHGIQDVIREVGPGGGWPILTKTNYVEWAAVMRVRLQALSKEWENLAFKPGEDVDDFALRLNTLLHKMVQYGDDTYEERAVKKLFRCVPEKYQIAHSIESLLDLSTMSIKEAIGRLKVVDGDEPQPLLGPITIGGKLHLTREYLAIGPKTVDRLDAARPTSHRWRKSQLYSWHTQASSSPAAPAAAVFLHLDESKVHAFLGNSSNNDKANGWYLDTGATHHMTGRREFFTELDSSVRGSVKFGDASGVDIKGVGSSPSPPSPVAQPVCLAARQDDEAWQWHECFERLHFEALKRLSAKEMGIHRHYTAPYSPQQNGDVERRNQTVVGMAQAFLKQRGMPAIFWGEAVVTAVYILNHSPTEALDSRTPYEAWHGRKPAISYLRVFGCLAFAKELGHIGKLDDRSTPRVFIGYTEGSKAYRILDPETQRVRTVRDVVFDDRRGWAWDKAVDDGSTPTYNDFTVEYVHFEGAGGVGSSSSPSVSTPVPEPPPTPAQTHPRATTSTTTSSSSTPPQPATPRTPAPTATPPGTSTPTPARVEHSPVEFATPLSHDEERIDAYHDGELPRYCTMEDLLGDQSVPGLVPRDLEAQLHLACDDGEPQSFAEAKRHAAWRAVMQSKMDAVQENRTWELADLPRGHRAITLKWVFKLKRDAQGLFCHTIRPY

SEQ ID NO: 103816 - protein, 70 aa, Oryza sativa
  Clone ID: PAT_MRT4530_10120C.1.pep
LVVSNLLVKYCRFRRAGLRYIIGGVCVYNSFLVFKFPCRMILSLIGLVCVSCGIRIYTTSPFDNLDTYII

SEQ ID NO: 103817 - protein, 41 aa, Oryza sativa
  Clone ID: PAT_MRT4530_101210C.1.pep
MKEERRKHEVVALYELGLRHAGVGGGTVREGSSPQEDDNWM

SEQ ID NO: 103818 - protein, 492 aa, Oryza sativa
  Clone ID: PAT_MRT4530_101211C.1.pep
YNGRGKRKYGDYRRGYSDWGRDREKERGRPGSNGRRYEENDDEDGAPGFRRERRGSGGNDDARSSVADVYREATPLMRKELGDLEMNGTESRAANPSGEVKEADAPQMVQSEENEEGEMEEDGMVLNSEPEVVELRMDTNDDVNNASVGVDMETELQRSPNGNVPGEKAEDDDKVLVESALDSIALDDEVANTENNLHGDERNLLKYCEYAKAPTKRRSSRPQRNAASVQIEPAVSETTDQISIGEASQIVPGEVANEISVTNLKSENREDQIYRENTDFSTSCNGTLEPILLEENNESAATGNIIEEKNDVQLHVVKEPEEEVNVSAFAPSHKDSLMQETDLSPSTASHKDSLLEGDIAGSTNNMCQLPLDNKGVQVIDIEDDTPIEVGGFDSSKAKSDMICSNMDNMMGPVVHSGDLPGIQDGYNLAISDYLGGDIPCYPSMQSDLHGGIGANDSEGITVMDDPIYGSLTDIGFMDVWGQPTQDDYEKFF

SEQ ID NO: 103819 - protein, 273 aa, Oryza sativa
  Clone ID: PAT_MRT4530_101212C.1.pep
GHHLLLDRLPANEALAEEEDNPARGEPRPRTTKTYPSPRAWNAKLDSTLKWMGFEQSPHEAAIYRRGNGENALLVGVYVDDFVITGTKDAEDDSGITLRQTAYAKRVVELAGLTDCNPALTPMEERLKLSRDSTTEEVDATQYWRLRPTTEHQQAVNRIIRYVAGTLDHGLYYPSKSTSGILFFHGECLVSWQSVKQQVVALSSREAEYMAASAALTQALWLARLLRSIKASYINTKDQLADLLTKPLGRIKFLELYSRIGMAQLPHKTTHKT

SEQ ID NO: 103820 - protein, 78 aa, Oryza sativa
  unsure (1)..(78): unsure at all Xaa locations
  Clone ID: PAT_MRT4530_101213C.1.pep
AKRAREMAGTTSRRAYLRRQXEVAVVIAMGWGRRGKQEKWNHLVETNXSSARWFGLRGSGEGDRVWRHGGESLSPGIH

SEQ ID NO: 103821 - protein, 36 aa, Oryza sativa
  Clone ID: PAT_MRT4530_101214C.1.pep
MYKMLMNWGEKRETDECYEIKTYCVCCGNCFRKECI

SEQ ID NO: 103822 - protein, 113 aa, Oryza sativa
  unsure (1)..(113): unsure at all Xaa locations
  Clone ID: PAT_MRT4530_101215C.1.pep
MAMLQEAYGKSKYYEKHLTSSFFFSGPSCPPNSGGSPPVFPVPVAMSHLVTFKRRALVAGDGGCLGSLDGAASYSGGGGPGSLGAXLQTPGAVASCDSLGALRTTAPCAGDTL

SEQ ID NO: 103823 - protein, 332 aa, Oryza sativa
  Clone ID: PAT_MRT4530_101216C.1.pep
MSHHDGSKPYQPRRGPERPPPPAPADDAAAHVAPTVDHLAAVAAEAEAMARFEEEHRALGAEEEYEEEEDELEEEEEEMEEDEDAQHHEGVGGEVAVPMDAEAAAQLDPHGGMLAASGAVQPMASNQLTLSFQGEVYVFDSVSPDKVQAVLLLLGGRELNPGLGSGASSSAPYSKRLNFPHRVASLMRFREKRKERNFDKKIRYSVRKEVALRMQRNRGQFTSSKPKGDEATSELTASDGSPNWGSVEGRPPSAAECHHCGINAKATPMMRRGPDGPRTLCNACGLMWANKVKMPSSRCHANLGMLRDLSKAPPTPIQVVASVNDGPFLSSC

SEQ ID NO: 103824 - protein, 161 aa, Oryza sativa
  Clone ID: PAT_MRT4530_101217C.1.pep
TYVLAGWEGAAHDVVVLRDALERENGLHVPQGKFYLVDVGYGAKPGFLPPFRSTRYHLNEWGNNPVQNEKELFNLRHSSLRITVERAFGSLKRRFKILDDATPFFPFQTQVNIVVACCIIHNWVINDDIDELVMGPNESIIQDNDTSTVGQPNDHAWMVQF

SEQ ID NO: 103825 - protein, 187 aa, Oryza sativa
  Clone ID: PAT_MRT4530_101218C.1.pep
MARRQPSPEQHKPWWPKSTICGIPRRKAAATAAGDGGRPMAADGGSGKNGGCLALNMHHLKKICELLRSLKYRKMNISQLPKQMNNLLHLETLDIRQTKVQGDAMKDIFLNELKHLLAGDIIVDAAGDNEAIALSTVVMPPKISKNTKILRHVQIKDGPEAQLQLSHVASLERLRKLGVLGPRLQRR

SEQ ID NO: 103826 - protein, 515 aa, Oryza sativa
  Clone ID: PAT_MRT4530_101219C.1.pep
MTTPLGPPRCSSTPRDAGGPGEILAICGLVASLIYLLSFFGIAFVQSVVSNSDDEEEEEDFLIDSRAAGPVAAQATPPPAPAPCSLLGSACAAPKKMPEEDEEIVAEVVAGKIPSYVLETRLGDCRRAAGIRREALRRTTGREIRGLPLDGFDYASILGQCCELPVGYVQLPVGVAGPLVLDGERFYVPMATTEGCLVASTNRGCKAIAESGGATSVVLQDGMTRAPVARFPSARRAAELKGFLENPANFDTLAMVFNRSSRFARLQRVKCAVAGRNLYMRFSCSTGDAMGMNMVSKGVQNVLDYLQDDFPDMDVISISGNFCSDKKSAAVNWIEGRGKSVVCEAVIKEEVVKKVLKTNVQSLVELNVIKNLAGSAVAGALGGFNAHASNIVTAIFIATGQDPAQNVESSQCITMLEAVNDGKDLHISVTMPSIEVGTVGGGTQLASQSACLDLLGVKGANRESPGSNARLLAAVVAGAVLAGELSLISAQAAGHLVQSHMKYNRSSKDMSKVAS

SEQ ID NO: 103827 - protein, 99 aa, Oryza sativa
  Clone ID: PAT_MRT4530_10121C.1.pep
PRVRSYRIGEAMASTKMAVVAILAALLLMAAVEPALATPPSLLPARKLQMPRLMDVVSAESKLACLPAGGFCMFRPMDCCGNCGCLYPVGVCYGSRCEE

SEQ ID NO: 103828 - protein, 90 aa, Oryza sativa
  unsure (1)..(90): unsure at all Xaa locations
  Clone ID: PAT_MRT4530_101220C.1.pep
MVLVSXSSSXTXVAALPGAAXAXSXLGRAXXSGXXLLKXXXXSSXXAXXSXRXXSXXXXIXXPXRTXPXWLHXSXHDDXSFIHXGLXSDP

SEQ ID NO: 103829 - protein, 61 aa, Oryza sativa
  Clone ID: PAT_MRT4530_101221C.1.pep
FHALINSRINNSTLPHHVFDAYTVIFNSLHRSPEYPGNIGPLHWGRDHRRADYWFLRTHHS

SEQ ID NO: 103830 - protein, 153 aa, Oryza sativa
  unsure (1)..(153): unsure at all Xaa locations
  Clone ID: PAT_MRT4530_101222C.1.pep
ANAACDDRCGADASCSAGVDAGLSFRVEHRLDLQSWFAGLQYELLRFNDELRGNLLRSPVMLTPKSTASQQTSHMCRFRGGNRRGFPVCQAECTSIXALGCSRRGIAVVPCGFAPLLLSFIRKFASFFQLTSLVKDGPTLMFILGDVSGIQFP

SEQ ID NO: 103831 - protein, 116 aa, Oryza sativa
  unsure (1)..(116): unsure at all Xaa locations
  Clone ID: PAT_MRT4530_101223C.1.pep
YISPVAEQGAHYEKAGALLRNALETTEDRXTINREGYPSIRANMSKICATGGMRGINAGLGPTVNGTLTYSXTCYYFMDDTIKTCNCPIHKKSGMTWPERPDIGALARVTESTMSY

SEQ ID NO: 103832 - protein, 91 aa, Oryza sativa
  unsure (1)..(91): unsure at all Xaa locations
  Clone ID: PAT_MRT4530_101224C.1.pep
MLATSQRQWIIGVQEGSKRHIVGRMRQAXSRSVLQDNTCRESNVYEHAGYGDEREQLRCEVNXEWVHNXPKAGLSFVGRGKIWTRMVIIEL

SEQ ID NO: 103833 - protein, 118 aa, Oryza sativa
  Clone ID: PAT_MRT4530_101225C.1.pep
MASIRTVVLVVVAAVCAAVVLVSIPPVEAQQRDCHSICNQSCASSCRPAPISACGKACSLAGPQACSQCQYSVYQQCTGLCFNYCFNSASLTGSCSEAKDFFVDLCLMRQGVNRDLVL

SEQ ID NO: 103834 - protein, 72 aa, Oryza sativa
  unsure (1)..(72): unsure at all Xaa locations
  Clone ID: PAT_MRT4530_101226C.1.pep
KPMVAIHQPIIPKNLQNINYHIYAVLIYIITSMKQTNSRAHLSNHMXTIIDHTDEDTESYRYPICTKXTCXP

SEQ ID NO: 103835 - protein, 82 aa, Oryza sativa
  unsure (1)..(82): unsure at all Xaa locations
  Clone ID: PAT_MRT4530_101227C.1.pep
MKIIFVFALLAIAACNASARFDPLSQSYRQYQLQPHLLLQXQVLTPCSEFVRHHYTIAATPFWQPVTFQLINNQVMHYNCCQ

SEQ ID NO: 103836 - protein, 160 aa, Oryza sativa
  Clone ID: PAT_MRT4530_101228C.1.pep
MMELRKYWGVGGRRCGACEASPAAVHCRGCGGVYLCTACDARPGHARAAHERVWVCEVCEVAPAAVTCKADAAVLCAACDADIHDANPLARRHARVPVAPIGSAAAAAVIPEALLIRINPAGAQPEALENKLLHRAPKLQTGNRKNVPQPYTDCRSSQSY

SEQ ID NO: 103837 - protein, 89 aa, Oryza sativa
  Clone ID: PAT_MRT4530_101229C.1.pep
NKKYNSLQNVKMKIEREDCTDLVRIPNISKVGSYSSDTRLEILPIDLENIGTKHQQEILQPFEGCVQPDPCFITFWKDLIHQIRILSHG

SEQ ID NO: 103838 - protein, 105 aa, Oryza sativa
  Clone ID: PAT_MRT4530_10122C.1.pep
MAKLTVFVAILAVAAAAAAAAVSTTTAHGVAVGRRALDEYRSVLRVIVPLEVAGAPSSGSLDDDAAAALGPDLPEFGAAPAAGPAAAACGGDEVDCDNKVPVYGP

SEQ ID NO: 103839 - protein, 161 aa, Oryza sativa
  unsure (1)..(161): unsure at all Xaa locations
  Clone ID: PAT_MRT4530_101230C.1.pep
TLRDQYSGNGGGTLFLRRAAYELPGSKRSKAVIIGAVVGGVAAVLSVLSTVACFLFQKXRRERTLRILKTAGGTLIAFRYSDLQHVTTNFSXRLGGGALXSVXKGKLADSAATAVKRLDGVHQGEEPFXAEVSTIGTVELVFLVHLHEKNKKKKRRQQENK

SEQ ID NO: 103840 - protein, 198 aa, Oryza sativa
  Clone ID: PAT_MRT4530_101231C.1.pep
PGWTVDGEVVVPWTGGGRRCPWTDGWQAGGPPDRRPAEPWTDGRQSPFIHGFLPPPPPLHLLTPCTLPPSRRQWWPTTRLVMGDSGGGSFVPPSPTGGLSDSTARTWSSSTLRPLPPPRLPPRIRLSRPQSRPPSAIKRIPAILSCFPSSPFPTLSRSSHAGLSSAAHRRPPTTSHRGSCRCRATPPPPPASSGGTKE

SEQ ID NO: 103841 - protein, 52 aa, Oryza sativa
  Clone ID: PAT_MRT4530_101232C.1.pep
SCGLPYFNHILNTKAHCPSLNAKSINPRRKFKRDKRERRGYQWGWNLDSKLV

SEQ ID NO: 103842 - protein, 223 aa, Oryza sativa
  Clone ID: PAT_MRT4530_101233C.1.pep
MEWTTVEAANGAKLSVRLFKPAAGAEAAAAEDVAVVLVHPYTILGGVQGLLRGIAEGVARRGYRAVTFDMRGAGRSTGRASLTGSTEVGDVEAVCRWVADNLNPRGVLLVGSSAGAPIAGSAVDKVDQVIGYVSIGYPFGLMASVLFGRHHNAILKSEKPKLFVMGTKDGFTSVKQLQNKLKNAAGRVDTHLIEGAGHFQMEGPAFDARMVDLIVNFIKSLPK

SEQ ID NO: 103843 - protein, 47 aa, Oryza sativa
  Clone ID: PAT_MRT4530_101234C.1.pep
SISCLPMAPNSSPKVEKGFLWGHRLIFILSDRALLEQSASKRVNGRN

SEQ ID NO: 103844 - protein, 175 aa, Oryza sativa
  Clone ID: PAT_MRT4530_101235C.1.pep
MESTDEHAMESDTDLISVLPGEVLQHILSFSRIRAIVRMRRLSRRWMRVIECLQFICLDYRDFKHWKVEKFARFVDNLLLIRSKVDLHTFQLYWFHYLPLNCNDLRKWILYAVKHNVKVLDVELDMYDKTALPSRIFTCRSVEELSLQMGEAPDEDLEHVGLVLPDIIQLPSLKK

SEQ ID NO: 103845 - protein, 69 aa, Oryza sativa
  Clone ID: PAT_MRT4530_101236C.1.pep
FVARDRFFPPVSHLNRIGCLSASVVLKATRSSVYTHKLVVLNQHTIWHMTLLKTQTRFIHLRSGAAYSR

SEQ ID NO: 103846 - protein, 48 aa, Oryza sativa
  unsure (1)..(48): unsure at all Xaa locations
  Clone ID: PAT_MRT4530_101237C.1.pep
GMLNVLEPQPVKTPFMLGVTHLKIYSSFLKAGXIKNYKKTPKKKTHTP

SEQ ID NO: 103847 - protein, 80 aa, Oryza sativa
  Clone ID: PAT_MRT4530_101238C.1.pep
GRPVGLGGGGAGLGGGCRRSVEAAPSSVAAVPGSVEGADAGRCGGSVAATAGSAREDDDGTSVLRRRETIAGVRKIIDPI

SEQ ID NO: 103848 - protein, 92 aa, Oryza sativa
  unsure (1)..(92): unsure at all Xaa locations
  Clone ID: PAT_MRT4530_101239C.1.pep
MVTAGSASASVFPAVEFGAKTSRLGPSPRPRPSPVFXFSRTSLLVLDAGRFHSSLYIYXSSATGSNIVSNASGINLEDPVLAPIAVPNMTGT

SEQ ID NO: 103849 - protein, 72 aa, Oryza sativa
  Clone ID: PAT_MRT4530_10123C.1.pep
THIKTDSEISNIQHTLTTILAILYVITLAASTGSAQYDARPYGQCEHKPFMQPTMNQNSEVPRLLDSTDEPT

SEQ ID NO: 103850 - protein, 147 aa, Oryza sativa
  unsure (1)..(147): unsure at all Xaa locations
  Clone ID: PAT_MRT4530_101240C.1.pep
FFFFFFLXSTXLSVIITXPGPASXHSXVNTHNVTCIHPSIHHMQGCFALPDCASHQLSSHPTAACVGHTFHFTLQPKKGMPSDNTXVTNSRCSPHTFFFSANKLSAHSITVFTRYTCLPRGGWCQXHTPVLITSGSSDXQASPXXGS

SEQ ID NO: 103851 - protein, 146 aa, Oryza sativa
  Clone ID: PAT_MRT4530_101241C.1.pep
MADQLTDDQIAEFKEAFSLFDKDGDGCITTKELGTVMRSLGQNPTEAELQDMINEVDADGNGTIDFPEFLNLMARKMKDTDSEEELKEAFRVFDKDQNGFISAAELRHVMTNLGEKLTDEEVDEMIREADVDGDGQINYEEFVKDY

SEQ ID NO: 103852 - protein, 415 aa, Oryza sativa
  Clone ID: PAT_MRT4530_101242C.1.pep
MADQLTDDQIAEFKEAFSLFDKDGDGCITTKELGTVMRSLGQNPTEAELQDMINEVDADGNGTIDFPEFLNLMARKMKDTDSEEELKEAFRVFDKDQNGFISAAELRHVMTNLGEKLTDEEVDEMIREADVDGDGQINYEEFVKVMMANNSCPWYVQIAVGPSHTRLRMELDKKFKVLCLHGFRTSGSFLKKQISKWNPSIFQQFDMVFPDGIFPAGGKSEIEGIFPPPYFEWFQFNKDFTEYTNLDECISYLCDYMVKNGPFDGLLGFSQGATLSALLIGYQAQGKVLNDHPPIKFMVSIAGSKFRDPSICNVAYKDPIKVKSVHFIGEKDWLKVPSEELAAAFEDPVIIRHPQGHTVPRLDEASVKQLSEWSSSILEDIKNADDVAKASIVEKPSEGNTVAESGENLVEQIAA

SEQ ID NO: 103853 - protein, 128 aa, Oryza sativa
  Clone ID: PAT_MRT4530_101243C.1.pep
KKKECRCRRRSPRTTGAAPPAAGRRAWPRRPPPPRPRRPKPRRPPPGTTPLGAAPPAAAGRRSTRPCRPPARQMGRGGWPGRGGGRGEKGEDRWKGRSWRRELERIDRTTSSPVPYLSSRTLCGTCPS

SEQ ID NO: 103854 - protein, 303 aa, Oryza sativa
  Clone ID: PAT_MRT4530_101244C.1.pep
MDLDLWISKVKEGQHLAEHELQSLCEYVKEILIEESNVQPVNSPVTVCGDIHGQFHDLMKLFATGGHVPETNYIFMGDFVDRGFNSLEVFTILLLLKARYPAHITLLRGNHESRQLTQVYGFYDECQRKYGNANAWRYCTDVFDYLTLSAIINGTVLCVHGGLSPDVRTVDQIRTIDRNCEIPHEGPFCDLMWSDPEEIETWAVSPRGAGWLFGSRVTAEFNHINNLDLVCRAHQLVQEGLKYMFQDKGLVTVWSAPNYCYRCGNVASILSFSETMEREVKFFTETEENNQMRGPRTAVPYFL

SEQ ID NO: 103855 - protein, 264 aa, Oryza sativa
  Clone ID: PAT_MRT4530_101245C.1.pep
MPPERHHHPPPPAPGSPAMKFPIISGDSDLGKDLKFHESSAPTIAAYSPLQEYQGHFELALGHSMVCTNFCNSEQSYGVYSPYGAQTMAGRMLLPPAIATDVGPIYVNAKQFNGIIRRRLARAKAEREHRVSRSRKPYLHESRHRHAMRRARGSGGRFLNTKNASSAAAAAADAAPVSSGGGDHGASNKSSSASEATRVYDDDDDMGAGGGGDGGDFHHAMGHLRSPAFFPSLAAMMDGGGGGGEGKWATATPHHGCRVDLLKV

SEQ ID NO: 103856 - protein, 534 aa, Oryza sativa
  Clone ID: PAT_MRT4530_101246C.1.pep
METQSTATPSPGASSATGGGGGGAYPRWVILEQRAVHDDKEDDDGEDDSRCSAADVKINTEAACRSSDGHLVRVYFRRLVAPPAASRMTYNGQLDRFVYSAADSPTLTLLPTHARRQHWLDVKTTGLLRRRRRDGELVVAELTVKKGDTDDTPEDAELVVLRSGEWTVTRAPIIHDDGKAEEVSRWRTDMVVPVGDTLLCWVDLCRGVILLSASDLFDESRPRRLKYTSLPVEAPAKKFDDDDGGEYAINPRGYPERNRSVCVTGGGAALKFIDVSPRCCCGSPGATTLCHNSSGAFVIKTWTLMMNDDDDTTSTTWAMDAMVNAAELWSLDAYAGPPRLRPVYPIVSMDNPHIICFMVCKEHWESCFHCERTIWKIIFDMKSKKLLSIRYYDESQCQTWGVHYGDDYLPSMISDYFNSNGKYTSHNATTSINDLIVTNYLPQSSHKGLKVVSSEVQVSDEEIFAALEEIPDLGCDDLLKAYSILSHDIGQHRFRSLLGLPMSLRKKWLLIEIKSREASSICSACAANMQHLHA

SEQ ID NO: 103857 - protein, 430 aa, Oryza sativa
  Clone ID: PAT_MRT4530_101247C.1.pep
MSDRLGAGFPKPPGSGLPHPGGKQGYHAVTAEVTAVFISPYPRGKPSNRAVTGGMVNPAWEIQGFLNRRSQGYRTPAEVTAVFILPYPRACTPPPLAPLARIRCRRRREGWIRRPLPLLHGSRRLSAPLLCGSAVRGDGWVDPATSVVSPPSVRADPPRVMMGGTEVGWQTGRWGDDLDDGDTCGLGAIAIFSPRSNLVAYWQGPGNMDVCSLLVGVSDLGVNLLVNHYDDLGRVADSSLDDGFLAGGAGGGKVGLPVLDGALAFPQATTASQFLSAVSCDFECHHTIMVKIPAQLYLDLDAARCVARFSRRQKMRFVDFDGLELWNRDGCQKNIQALFGYAWIQSGLGMTGYGAVDESGGRVVQAELFGRPDRRVQVVGRRIIRSDPSLFDLFGLSGSTKVTNLGSLNPKAFVAMGCLVLVVTWAAMGV

SEQ ID NO: 103858 - protein, 77 aa, Oryza sativa
  Clone ID: PAT_MRT4530_101248C.1.pep
MPLGRPGTARDVLGHAWAASAARGLARHGPPHQVAGPPDHFSLGSLIIDLTYRLLTIYTDGTTMSSFFPLCSSPTVS

SEQ ID NO: 103859 - protein, 116 aa, Oryza sativa
  unsure (1)..(116): unsure at all Xaa locations
  Clone ID: PAT_MRT4530_101249C.1.pep
MRERDAAAGATPPPMWASSLLPLPPGHAREGTGASPPSHIDPGGTRGTPDGIDPDSXSHVKIEDSYIVSGDDCIAVKSGWDQYGIKFNMPSQHILIRRLTCISPTSAMIALGSEMS

SEQ ID NO: 103860 - protein, 70 aa, Oryza sativa
  Clone ID: PAT_MRT4530_10124C.1.pep
MERSSGSGSAVRGGGGIARRAHTLTRMTRHSGTVRQRRCQLSLVLLPMRYRGRPQRTCRHQPLASGESVV

SEQ ID NO: 103861 - protein, 191 aa, Oryza sativa
  Clone ID: PAT_MRT4530_101250C.1.pep
LAPLFRPGPSPCKESRTSAERRAPLLAPAREQRSTLGAARWRGRLPVTDPRWKMPPPGSSAGHRRIDLLRYCGRRWRRGGLERKAYPGSSVSAASLPAADASIRGRRVDPRRRCFDPPLPPRSPPPAPPSAATASICGRSRFDPRPLPRSPPPAAARSAAAGKLRPPLLEAPRRERGGRAGEGAAGEGEIA

SEQ ID NO: 103862 - protein, 612 aa, Oryza sativa
  Clone ID: PAT_MRT4530_101251C.1.pep
MAALRVPLRAILATPRAAGPRLLLPLHAHLLVSGRLAASPAALTSLVSLYARAAAPALHRHVAPLLLDRPSPPPLPCFNAGLSLPHPLALAVFRGLRHAYSPDAFSFPPLVSSAPSPPHLLALHALALRCGLAHDLFCASAMLRSCLRFGLADHARRLFGELPRRDVVVWNAMVNGFARLGCFGHAVECFRMMREDGEVEISSFTVTGILSVCTATADLGHGAAVHGLVVKSAFEQEVSVCNALVDLYGKCHKVDDAAMVFEGMADIVKDLFSWNSMLSALHYSADHAGTMKLFSRMRRVAVWPDAVTVAAVLPACAQTAALQVGREVHGYIVTSGLACHGALDSFACNALVDMYAKSGALDEARRIFDRMQQRDVASWNIMIDGYASHGHGKEALELFCQMTEVERLLPDEITLLGALSACSHSGLVEEGKNFLKRMKEEFSLEPQLEHYACVTDMLGRAGRLEEARKVVEDAGDVGVGAWRTYLAACRMHGDKERAQEAARMLMTTEQSESGGWVLLANTYGWEGNFDELEEVRGEMKRRGVQKAAPGCSWVEVGGDDRGSGAVMHAFVSGDRGHPEADMIYEMLHALISWMRDCSHLSNTTPLYSVEHS

SEQ ID NO: 103863 - protein, 69 aa, Oryza sativa
  unsure (1)..(69): unsure at all Xaa locations
  Clone ID: PAT_MRT4530_101252C.1.pep
TRPAGRGRTYSARSPRSCSTPCSFKALTALVKSISGKAILGRTFMRKRYYPENCLISSAXRELKVLILE

SEQ ID NO: 103864 - protein, 90 aa, Oryza sativa
  unsure (1)..(90): unsure at all Xaa locations
  Clone ID: PAT_MRT4530_101253C.1.pep
MAASIVHTAVVSVXEAPDARVVAMHPLXASDDXFLSLACANGNXNSIRPRRCLDTPLRALSMLSHLAAGRSAPWTDRVITTFFTKDRAGS

SEQ ID NO: 103865 - protein, 164 aa, Oryza sativa
  Clone ID: PAT_MRT4530_101254C.1.pep
RVQSISCGDLDIEGLTESIFVSHKDEYTEFEQASLRQQYQSKMAELRAEAKQQSESTGTIGRSNGAAVTTSLQQQISVTVVTEFVRWNEEAISRCTLLFSQPATVAANVRSIFACLLDQVSQYLTEGLDHARESLNHAATQRDRYVIGTSVSRRVATAAANAAE

SEQ ID NO: 103866 - protein, 118 aa, Oryza sativa
  Clone ID: PAT_MRT4530_101255C.1.pep
MTARFPFPYPLLLLTARCVRDGGGGGDGRIDLIPSRRRASSRGRAGIGQWLERGRAERHVAGRGLKARLRCLVAAVADALAKLRTPTSCPVCSNVLLTESFQIDCLRIDDSGQDGVMD

SEQ ID NO: 103867 - protein, 562 aa, Oryza sativa
  Clone ID: PAT_MRT4530_101256C.1.pep
RPLWRSSGGGGAIVSKLLRSRGVFLTWEDVWVTAVDSGGKAATILNGVSGSARPGEVLAIMGPSGCGKTTLLDTLAGRLDSNLKMKGQILVNGRCQQLAFGTSAYVTQENVLMATLTVREAIYYSAQIQLPDTMTMAEKLRRADETVREMGLTGTLDTRIGGRSSKGISGGQQKRLSICLDILTRPRLLFLDEPTSGLDSAASFHVMSRIIGLAAREGMTVVAVVHQPCSEVFELFHVLCLLAAGNTIFFGPASMAAEFFASNGYPCPPMRNPSDHFLRTVNKDFDKVTNTQESEDRLRCMPAVADEAIDILVNSYKSSNTSEVAKQDMRHINEMVSADRVTIGRNRAGFITKTLVLTRRSFVNMYRDIGYYWLRMAIYISISACLGTIFYNMGYGSDSIRARSSMLMFISTMLTLMAIGGFPSFVEDMKVFMKERLNGHYGVTTFVISNTLSSTPYLLLIAIIPGAIAYYLSGLQRQIEHFVYFTLVLCSCTMLVEGLMMIVATIVPDFLMGIITGAGIQGIMMLTSGFFQLPNSLPNIVWKYPMYYISFHKYALQGERGR

SEQ ID NO: 103868 - protein, 149 aa, Oryza sativa
  unsure (1)..(149): unsure at all Xaa locations
  Clone ID: PAT_MRT4530_101257C.1.pep
YVFTDRLAFAAADWCFRHRSWASTSSPTGLPSPPPTGVSTTGSPRPPPTGVSASAASSAVDWCFRRPAASSAADWCFRVFTDRLAFAAADWCFRRPAASSAADWCFRLHGWPLCRCCWASTSSPTGXPHPPLTGVTAFAMAADCFLHFH

SEQ ID NO: 103869 - protein, 187 aa, Oryza sativa
  unsure (1)..(187): unsure at all Xaa locations
  Clone ID: PAT_MRT4530_101258C.1.pep
MASSTTEPLVPPCRRRLGRCPLPSPPAPAAEGGAPVHLRSSRLPTPLSALSASLLGVSVVLLVALLGGQRPNRRRQGGTGGAAVELAMATGEIFTRGMEEEEEPGARMASSEFFGLWDELAGISLDPASTDTLPEELIVPXGKIIWKSRTPARYKFFMFLTVRGACMMADTMQHRGWHLASFCHLCA

SEQ ID NO: 103870 - protein, 120 aa, Oryza sativa
  Clone ID: PAT_MRT4530_101259C.1.pep
MEVQEGEGIGDGGEEGLADVRSRSMVRRRDDDGGSDGNARGKGRRGDRATRGMMGCGGAVLRDAEQRGLTEEQRRRVRERELPCGEKSESRGRTVRGSLREGMHRRRRGGARAMGSLSTV

SEQ ID NO: 103871 - protein, 159 aa, Oryza sativa
  Clone ID: PAT_MRT4530_10125C.1.pep
MALAAVLSRAAARLLRPPLPLRTRHLCALPSSSSPAPSEAEILAEIDPIVDLVKDILHSARYGDGAFLSPDDQKAVVEKVLVHHPTSEDKIGCGVDAIMVGKHPDFRKSRCLFIVRTNGETEDFSYRKCIKEYIKQKYPSQADDFIQNHLTRQFTRRPK

SEQ ID NO: 103872 - protein, 326 aa, Oryza sativa
  Clone ID: PAT_MRT4530_101260C.1.pep
MEHIMNFPLKVDSPGAENPGVLPIICRRKAGKSTLIEHDCNDERVCNHFSQIVCFSDNDLKDACMVTLRDCGAIKHQNHGIGGERVFIVIEQIGDIDEGVWRRLYSASKSCVPNGSKIIVASQSDKIASFGTTQALRVELFTEEAYWYFFKVCTVGSMDEQEHPKLASIAMDMARELDGCFMGASIYSVLLKANFNARFWNMALASIKEFKQTNLLVYGAYIDNPWQTSEPTYVRTVNRISSEYLVILDDYQTCPIQITNPAQSEAEVPEVNIQDFLFASVIPQGKFKVLAWTSHLPPHYNYMLSCEVQRKYRMVAKKKRSQELCT

SEQ ID NO: 103873 - protein, 52 aa, Oryza sativa
  Clone ID: PAT_MRT4530_101261C.1.pep
MAPAGAEAGRTATARWVQRPVRRCGRPLASWPAENPAGARSVVPRGPITGQG

SEQ ID NO: 103874 - protein, 144 aa, Oryza sativa
  unsure (1)..(144): unsure at all Xaa locations
  Clone ID: PAT_MRT4530_101262C.1.pep
KVSHSSPSSINTVDAYAFSCFYSIPIIVCKQKGETIVNFSCHVKRKXFTRHLSLLSNLFWILRSTLAYCLHWVLYYIISFEGLLGTFRLYLVYFGIYCLLFIREAVKDXEDRGECHAPISGITFITQSPMPSRGLQASSTLWTP

SEQ ID NO: 103875 - protein, 1794 aa, Oryza sativa
  Clone ID: PAT_MRT4530_101263C.1.pep
MAEPAKARDLSPSMSGDDGEPNPRRRARTPPPPPRQSPRREKALERAEGSTTSTSTGGGEGRRDGERRLLVYGDGSTPQGALQAAGALLRHPPVAHDPESPAQRWLDDVAKLVMTARQRLDAGGRSSATKASGAATTGSASAFVASLRNVRWPPRFRPTIAEKYDGSVNPAEFLQVYTTGIEAAGGDDRGGVRHNRMLEKIASKEPQTTAELFQLADRVARKEEAWTWNPSGSGVAASAAPGSAAQTGRRDRRRKKRSAHTDDEGHVLAVEGAPRATRKGRPAGDKKKEAGAPSRERPTGKWCTVHNTSLHDLADCRAVKSLAERTRKWEEERRQERREGKSPAVPSGNRRSEAKQKAPAEDIDDGDDDLGFQEPGAIVATVDGGACAHVSRRSLKAMKRELLAAAPTHEATRRARWSEVALTFDQTDHPPCVARGGQIAMVVSPTVCNVKLGRVLIDGGAALNILSPAAFDAIKAPGMMLRPSQPIIGVTPGHTWPLGHIDLPVTFGGPANFRTERVNFDVADLSLPYNAVLGRPALVKFMAAVHYAYLQMKMPGPDGPISVHGDLKVALACMEQRADRLAVVSKPEGGDERLGTSAPAAPRQRIVTCDEVPEDTLVSFLRANADVFAWRPADMPGVPREVIEHRLAVRPGARPVRQKVRRQAPERQAFIREEVARLLEAGFIREVIHPEWLANPVVIPKANGKLRMCIDYTDLNKACPKDPYPLPRIDQIVDSTAGQIGRNVEAYVDDLVVKTRNQETLLSDLAETFESLRSARIKLNPDKCVFGIPAGKLLGFLVSARSIEANPEKIRAIERMRPPSKLRDVQCVTGCMAALSRFISRLGEKALPLFKLLKRSGPFTWTEEAERALTQLKAYLSSPPVLVAPEPNEPLLLYLAATPQVVSAALVVECDEDNPHSAHPHPVLAWPGREQGGEAPEPDGGPRPPTTGAGPLPACQTVPGAPDPQDGPEATAGRPHLSPSDPEANPVPIRPGREQGEEAPEPNGGLRPLTTGVGPLPACPTTPGAPDPQDGPEATVGRPPLSSSDPEVVGTEDECAPRGRLGEERPRDAAPSEEDRPHRKVQRPVYFVSKALRDAKTRYPQAQKMLYVILMASRKLRHYFQAHRVTVVTSYPLGQILHNREGTGRVVKWAIELSEFDLHFEPRHAIKSQALADFVAEWTPAPELVSVPEASSGPSQLPHTAHWVMQFDGSLSLQGAGAGVTLTSPSGDVLRYLVRLDFRATNNMAEYEGLLAGLRVAAGLGIRRLLVLGDSQLVVNQVCKEYRCSDPQMDAYVRQVRRMEHHFDGIELRHVPRRDNMMADELSRLASSRAQTPPGAFEERLAQPSARPDPLGETDAPDRPPRPVGVQASGPEGSAPSSLRLIAWIAEIQAYLTDKTLPEDREGSERVHRISKRYVLVEGTLYRRAANGILLKSIPREQSVVLLADIHEGECGAHSASRTLVGKAFRQGFYWPTALNDALDLVRRCRACQFHAKQIHQPAQALQTIPLSWPFAVWGLDILGPFRRAPGGFEYLYVAIDKFTKWPEAYPVVKIDKHSALKFIKGITARFGVPNRIITDNGTQFTSELFGDYCEDMGIKLYFASPAHPRSNGQVERANAEILKGLKTKTFNILKKHGDSWIEELPAVLWANRTTPSQVTGETPFFLVYGAEAVLPSELTLRSPRATMYCEADQDQLRRDDLDYLEERRRRAALRAARYQQSLRRYHQRHVRARSLCIDDLVLRRVQTRAGLSKLSPMWEGPYRVVGVPWPGSIRLATGDGTELPNPWNIEHLRRFYP

SEQ ID NO: 103876 - protein, 834 aa, Oryza sativa
  unsure (1)..(834): unsure at all Xaa locations
  Clone ID: PAT_MRT4530_101264C.1.pep
MSSADSHDSASRLLPAKVEVEIGSLESHPGSPAEPAKGGLRGLPVRSPTLRHLARQLFLFSPMAEPAKARDLSPSMSGDDGEPNPRRRARTPPPPPRQSPRREKALERAEGSATSTSTGGEEGRRDGERRLLVYRDGSTPQGALQAAGALLRHPPVAHDPESPAQRWLDDVAKLVMTARQRLDAGGRSSATKASGAATTGSASSRRRARRAAAAVRHSAATPTSTPSTREDLRGGPDARTSIERRRNDRRAAHTTEGASSSRVSPHHGRGDQPSVPPVGGVGCRAFVASLRNVRWPPRFRPTIAEKYDGXVNPAEFLQVYTTGIEAAGGDDRVMANFFPMALKGQARGWLMNLPPASVHSWEDLCQQFTMNFQGTYPRPVRNTIPCIPAHAVIYAFREGVRHNRMLEKIASKEPQTTAELFQLADXVARKEEAWTWNPSDSGGGRRGRPIPTTRVMSSPSKAFRWPPERGGLRATKRRKPTLPDLGYLEERRWRAALRAARYQQSLRRYHQRHVRARSLCVDDLVLRRVQTRAGLSKLSPMWEGPYRVIGVPRPGSVRLATGDGTELPNPWNIEHLRRFYPYLAVAVVRTVVTALLVGVEGKREPRGRSLLSVGFPLLIRAICDRRDSARRKREQGGEAPEPNGGPRPPTAGAGPPPACPMVPGAPDPQDGPEATVGRPPLSSSDPEVIGTEDECAPRGRLGEERPRDAAPSEEDRPHRKVQRPVYFVSEALRDAKTRYPQAQKMLYAILITSRKLRHYFQAHRVTVVTSYPLGQILYNREGTGRVVKWAIELSEFDLRFEPSHAIKSQALADFVAEWTPAPELVSAPEASSSP

SEQ ID NO: 103877 - protein, 678 aa, Oryza sativa
  Clone ID: PAT_MRT4530_101265C.1.pep
MPGPGGPISVHGDLKVALACMEQRADHFSAASKPEGGDERLGTSVPAAPRQRMITCDEVPEDALVSFLRANADVFAWRPADMPGVPREVIEHRLAVRPGARPVRQKVRRQAPERQAFIREEVARPLEAGFIREVIHPEWLANPVVVPKANGKLRMCIDYTDLNKACPKDPYPLPRIDQIVDSTAGQIGRNVEAYVDDLVVKTRNQETLLSDLAETFESLRSARIKLNPDKCVFGVPASKLLGFLVSARGIEANPEKIRAIERMRPPNKLRDVQCVTGCMAALSRFISRLGEKALPLFKLLKRSGPFTWTEEAERALTQLKAYLSSPPVLVAPEPNEPLLLYLAATPQVVSAALVVERDEDNPHSAHPHPVLAWPGREQGGEATEPNGGPRPPTTGAGSLPACQTVPGAPDPQDGPAATAGRPHLSPSDPEPNPVPTRPGREQGEEAPEPNGGLRPLRTGVGPLPACPTTPGAPDPQDGPEATVGRPPLSSSDPEVVGTEDECAPRGRLDEERPKDAAPSEEDRPHRKVQRPVYFVSEALRDAKTRYPQTQKMLYAILMASRKLRHYFQAHRVTVVTSYPLSQILHNREGTGRVVKWAIELSEFDLHFEPRHAIKSQALADFVAEWTPAPEPVSVPEASSDPSQLPHTAYWVMQFDGSLSLQGAGAGVTLTSPSGDVLR

SEQ ID NO: 103878 - protein, 225 aa, Oryza sativa
  Clone ID: PAT_MRT4530_101266C.1.pep
MPLQSTAGPATPSSLLLPPPLSRVNARRSPSLDQRRRYRASTAGPPQSLHASSRVPAARHRIVCPCRRRGGSPSLTRRSSPEKPGPFSQTRSPETEKMNKRVERRKRKYMVMMLPSTCCCWPDLPLVMNNKIHGRMALQANIVDKDREDQGGCSYEYKSCSDAIKSATDSHIHKAYFTCAINSPIKLTMRHLYLDSISLFAFVNYILLVSIHLSNSQEVNQAPVF

SEQ ID NO: 103879 - protein, 72 aa, Oryza sativa
  Clone ID: PAT_MRT4530_101267C.1.pep
LLIIIATVCCCAQGELDPPPPRSPPLDPPPSLSPSLDPPPPCLPITESVAAAPPPPPHLSTATLAPVSPSFP

SEQ ID NO: 103880 - protein, 2032 aa, Oryza sativa
  unsure (1)..(2032): unsure at all Xaa locations
  Clone ID: PAT_MRT4530_101268C.1.pep
MAEPAKAHDLSPSMSGDDGEPNPRRRARTPPPPPRQSPRREKALERAEGSATSTSTGGGEGRRDGERRLLVYGDGSTPQGALQAAGALLRHPPVAHDPESPAQRWLDDVAKLVMTARQRLDAGGRSSATKASGAATTGSALSRRRARRAAAAVRHSATTPSSTPSTREDLRGGPDARTSIERRRNDQRATHATEGASSSRVSPQHGRGNQPSVPPVGGVGCRAFVASLRNVRWPPRFRPTIAEKYDGSVNPAEFLQVYTTGIEAAGGDDRVMANFFPMALKGQARGWLMNLPPASVHSWEDLCQQFTMNFQGTYPRPGEEADLHAVQRRDDESLRSYIQRFCQVRNTIPCIPAHAVIYAFRGGVRHNRMLEKIASKEPQATAELFQLADRVARKEEAWTWNPSGSGVAASAAPGSAAQTGRHDRRRKKRSAHTDDEGHVLAVEGAPRATRKGRPAGDKKKEAGAPSRERPTGKWCTVHNTSLHDLADCRAVKSLAERTRKWEEERRQERREGKSPAVPSGNRRSEAKQKAPAEDIDDGDDDLGFQEPGATIATVDGGACAHVYRRSLKAMKRELLAAAPTHEATRQARWSEVALTFDQTDHPPCVARGGQIAMVVSPTVCNVKLGRVLIDGGAALNILSPAAFDAIKAPGMMLRPSQPIIGVTPGHTWPLGHIDLPVTFGGPANFRTERVNFDVADLSLPYNAVLGRPALVKFMAAVHYAYLQMKMPGPDGPISVHGDLKVALACMEQRADRLAVVSKPEGGDERLGTSAPAAPRQRIVTCDEVPVKKVALGDGPVSFLRANADVFAWRPADMPGVPREVIEHRLAVRPGARPVRQKVRRQAPERQAFIREEVARLLEAGFIREVIHPEWLANPVVVPKANGKLRMCIDYTDLNKACPKDPYPLPRIDQIVDSTAGCDLLCFLDAYSGYHQIRMAREDEEKTAFITPIGTYCYTTMPFGLKNAGPTFQRTTRISLGSQIGRNVEAYVDDLVVKTRNQETLLSDLAETFESLRSARIKLNPDKCVFVIPAGKLLGYLVSARGIEANPENIRAIERMRPPXKLRDVQCVTGCMAALSRFISRLGGKALPLFKLLKRSGPFTWTEEAERALTQLKAYLSSPPVLVAPEPNEPLLLYLAATPQVVSAALVVERDEDNPHSAHPHPVLAWPGREQGGEAPEPDGGPRPPTTGAGPLPACQTVPGAPDPQDGPEATAGRPHLSPSDPEANPVPIRPGREQGEEAPEPNGGLRPLTTGVGPLPACPTTPGAPDPQDGPEATVGRPPLSSSDPEVVGTEDECAPRGRLGEERPRDAAPSEEDRPHRKVQRPVYFVSEALRDAKTRYPQAQKMLYAILMASRKLRHYFQAHRVTVVTSYPLGQILHNREGTGRVVKWAIELSEFDLHFEPRNAIKSQALADFVAEWTPAPELVSVPEANSGPSQLPHTAHWVMQFDGSLSLQGVGAGVTLTSPSGDVLRYLVRLDFRVTNNMAEYEGLLAGLRVAAGLGIRRLLVLGDSQLVVNQVCKEYRCSDPQMDAYVRQVRRMEHHFDGIELRHVPRRDNMMADELSRLASSRAQTPPGAFEERLAQPSARPDPLGETDAPDRPPRPVGVQASGPEGSAPSSLRLIAWIAEIQAYLTDKTLPEDREGSERVHRISKRYVLVEGTLYRRAANGILLKCIPREGIVLLANIHEGECGAHSASRTLVGKAFRQGFYWSTALNDAVDLVRRCRACQFHAKQIHQPAXALQTIPLSWPFAVWGLDILGPFRRAPGGFEYLYVAIDKFTKWPEAYLVVKIDKHSALKFIKGITARFGVPNRIITDNGTQFTSELFGDYCEDMGIKLCFASPAHPRSNGQVERANAEILKGLKTKTFNILKKHGDSWIEELPAVLWANRTTPSQATGETPFFLVYGAEAVLPSELTLRSPRATMYCEADQDQLRRDDLDYLEERRRRAALRAARYQQSLRRYHQRHVRARSLCVDDLVLRRVQTRAGLSKLSPMXEGPYRVVGVPRPGSIRLATGDGTELPNPWNIEHLRRFYP

SEQ ID NO: 103881 - protein, 147 aa, Oryza sativa
  Clone ID: PAT_MRT4530_101269C.1.pep
MPLQSTAGPATPSSLLLPPPLSRVNARRSPSLDQRRRYRASTAGPPQSLRASSRRGGSPSLTRRSSPEKPGPFSQTRSPETEKMNKRVERRGGRGIHGRMALPANIVDKDREDQGGCSYEYKSCSDAIKSATDSHIHKAYFTWVHTL

SEQ ID NO: 103882 - protein, 58 aa, Oryza sativa
  Clone ID: PAT_MRT4530_10126C.1.pep
THQHVPSNRLLNKTDPSAIQCLIVNRQLSTRQASYSSPPNIVRQSKLACLILLLKLHG

SEQ ID NO: 103883 - protein, 1963 aa, Oryza sativa
  Clone ID: PAT_MRT4530_101270C.1.pep
MAEQAKAHDLSPSVSGDDGEPNPRRRARTPPPPPRQSPKRGEALERVERSATSPIAGDGKERRDGERRLLVYGDGSTPQGALQATGALLRHPPVVPDPESPAQRWLDDVAKLVMTARQRLDAGGRSSATKASGAATTGSASSRRRARRAAAAVRRSAVTPSSTPSTREDLRGEQDARTSIERRRNDRSAAHATEGASSSRVSPRHGRGNQPSVPPVGGVGCRAFVASLRNVRWPPRFRPTIAEKYDGSINPAEFLQVYTTGIEAAGGDDRVMANFFPMALKGQARGWLMNLPPASVHSWEDLCQQFTMNFQGTYPRPGEEADLHAVQRRDDESLRSYIQRFCQVRNTIPCIPAHAVIYAFRGGVRHNRMLEKIASKEPQTTAELFQLADRVARKEEAWTWNPSGSGVAASAAPGSAAQTGRRDRRRKKRSVHSDDEGHVLAVEGASRATQKGRPASDKKKKAGAPSRERPAGKWCTVHNTSLHDLADCRAVKSLAERTRKWEEERRQERREGKSPAVPSGNRRSEAKKKAPAEDIDDGDDDLGFQEPGATIATVDGGACAHISRRSLKAMKRELLAAAPTHEATRRARWSEVALTFDQTDHPPCVARGGQIAMVVSPTVCNVKLGRVLIDGGAALNILSPAAFDAIKAPGMMLRPSQPIIGVTPGHTWPLGHIDLPVTFGGPANFRTERVNFDVADLSLPYNAVLGRPALVKFMAAVHYAYLQMKMPGPDGPISVHGDLKVALACMEQRADRLAVVSKPEGGDERLGTSAPAAPRQRIVTCDEVPVKEAGFIREVIHPEWLANPVVVPKANGKLRMCIDYTDLNKACPKDPYPLPRIDQIVDSTAGCDLLCFLDAYSGYHQIRMAREDEEKTAFITPIGTYCYTTMPFGLKNAGPTFQRTTRISLGSQLGRNVEAYVDDLVVKTRNQETLLSDLAETFESLRSARIKLNPDKCVFGVPTGKLLGFLVSARGIEANPEKIRAIERMRPPSKLRDVQCVTGCMVALSRFISRLGEKALPLFKLLKRSGPFTWTEEAERALTQLKVYLSSPPVLVAPEPNEPLLLYLAATPQVVSAALVVERDEDNPHSAHPHLVPTWPGREQGGEAPEPNGGPRPPTTGDGPLPACQTVLGAPDPQEGPEATAGRPHLSPSDPEANPVPIWPGREQGGEAPEQNGGPRLPTTGDGPLPACPTTPGAPDPQDGPEATVGRPPPSSSDPEVVGTEDECAPRGRSGEERPRDAAPSEKDRPHRKVQRPVYFVSEALRDAKTRYPQAQKMLYAVLMASRKLRHYFQAHRVTVVTSYPLGQILHNREGTGRVVKWAIELSEFDLHFEPRHAIKSQALADFVAEWTPAPELVSVPETGSGPSQLPHTAHWVMQFDGSLSLQGAGAGVTLTSPSGDVLKYLVRLDFRATNNMAEYEGLLAGLRVAAGLGIRRLLVLGDSQLVVNQVCKEYRCSDSQMDAYVRQVRRMERHFDGIELRHVPRRDNMMADELSRLASSRAQTPPGAFEERLAQPSARPDPLGETDAPNRPPRPVGVQASGPEGSAPSSLRLIAWIAEIQAYLTDKTLPEDREGSERVHRISKRYVLVEGTLYRRAANGILLKCTPREQGVVLLADIHEGECGAHSASRTLVGKAFRQGFYWPTALNDAVDLVHRCRACQFHAKQIHQPAQALQTIPLSWPFAVWGLDILGPFRRAPGGFEYLYVAIDKFTKWPEAYPVVKIDKHSALKFIKGITARFGVPNRIITDNGTQFTSELFGDYCEDMGIKLCFASPAHPRSNGQVERANAEILKGLKTKTFNILKKHGDSWIEELPAVLWANRTTPSRATGETPFFLVYGTEAVLPSELTLRSPRATMYCEANQDQLRRDDLDYLEERRRREALRAARYQQSLRRYHQRHVRARSLCVDDLVLRRVQTRAGLSRLSPMWEGPYRVVGVPRPGSIRLATGDGTELPNPWNIEHLRRFYP

SEQ ID NO: 103884 - protein, 148 aa, Oryza sativa
  unsure (1)..(148): unsure at all Xaa locations
  Clone ID: PAT_MRT4530_101271C.1.pep
SRVNARRSPSLDQRRRYRASTAGPPQSLRASSXVPAARHRIVCPCRRRGGSPSLTRRSSPEKPGPXFGPRDLMPVVNVVVCIGCDPFTDWLLGPFXTRRSRPWPEPMLSPVAAEAEVVPFRRRTPPLPPPEPRSARAVLFPIRRCRSR

SEQ ID NO: 103885 - protein, 100 aa, Oryza sativa
  Clone ID: PAT_MRT4530_101272C.1.pep
MDIPDIPVVYEASWVTKCCMIWNIPIYTVHNCFITNALNAMKIPAFYTALIYDNLIRYSSMKHSMTVIDSGYGTKILDICLKDKDETHHWISEEEAKGSV

SEQ ID NO: 103886 - protein, 236 aa, Oryza sativa
  unsure (1)..(236): unsure at all Xaa locations
  Clone ID: PAT_MRT4530_101273C.1.pep
PAGAAPISAPSSTPRILPPLISSTRIPAASLAPPDSPLLPDQPPPPPSSSAARGIPAASLAPDSPMPLQSTAGPATPSSLLLPPPLSRVNARRSPSLDQRRRYRASTAGPPQSLHASSRVPAARHRIVCPCRRHGGSPSLTRRSSPEKPGPFSQTRSPETEKMNKRVERRKRDSRREMVQSTAATDGAXPWLEPMLSPVAAEAEVVPFHRRTPPLPPPEPRSARAVLFPIRRCRSR

SEQ ID NO: 103887 - protein, 695 aa, Oryza sativa
  Clone ID: PAT_MRT4530_101274C.1.pep
MEQLRQLGEAVGSINALMAFEDDLHINPRQCRLLADACARALAAVTGQVRAQLRFDERGAKWRAIEAPLRELHRAFRDAEAYVRQCLDPRGSWWARAAAMAHGTECVEQHLHNVLWCVAVALEAIDAAGEIAGSDPDELARGRLVLARKYDRDMLDPKLFEHAFGKLYLVSQELVARMDMAWKEDRWVISQMFDEMKGPAASKPLSKNEHRLAELLAAAMGKLHPASVLLGSDYSVRRRLGGRLKEVHWMGESFAMKHFIGDTDAAGAEVALLCSVAHPNVAHAAYCFHDEEKKEYFVVMDQLMAKDLGSYVKEVSCPRRRIPFPLVVAVDIMLQIARGMEYLHAKRINHGELNPSNVLVKPRQPDGGYVHVKVAGYGQPAGITAGGAKASANGNANGNDNSCIWYAPEVLRSDGVADAAAAGRCTEKADVYSFAMICFELLTGKVPFEDNHLQGDKTSKNICAGERPLFPFQAPKYLTALTKRCWHADPAQRLAFASICRVLRYVKRFLILNPEQQQQQQQGQTDDAPKPAVDYLDIEAQLLKKLPAWQRGGEAPRVADVPFQMFAYRVMEREKAAGAVHVAKDRASDSGSDGNSLYGDENGFGAMSPEHTFSAVSNGTLRSRPASSDGRLPTAKKADGKAPRQAGPQPKVKPVNTAARTPHSARRALGVKPDDHLQTNGAPTARRRTPEMASE

SEQ ID NO: 103888 - protein, 160 aa, Oryza sativa
  unsure (1)..(160): unsure at all Xaa locations
  Clone ID: PAT_MRT4530_101275C.1.pep
MRWSHSDTLLFTSETVNEVHPDXLCDPVSDAALGGCLAEEPDSKVAWETCTKTNMVMVFDEITTEANADYEKIVGXTCPNIGLVAXRDAPLDADHWKVLAQIESXTPDIGQGVHAHFTRCPEXIGDVDHARMIGYAAVETPEVMPLRHGLATKLGARLTE

SEQ ID NO: 103889 - protein, 99 aa, Oryza sativa
  unsure (1)..(99): unsure at all Xaa locations
  Clone ID: PAT_MRT4530_101276C.1.pep
QXXSSGTELXXFLCSRTCQYLPCHLXVVHQGVLVXRNMGELVNLXFFSFHVYSELRXGFXMIXLXYYCTARFGFGXIIIXIXXSXDXNKKKKKKKKKKK

SEQ ID NO: 103890 - protein, 442 aa, Oryza sativa
  Clone ID: PAT_MRT4530_101277C.1.pep
MELVVQALAAAAALLAVFFLSTLYLSPAATARRLRNAGFRGPTPSFPLGNLREIASSLASNNDTDESNTKGGDIHAAVFPYFARWRRAFGKVFVYWLGTEPFLYVADPEFLKAATAGALGKLWGKPDVFRRDRMPMFGRGLVMAEGDEWARHRHIIAPAFSATNLNDMIGVMEETTAKMLGEWGDMVASGRSCVDVEKGVVRNAAEIIARASFGISADDDDATGARVFHKLQAMQAILFRSTRLVGVPLAGLLHIRATYEAWKLGREIDALLLDIIESRRRREGGGGGKKKKKTTSNDLLSLPPPLAVVDIVSAPELQIQRPLPPPGSPAARPPSLPMAEEATQGKKEEEEFSTGPLSVLMMSVKNNTQVLINCRNNKKLLGRVRAFDRHCNMVLENVREMWTEVPKTGKGKKKALPVNKDRFISKMFLRGDSVIIVLRNPK

SEQ ID NO: 103891 - protein, 972 aa, Oryza sativa
  Clone ID: PAT_MRT4530_101278C.1.pep
MAAVGVGSPVKYNNNVAVQFVNAWEIEFIVVSSFLLQVAALFLAGYRRRSNSAVVKSIVWISYLLADSAATYGLGHLSVNSRPPERQQLVAFWAPFLLLHLGGPDSITAYSLEDNQLWKRILQKDFFTQVLGAAYVLYKTFPAGSGLLLPAAWVIFAIGVAKYAERIWALYNANMSNIRSALENDDNSDDEKQEEPPEVPVIIRYRRAPEDLLLYAHSQFEVCKSALVDSSSAKAKNISYLRRTIFSDVWEWEKRWTVFQMEVSLLYDIMYTKAGVIHTWYGYCLRVFSPLATAAALLLFHLSRSSTSSVGATSIAAMNSPPVLVDVAITYALLVGAILLDMVSLLSAAGSSWAFTYLVLGMPRRRHGWLYRAAVHSGMWLHRWLEYLRELINAHDRRRWSGAIGQYNVLQFCTATSEKRNYTTTTEEIPEGVMKLVFEELTRVILRTNMEGNSGTGNKDMSKEGIGLAKKDLTNNPSDQMEGIGSDLGDHSSHHVKWIGTSNKDLTNKSSDHVEGNESDLNDNSSGHGEGIGSGNKHLSNNFLNHVEGIGFDLNDNSSDHEEGIGSGKKDMMNKSLDRVEGISFDLRDNYSRDETFGSGRKDTSNKSLDHVEGIEPDLRDNSSGDETFASYGEDMSNKSSDHEEGIRSGNKSSDQIKNEYVTVEITQKLRRGVRRQTPKVSKPSAELTKLEGAATDSVGLIKAERGQLALRNLMAKKEGLVISIGDLKRYLRDEIQEGILIWHIATDVFLRTSESDEPAAMKQQHDSDHQTDQRVEAIKLLSNYMIFLMVERPSMVPGLALGKLYRQTCRALSKELAPGVNGDANKLAEILATKKRDNPVLQQDGKLALRGNALRYATKLALMLADLNEKFAHESTTLNGKPTSIPEKKRDDDLVQFLFEMWVEMLLYVSHRCSRESHAKRIGEGGELTTVVWLMAEQAGKFYIDKELSVAEEAEQAEEKDDDNYVLVISP

SEQ ID NO: 103892 - protein, 138 aa, Oryza sativa
  unsure (1)..(138): unsure at all Xaa locations
  Clone ID: PAT_MRT4530_101279C.1.pep
VGPTCRARLPPPAGATAPRNRRRARSHVSRATSPTSPSRPRSPRPLPSLSRSRPRSRRPGFNFXIPPLSPLPLXPTSAGDFRLSRPRPXPLLPYLSTTAIPSLFFPISPSPPVLSTALAPSPSSPPPPPSLRSPLAAA

SEQ ID NO: 103893 - protein, 195 aa, Oryza sativa
  Clone ID: PAT_MRT4530_10127C.1.pep
MAASGSSTVRGSHVEGSMLRHPRHASSSSTECYQKYLIDHGLLNGDASREEIKGDSSEEDEVEDLGSKKKLIDVVLMMRSEVKQQTLYLKIAAFGIVVFGAVLLGMIAVVVAKGFLQWLVTELGAPHWETAQAPLCRFGRGPWGDKEKGDRITLGPDPPEGGDRPPRGKRSGVTPLLRPGDRWGRFLQVPSNYIT

SEQ ID NO: 103894 - protein, 284 aa, Oryza sativa
  Clone ID: PAT_MRT4530_101280C.1.pep
MSATSAYTADCLNNFAVGCLHATAWARCRTLGVFGLRTAEATRFRLGHVSVCPGQDTARPGASVFSWLTRPDYAPDRLLPSPTSPGHISVRPGHDAARLGALAFTRLTRPDFARSVCPPAYASTLVNHVPTDWPAPGQLKGFTASPGPAGTLLCEAHSLVLPYSASSLPAGGYASTLVALLGYHSTGQDTPPELSYSGVTPKSRVSSSWLPMPPSGDLIPMLAGSSAAGWGLRLQVGCLCCCRVTLSLCWLAPSPPPSNYVPMLANFVITNWLPHLHGLAGSIG

SEQ ID NO: 103895 - protein, 340 aa, Oryza sativa
  unsure (1)..(340): unsure at all Xaa locations
  Clone ID: PAT_MRT4530_101281C.1.pep
MRPSLMRSASQVLRRRRGYSSASGQPERKVAILGAAGGIGQPLSLLMKLNPLVSSLSLYDIAGTPGVAADVSHINAPAQVKGFMGDDQLGEALEGSDIVIIPAGVPRKPGMTRDDLFNINAGIVKDLCTGMSKYSPKVLARKTGXPVTTSLPSTPALLKASATYSCKXVFGVITLDSAPAKTFYAGNADVPVTDVNXPVVEGQAGITILPLFSQATPATNALSDEDIKALTKRTQDGGTEVVEAKAGKGSATLSMAYAGAVFANACLKGLNGVPDVVECSFVQSTVTELPFFASKVKLGKNGVEEVLGLGQLSDFEKEGLENLKGELKASIEKGIKFANA

SEQ ID NO: 103896 - protein, 59 aa, Oryza sativa
  unsure (1)..(59): unsure at all Xaa locations
  Clone ID: PAT_MRT4530_101282C.1.pep
GPAVCIGALFALFNADMAIGTIVXRSSLTLSPADMPAPFAVITRPPQHGARLTLKNIHP

SEQ ID NO: 103897 - protein, 52 aa, Oryza sativa
  Clone ID: PAT_MRT4530_101283C.1.pep
CYGCIGCSSWLGDLPLRVLCLLSRALPFSLGRAYRRGFLSDPLPASCFPRVR

SEQ ID NO: 103898 - protein, 107 aa, Oryza sativa
  Clone ID: PAT_MRT4530_101284C.1.pep
WPPPLLSIARGKLHLPPPLEKVKKMSPFPFLRPVETWLRKKRIEVRRRKKDRKEKGLPEFAKVSEGGRVIGDPPPKPVTNGWAPGGLPPPVAGEENFFFSFTSVFRQ

SEQ ID NO: 103899 - protein, 163 aa, Oryza sativa
  Clone ID: PAT_MRT4530_101285C.1.pep
MKGTMQGVDCLPRVPHSWSMVGKGLTGDKVAVRTGFVPERIGDQSASNTETILIWFRLVTTMFKMPPVRLKVETLVSASLEKRQPALLLPTWPWWWMMLLQLQQPLLTTSGLDAATNCARAVPSFDRDRPNFLSTSKKHNHELQLINWSTPPALPTDRVIVDY

SEQ ID NO: 103900 - protein, 536 aa, Oryza sativa
  Clone ID: PAT_MRT4530_101286C.1.pep
MAAAAAAMATATSATAAPPLRIRDAARRTRRRGHVRCAVASGAAEAPAAPGARVSADCVVVGGGISGLCTAQALATKHGVGDVLVTEARARPGGNITTAERAGEGYLWEEGPNSFQPSDPVLTMAVDSGLKDDLVFGDPNAPRFVLWEGKLRPVPSKPGDLPFFDLMSIPGKLRAGLGALGVRAPPPGREESVEDFVRRNLGAEVFERLIEPFCSGVYAGDPSKLSMKAAFGKVWRLEDTGGSIIGGTIKTIQERGKNPKPPRDPRLPTPKGQTVASFRKGLTMLPDAITSRLGSKVKLSWKLTSITKSDNKGYALVYETPEGVVSVQAKTVVMTIPSYVASDILRPLSSDAADALSIFYYPPVAAVTVSYPKEAIRKECLIDGELQGFGQLHPRSQGVETLGTIYSSSLFPNRAPAGRVLLLNYIGGSTNTGIVSKTESELVEAVDRDLRKMLINPKAVDPLVLGVRVWPQAIPQFLIGHLDHLEAAKSALGKGGYDGLFLGGNYVAGVALGRCVEGAYESASQISDYLTKYAYK

SEQ ID NO: 103901 - protein, 576 aa, Oryza sativa
  Clone ID: PAT_MRT4530_101287C.1.pep
MAAAAAAMATATSATAAPPLRIRDAARRTRRRGHVRCAVASGAAEAPAAPGARVSADCVVVGGGISGLCTAQALATKHGVGDVLVTEARARPGGNITTAERAGEGYLWEEGPNSFQPSDPVLTMAVDSGLKDDLVFGDPNAPRFVLWEGKLRPVPSKPGDLPFFDLMSIPGKLRAGLGALGVRAPPPVCVLSPLCILDSLVKFDCAERFRRRFQGREESVEDFVRRNLGAEVFERLIEPFCSGVYAGDPSKLSMKAAFGKVWRLEDTGGSIIGGTIKTIQERGKNPKPPRDPRLPTPKGQTVASFRKGLTMLPDAITSRLGSKVKLSWKLTSITKSDNKGYALVYETPEGVVSVQAKTVVMTIPSYVASDILRPLSISVVIEFGLVIYLSDAADALSIFYYPPVAAVTVSYPKEAIRKECLIDGELQGFGQLHPRSQGVETLGTIYSSSLFPNRAPAGRVLLLNYIGGSTNTGIVSKTESELVEAVDRDLRKMLINPKAVDPLVLGVRVWPQAIPQFLIGHLDHLEAAKSALGKGGYDGLFLGGNYVAGVALGRCVEGAYESASQISDYLTKYAYK

SEQ ID NO: 103902 - protein, 51 aa, Oryza sativa
  Clone ID: PAT_MRT4530_101288C.1.pep
RVSGGKKDSSAKSCGSLKFSTKETEACIGFGYITKTPTGVLTAQSVGQPPF

SEQ ID NO: 103903 - protein, 63 aa, Oryza sativa
  Clone ID: PAT_MRT4530_101289C.1.pep
RKTRDSMRAARSFLFFLFKNSGVHGGVPITIHPNVHQNARNMKQHMAMGEAGLRYNSLNQCCS

SEQ ID NO: 103904 - protein, 173 aa, Oryza sativa
  Clone ID: PAT_MRT4530_10128C.1.pep
MAASGSSTVRGSHVEGSMLRHPRHASSSSTGQIRFTPSSLLPLVYYPDCGEQIVRYVSRSKKNPNRVYYKCSNRTERNAPCDFWYWKECYQKYLIDHGLLNGDASREEIKGDSSEEDEVEDLGSKKKLIDVVLMMRSEVKQQTLYLKIAAFGIVVFGAVLLGMIAVVVAKGFL

SEQ ID NO: 103905 - protein, 362 aa, Oryza sativa
  Clone ID: PAT_MRT4530_101290C.1.pep
MDGEIGEDMLTEILVRLPYKSLARFQCVATSWRRLISGDYLRRRLPLITSGVLYQEGRGGGGGGGGEGRRRQAYTYACASGGGDHGGGVAEADMGFFPGHETSTIIDGCNGMLLYYASQPAAAFHVVNPTTRRWARLPPPRGKTLLSVLAFDPSASPHYRVVCFTGWLPRGASVEVFDSEGGAWRDHELDFGLDTDAMSATMHYFDGAIHVLAYSGHVVRIDLGTMACAVTALPAPVSCRARAGHCRGRLRYASSDGTRLKFWELKNAATSEWALKHELGVNDLVAGEASGACQAVTFLFMAFHPDREMVYLWTPWKLVAFDMEKRRVEEEWEVGPEKEKEGAHLIQIWLFPFSRHLANSLA

SEQ ID NO: 103906 - protein, 243 aa, Oryza sativa
  Clone ID: PAT_MRT4530_101291C.1.pep
MAMTLRFPAGGATSVPAAMPHRVPMATAPSRLPATVAMALISTPSAAIRLTPINSVTHFDVLRLRARRTDGEDDVSALPEIDGAASALPCTASTASPRSCVPGFPNTQSAFPNTRLSLLGWILKLVQERFSGDPSLLSSLLVLLIGGWQTAYFKEAVERRIKGSMRIPPCILTIFTFCAAVATLLYKAVKASEELDGIISHLIKKFEKLLESHDVKTQSEKLPEPREAEAKSQAKEVKTQDKS

SEQ ID NO: 103907 - protein, 388 aa, Oryza sativa
  Clone ID: PAT_MRT4530_101292C.1.pep
MRHPGAGGGSGDAGFVRADQIDLKSLDEQLERHLGRPAERAASQHGGSGSRRGESARLGLGEEPPQAPHHQRRREDWEIDPAKLVIRGVIARGTFGTVHRGVYDGQDVAVKMLDWGEDGHRSEREISSLRAAFAQEVAVWHKLDHPNVTKFIGAIMGARDLNIQTEHGHFGMPSNICCVVVEYLAGGALKNFLIKNRRRKLAYKVVVQLALDLARGLSYLHSKKIVHRDVKTENMLLDKSRTVKIADFGVARIEASNPSDMTGETGTLGYMAPEVLNGHPYNRKCDVYSFGICLWEIYCCDMPYPDLSFSEVTSAVVRQNLRPEIPRCCPSSLANVMKRCWDANPDKRPAMAEVVSMLEAIDTSKGGGMIPSVYVGGYLSCFGRRHDP

SEQ ID NO: 103908 - protein, 79 aa, Oryza sativa
  Clone ID: PAT_MRT4530_101293C.1.pep
MSMSPSLPLTRSHRRLDLVRPPRLLENEQVREVEVEDDARGEGKRRLNGDGTFGEVKADDDQQILCPPHRCHHRLHVAR

SEQ ID NO: 103909 - protein, 545 aa, Oryza sativa
  Clone ID: PAT_MRT4530_101294C.1.pep
MTTAVLRPSPPVATLLGRCRTARCLAQLHARIVRLGLHNHHALLARFAAACDALSCPSVAASLLSVAVPVRLRNAVLASLARHAPLRDALAQFNLLRGGASRPDAFSFPPLLCACARASSLPTGASLHAAAIRLGVDADLFVRTALIQFYGRCGAAAAARALFDSLTNPSEVSWTAIVTAYVNSGDILTARELFDQIPHRNVVHWNAMVDGYVKCGDLEGARKLFDEMPERTPAAYTSLIGGYLNAGNMGAARTLFDKLEDRDLFAWSTMISGCAQNGYPGEALRIFNEFQKQEICPDELVIVGLMSACSQLGNITLARWIEGYIMIYPIDMNNVHVMAGLINMNAKCGNMERATLLFESMSVRDVFSYCSMMQGHCLHGSASKAVELFSQMLLEGITPDNAAFTVVLTACSHAGLVEEGKRYFDMMKNEYMIVPSGDHYACLVSLLGRFGMLRDAYELIKSMPGEPHPGAWGALLGGCKFHCDIELGKIAAKKLFEIEPENAGNYVSLSNIYANIDRWGNVSETRAEMTGRGITKIAGCTLVLQ

SEQ ID NO: 103910 - protein, 39 aa, Oryza sativa
  Clone ID: PAT_MRT4530_101295C.1.pep
MASASDGGFSPCVSRRLPTDARAVREKAASGGEFTVEKR

SEQ ID NO: 103911 - protein, 424 aa, Oryza sativa
  Clone ID: PAT_MRT4530_101296C.1.pep
MSLHLLLAVSLCVALASSLPWAAASANGNGNGKPLVAAITKDAATSLYTVPIKDGRPLVLDLAGALVWMSCAAAHPTLECHHHFCMHAHSYHPPGCPHNGYGRADVEDPFRCKCTAHPYNPFSGESATADLTRTRLSANATDGKNPLYPVSFAAVTSCAPDSLLAKLPAGAVGVAGLARTRLALQAQVARSQKVANKFALCLPSGGGGDGVAIFGGGPLFLLPPGRPDVAATLAGETPLHRNKDLPGYFISATKIAVNQEQVQLYTQEPLVVELCTRIPYTALRPDVYRAVVDAFARATAGRKRVTPPPPPAAPFELCYDSRDLGSTRLGYAVPQIDLVLEGGKNWTVFGGNSMAQVSDNTACLAVVKVKGEKGSPPPPAAIIGGFQMENNLVVFDEEKQRLGFSGLLWGRQTTCSNFNFTLAA

SEQ ID NO: 103912 - protein, 87 aa, Oryza sativa
  Clone ID: PAT_MRT4530_101297C.1.pep
MDSRTTGTEESTESKPRSSVPSTAAKRPEHQDDMKKTSHLKDLEALGPLEVFRADMDEEGSFDDAVAGCDYAFLVAAPVNFQSQNPE

SEQ ID NO: 103913 - protein, 93 aa, Oryza sativa
  unsure (1)..(93): unsure at all Xaa locations
  Clone ID: PAT_MRT4530_101298C.1.pep
TIRLMYEWAKNLELARXIGPKFRSLRMRAKEEAACRNCARSAQPMVRPNNWVRPNAPQLRLIQGSPGRLRWLPNDGWRVLPTIPTVTTVIGRL

SEQ ID NO: 103914 - protein, 67 aa, Oryza sativa
  Clone ID: PAT_MRT4530_101299C.1.pep
FDFLSPPAPYTQQSSAANHLLLFFLNLLISKSMQMQTDISPPRFQPFSPSPRLLTTTINHLILLHTH

SEQ ID NO: 103915 - protein, 208 aa, Oryza sativa
  unsure (1)..(208): unsure at all Xaa locations
  Clone ID: PAT_MRT4530_10129C.1.pep
PPPQPPPRPPPAPPHPPPPPPPPPRPPPPPPPPPAPPPRPPHAPPPPPPPPPTPPPPHRSPPTPPRAPTHPPQRGSPPPPRPPPPHPQPPLPAQPPPHPPPPPPPPMAPHPPPAHGAPAAPPPXPTPHPPTAPPPWPPHPPSRLIPRIPLDQWTQIDALVSAPPPLPSAPPPPAMPPMAPLAAAVLLWSPPCPLSSSMAFFLGVPSAP

SEQ ID NO: 103916 - protein, 1258 aa, Oryza sativa
  Clone ID: PAT_MRT4530_1012C.1.pep
MSQESKLDLLLKVVEENERKRVAAKERTRADFADLKKMVEARLPVVEKKVETLSVSVQSLSQKVELMEGSMLKSEPPTEGIGNNASWLAICSRFTRDRQEALIRQWFHAQQSSTVAEYVENFDKIMHQLMAYDSALTPVYFVTKFIEGLRDENRGVVMLQRPQDLDSACSIALLQEEILDSCKPTVSKRADSPSVYKQVPRFSSFIPATPGHKFFPGSSSDGGKVTESTKPKEDRVASLKAYRRSKGLCFVCGERWGRDHKCATTVHLHVVHELLEALQSESYSENDTSPEGTKEQDEGTLMAISQQALWGTESSKSIRLRGWIQGTEILMLVDSGSSYSFIDIEIGSTLSVITNLRQPVIVKIADGGMDWLEQFSPMKVDWVNKWLEIMLEGKLITLQGITTQTTICPPISTDQCLGMARNGSLMYLIQLNSMFQTESAEIPDSVRKILDQFKSVFEEPKGLPPKRICDHSIPLIPSAKPVNLRPYRYNPALKDEIESQISEMLHTGVIQPSQSAFASPALLVRKKDGTWRLVIDYRQLNAITVKSSYPMPVIDELLDELSGAKWFSKLDLRAGYHQIRMKEGDEYKTTFQTHIGHYEYKKYQWQVKLSKCSFAQQQLTYLGHIISAAGVATEPIKIQEVVNWVTPANQKKLRGFLGLAGYYRKFVQGFGIISKPLTNLLRKGVPYKWTQETELAFQQLKQALVSAPVLALPGFSKPFTVETNASDSGIGAVLSQDKHPIAFVSKALGPRTKGLSTYEKECMAILLAVDHWRSYLQLGEFIILTDHHSLMHLSDKRLHTPWQHKAFTKLLGLNYIICYRKGTSNAAADALSRKFQGDAELSIISNCTPSWLLDVVKGYEQDSHATELLTALALQADSKPGYQLQSGVIKYKGRIWIGNNAQLQWKLLTEFHASPLGGHSGFPVTYSRLKKLFAWPGMKSQAKKFVQQCQICIQAKPDRAKYPGLLQPLLVPDGSWEVISMDFIEGLPRSKSFNCILVIVDKFSKYGHFIPLAHPYTALEVAKLFMLHIYKLHGLPLVIISDRDKIFTSQLWNHLFTSSAEYWYNTSYHSSVKASPFEVLYGHAPRHFGISVEACAIPDLQEWLKERKLMQALVQQHLNRANQQMKHMADKKRSFRSFAEGDWVYLKLQPYVQSSVATRANHKLSFKYFGPFQVLQKIGIVAYKLQLPETSNVHPVFHVSQLKAACGFQGDIQSTLPSALSDLQVPLQILDTRVINKGNSAVSQVLIHWSGTAAEDAT

SEQ ID NO: 103917 - protein, 36 aa, Oryza sativa
  Clone ID: PAT_MRT4530_101300C.1.pep
IIEVPPMSQDPLPLVLCHISRQIVTRADHVSDTKWH

SEQ ID NO: 103918 - protein, 301 aa, Oryza sativa
  Clone ID: PAT_MRT4530_101301C.1.pep
MASTAAFLSTLAGSTSLGGATPASGGGSGRSKTARFLRRRRRGGAVRAAVSGTEQAPETTKKKGGGGGGGDERVVQVHSAEELDGALRAAKERLVVVEFAASHSVNSSRIYPCMVELSRTCGDVDFLLVMGDESDATRELCRREGITAVPHFTFYKGAEKVHEEEGIGPDQLAGDVLYYGDHHSAVVQLHSRADVESLISDHRGEGGKLVVLDVGLKRCGPCVKVYPTVVKLSRTMADTTVFARMNGDENDSCMEFLRDMDVVEVPTFLFIRDGDIVGRYVGSGRGELIGEILRYNGVKVT

SEQ ID NO: 103919 - protein, 87 aa, Oryza sativa
  unsure (1)..(87): unsure at all Xaa locations
  Clone ID: PAT_MRT4530_101302C.1.pep
HRTPSSSCASPRLESSAAPGGAGASAXRRGGXWVCGAGXRDTRKGRAEGRERGGRPVPRRRRRQWREAPFAACGEAAGIWRWERGEE

SEQ ID NO: 103920 - protein, 102 aa, Oryza sativa
  unsure (1)..(102): unsure at all Xaa locations
  Clone ID: PAT_MRT4530_101303C.1.pep
RSCHAWALLRSDLEGRICSQVLHQGHVFVFHEGLSHLQLNLSPQYGTVASPALSTQEFGVITIPNAVYVSMPPISYDXLIKAFVVDKEIIVLLQDLFYKNFY

SEQ ID NO: 103921 - protein, 64 aa, Oryza sativa
  Clone ID: PAT_MRT4530_101304C.1.pep
MPMAWALEKFVCLCVWMIHLLPYKQTNKEGAMWWQAGIAASWGVWSVTSLSAPNDLRLPCDDVV

SEQ ID NO: 103922 - protein, 87 aa, Oryza sativa
  Clone ID: PAT_MRT4530_101305C.1.pep
IPGVPAVPVHVEAHVVPFAGVVADVAWYVHGFGSQRGVHRQLVIPPSEDADRSARAAGCVRPVTAAASPCTNPSHWSTTPTTPLGCR

SEQ ID NO: 103923 - protein, 101 aa, Oryza sativa
  Clone ID: PAT_MRT4530_101306C.1.pep
MDSPPPPREEVVVFAVNSERFELRRDGGDPGESLLEFLRSRTRFTGAKLGCGEGGCGACVVGGLGLRRVGRPGSARRGQMMPYLEARSPTSHEDDLTVCIE

SEQ ID NO: 103924 - protein, 392 aa, Oryza sativa
  Clone ID: PAT_MRT4530_101307C.1.pep
MRPLYLRSSGSFKKLLLSISHRGAKNGNGDAAAKERYTPAAAAAAPESPRKPAWRCFSYEEIHRATNAFHEGNLVGKGGSSEVYRGELPDGRAVAVKRLMGAWACERRERDFLAELGTVGHARHPNVCALLGCCVDRDLYLVFHFSGRGSVSANLHDEKKAPAMGWAVRRAIAVGTARGLEYLHKGCQRRIIHRDIKASNVLLTDDFQPQISDFGLAKWLPSEWTHRAIAPIEGTFGCLAPEYYTHGIVDEKTDVFAFGVFLLEIMTGRKPVDGSHKSLLSWARPFLNEGRIESLVDPRIGGDYDGEEARRLAFVASLCIRSSAKWRPSMTEVLELLEGVEIRQERWTMPEAVEDDDDEELWRFDDLDDEDDEDEEEFNTASPSSCSSSLSN

SEQ ID NO: 103925 - protein, 324 aa, Oryza sativa
  Clone ID: PAT_MRT4530_101308C.1.pep
MSYSRGSRSVDSSDVENPGNNLYVTGLSARVTDRDLEKHFSAEGEVIDASIVLDPWTRESRGFGFVTMATVKEADLCIKYLDRSVLEGRVITVEKAKRRRGRTPTPGRYLGTKSSCVTPARRYSPSYSPVERDRYSSRYSPERERSYSPYGRRRSYSPYNRRRSYSPYERRRSYSPHERRQSYSPYGRSPSPYGRRRSYSPYDTRGSRRRSYSSYRGSRYRSRSPYRYRRERSCSYDHSVSPYYRRCYSPSARGRSYSRSVSPQRSYSHSCSPDSQRSGSYSPRKRYSERKPSRSRSSGKRHSRESYSHSRSSYSRSVSRERSE

SEQ ID NO: 103926 - protein, 73 aa, Oryza sativa
  unsure (1)..(73): unsure at all Xaa locations
  Clone ID: PAT_MRT4530_101309C.1.pep
QGRGVFGMALXGCPETFQSVRSPFEQEVATAGEAQSSMQKMRDEHQQLHQFLPKVMYRSAAGVATVYTCDLCV

SEQ ID NO: 103927 - protein, 786 aa, Oryza sativa
  unsure (1)..(786): unsure at all Xaa locations
  Clone ID: PAT_MRT4530_10130C.1.pep
MDLLRSHLHKVRIPEPGSRIHKDECCVSFDTPRSEGGLYVDMTSFLGFGREHVAWNYEKSGNPVYLHIVQRRKPEPDDEADRPLKKPTLLAIGVEGGFTDQEPEYDEAFEIVILPEFXSLPFPSIDLPEKVRIAVDKVILAESADRKQQLASWVADKKKVSAHAMDLKQLDNGVIVPPTGWKCSKCDKTENLWLNLTDGMILCGRRLWDGSGGNNHAIEHFEQTKYPLAVKLGTITADLEAAEAXVFSYPEDDSVEDPLLAQXLSHFGIDFSSLQKTEMTTAERELDHNTNYDWNRIQESGKDAELLYGPGYTGLVNLGNSCYMAXVAKMPNFSTALVILALEIXCLKAVFAIALADPTWDLNMQMTKWAHGMLSGKYSVPNLWQKEGIHPRMFKTVIAAKDPEFSSMRQQDALHFFLHLIDQVDQSNNGTNXSDPFTGFKFIIEERLQCPSGKVSYNKRSDYILSLNIPLHEATNKEQLEAFHEKKAAMDLDGKEVANGEIVRPRVPLEACLASFAGAEEQLRLLAFEFYSTALNSKTTAIKTAGFKTFPDYLVLQMRKFVMEAGWVPKKLDVYVDVPDIIDISHMRSKGIQPGEELLPEGASGDNKAEPVHPVASEDIVSQLASMGFNYLHCQKAAISTSNTGVEEAMNWLLSHMDDPDINDPISKDSQAAEQTVDETSVQTLVSFGFQEDVARKALAASGGNIERATDWIFSHPEAFSSVPTDSSTSNMEDDDAHIPDGSGRYKLMAFVSHMGTSTHCGHYVAHVLKDQGYGIPVFLSKDIKL

SEQ ID NO: 103928 - protein, 354 aa, Oryza sativa
  Clone ID: PAT_MRT4530_101310C.1.pep
MSYSRGSRYESDSYSTSPRRSSRSRYRSRSRSVDSSDVENPGNNLYVTGLSARVTDRDLEKHFSAEGELTVLQVIDASIVLDPWTRESRGFGFVTMATVKEADLCIKYLDRSVLEGRVITVEKLLAKRRRGRTPTPGRYLGTKSSCVTPARRYSPSYSPVERDRYSSRYSPERERSYSPYGRRRSYSPYNRRRSYSPYERRRSYSPHERRQSYSPYGRSPSPYGRRRSYSPYDTRGSRRRSYSSYRGSRYRSRSPYRYRRERSCSYDHSVSPYYRRCYSPSARGRSYSRSVSPQRSYSHSCSPDSQRSGSYSPRKRYSERKPSRSRSSGKRHSRESYSHSRSSYSRSVSRERSE

SEQ ID NO: 103929 - protein, 601 aa, Oryza sativa
  Clone ID: PAT_MRT4530_101311C.1.pep
MMGALQQQSNGHGHGVLLLAEAGYAEVDPTGRYGRFNEILGKGSSKIVYRGFDEWRGVEVAWNQVRLRDVVRGGGELERFYGEVHLLAALRHRGIVRLHAYWVDAPRRALNFVTELFVSGTLRQYRERHRRVSAAAVRRWCAQILDGLAYLHAHSPPIIHRDLKCDNIFVNGNQGEVKIGDLGLAAFRRGGGHARCVGTPEFMAPEVYDESYDELADVYSFGMCVLEMVTLDYPYSECSNPIQIYKRVISGIKPAALYRVSDPVVRQFIERCLAPAARRPAARELLDDPFLLPLEDDGFFSGDGGDGHGGFGVGYYNLMYNYLHQPACIDDHHACSNGGLSPSNSVGDNDVDAAVQRGDDDGDNWLRDIHMLFDEDDDDAAAADANERVGGVDITIKGRRTDDGGVYLGLRIADKNGTGRGRIICFRFDTEADTAMTVAAEMVAELDITDHEVTRIAQLIDGKVAALVPGWRPGPATDDDDDDDLVGGGDDPDAPGGAAAACCKNCRPAASSSSSCGSLVDFMSSAAAAERHGCRRCAELHGRFEEITFQADDDEEEQHLQGSSSDTGGSNHEQHAMGKDKEVMNINGIAQDGTVQGSEQP

SEQ ID NO: 103930 - protein, 35 aa, Oryza sativa
  Clone ID: PAT_MRT4530_101312C.1.pep
GATAVKLCRRHRRGGGGWRQRNSHRRRGRISWRTC

SEQ ID NO: 103931 - protein, 299 aa, Oryza sativa
  Clone ID: PAT_MRT4530_101313C.1.pep
WVDAPRGALNFVIELFVSGTLRQYREKHRRVSVAAVRRWCAQILDGLAYLHAHSPPTIHRDLKCDNIFVNGNQREVKIGDLGLAAFRLSAAGGGGDHTRCVGTPEFMAPEVYEESYDELADVYSFGMCVLEMVTLDYPYSECSNPIQIYKRVISGIKPAALYRVSDPVMRQFIERCLAPTARAARRPVPAAARRRWLLLRRRRWPWQCWRCLLQFDVQLPAPACLHRRSPCEGIDKVWVGRTRRRPAGGGHGGVPAGAAAAALPFSRVTAATTSAVGFPPSSRPATSSPPGRPYQRGIK

SEQ ID NO: 103932 - protein, 105 aa, Oryza sativa
  Clone ID: PAT_MRT4530_101314C.1.pep
MHVGPTIRHGPIGLGDRAIMVSADQGDGPNGLVRVGHNNGRAPPQCSFSNIQHYPWRQLLHLSISMSANSTTSKSLKYETEKTTYTCMQDWAHSRQHNTGLSIAL

SEQ ID NO: 103933 - protein, 46 aa, Oryza sativa
  Clone ID: PAT_MRT4530_101315C.1.pep
SSMIVYISISGSLLSLENQNLINRVRCSYICSASMCVCVCVSLIVY

SEQ ID NO: 103934 - protein, 113 aa, Oryza sativa
  unsure (1)..(113): unsure at all Xaa locations
  Clone ID: PAT_MRT4530_101316C.1.pep
ISEEMFKGVNTITSSLYNGKHLKIMTLGDGQVFSSEYHNXFNFINGKLLKDTSALLSXLPSGGGGAMILARVLLGSPGLWMTGMPAVLGRQSLAPVPGGWTPPWPSRPLLVCS

SEQ ID NO: 103935 - protein, 307 aa, Oryza sativa
  unsure (1)..(307): unsure at all Xaa locations
  Clone ID: PAT_MRT4530_101317C.1.pep
MSSPHGGLDDQIERLMQCKPLPEPEVRALCEKAKEILMEESNVQPVKSPVTICGDIHGQFHDLAELFRIGGKCPDTNYLFMGDYVDRGYYSVETVTLLVALKVRYPQRITILRGNHESRQITQVYGFYDECLRKYGNANVWKTFTDLFDYFPLTALVESEIFCLHGGLSPSIETLDNIRNFDRVQEVPHEGPMCDLLWSDPDDRCGWGISPRGAGYTFGQDISEQFNHTNNLRLIARAHQLVMEGFNWAHEQKVVTIFSAPNYXYRCGNMASILEVDDCREHTFIQFEPAPRRGEPDVTRRTPDYFL

SEQ ID NO: 103936 - protein, 60 aa, Oryza sativa
  Clone ID: PAT_MRT4530_101318C.1.pep
MARGGTMAIEDRGEESGMMVLEVKGGKRRGHAVLANSVGGVGDGGEGVCGWGSFWGELLR

SEQ ID NO: 103937 - protein, 53 aa, Oryza sativa
  Clone ID: PAT_MRT4530_101319C.1.pep
LEPSGGGDRRRGSDVMRWDCSDGGNVEAVAAAVGAKSGTLWPDPVVGDSDRLV

SEQ ID NO: 103938 - protein, 77 aa, Oryza sativa
  Clone ID: PAT_MRT4530_10131C.1.pep
KVFPGWSPPKAFLPFQKAVFLWFLGPSPSPQDKVSPLGDFPCPPHILWERVSGSGPGPLNPLMERGEGGFSQLWTSF

SEQ ID NO: 103939 - protein, 182 aa, Oryza sativa
  Clone ID: PAT_MRT4530_101320C.1.pep
MAPSCAVALTATGSCSTKKASAPDWVEDWRKKASSFGQVTVRWVPMTVVAVMAVSGMVTPDIRQSKWPPKPATCEVGGGLHRSGVADSKVEDGRRDAGVEVGMQEKVVQAWSGRRWREPSGGGDRRRGSDVMRWDCSDGGNVEAVAAAVGAKSGTLWPDPVVGDSDRLETVAVCEVSPVWRR

SEQ ID NO: 103940 - protein, 128 aa, Oryza sativa
  Clone ID: PAT_MRT4530_101321C.1.pep
FDVDGFHPLNIGRLAMQGRDPFFVPCTPKGCMELLHRYGVEIKGKRAVAIGRSNIVGMPAALLLQKANATVSIVHSNTKKPEEITRQADIVIAAVGVANLVRGSWIKPGAAIIDAGINPVDDPESPRG

SEQ ID NO: 103941 - protein, 47 aa, Oryza sativa
  Clone ID: PAT_MRT4530_101322C.1.pep
FEKAEIFCGLYSISTGHTALLSPYHRVLKRSGTPGSGLQVLKITRGA

SEQ ID NO: 103942 - protein, 149 aa, Oryza sativa
  Clone ID: PAT_MRT4530_101323C.1.pep
MASSASSVFAAFDKDGDGKVSASELRGCMAAALGEEVSEEEAAAILATADTDGDGLLDPHEVMRLSAAHQLQEPAEESLRCLREAFDMYPEEEETAVITPASLRRMLRRLGSEHQRLEMEECRAMICRFDLNGDGVLSFDEFRVMMLMA

SEQ ID NO: 103943 - protein, 776 aa, Oryza sativa
  Clone ID: PAT_MRT4530_101324C.1.pep
MPVSTRASAAGGQPWSSAAPAPASAPGRGGARREILTNHHHHGLKEKMRALTLFYEQHKQQLASSQGGGARGRRSIQYAVGEVGGDENGRNAEEEDDVGRKRHDAVPAAVLRENMAPPEERAPPPPPAPPPKSSHVVVFSRQADPTEKENVSHGGIATMSCPIKKAAPALPAPAARKLSLGGGMAARLKTAGEAGAGNGDAAGSRIMVFVRLRPMSRKEKDAGSRSCVKIVNKKDVYLTEFASETDYLRLKRVRGRHFCFDSSFPDTTTQAEVYSTTTSDLVEGVLQGRNGTVFCYGATGAGKTYTMLGTMESPGVMVLAIKDLFTKVRQRSHDGNHSIQLSYLEVYNETVRDLLSPGRPLLLREDKQGTVAAGLTHYRAYSTDEVMKLLQQGNQNRTTEPTRVNETSSRSHAILQVIVEYRSIDGGSIVTRVGKLSLIDLAGSERALATDQRTQRSIEGANINRSLLALSSCINALVEGKKHIPYRNSKLTQLLKDSLGGSCNTVMIANISPSNLSFGETQNTLHWADRAKEIKTKALTTANEEVLRVTDSETDQAKLVLELQKENSELRQQLARQQQKLLTVQAQTLASNASPQQSPAPSAQISTPCSTQRKVKRSILAGNCFNTPDSKRPAAENAQVRDLQRKVKAMEAEIEKMKKEHLLQLKQKDEFIRDLINRKTSNVPEAATCERRVATRASVRKAQKDAAAAGELRSPSHRFTSPVPTAKKRTFWDIGGNSPSTLAVNGRKTRSHVAAETPKGTSMLLQPGFARQRAIH

SEQ ID NO: 103944 - protein, 259 aa, Oryza sativa
  Clone ID: PAT_MRT4530_101325C.1.pep
MASLVIQPKLCVMDKEQILSSHLFALSTFLSEFVTAHQNSPHEFGVLSAGALVVSGSPPVVAWVGDAFACLLAAISRGTEWGFSRGLASSTSCSPPAAVEDGDGARERDKGSYRYGPLGSGTPYSYAWDYDEFLQEVLSSWGNLTVLPLGLKLLRVVPFLGGRGPPFIVQGIPHAPSMRTPPWEGDPPNLDQTAIRAFNRKQGGCASLGGAQRRPPPDTGDTPHGTVGAPRIESGERRSCSAHSPRHVMAGWGPQGSTR

SEQ ID NO: 103945 - protein, 254 aa, Oryza sativa
  Clone ID: PAT_MRT4530_101326C.1.pep
MAIDHESPFKELRLKNRRIMGGGGPEPEEEEAVAHGEQWPRWLSPLLSASFFSQCKVHADSHRSGECNMFCLDCAADADAAAAALCSLCLAHNHRDHHTIQIRRSSYHDVIRVSDIQRFMDIGGVQTYVINSARVVFLNERPQHKAGKGAVANICEVCSRSLLDNFRFCSLGCKVVGCSPHAATAAATATATAARRKRLRHAHAMASTSDSDNSTSPAKRSFTPSTPPPPPTLPPKRRKGIPHRAPFGSLIVEY

SEQ ID NO: 103946 - protein, 65 aa, Oryza sativa
  Clone ID: PAT_MRT4530_101327C.1.pep
MAPPPILPPPLLWLASICNIGLLRLGLCLAAQGARPQPVARPHRCGKPGSSRGRRVFVDNMRIAT

SEQ ID NO: 103947 - protein, 88 aa, Oryza sativa
  Clone ID: PAT_MRT4530_101328C.1.pep
LPMYVQNPLTQGVTVVNMGHYAVHCRKEKMVAPKGLQDSKLIKNTHLCQALNTNIWLNSHHMCVLQIVYQNFLDRGFLFTDFSLQNFL

SEQ ID NO: 103948 - protein, 77 aa, Oryza sativa
  Clone ID: PAT_MRT4530_101329C.1.pep
LIIQSLQSSVRFQVEDTLPFSLQVHHRTRHVQILAASCLYLLYGDLNPSLQHKRGSSLTHASRHESPCPYHFCTRDG

SEQ ID NO: 103949 - protein, 72 aa, Oryza sativa
  unsure (1)..(72): unsure at all Xaa locations
  Clone ID: PAT_MRT4530_10132C.1.pep
KEEKGKKKWKGEKKKRKGXNKGIRNRNEEEDTKKEKRKKKEKENGEVKRRKRKSKKVERKKEHGEKRRKWRN

SEQ ID NO: 103950 - protein, 77 aa, Oryza sativa
  Clone ID: PAT_MRT4530_101330C.1.pep
GISLTSLMDVERGGGFFKPVGGKAMVELDAAPFKKYASMRDEWALKNRYISPGPIQFSGPGSDDSNHTLMLELGAAL

SEQ ID NO: 103951 - protein, 73 aa, Oryza sativa
  Clone ID: PAT_MRT4530_101331C.1.pep
PARPRAPRPCRRGRRAGLPPPRRLAPAAVRKPPMTSPPSVTAPSPRRARGKRGFGWGVVAPTPNNNCCCCRYR

SEQ ID NO: 103952 - protein, 160 aa, Oryza sativa
  Clone ID: PAT_MRT4530_101332C.1.pep
MADAGFIATTCNKTHNAKCVAVLTANPDSADASTVSDLAGVALDLAVAAASDAGALINDRSSRYGGGAPEGEALRACSGAYFDAANDLDIDAHDSLGSGDYAAASRLVSGASGAADTCDAAFAAAKVSSVMVDVDQKMKDRCGVARDLINLLIKFPPSDN

SEQ ID NO: 103953 - protein, 261 aa, Oryza sativa
  Clone ID: PAT_MRT4530_101333C.1.pep
MDEDRAVEAAASAWPGPSRRRRLIEFLLHASTRLDLRPVVKYTALSFFADRLLPSLRRKMGFCGARGGRAVTSWLLEPLRDSNLELFALVAVWIASKIHELKPLSVKSLKALGDRIIADQHFTCRDFANAELVFMEVVEYNIGSLNIAFTYLEELLVQFREISKIGDLLNMDVCMEILDILYETEDSSWLFNSPCQLAASALVTAYAISVPKQRWEFPILPWVTFTTSYDEEEIMKVVLTILMHVLKPDEMKGKGERDFNI

SEQ ID NO: 103954 - protein, 97 aa, Oryza sativa
  Clone ID: PAT_MRT4530_101334C.1.pep
SAPVHLALSSQPSHPEGLLGWAMAETAKSHLSARPVGTELPTVSAIMAGAEVPARKPSRRLAGLDLGRCGQVPPQRQAGWRTRILLEAVVAAAPHLH

SEQ ID NO: 103955 - protein, 240 aa, Oryza sativa
  unsure (1)..(240): unsure at all Xaa locations
  Clone ID: PAT_MRT4530_101335C.1.pep
RLDLRPVVKYTALSFFADRLLPSLRRKMGFCGARGGRAVTSWLLEPLRDSNLELFALVAVWIASKIHELKPLSVKSLKALGDRIIADQHFTCRDFANAELVFMEIISFLFVLWVLXVVEYNIGSLNIAFTYLEELLVQFRVFXIGYIFNIGVCMDXLDILYEXKDSSWLFNSPCQLAASALVTAYAISVPKQRWEFPILPWVTFTTSYDEEEIMKVVLTILMHVLKPDEMKGKGERDFNI

SEQ ID NO: 103956 - protein, 639 aa, Oryza sativa
  Clone ID: PAT_MRT4530_101336C.1.pep
MTSLPLVEDRNCCNSTRNAKRRSQGDSSSEKLPPVAMSTFASPSAAPSAEYAEQFLAEALETKKQIPLGKILLGYLYQMLSNASAKIAIGSVVGASGPWWLLQTWLNLVAMKAVNQPPLTDAEFPSLEPTINDDGEEVTHRRCMSYGEAASTPADSGAKLSAELLKDWLCSFCEGFQKDARVWFAYEDSMDFELPSDFRFEEINSEKFDKSRETTESSPPRKSNSGKDIEYALGLIPKGGGLAPPVIGYHAPKTSSLLQGQLREPANIGRKRKAKASAVDLSALAPKKKAMKKKSKPTDDLPALDPSIEKVLDEEEIEEDVDQAAARLSDSGDKTPSASRKRTPPTPAAPAHFSRKKKTAVKKKSAPAPYRQVPSAPPPSPPGQPISSDRTPSAAGSHNVEEEEQPAAPAIPVLADLFSFDIKDYFDEEAEEETTSKTLAPPDEDVKRTLEDISHRLESSLDNLVADCGSIRARFAEIQALVPDDLANIISPAVYLEQHQFKLEKAKQRIADRRERKDIEATIQANRQLVHKEKAKLDQLSIGPIQSNIDQFEARKIDLIAQFEECNAELDLEKQKLANLPNAVEEQTSRLRSAIKKVADMTKSLKVIPGTDAQDIQPIEEVEQIRQQAVSAIQRYLSG

SEQ ID NO: 103957 - protein, 135 aa, Oryza sativa
  Clone ID: PAT_MRT4530_101337C.1.pep
MGRPPPPPLGTTAAACRHHQPTTPSTFSPDLANSGEADGEGEQDEKGTGFAPPRRSWGGRRSHVPLLAVWKRGTEGEGSSQPARWDRGAKGGGSQQVQEGEGEERAAELEGVRRTSQGVRVSHRADKEKADARHG

SEQ ID NO: 103958 - protein, 456 aa, Oryza sativa
  Clone ID: PAT_MRT4530_101338C.1.pep
MAEVDTKLLEVGLRFKNPYKGWLFWVAYGGRTGFDVRKRCTNVSKMDGKVTSCRYVCFNEGHRTKRQTEHVTRCFRADTRTDCKAQMVISLDRGAGNYEVIDVLEHNHPLHLPETFHLMKSQRKISKLQAFEIETADDSSIRPKAAHELATRQVGGPLNLSYSCRDRQNYLQSRRQRELAFGQNAVKHLSPVKGKEDDEGEEEDEGEEESHVRFLGVRSTQLSESFNNALKNHLKSDFDIIRFLKHFERSVQDKRDKELQSEFEARKKLPRRLMCTPMLVRANQVYTPVIFEAFQSEYERSMAACARVLDGEHRYAVVVGNLLGELEEKLNLLSAGGTHEPYEDKENIDPNAQHGDDLLSATQLNKKEVQSNKSRRIRTWIDKLRKGKRNNPKSAKPTKKGVKKNDALQPQVQVKDDGSHKERDVELQQYNIISDFTHLVTAPSCDDDILCDQDLF

SEQ ID NO: 103959 - protein, 92 aa, Oryza sativa
  Clone ID: PAT_MRT4530_101339C.1.pep
PPVRSTTTGAAPTPRCIGYRICRLFAGARSGAVLRRQRSGRPDFRRSKAEVKAGDGSDRETHRPSSRGRGGRNPLNILCARVVASPSSQQLA

SEQ ID NO: 103960 - protein, 100 aa, Oryza sativa
  Clone ID: PAT_MRT4530_10133C.1.pep
ISVKIGGADPEKYDRRAEELAFMIDSGLHDRCMSITLQCVRQMFDFNEDKSSLTHEEQRKLKQQEILEDDSDEEYDEIIQDSGEQEVKQSTLSEWDIVHL

SEQ ID NO: 103961 - protein, 337 aa, Oryza sativa
  Clone ID: PAT_MRT4530_101340C.1.pep
MECEPEELQFLGMVGIYREAASILRAHRPLFARIAAAFVLPLSLLFLLHIAISHALFSHIDSDDSALDSAAPGTPAQRRLLHRLADDWLALLLFKAAYLLALLLFSLLSTAAAVFSVASVYSAKHDALSFPRVLSVVPRVWRRLAATFLAAFLLLFAYHLLFVAVFVALLVAADSGSGLAALLAFLLALAYIAGLVYLSVVWHLASVVSVLEDYKGFEAMRKSKALIQGKLWTASAIFFVLNVVFIVVEVAFRAWVVRGATHGLGAGSRLLLGLAMLAALCAVVMLALVVQTVVYLVCKSYHHESIDKSNLSDHLEVYLGEYVPLKASDVQMEQFNL

SEQ ID NO: 103962 - protein, 55 aa, Oryza sativa
  unsure (1)..(55): unsure at all Xaa locations
  Clone ID: PAT_MRT4530_101341C.1.pep
MTMITPSSNTTHYREXWYACRYRSGIPGSTHASADAWADAWVQKENSDGNLKIKS

SEQ ID NO: 103963 - protein, 190 aa, Oryza sativa
  Clone ID: PAT_MRT4530_101342C.1.pep
SVEYHPCDVDDVHKPSSAVRSGGMSEALDLNYSNQAPQSSFVQPAAESNAREIGGSSMNGGEEVLNAETAPAFARDQLSLGVSGGSVGMGASHEAEIHGVDVSEHKTDSVVGDVEPAPELTENMGNTGESSPGPGMMDEFVPEDVGRERTSGDSQDVASRVYSGIDLSKDEVTQIAKLPANDDYDPGDDL

SEQ ID NO: 103964 - protein, 66 aa, Oryza sativa
  unsure (1)..(66): unsure at all Xaa locations
  Clone ID: PAT_MRT4530_101343C.1.pep
QLGRIQFTWQDDCGDMREGGAMLQVESGGRNYKDSGXSLVYGEPDGGLSGQLGVSGEKGSTQVLVH

SEQ ID NO: 103965 - protein, 240 aa, Oryza sativa
  unsure (1)..(240): unsure at all Xaa locations
  Clone ID: PAT_MRT4530_101344C.1.pep
MREEVRSSSAAPPDPPPRSASPPATPVASSAGASSPPAQTNAASIDWLGGEPISKVESSSQIAPHAPRPSLSTNAAGAAVDFSQPSCRPWERGDLLRRLATFKSSTWASKPKAASSLACARRGWVNIEMDKIACESCGAHLIFTALTSWSPAEVANAGEAFAEQLDASHLGDCPWRGNSCADSLVQFHLTPSALXGGFKDRCDGXLQFISLPVIAKSAIESMKLTKSPQIDRVLSQAITI

SEQ ID NO: 103966 - protein, 232 aa, Oryza sativa
  unsure (1)..(232): unsure at all Xaa locations
  Clone ID: PAT_MRT4530_101345C.1.pep
MTTSITTRILARYPADPDQIHSRLPEHKQNSYSASVKKDKGKGKIHVKDSGCSMRSPLLDCSLCGATVRIWDFRSVPRPSHLSINNIDAPDMRKGVLTRGISATSGINGWVAEGTERENVEGRGEAGTDEGKSLSNAQVDLNLTMAGGLPSTHSVMPSMHDHFNDGGMGRDLMIGQPTXSELGGFCSSFESRGXPSQESRILRKVGAQLDKPLIXLHSADSIRRTCIDRDRD

SEQ ID NO: 103967 - protein, 534 aa, Oryza sativa
  Clone ID: PAT_MRT4530_101346C.1.pep
LCKCATFYTINNEERIEAGTDEGKSLSNAQVDLNLTMAGGLPSTHSVMPSMHDHFNDGGMGRDLMIGQPTGSELGGFAASFESRGPSSRKRNLEEGGSTADKPLNRLHPADSIEGTVIDRDGDEVDDGAQDSDIRSNKRPRGFNLFDVNQPSSSGAGPSRNLSFDLDIDVNKFDTYKAEGPSALHNPSASMRASSVIAMDTVHSAEENSTESPSSAVRSGGMSEALDLNYSNQAPQSSFVQPAAESNAREIGGSSMNGGEEVLNAETAPAFARDQLSLGVSGGSVGMGASHEAEIHGVDVSEHKTDSVVGDVEPAPELTENMGNTGESAPGPGMMDEFVPEDVGREEPQGDSQDVASRLVGRADSGSKICGSTKADSVESGEKMSHGIGHESNLQHSLSRNARVYSGIDLSKDEVTQIAKLPANDDYDPGDDLAANGGNDYEAGLPEFDPISHHNNYCPWVNGHVAAACCINTGSSTSTGLSGWQLTVDALETIQSLAQAQNQIMPSDSAASLYKDDHVAPSRKLLKRASHSKC

SEQ ID NO: 103968 - protein, 71 aa, Oryza sativa
  Clone ID: PAT_MRT4530_101347C.1.pep
LVGLGPNYKVREPLRLPAFLGTWPGFSNFFFPFAGPPDPFGHYHFPPQVFLNQILLNEGIRLGPGPILFSG

SEQ ID NO: 103969 - protein, 426 aa, Oryza sativa
  Clone ID: PAT_MRT4530_101348C.1.pep
MATATATSLASSAAHRRLPPSRSAASSILRAPNRGRLCPGSPSVLRASSSSPSSPQPTAGGDEGEEEEEGRRLSKQSSWEAKDSEGDDYLYRLGKEADNMNIAVGARSGIVDDLFVGNFLGKDSDIVFDYRQKATRTFEYLQGDYYIAPLFLDKVGIWGGKGQGKTFQTELIFRAMGVEPVIMSAGELESEKAGEPGRLIRDRYRTASQVIQNQFTSMIPVFTIFFMKKSTFCRKRWILEFYFSSNIWVSIGQKWRESDVTHRVPIIVTGNDFSTLYAPLIRDGRMEKFYWQPGREDIINIVHRMYIKDGLSFEDVSKVVDTFPNQALDFYGALRSRTYDRAILQLLKMYFLANTVEDVLWVEEIGGHEQLNEKLLKRKKGEELPTFIPPKTTVDALIESGDSLVKEQELIMNSKLSKEYMKNLDD

SEQ ID NO: 103970 - protein, 107 aa, Oryza sativa
  unsure (1)..(107): unsure at all Xaa locations
  Clone ID: PAT_MRT4530_101349C.1.pep
AXXKGXCFKEQVLRDSKEXXAXRXXRXREAEEAQGAGVXVVELRRRTRSFCMRKGSHRKVGCSTRKNNRGMILVSFSLSNYMLLKPHICVASFAAATVVFNVDIFFS

SEQ ID NO: 103971 - protein, 141 aa, Oryza sativa
  Clone ID: PAT_MRT4530_10134C.1.pep
FRAAGADGYHRRHSTHGNHRRRSVDGTAAVLLRSPRATGSNGSRCLLGPPQPLRPPPPTGAVGPPPSSAAPSTVKETPSPMPCHLPAATVLAAGQLWRQHGQIWELGGERKRRAGGRGSWDLGRGPVATVLAAARTCGSWL

SEQ ID NO: 103972 - protein, 42 aa, Oryza sativa
  Clone ID: PAT_MRT4530_101350C.1.pep
LLEQMRFLAMIVPHRHAECLLPITQHIRCDLVILRLCKKNAS

SEQ ID NO: 103973 - protein, 58 aa, Oryza sativa
  Clone ID: PAT_MRT4530_101351C.1.pep
GAHGWCEPGVVTQHGTCAGTGSGVDRRPSISLKGGGALGVEDARPALLCQLRNCHAPS

SEQ ID NO: 103974 - protein, 305 aa, Oryza sativa
  Clone ID: PAT_MRT4530_101352C.1.pep
QQIVEGTPVIGAGAGTGISAKFEEAGGVDLIVLYNSGRFRMAGRGSLAGLLPFADANAIVLEMANEVLPVVKGVPVLAGVCATDPFRRMEYFLKQLEAIGFCGVQNFPTVGLFDGNFRQNLEETGMGYSLEVEMISRAHSMGFLTTPYAFNPEEAAAMAKAGAHIIVAHMGLTTAGSIGAKTAVTLDDSVKRVQAIADAALGINPDIIVLCHGGPISGPQEAEFILKRTNRVHGFYANIWGTAILHRADEARTSEARPTARRSASESTRSLPTAMGSAAVATDGGPCEEEPAQVALTRKRSGLGP

SEQ ID NO: 103975 - protein, 91 aa, Oryza sativa
  unsure (1)..(91): unsure at all Xaa locations
  Clone ID: PAT_MRT4530_101353C.1.pep
ISMEELXEIMEDLGAGGHDAEELMRLLDANSDGSLSSDEFALFQKRVKLKTKLENKDDEYKEILKQKLQKVDDTGLIHVYRKNLSDKLVLV

SEQ ID NO: 103976 - protein, 179 aa, Oryza sativa
  Clone ID: PAT_MRT4530_101354C.1.pep
PTRPQRIINWMDSTGGLCAAFDFTTKGILQEAVKGELWRLRDPEGKPPGVMGWWPSRSVTFVENHDTGSTQGHWPFPSDHIMEGYAYILTHPGIPTVFYDHFYGKDDSFHGGIAKLMEIRKCQDIHSRSAVKILEASSDLYSAIVDDKLCMKIGDGSWCPSGPEWKLAASGDRYAVWHK

SEQ ID NO: 103977 - protein, 279 aa, Oryza sativa
  Clone ID: PAT_MRT4530_101355C.1.pep
MRDALAVTDAADGGHHSVLVFEAFSASAPGRIDPATGYLLDELTDDCHADYRNLMAAAVRGDFDTCALYADQLKRRCADQFKDGVLGLEHLAAVDSLCEIVARGMGADEPSGTYHINLSGFTFLPDMWAIGQMFPIIPIQCLGERPAIDGVLSDLTSDSDGKVDHFISGRHSLPLHELPVHGTRGYYLGGTYQEALGGLHNLFGGPSVHEHEVFKQRTDGATAAALAKAFGAMPYLSFYPEAAAMARGESSGMSSDSEVSAAGVAEDDDEWEFMRGLIV

SEQ ID NO: 103978 - protein, 702 aa, Oryza sativa
  Clone ID: PAT_MRT4530_101356C.1.pep
MPALAVDAAAPVAHAFACDAARFPAPLLGPAAAAAAVAEKPDAAAWSADLSSALYNVDGWGAPYFFVNDDGDVAVRPHGAATLPGQEIDLAKVVAKAAGPRSGGGLGLPLPLLVRFPDVLRHRVEALNAAFDYAVRSTGYGGRYQGVYPVKCNQDRHVVEDIVEFGEPFRFGLEAGSKPELLLAMSCLAARGNPDALLICNGYKDDEYVSLALIARTMGLNTVIVLEQEEELDIVVDASRRLGVRPVVGMRAKLRTKHAGHFGSTSGEKGKFGLNAAQILSVVAKLKTLGMLDCLQLLHFHIGSQIPTTALLGDGVGEAAQIYCELARLGAAMRVIDVGGGLGIDYDGSHSAQTDMSVAYSLEEYAAAVVAAVGRVCDRKGVAHPIICSESGRALVSHHSVLVFEAFSASAPGRIDPATGYLLDELTDDCHADYRNLMAAAVRGDFDTCALYADQLKRRCADQFKDGVLGLEHLAAVDSLCEIVARGMGAAEPPRTYHINLSVFTSLPDMWAIGQMFPIIPIQRLGERPAVDGVLSDLTCDSDGKVDHFIGGRHSLPLHELPVHGTRGYYLGMFLGGAYQEALGGLHNLFGGPSVVRVSQSDGPHCFAVTRAAAGPSCADVLRSMQHEPEVMFEVLKQRTDGATAAALARAFGAMPYLSFDPEAAAMASGESSGMSSDSEGSAAGAAEEDDDEWEFMRGLTV

SEQ ID NO: 103979 - protein, 338 aa, Oryza sativa
  Clone ID: PAT_MRT4530_101357C.1.pep
MSRYVDPNDRYEPRGRNSRLYVGHISLRTRAEDLENLFSRYGRVRFVDLKNEYGFVEFSDPRDANDARLDLDGRKYDGSDIIVQFARGVERGLGGSRGYKARPAHGSDHCFNCGMEGHWHRNCTAGDWTNRCYGCGERGHILRECKNSPKDLKQERGYSRSRSPRRRRSPSYGKSGPPSHWGSHGADREERLHSRRDGRGYSRSPRRHDSPSNQRNHSPRRYALPSNERYDGTRRYASPSYGRDRSPGGNALPANGRSHNLTSDGMNPSPRERDDQNGSHRRGDNDYLPSKRDDQNGSYRRGDSDYLSRERDDYLSRGRDDQNGSHRRGDSDYLSRDR

SEQ ID NO: 103980 - protein, 74 aa, Oryza sativa
  Clone ID: PAT_MRT4530_101358C.1.pep
PDRKYRREPPIRGTLMRPPTSTTTMAIEAVGWNTSPLRLGETANSFSSQQIQEHLKETLIHKSEGLRTSRLVGD

SEQ ID NO: 103981 - protein, 53 aa, Oryza sativa
  Clone ID: PAT_MRT4530_101359C.1.pep
MQIEMVMVDMELGGDGLIDCVALHQGDGDFPRGTPVAYVEGNLLGGRLRLNVT

SEQ ID NO: 103982 - protein, 102 aa, Oryza sativa
  unsure (1)..(102): unsure at all Xaa locations
  Clone ID: PAT_MRT4530_10135C.1.pep
KPEVMVVSGAKDNDCFILTNNGLWDVVLNXKACKVARRKIFLWDKKNGVALPLFYEGEGSTDLVAQKAADYLIKFVFKKGREDKITVIVVDLKPGKKFKNIL

SEQ ID NO: 103983 - protein, 67 aa, Oryza sativa
  unsure (1)..(67): unsure at all Xaa locations
  Clone ID: PAT_MRT4530_101360C.1.pep
LVNGSSTDLMFLCNGQCESKMMKAAGICSGLAYKARHGPTKTNRSHFGSHGFXAKGTHPCXXAIMRA

SEQ ID NO: 103984 - protein, 66 aa, Oryza sativa
  Clone ID: PAT_MRT4530_101361C.1.pep
NVTGDRVVEEPGATAAGCEAGNWRPVNHGTDASRAGHLCIQHREGTRSPQRQDTTVATGSTVRIAR

SEQ ID NO: 103985 - protein, 114 aa, Oryza sativa
  Clone ID: PAT_MRT4530_101362C.1.pep
CVVEDIPPEELHAKMQDPDCVEEAQWIDVREPDEVDKASLEGFKVLPLRQFGTWGPVMTDEFDPQKDTYVLCHHGMRSMQVAKWLQSQGFRKVYNVAGGIHAYAVKADSSIPTY

SEQ ID NO: 103986 - protein, 429 aa, Oryza sativa
  Clone ID: PAT_MRT4530_101363C.1.pep
MAEGSRSPLRSFVEVAPGSHFPIQNLPFGVFRRRGSPEPEPPRPAVAIGDFALDLAAVSDAGLFHGPLLSASPCFRQETLNMFLGMGRPAWKEARATLQKILSADEPVLRDNEALKKKCLVPMSDTEMLLPITVGDYTDFFCSVHHARNCGFIFRGPQTPVNPNWFQLPVGYHGRASSVIVSGTDIIRPKGQGHPTGDSRPYFGPSKKLDFELEMAAIVGPGNELGKPIDINDAEEHIFGLMIMNDWSARDIQAWETIPLGPFLGKSFSTTVSPWIVTMDALKPFTCEAPKQEPEPLPYLAEKNHVNYDIPLEVWIKPKEQSEPSMVAKSNFKHLYWTLTQQLAHHTVNGCNLRPGDMFATGTLSGPETESLGCLLELTWNGQKEISVGNSTRKFLEDGDEVILTACCKGEGYNVGFGTCTGKVLPALP

SEQ ID NO: 103987 - protein, 949 aa, Oryza sativa
  Clone ID: PAT_MRT4530_101364C.1.pep
MAGYVTIILLLLLPAAVSGAASGGGGCIGAMVDDTSRAGKEEKLAMEMAMEDFTVSGVDVGSPAVAVVLCTMASNGDPVRAASAALSLINERGARALVGLHSWQEAAFVAEIGRQAMVPVLSFAAAAAPSTSRRWPFLVRVARGQHAQMRAVAAVVGSWQWRRVAVLYEDADYGGGAGVFPHLADALRAVGSEVDRRVPVPASPSGDALRRSLGDLMGGQCRVFVVHTSAKVAVALFAEASRMGMMATGYVWIVTDAIAGAIDSLDAAAVSTMQGVIGVRNHISMDTNSKNTRDRLIARLRKRFRSQYPGDDDDGGGGGGGDNDKTRGPHYPALLAYDTIVAVASAMRKTNATAPTRATDPNPSSPDSGETIKIAVSSNGTELLREVKSVRFRGVSGEFGFVDGEFSPPVRFQLINVAAPRYHELGFWSPEHGFSKSAGGCSHRGGDGGGECEPSMRFLGPVIWPGKPWDVPRGWAPPANGSPFTVAVPEKAAFPDFVKVTRHHGRGGDDDDEPSFEGFSIDVFKAAVEHLPYNFHYKFVSFNGTYDSLMQHDYMKSYDILVGDTSISSGRYKFVEFSQPYTESGLVMVVPFSADTWDRSWIFLRPFSPAMWLLIAAVRLYNGVAIWLMERRHNGDYRGGVWKQVTIVLWLSLAALLSPGEKERRLRSSLSKASMAVWLLVAVVLATNYTASLSSLMTAQRLGREAAVTAESLRSAAGAVVGCTEGSVVGRYLEEVLMFPGHRVRRLAGDEEHRRALVSGEVKAAFLRVSHAKLLLAKYCNELMTTGPVYHVAGLGFVFPKGSPLLADISQAILEVFENGTIQRLETAMLSAYNCTAAAAAAAMDGGAGDLYRLGPENYWGLFLMTLFASTASLAAYGVFFHHDTSCGSGGGGGGAVITGGHRKQGDGRKDSATVDPGGSSHGDEAPSSASVTAGHGGKDTEMVVISMA

SEQ ID NO: 103988 - protein, 73 aa, Oryza sativa
  unsure (1)..(73): unsure at all Xaa locations
  Clone ID: PAT_MRT4530_101365C.1.pep
MPRQRRRLEEFRITSTPLTKNTIPAIAAVGGTXGKAWTVDTGNVWLLQSDGELFQVLLGFLSDELPGLARVPD

SEQ ID NO: 103989 - protein, 199 aa, Oryza sativa
  Clone ID: PAT_MRT4530_101366C.1.pep
MTNLPTWPRHRQLLHWALDLHESAPCRCHTRRHPRPRDVLMPRQRRRLEEFRITSTPLTKNTIPAIAAVGGTLRFILCEWNADEMCTVHFDLTSPPDRPLRSGRQVRRQYTGKAWTVDTGNVWLLQSDGELFQEDQRSLRVQDDLSDELPGLARVPDIGVMPSQRKVPPFCMPGPGFAKSRGYGALITVGYELRSVIGG

SEQ ID NO: 103990 - protein, 85 aa, Oryza sativa
  Clone ID: PAT_MRT4530_101367C.1.pep
DPMEAYKPELQRPRYEVSGAADRPTASESRMTLELERGPLMISPCRVKKNEGSPPPPSVVAERPPQRHWGWRRSSGLLADAARIR

SEQ ID NO: 103991 - protein, 64 aa, Oryza sativa
  Clone ID: PAT_MRT4530_101368C.1.pep
GLASSHELGLSGGAFPSLDFLVRGKEINSCLHRQAGCLFCWLPPSYFFCFWSPHPLVIFPVLSL

SEQ ID NO: 103992 - protein, 61 aa, Oryza sativa
  Clone ID: PAT_MRT4530_101369C.1.pep
IRRMGKVQGITQGSIWTCTLVSDLCLDIFRLPTNLEINFIVQCHIAIICNQEKSKIYAKQT

SEQ ID NO: 103993 - protein, 153 aa, Oryza sativa
  unsure (1)..(153): unsure at all Xaa locations
  Clone ID: PAT_MRT4530_10136C.1.pep
RGXRXXXGKGXXGXXXPQKRGGGENFXRXFPRXXGXEKPXLFPFFXGXXKRNXTPPPPXEXXXXGXXXKFXNXGXXXPXIPKXXQRXEIXGEGNXKXXFXKNFXXKPFQGRKFLRLGXRKNKXPLVXFLFPQFIXXGKKKKXQWFXNGXNGIF

SEQ ID NO: 103994 - protein, 216 aa, Oryza sativa
  Clone ID: PAT_MRT4530_101370C.1.pep
MMDPSSSSAAVPAAAPAVGDGGGGGGGGPAVAVSSAVAMASRRFQHLLDRSTPHVGRRWLAFAGVAAGGALRVWFAGGYYIVTYALGIYILNLLIAFLSPQVDPEVAEVLGEGGAALPTRASDEFRPFVRRLPEFKCWYSIVKAFCIAFVLTFFSVFDVPVFWPILLFYWVVLFTVTMKRQILHMIKYRYVPFSFGKQRYNGKRVASADDLTLPKD

SEQ ID NO: 103995 - protein, 179 aa, Oryza sativa
  Clone ID: PAT_MRT4530_101371C.1.pep
MAARAHDAAALVVKGPAAVLNFPGAAASLPRPASAAPRDVQAAAARAAAMALDAVVPAPPSPPPPLMPPQASPSEAARAHALVAQVDQDDDDEELEEIVELPPIDELDAAAELVFASSGATTFHYDPAADQPWYDQPAACLQDGGGGGIAVHDALGFELDHVWADGVVASGFGALLWNM

SEQ ID NO: 103996 - protein, 97 aa, Oryza sativa
  Clone ID: PAT_MRT4530_101372C.1.pep
MAHKSLEQEAPMDHTNPMVDKEENQQEEDPMVTASVAQKEDMAVMHGNPPIDDPDPQTLALEEQHVSCCCYQPTCTQQRLLCRGGVATSRPEGLRRR

SEQ ID NO: 103997 - protein, 58 aa, Oryza sativa
  Clone ID: PAT_MRT4530_101373C.1.pep
MTRMDNRIAVHFHLKDHPERNPVVRFCTFMNADDAAVFINPIKEDVSAFADLLSRFGK

SEQ ID NO: 103998 - protein, 275 aa, Oryza sativa
  Clone ID: PAT_MRT4530_101374C.1.pep
MDDSQGVFKEIIDKDVVAYTSMITGYSEIVDSVAWNAFDIAIDMLQGNLEVNRVTMISLLQIAGNLGALKEGKSLHCYSIRRALVVSDYILETCIVNLYTRCGAYQSAVATLQNSKGTAASWNAMLSGLTRAGQSFDAIHYLSVMLHEHKITPDSVTFANVISACVEVCYFGYAASIHTYLIRRYIPLDVVLATALVKVYSKCKKITISRHLFNQLIVKDAVSYNAMMYGYLHNGMANEATSLLNYMMAEGIVPDFATVLSLLAAFADQRDLVRG

SEQ ID NO: 103999 - protein, 711 aa, Oryza sativa
  Clone ID: PAT_MRT4530_101375C.1.pep
MELVARAAAGADAAGGAAAAAVVRGRGGRRRRVSAGRKRKREEAERSAAAVAGVGKGGKNASAAAGEEAGGADGRKRVTVFFGTQTGTAEGFAKALAEEAKSRYDKAIFKVVDLDEYAMEDEEYEERLKKEKISLFFVATYGDGEPTDNAARFYKWFTEGNERGVWLNDFQYAIFGLGNRQYEHFNKVAKVVDELLVEQGGKRLVPVGLGDDDQCIEDDFNAWKETLWPELDQLLRDENDVSTGTTYTAAIPEYRVEFVKPDEAAHLERNFSLANGYAVHDAQHPCRANVAVRRELHTPASDRSCTHLEFDIAGTGLTYETGDHVGVYTENCLEVVEEAERLLGYSPEAFFTIHADKEDGTPLGGGSLAPPFPSPITVRNALARYADLLNSPKKSALVALATYASDSTEADRLRFLASPAGKDEYAQWVVASQRSLLEVMAEFPSAKPPLGVFFAAVAPRLQPRYYSISSSPSMAPTRIHVTCALVHEKTPAGRVHKGVCSTWIKNAIPSEETKDCSWAPVFVRQSNFKLPADPSVPVIMIGPGTGLAPFRGFLQERLSQKQSGAELGRSVFFFGCRNSKMDFIYEDELNTFLEEGALSELVLAFSREGPTKEYVQHKMSQKRCSYFLPLSVQASEIWDMISQGGYIYVCGDAKGMARDVHRVLHTIVQEQGSLDSSKAESFVKSLQTEDDVSKRDLIIHEKSYILVHDNV

SEQ ID NO: 104000 - protein, 55 aa, Oryza sativa
  unsure (1)..(55): unsure at all Xaa locations
  Clone ID: PAT_MRT4530_101376C.1.pep
LFLAICYYLLLXPXYVPXLDSVMSEPXVGFKQCILSNFQLLXVKLCNFLCVXXXX

SEQ ID NO: 104001 - protein, 62 aa, Oryza sativa
  Clone ID: PAT_MRT4530_101377C.1.pep
EREREREERLQVGSRSYSTARRMMGVRLLAACARIGCSTIRIRGGEGRFWCSSRRGVGDRKE

SEQ ID NO: 104002 - protein, 168 aa, Oryza sativa
  unsure (1)..(168): unsure at all Xaa locations
  Clone ID: PAT_MRT4530_101378C.1.pep
SASQSSQPLGGRSQCCVGTRFLERAGSIFLCVQDGAPGWTIPLQQLCLPASPCLPSGSEAQHRAASPSPWPTAAARRWGTRGARTRTGRPRGRRSRRAPWRAPPRRRPSARRWXEDSRRRRSPSPRRGXRRAGPSPPPPPPPAPSVPTPPSPTSPDGATPAPPPLMIR

SEQ ID NO: 104003 - protein, 189 aa, Oryza sativa
  Clone ID: PAT_MRT4530_101379C.1.pep
MEGSFAVPAAIPVRQRVAICIWWQLRRGERGGGGGEAAARKDGAGGDTERRRRRMRRGGGEEGGELRRVGRNDGGELPNVVQTTFVLPSAVRDWDGQLMEGEAIPGLLTSVIEQDNADLITREEFFFMGVTLIPDLGLLAASNTDWSADLAAHAFPRDEWTTANNLQIASEGSYVMSDELMMASLLVCN

SEQ ID NO: 104004 - protein, 52 aa, Oryza sativa
  Clone ID: PAT_MRT4530_10137C.1.pep
LTASRVDKGSRRRGSNWGFSDAVAMDPKLVEVTLSFLRFKEVFCWNFCLHLR

SEQ ID NO: 104005 - protein, 235 aa, Oryza sativa
  unsure (1)..(235): unsure at all Xaa locations
  Clone ID: PAT_MRT4530_101380C.1.pep
GLQADINECDLRRAEPAKYEELYPCSSHSKCHDTEGGYDCKCCFGHHGDGKISGKGCTPIIPAPYVATVGELIFSSSFILTTDMNXVLANNNYXLSIASDFYISVCLHISATAFAVVALVALAWFMRRGHKRWERRGFFDSNGGKLLEDMDIIQFTEEQIERITNKKRIKIGQGAFGEVYKGTHNNQDVAVKYSKTIGNLKGVTRTRGIEGFINKIAVQSSISPSDDALGHEASV

SEQ ID NO: 104006 - protein, 62 aa, Oryza sativa
  Clone ID: PAT_MRT4530_101381C.1.pep
MTARGLHHPKLTTALPELTTALTLVCAQDQACTVVPHYIGTFHGRSESNANHMAYTPATPKP

SEQ ID NO: 104007 - protein, 48 aa, Oryza sativa
  Clone ID: PAT_MRT4530_101382C.1.pep
EDPKTFGTRIHGMFKLGLSIDEDEFVEVDAEMLPLEDDAGESKMEEVD

SEQ ID NO: 104008 - protein, 167 aa, Oryza sativa
  Clone ID: PAT_MRT4530_101383C.1.pep
NIHLESIKPTTKMTGFLNSIASHAKAHHESVNAACNAYYGGSLPASRTASPETSRNSSVAGPSSAPKNPTNASKAWKALKRHHQEMNAAFAVYYSPGNSPSASRNSSAVSSPRHSVEAPSHSAEHELKEVGPRNYQKIWKAIKNRAVEHHKSVSAAYDQTYGMHIHQ

SEQ ID NO: 104009 - protein, 49 aa, Oryza sativa
  Clone ID: PAT_MRT4530_101384C.1.pep
LAGCRRPETSEQSRRGGAAVRAGQEEAAERRVVAHPRATVLAEDIVADR

SEQ ID NO: 104010 - protein, 64 aa, Oryza sativa
  Clone ID: PAT_MRT4530_101385C.1.pep
AFFFSNRAKQGAAGGAEARPFITHHNSLQRDLYLRIATELHLKRMLVGGLEKVYEIGRIFRNEA

SEQ ID NO: 104011 - protein, 131 aa, Oryza sativa
  unsure (1)..(131): unsure at all Xaa locations
  Clone ID: PAT_MRT4530_101386C.1.pep
XXXXKKXNXNEGXPXXVAKFHRGXFXAXXFELNXKXAFGSRHFPLXSRITPXDNQPXXQETWVXRFQXVSYAXNFGRXKHGCTEGRNIFIGXRRXXIYVVPXGTMSVXVLXNAXXTXDXXXXXXXXXEXFX

SEQ ID NO: 104012 - protein, 39 aa, Oryza sativa
  Clone ID: PAT_MRT4530_101387C.1.pep
NKRFFRKVIRVNRKKEVFYMCLLWMDLYGNFLLDNFRMC

SEQ ID NO: 104013 - protein, 68 aa, Oryza sativa
  Clone ID: PAT_MRT4530_101388C.1.pep
ATRVLYAGVPPRGDPVFKGMDWLTPLSEPLKVKAGGGKNGIAQGQGNQACPLKAAMLSAAQRASIKLV

SEQ ID NO: 104014 - protein, 108 aa, Oryza sativa
  Clone ID: PAT_MRT4530_101389C.1.pep
SLESDNLGSNPVTATYQLYELQHSFNFFICKARINNSCFFIIMMILCLAYNKHSINACKYHQCHPHHVIASLLLSSHSQPWNFLSSIPGCRRTAEARACMLLTSIKGR

SEQ ID NO: 104015 - protein, 155 aa, Oryza sativa
  Clone ID: PAT_MRT4530_10138C.1.pep
MGRQRDGGFHLSVTDRKLLDWIDGERRRRRQKEVARGVLGQRSRSGSMAERVRAVAVMRDQRRDTMLRQGRPRGLPNFGVNNLVRKMVAQRDAGSSSAERSGAGSAERNGAVGHSVDWPVACDTAGATRSCPVALRGATCSVGSMSWTNGVAQVQ

SEQ ID NO: 104016 - protein, 75 aa, Oryza sativa
  unsure (1)..(75): unsure at all Xaa locations
  Clone ID: PAT_MRT4530_101390C.1.pep
PPHLPIASASACLRRPPHPPPPXPPPXPPAPAHLVPPAPAPARSPTPAPAPARPPPPAHTPTRPPPSPVGRPLPG

SEQ ID NO: 104017 - protein, 537 aa, Oryza sativa
  Clone ID: PAT_MRT4530_101391C.1.pep
MDAPNPTRSDATTTPATADDDAAVDYSNLPPDIVADIHARLTHLDRLTVAAVFGAAGHSMNLEEPWLAIPGGETTTTAPAPPTKLYSISDRRAAAARAGEAAMRGCFFLGGSGDGWLVTADKRSRLRMVNPVTGAHRALPAITTCPFFYTTSWAGRGSHVNLTAGPFMRVRHGGGPPPPPPEQLIGTSLYTVTAGQVRQYVYRKVVLSAAAACPGSSYAAMLVLSPDLGAPMFATSDDPAWRVAPSRDGVEDAIHHRGRFYSVTYTGVVEEWDRGGGGFTSRTVATAPLKPDDLKNRKYIAAAPDGKLMVVVKFFKDIKYQTRGRDGYLRRTHTVTDKRVLFKLLVLDDEESGRWRKKEEEVGDAAAAALFVGANASMCVAATSGGDLAGGCIYFTDDDVARGRPFDKSKDDDHWRYREDDREIVAGVYSLEKHRAHKLPLLQRRRRTPSYGHDHDDDDDNYDGNADADDNGGGGDDDGEDEEEVQIGKIWPPPVCRSARSNRRLLLCPTPEEGMEETIEERTPPAGGGAPLARGGH

SEQ ID NO: 104018 - protein, 46 aa, Oryza sativa
  Clone ID: PAT_MRT4530_101392C.1.pep
MALANEVGLWTSTSRLSGGWRPAVKSYTFCPSAANSPRGFERSGGP

SEQ ID NO: 104019 - protein, 77 aa, Oryza sativa
  unsure (1)..(77): unsure at all Xaa locations
  Clone ID: PAT_MRT4530_101393C.1.pep
GGXLAGFLLLLSTSAATTAAAMAIXSFIASRLARSTGHALXSVASKAPMARNAAASPXLSRLXSVARAFSQSLPXWM

SEQ ID NO: 104020 - protein, 221 aa, Oryza sativa
  Clone ID: PAT_MRT4530_101394C.1.pep
GCRNSARGAAEVSFRAVPPLLPPTHAAGGGGGALPLSAPRAAAGGLRGGGGRGAALLYRTCLSRPYTTGRALGLSCQRRRTRWKPVFALETGGPSNADNQDFEDDGGFLGRTRLGRLIQAAARELLEKLNSARNKSPTKIFLVLLGFYTANALATVLGQTGDWDVFVAAIVVATIEGIGMLMYRKPASRPPGRFWSMITMVNYWKAGVCLGFFVDAFKVGS

SEQ ID NO: 104021 - protein, 52 aa, Oryza sativa
  Clone ID: PAT_MRT4530_101395C.1.pep
GWHFVNIGRRVFKNVPPQASARKDFEWKPAPDWFLGKTSKLKCKTENGSFRL

SEQ ID NO: 104022 - protein, 136 aa, Oryza sativa
  unsure (1)..(136): unsure at all Xaa locations
  Clone ID: PAT_MRT4530_101396C.1.pep
YXKCHNHKATRQSQHXXYGQGSQYRPFKETWTSWVYLLPLPLTSFNHAYSLLYTRGYAIVQHWHYCSNCYSPQINIRPYHFAARIQTHYSGVGYANLADSKVLSSLIINDRMLGYSHKGKDMQNWINENKDAQEAH

SEQ ID NO: 104023 - protein, 155 aa, Oryza sativa
  Clone ID: PAT_MRT4530_101397C.1.pep
MASTPEPETTVGDYELRERLGGRPPSTVVWRAVERSSGSPVVVKQVRLTGLPSTLRDSLDWEVRFLAAVTHPNIIRLLDLIQTQSNLYLVLELCEGGDLAAYIQRNGRVEERVASNFMRQIGNSPSNICHINFISSPSSISFLLLPPNLSHYPQA

SEQ ID NO: 104024 - protein, 265 aa, Oryza sativa
  unsure (1)..(265): unsure at all Xaa locations
  Clone ID: PAT_MRT4530_101398C.1.pep
ATHPHKHKDNRHSPRLPPTSNQRPPPSTPPPPTQIPVTVKYAAAPPAHTRLHTTQPPHFTPRXPHSPPAPKTAGPDTMEQLPPLPRKRANPEPPGRPAPEIPGSGSVATTXPSPDPPPPAPTPXDRXRPPSPPMDPPXPSPPPPLSSSPPPPPSSSPPPPPSPKPXPPPSPSPPPPPLPSPPPPSPSPPPSPPNRWPPPHPHPFSSFLILSSTALSLPPPRAAVASPPPDPPPTHPPQPTKPEPTGAKSPCDLVEPTRLRSRRYY

SEQ ID NO: 104025 - protein, 59 aa, Oryza sativa
  Clone ID: PAT_MRT4530_101399C.1.pep
MGRRKVQLKRIEHNMNRAVSESKRRHGCDKNCHEIVARVKGMVVLMRLAETGELYELSI

SEQ ID NO: 104026 - protein, 57 aa, Oryza sativa
  Clone ID: PAT_MRT4530_10139C.1.pep
MAKEPMRVLVTGAAGQIGYALVPMIARGAMLGADQPVILHMLDIPPATESLNGPKME

SEQ ID NO: 104027 - protein, 30 aa, Oryza sativa
  Clone ID: PAT_MRT4530_1013C.1.pep
YHYLKFFYNGTYSPLTVLFLILRSNVVVSA

SEQ ID NO: 104028 - protein, 74 aa, Oryza sativa
  Clone ID: PAT_MRT4530_101400C.1.pep
GRPVLLMSHWLSPVKSADTVPVISLAQILENGPPNKLFTRAGIFVALVKRHLQGPRFEGACPATTEIEPISNGQ

SEQ ID NO: 104029 - protein, 54 aa, Oryza sativa
  Clone ID: PAT_MRT4530_101401C.1.pep
MVTCASWAHDDTVTFAAPSRAPLPPPLAPRPSSPLGPDDTVVARPPRSTSALSS

SEQ ID NO: 104030 - protein, 50 aa, Oryza sativa
  Clone ID: PAT_MRT4530_101402C.1.pep
LFPLAPREPVWKDVSPHSHDCPPPHYVNACSVMLFMISHQKWGSNMVDEE

SEQ ID NO: 104031 - protein, 77 aa, Oryza sativa
  unsure (1)..(77): unsure at all Xaa locations
  Clone ID: PAT_MRT4530_101403C.1.pep
VRGFFAVFSCQRLLXPLAAXLRGXXXLGALALGLFXLRXLAVAXPLVSAIIFLIPGSPXSXRPGAPTSXXRXRPRXX

SEQ ID NO: 104032 - protein, 108 aa, Oryza sativa
  Clone ID: PAT_MRT4530_101404C.1.pep
MEGYEGRTELSPHATYLTFRGAPNKRGHPPFIAWNDGCMAIVEVGAPLTVIGELSGTSTWKAKIRDASGEAQHSVDALDSEAMESIESQESIFGVLLDSVVAMESVKA

SEQ ID NO: 104033 - protein, 219 aa, Oryza sativa
  Clone ID: PAT_MRT4530_101405C.1.pep
MSSTPLLPVLLSTMILLSAVSTTTTALTQDFCVANLPLGADTPSGYQCRPAATVTAADFYSGALARPGILIRPFNTSLASAFVQQYPAVNGLGISASRVDILPGGVVPLHTHPAGSELLYVLDGALVAGFISSSDNKVYYKEVSKGGMFVFPQGLLHFQYNTGDTTAVAFAAYSSSNPGLQILDYALFANNLPTSYVVKGTFLAEAEVRRLKSKFGGSG

SEQ ID NO: 104034 - protein, 94 aa, Oryza sativa
  Clone ID: PAT_MRT4530_101406C.1.pep
MVRKVFVLSDMELDAGAWRSQDELNTIRCKFAAKGLSAPEVVFWNVGAPASTPVVEPQENAGGGERLLKCWIDRLNVCIPLVHSTEYYKKPRGP

SEQ ID NO: 104035 - protein, 60 aa, Oryza sativa
  unsure (1)..(60): unsure at all Xaa locations
  Clone ID: PAT_MRT4530_101407C.1.pep
SRRGLYRRNTDPAERVXRRQWYKXALSVTHTPKPVSPIAYQSKNKNEPANKPKPAAPNKK

SEQ ID NO: 104036 - protein, 166 aa, Oryza sativa
  unsure (1)..(166): unsure at all Xaa locations
  Clone ID: PAT_MRT4530_101408C.1.pep
MRWPPPPPSLLRPDLGGREVSATATALPSPRRGRIXEREGRGAASAPPSPSGQPLSPHPXPSSPSTSSSLPLLQPDLGAGRERGGXPPPPSSAHPXDVAVHAAAASPMSASLLSPSLPLLQWGGREGERRTAVXSPPPIGLGGRRGGEPVGRGGEEKRIVEGEGDK

SEQ ID NO: 104037 - protein, 104 aa, Oryza sativa
  Clone ID: PAT_MRT4530_101409C.1.pep
CRCSDFYFSGKEMRAVVHGKATKSEGCARINLKKRRSQTFRLHRVPPDVLRVILSQLSFQRSCPYKHCVQEVETALEMLPKAGLDRRYDAWQQQQCCRRPPNME

SEQ ID NO: 104038 - protein, 301 aa, Oryza sativa
  unsure (1)..(301): unsure at all Xaa locations
  Clone ID: PAT_MRT4530_10140C.1.pep
MALVVICGQPCSGKSAAAXCLAAALCSSTSXLTVRIIDESSLHLGRNDSYKDMVVEKNLRGVLRSEVDRSVSRDSIIXVDSLNNIKGYRYELWCLARASGIRYCVLFCDTEVDHCREWNTKRQEKGEPTYDNNIFDDLVSRFEKPDRRNRWDSPLFELFPSRDGVMESSPVIAEAVSYLTKKVDSKTRDVKVLQPTIATQTARTTEANSLYEMDKATQEVINAIVEAQSCGLGLPVNKISLGPDLPTICLQRSVGLPELRSLRRTFIKLAGQYSLSGPPPPADADSATRMFVDYLNREISS

SEQ ID NO: 104039 - protein, 158 aa, Oryza sativa
  Clone ID: PAT_MRT4530_101410C.1.pep
MAPVCISDERSVAVSAERFWKVFSNPPAMPKVCAGFFDAAEVEGDGGPGTVVILKFNPAVKQGLYKTRVVARDNASHFLKSEVLEVALGRAGKLKTHLTETKLEATGAGSCMAKLRVECEPEDGGSLSPEKQKIILEGYFGMLKMIENYLVAHPAEYA

SEQ ID NO: 104040 - protein, 208 aa, Oryza sativa
  unsure (1)..(208): unsure at all Xaa locations
  Clone ID: PAT_MRT4530_101411C.1.pep
ETEPPPLPTPPAARHRHSSQCRAAPLQPKAPPHRAAPRHPLRSPPPPPQHHSHRGAKLPPPVPPPAAHRRRPSHRXPILPVRQIPPALGRASGVVGSRRNAVPASSRADHRHRFRRRPPPRGHLAVVPSGDHPSSFPAASCAVRRRSLHRQCWRRWPSGRAPPLPSRVGRRANPPLCCAPLPWTKSTMDQILWPADSLGPPVGAGSLL

SEQ ID NO: 104041 - protein, 66 aa, Oryza sativa
  Clone ID: PAT_MRT4530_101412C.1.pep
KDWLAAKVFGLAWRIYFFFFCASASLPRLGSKKCLAVESWEFTRSLSLFTSFGDIIPLFSNKLSGV

SEQ ID NO: 104042 - protein, 761 aa, Oryza sativa
  Clone ID: PAT_MRT4530_101413C.1.pep
MTCRRQRRRRRTSPAAPAPPPVLPPDNDDLIQEILLRLPSHPSSLPRASLVCKQWRRLVSDPAFLRRFRARHRDPPLLGVFKDELHHPVFRSVLDPPDLIPPDRFALRLDDYRAASLLGCRHGLVLIFNYNTCEFLVWDPVSGDRRRVAVPQELDGGERSVMNGAVLCAAGDDGHVHGGGFRSCHFKVVLIGASKMDGRIFASIYSSVTGEWGDAIFTGPVSTIYYFGSPAILVGNSLYWLLSVSGHHILEFNLETLTLAVIDGNWPQMNFSSDCHYCIMRGEDGNVGLAILSYSGFQMWERKVTLGGAAKWVLWKTVKLHDILGLSSAVQREKTDIVGYSEDPNAFILVVDTDFYMFRVDSMQSKKLFDCNVVTRCHPFTSFYTAGLDMEHVVSAVTGELVTRFISYLMSKYSRRHEISEEKQLKRLQQLLLRVSMVVEEADGRYITNSGMLMQLKALADAMYRGHHVLDMFRCRTLIQEDPIKEVSNPFPPLKRFCKIVDASGKDKARHLELHRTLEILETAVDHMAEFVVLLGGCDRMSRRPYDTYLYIDNFMFGRHSEKQRLLNFLLEYNPPGVQPAVLPIIGALGVGKKTLVAHVCADERVQSQFSSILHLNEGDLLGLAHSHTLLAGNMLVVVEFVSDVNEMNWEEFYTSLAQMNQGSKVVTISRLRKSEKLGTVKPMALDIHSDEELSYLFKTLAFGSANPKDHPRLLQIAEEYCHAVAVHRVTCRSECSCRCIEREFGCQLLAWQAEQVHYTG

SEQ ID NO: 104043 - protein, 120 aa, Oryza sativa
  Clone ID: PAT_MRT4530_101414C.1.pep
MVGPIVIASAGLGMLAGVAMANRTMGGGGDGRQLPAASRWDARPRCATCGGSGRVDCLCNRWSDGDSGCRTCAGSGRMPCRSCGGSGTGRPLPARLIARGHHHHHNPPPSSAPGRGGDYS

SEQ ID NO: 104044 - protein, 82 aa, Oryza sativa
  Clone ID: PAT_MRT4530_101415C.1.pep
RPGSVRRRRRRRRSSAKERETESYIERERTGALTQETRRRRLRWRRRGPPGDGERQRRRRRGVALGSGGEGEADARSRWKNV

SEQ ID NO: 104045 - protein, 139 aa, Oryza sativa
  Clone ID: PAT_MRT4530_101416C.1.pep
PCFSGEERTESERALDGVAPVLNTRRSDLSWKAFLPEGADRNHPAAHVVTGDDDDDAELHEAFPPAMVVVGGLDPLQDWDRRYAAMLRRKGKAARVVEFPEAIHSFYFFPEFLADDHRKLVGEIRAFVEECITSKQPTA

SEQ ID NO: 104046 - protein, 174 aa, Oryza sativa
  Clone ID: PAT_MRT4530_101417C.1.pep
MEYVESLKSVEVPDSVDTLDIVNALDSIEGLESEMALDSVEVPDSVKVVLESVEVAPDSVEVVQCPRCGTFHAGGVFGEACFQARRRARKCAHCGLLHEDYDLIARFLHNMEKFDCELYIPDVEKLQMDGETILLPEHVIKKLDEIYSMKELEDAKMKQEQETSNAFSKQGCFT

SEQ ID NO: 104047 - protein, 94 aa, Oryza sativa
  Clone ID: PAT_MRT4530_101418C.1.pep
PPLLGRAHIHLAVFIGHRLPSQTNTTLFCICCPHSCASEMNFPIGHPSQITPRQACLTLEFFRDRLPEKKLQLVDMSILLILLSPRPGCYRALP

SEQ ID NO: 104048 - protein, 157 aa, Oryza sativa
  Clone ID: PAT_MRT4530_101419C.1.pep
MRGEDNFSRFFKGEGSGVAGKWTGGRGRRGTLTIGVCRGAEDEETAWACDGEEDEMWRAFVLVGVDALAVSTEDAVGGAASGRRKGDKAEASLYAGPESNAITEAEDSEIYEDPEIYEDPDVVREFFETHVRLECIAADGSLGMSVDSDWSLKYSGR

SEQ ID NO: 104049 - protein, 191 aa, Oryza sativa
  Clone ID: PAT_MRT4530_10141C.1.pep
MIKHVNLDLKLFCDTEVDHCREWNTKRQEKGEPTYDNNMYRSYWVIMEGGRLWQVRAEEEYCGGRVAGDRRERFDDLVSRFEKPDRRNRWDSPLFELFPSRDGVMESSPVIAEAVSYLTKKVDSKTRDVKVLQPTIATQTARTTEANSLYEMDKATQEVINAIVEAQSCGLGLPVNKISLGPDLPTISFTV

SEQ ID NO: 104050 - protein, 167 aa, Oryza sativa
  Clone ID: PAT_MRT4530_101420C.1.pep
MEYVESLKSVEVLDSVDALDIVNALDSVEGLESEMALDSVEVPDSVEVVPESVKVAPDFVKVAPDSVEVVQCPRCGTFHAGGVFGEACFQARRRARRCARCGLLHEDYDLIARFLHNMEKFDCELYIPDVEKLKMDGETILLPKHVIKKLDEIYSMKELEDAKMKQE

SEQ ID NO: 104051 - protein, 159 aa, Oryza sativa
  Clone ID: PAT_MRT4530_101421C.1.pep
MAVRFRCPGQAPEQEADARGPPSPAAACARGICGCRSGGLRANAGEAQLGGGDGGDPRRPPLLGRLAGSNGIFLLLLVVVIVVDSAMFRINVAVTRLQVYSPKRLWPGKKKHTVTPRIYDQNPPPKIKANYDIPKGMDILNGVFRKNVAPRVLPPPALR

SEQ ID NO: 104052 - protein, 167 aa, Oryza sativa
  Clone ID: PAT_MRT4530_101422C.1.pep
MEYVESLKSVEVPDSVDTLDIVNALDSVEGLESEMALDSVEVPDSVEVVPESVEVVQCPRCGTFHAGGVFGEACFQARRRARKCARCGLLHEDYDLIARFLLNMEKFDCELYIPDVEKLQMDGETILLPEHVIKKLDEIYSMKELEDAKMKQEYETSNAFSKQGCFT

SEQ ID NO: 104053 - protein, 168 aa, Oryza sativa
  Clone ID: PAT_MRT4530_101423C.1.pep
MAVVLLLMLVQLPGYLSCLLLCAIRAAVERAVAATFAAAGDAVSAAADAAMGWRDAASSNSTAAVAFVQAAMGRPKALLAEMLAIFGLVASLSCSPATRRRRTSLLGLPRAPPRPAATFFSGAVLAIPFSLSPPLSLRMVSAGGRRTGAATELRLERRQAACGAAAGG

SEQ ID NO: 104054 - protein, 80 aa, Oryza sativa
  unsure (1)..(80): unsure at all Xaa locations
  Clone ID: PAT_MRT4530_101424C.1.pep
FARDEKVTMPQTSTTIIAXAATKDEIEGRVAQLTRELCQTDXTXESEKGDERKAELSGGVAEIKDGGETETEFEERKLQI

SEQ ID NO: 104055 - protein, 73 aa, Oryza sativa
  Clone ID: PAT_MRT4530_101425C.1.pep
MGGRDGSLLGHEMRRVARQVDAVVVEGELAAAALPPPAVVARQVDAVVVEGEPREAAGARKGLATLQLVTLRS

SEQ ID NO: 104056 - protein, 173 aa, Oryza sativa
  unsure (1)..(173): unsure at all Xaa locations
  Clone ID: PAT_MRT4530_101426C.1.pep
AVKSVDRSRLSDDLDRXLAALEPKLARLAAAGNPGVVQVHAVYEDDDWTHTVMDLCTGPDLLDWVRLRCGQPVPEPDAAAVVAQIAEALALCHRRGXVAHRTSKPDNVPPTTPPGTGRTRVRLADFGXSAPWVGXGISAEGLVGTPHYVAPEVVAGGXEYGEKADVXNAGVVM

SEQ ID NO: 104057 - protein, 115 aa, Oryza sativa
  Clone ID: PAT_MRT4530_101427C.1.pep
MAAVVPANFGEGGSHGEHQWSKGSTVVAAARPGAAWSSGAPCSRRRSNRAATPGGGAGGTPASDWMGNERGKGVLSMANPFLPSISEDLQLEKRRSYASGKLEVSSGHSFVCSSS

SEQ ID NO: 104058 - protein, 324 aa, Oryza sativa
  Clone ID: PAT_MRT4530_101428C.1.pep
MEDSEAMAQLLGVQYFGNDQEQQQPAAAAPPAMYWPAHDAADQYYGSAPYCYMQQQQHYGCYDGGAMVAGGDFFVPEEQLVADPSFMVDLNLEFEDQHGGDAGGAGSSAAAAAAATKMTPACKRKVEDHKDESCTDNVARKKARSTAATVVQKKGNKNAQSKKAQKGACSRSSNQKESNGGGDGGNVQSSSTNYLSDDDSLSLEMTSCSNVSSASKKSSLSSPATGHGGAKARAGRGAATDPQSLYARKRRERINERLKILQNLIPNGTKVDISTMLEEAVHYVKFLQLQIKLLSSDDMWMFAPIAYNGVNVGLDLKISPPQQQ

SEQ ID NO: 104059 - protein, 66 aa, Oryza sativa
  Clone ID: PAT_MRT4530_101429C.1.pep
HGLFILELLGISGISGFDHILVNCTVDNNILQHKICHSAIRLQPSKTPHWSTNTRLVRFRCKGLVD

SEQ ID NO: 104060 - protein, 83 aa, Oryza sativa
  Clone ID: PAT_MRT4530_10142C.1.pep
SNFPDQETTSVAGAAASGRRHSDPNTSNQALPPQRHACLNPHKIHSKKTKLSESDGFHFISSFVTMHSFFFVVEGYTSCKITS

SEQ ID NO: 104061 - protein, 223 aa, Oryza sativa
  unsure (1)..(223): unsure at all Xaa locations
  Clone ID: PAT_MRT4530_101430C.1.pep
PSTHYWMAITTRFLIGSLNGLLGPIRAYAVEVCRPEHQSIGLSLVSTSWAIGLIVGPAIGGYLAQETLHKHATERNGDCKIGSLSTHLVDSEEFVKQHTGPAKDKSLFKNWPLMSSIVLFCIVSFDDMAYTEIFSLWSESDKQFGGLNFSSEDVGQVLAITGASILIYQTFIYPHIVKVLGIINTSRVAVILSMAILCSYPPMTYLSRPXLSIVVNIGSMLKK

SEQ ID NO: 104062 - protein, 165 aa, Oryza sativa
  Clone ID: PAT_MRT4530_101431C.1.pep
MANGLPGSAWPKHGCAWAEKREKKMHVEAYERGNMTEKSESSRSRLSNSFLGLPISSLFPFLYFMIRDLHVAKRVEDIGFYAGFVSTSWAIGLIVGPAISGYLAQPSEKYPILFLANSLFGRFPYFLPCLCISIFCFVILISCIWLPETLHKYSIERTEIVKLDL

SEQ ID NO: 104063 - protein, 384 aa, Oryza sativa
  Clone ID: PAT_MRT4530_101432C.1.pep
MHVEAYERGNMTEKSESSRSRLSKSILGLPISSLFPFLYFMIRDLHVAKRVEDIGFYAGFVAYYNRALQAYAVEVCRPEHQSIGLSLVSTSWAIGLIVGPAIGGYLAQPSEKYPILFPANSLFGRFPYFLPCLCISIFCFVILISCIWLPETLHKHATERNGDCKIGSLSTHLVDSEEFVKQHTGPAKDKSLFKNWPLMSSIVLFCIVSFDDMAYTEIFSLWSESDKQFGGLNFSSEDVGQVLAITGASILIYQTFIYPHIVKVLGIINTSRVAVILSMAILCSYPPMTYLSRPWLSIVVNIASMLKNNFVCKLPVYMVVQVTINTCSFILQNNSVPQHQRATANGLATTLMSFFKAFAPAGAGILFSWAQKRQHAFFFPVAID

SEQ ID NO: 104064 - protein, 51 aa, Oryza sativa
  unsure (1)..(51): unsure at all Xaa locations
  Clone ID: PAT_MRT4530_101433C.1.pep
TAXNNLATYRXXLVARXPGTPVAMTPPHPLSPHVSSLLVTXGRRTAWVRPG

SEQ ID NO: 104065 - protein, 134 aa, Oryza sativa
  Clone ID: PAT_MRT4530_101434C.1.pep
PRVRERVWVDWEDLILEDTVPLVGFVRMILHSGKYENGDRLSPEHEKAILERLLPYHPQYEKKIGCGIDYLTVGLHPEFENSRCLFIVRKDGEQVDFSFWKCIKGLIRQKYPMYADSFILRHFRRRQDYRISDS

SEQ ID NO: 104066 - protein, 57 aa, Oryza sativa
  Clone ID: PAT_MRT4530_101435C.1.pep
AKIPLTLQVQASLSLAYSKAWGPRPFRLQVSRALWPSTMNKNSNARIESYRALGSGQ

SEQ ID NO: 104067 - protein, 63 aa, Oryza sativa
  Clone ID: PAT_MRT4530_101436C.1.pep
NPKEGNLFISTRGIKKTHPSGHSHESRTFINIAPCKKGVMLCPKLICNLGPAVPGPVQRNTRS

SEQ ID NO: 104068 - protein, 75 aa, Oryza sativa
  Clone ID: PAT_MRT4530_101437C.1.pep
VTIAMPRCSIDWSCCNMKMVLLPDEAPDGHRYSFQFLSCGSLNLSMEERTTDGIRRWITPTRHLHLLQVTHTTVA

SEQ ID NO: 104069 - protein, 38 aa, Oryza sativa
  Clone ID: PAT_MRT4530_101438C.1.pep
MPGHVGTGSGGQIAWRTQGEKAQVDRYTFRASAHPGVK

SEQ ID NO: 104070 - protein, 131 aa, Oryza sativa
  unsure (1)..(131): unsure at all Xaa locations
  Clone ID: PAT_MRT4530_101439C.1.pep
KFLSAAAAAVDAAMATQTRPLVSDKGLEVDMHTDNSSSHALSEVFRAPLRPDVXPVTHRLLDCNRRQPYAEARRADHHTSAXVEGHGGAPSSRMPRVPGGGTNRAGQXGAFGNMCPGGRMLGPTKTWPKRH

SEQ ID NO: 104071 - protein, 164 aa, Oryza sativa
  Clone ID: PAT_MRT4530_10143C.1.pep
ATAASTTSGWARSSRSTATGPAGGLAALLAETVRELRHFFKTETVSRKILKKHDKRTGGALAAPVAEAVRERRHFFKTETVSRMVRECEAMMAEAAVLPAEAAPEALAAAAEHGIFRNTVAALLTMEDVRRGSSTHGRHSLPPLTLPDSDWLRSFQPPSPIPIQ

SEQ ID NO: 104072 - protein, 192 aa, Oryza sativa
  unsure (1)..(192): unsure at all Xaa locations
  Clone ID: PAT_MRT4530_101440C.1.pep
SCKIKXVFDSYYVMNNWHLRLLASIFGDYWXSGFGDDWIXQVLNRYRWRFGPVRSGMGCRXRSMHVVGEYSIXHTIEILCAYGMQSRIWKESKFGTIGXVKLVSCTGRFLRWIRTSYMSLVRGFRLPTSCINREGGSNWRITGGQTGGIAAVRPTAASSGSFRSWWSDRXSISIRLIASRRSDQHILRSDHD

SEQ ID NO: 104073 - protein, 207 aa, Oryza sativa
  unsure (1)..(207): unsure at all Xaa locations
  Clone ID: PAT_MRT4530_101441C.1.pep
MIPVVVVLHRCAVSSSWPDRVFEAKHIAGAGEQDMQDDLPDDLTASQYIGYDKFLGGLLQEGFDEVSCRSRYQFARYHKNFTRIPSSYLLERLRRQEALQKKCGPGTKSYKQAVKLLRSSQGVNMTTDCNYLFLTVHAGLGNRMLEIASAFLYALLTNRILLLDRXQEIGDLFLGTFPGTSWLMPXDFPLTMXEFTQSSPESYGNML

SEQ ID NO: 104074 - protein, 489 aa, Oryza sativa
  Clone ID: PAT_MRT4530_101442C.1.pep
MESLRDMVLPPGFGFHPKDTELISHYLKKKIHGQKIEYEIIPEVDIYKHEPWDLPAKCDVPTQDNKWHFFAARDRKYPNGSRSNRATVAGYWKSTGKDRAIKMGKQTIGTKKTLVFHEGRPPTGRRTEWIMHEYYIDERECQACPDMKDAYVLCRITKRNDWIPGNGNELDNSDPHPEPYDAPPSVISTEQLNPAAEPVVGVEAAPVTVAEPDGVTTSAITANIPSPSDDINLDDWLNELFDPFFDPEQSLASADLSPDEQNVESSNVGALAPKVEQDYSSPNENVVDDTEYLLPEDVYNILHPGTDDFNMLQNPLDQYPIQYATDVWSGIQKEELWSPQANAEPSQSNEAADNGIIRRYRSMKTPETSVPQFKGKTQAKMRVGINKMATSSSESINQTIKFENSGRLVEHQKNQAHDVASTKRSDAGKPSTELSSNRGFLRGIRNAFAGCSDARWNMILVAGFAIGVAVVALHIGQRLGLSQRDQQHT

SEQ ID NO: 104075 - protein, 270 aa, Oryza sativa
  Clone ID: PAT_MRT4530_101443C.1.pep
MRHTSFWTERRCLPRERGVAPGSPWRVGLARPHGGSIKPPLASSAPKSRCPRRKSGKVEPAECDRDGDRDHLQTRTKLKDPRTCWCYTTTKEATPADCVQNSTQVAVTAWTLSFVLNGSTSSTYTQVLNHTVQVNRTKEKYRTSCRYVRRYMIGRILVVLLQQQAVLVSKQLPGHRSAASQRTVAAQTSIRHAMALWQRGDTRGHPGLPAERDGRIDRSIDRSPARPRSKATAVTATGRATATRTLVLTADRAPGLQTAQESLVATDEPS

SEQ ID NO: 104076 - protein, 104 aa, Oryza sativa
  unsure (1)..(104): unsure at all Xaa locations
  Clone ID: PAT_MRT4530_101444C.1.pep
PLPVSKEIVNAKGRFRNSSELLQEGHSPSARFLQLRSGRHREERGCSFFPXLSRSFLSNGLEMYHYANVNFHTEFKKRLLDFSFFRKKTKRSHVQSFIHGFFIL

SEQ ID NO: 104077 - protein, 517 aa, Oryza sativa
  Clone ID: PAT_MRT4530_101445C.1.pep
MESLRDMVLPPGFGFHPKDTELISHYLKKKIHGQKIEYEIIPEVDIYKHEPWDLPAKCDVPTQDNKWHFFAARDRKYPNGSRSNRATVAGYWKSTGKDRAIKMGKQTIGTKKTLVFHEGRPPTGRRTEWIMHEYYIDERECQACPDMKDAYVLCRITKRNDWIPGNGNELDNSDPHPEPYDAPPSVISTEQLNPAAEPVVGVEAAPVTVAEPDGVTTSAITANIPSPSDDINLDDWLNELFDPFFDPEQSLASADLSPDEQNVESSVSFFTVTVFAVLSLCILAHRAIFLLNLQNVGALAPKVEQDYSSPNENVVDDTEYLLPEDVYNILHPGTDDFNMLQNPLDQYPIQYATDVWSGIQKEELWSPQANAEPSQSNEAADNGIIRRYRSMKTPETSVPQFKGKTQAKMRVGINKMATSSSESINQTIKFENSGRLVEHQKNQAHDVASTKRSDAGKPSTELSSNRGFLRGIRNAFAGCSDARWNMILVAGFAIGVAVVALHIGQRLGLSQRDQQHT

SEQ ID NO: 104078 - protein, 118 aa, Oryza sativa
  Clone ID: PAT_MRT4530_101446C.1.pep
SLHRNVLDDEHDYNFLVLVFFSGDLGLGKSLDGAWYVFSPRSRYKERGVRPARGIKTTAVGYWKSNSAEADVVDDDGEVIGRVNSLTLALGHQPRGKATHWRMKEYRIPQFQIPPDAW

SEQ ID NO: 104079 - protein, 81 aa, Oryza sativa
  Clone ID: PAT_MRT4530_101447C.1.pep
GGKEAAVHGSPRATAATEEAVGAEGDGGAARVDGDGGVPAVGELGEAVDGVGGDRKLFDSTRLRVPLQLLRPCLHVPPRQQ

SEQ ID NO: 104080 - protein, 457 aa, Oryza sativa
  Clone ID: PAT_MRT4530_101448C.1.pep
MLLRSGRRLAAGGGGGGGGAPRGSPPGGGSPLNSSRRSSRRPRPSGSSPTSSPGQIRSPPDDGDGQPPPPRRRRRGEPPSPSPVPGTATSEAAVAGLPIPEEIQEEILLRLPANSVLHCRAVCRSWRHIASTHAFLLRHHRRQPEFPLVTSFRNPAPADQWMPNCLDAILLRSAERRPIFSFPRPFCGGFPITASCDGLLIVGGYICNPTTRQRAPISRWTIDNIVGLYRHEPSGEYRVLYFASSDTPSEVYCPICYCVLAVGSNKPRQIPCSVTPMDEEIIGAPGPMIFGRPVLIHGNLHLHWKKRRGTRYNRILVFNTVAESFRQLRPPAVNPRNYTRLLAMDGMLAMSVSKERVMDMSIFMLEDYDHEVWVFRYKIKLPTMEIRRFQDQGDWWAEVVSEEGDILVSCFGWLLHCDNKGNLVSKFQYNDDLPAISPHRIKESLIQHAFFKEGTKK

SEQ ID NO: 104081 - protein, 509 aa, Oryza sativa
  Clone ID: PAT_MRT4530_101449C.1.pep
MATCSWAATTAAAAPPRPPARCRSRVAALRRTAAASAAAASCVLAEAPKGLKVEQADAVEPAAAAAARRDVGPDTVASIILGGGAGTRLFPLTRTRAKPAVPVGGCYRLIDIPMSNCINSKINKIYVLTQFNSQSLNRHIARTYNIGEGVGFGDGFVEVLAATQTTGESGKRWFQGTADAVRQFLWLFEDARLKRIENILILSGDHLYRMDYMDFVQKHVDKGADISVACVPVDESRASDFGLMKTDKNGRITDFLEKPKDESLKSMQLDMGTFGLRPEVADTCKYMASMGIYVFRTDILLRLLRGHYPTANDFGSEVIPMAAKDYNVQAYLFDGYWEDIGTIKSFFEANLALTDQSPNFYFYDPVKPIFTSPRFLPPTKVENCKVLNSIVSHGCFLTECSVDRSVIGVRSRLEPGVQLKDTMMMGADYYQTEAERFSELSDGKVPVGVGENTIIRNCIIDKNARIGKNVMIMNSQNVQEAERPLEGFYIRSGITVVLKNAVIPDGTVI

SEQ ID NO: 104082 - protein, 47 aa, Oryza sativa
  Clone ID: PAT_MRT4530_10144C.1.pep
IIIINLDPKKNGNGRYPKTAAYGHFERDDPDFPWKVVKPPKWEKPSA

SEQ ID NO: 104083 - protein, 341 aa, Oryza sativa
  Clone ID: PAT_MRT4530_101450C.1.pep
MDFADAPSHDKNVDFKTDIPYTGDSLVVVRDALLSQLQQDRLRKDIIVAELAKIERAMALRDVSQSPTPRHAAAAAAAGKTITTVATPAKKPSPSEKSEPAVQKSMPPSAWSCAVCQVRTTSERNLRDHCGGQKHQSKVAALEKTTKAMARTTAKPSPGAAARWGCSICNISCNGECDFDTHLKGKKHQANTQALLEQNKKSSVNPESQGTKAAAATLICRVCQAKFTCQSDLQSHLKVMKHQLNLRAPSSDGSSFTSATSESLSLELYSCKVCSVKCTFERMLAYHLTGKKHLKQENLQLSCEICKLQCNSEKVLSDHRYGKKHQAKLEKVLQAKLNATE

SEQ ID NO: 104084 - protein, 43 aa, Oryza sativa
  Clone ID: PAT_MRT4530_101451C.1.pep
YSDILSSGWPSLGVIFVFPSPPDWPSHGLDGCLPVPFRRRSAP

SEQ ID NO: 104085 - protein, 108 aa, Oryza sativa
  Clone ID: PAT_MRT4530_101452C.1.pep
FFFFFFTSHQPFTHSHPNNSPTTFPWPPRIKLDKIIIYFHPTTNYSGSVFFVRERQLKPLFAPPLPNNGNAPFSSLPRVITSIHPAWGNCSPSLWALLQPLINSLPYF

SEQ ID NO: 104086 - protein, 600 aa, Oryza sativa
  Clone ID: PAT_MRT4530_101453C.1.pep
MPPCRCAHSPEGECAAVEWPCLGAPPPLSPLSGIGYGRRRQTTAGGGGGLPRGVCDNRLWGEGGAEEEMIEVTVILRLSDCHEEKMLFSTIESIRKIGKCAIKRNIPEIEFDADGSIFFFSGIIADCCRGKERSAFPASDSGASIQNQKQISSHKYAILDVDSTLRVLEFISDEERRMMAQFFCRMWDRAQGKLYVVRICDKVFTELSDKNTQLLDISSLHVATLMVYNSINKQLAGPHKDPPCMNVVAKQMEQYKKETPEGITLEEFRRLIMEWVRKDLRLVLANKAAVAIMAAPLLAVTTKSAGRQVPRVGPAVEKVPTPLLFTVFSVGLMFLQDIRAGKQINSKTQSPTWPGTFGDVGPEGEVSALLLISPRGVGESWGFHPEPPAEPAKGGLCGLPREILPSPIFFPSKTPISSHSGVSSADVAMGQAWASLQDKLQGRQWKEKQVRKITDKVFDRLTEDTKKREQEALTFEEVYIAVLCVYNDINKYLPGPHYDPPSKEKLKAMMNEYDINLDGLLDREEFAEFIRKLTAESLCAISFKLLVTLVAAPALALATKRATEGVPGVGRVVRKVPNSIYASVITLGVVMAQKSTEGVE

SEQ ID NO: 104087 - protein, 72 aa, Oryza sativa
  Clone ID: PAT_MRT4530_101454C.1.pep
RWHFCLMLLAGIYVASVCTDNTRPFANQIFRLQWSRVLRLCIFHTFHLFFPRIKRNSISTYGHKKNKLKKKN

SEQ ID NO: 104088 - protein, 103 aa, Oryza sativa
  unsure (1)..(103): unsure at all Xaa locations
  Clone ID: PAT_MRT4530_101455C.1.pep
RGRACGARGGTGRGAPGQAHLHLTAFIGHRLPSQTNTILFCTLCPHSCAPIPXIALDQAHLTSEFFRDRLPEKKLQLVDMIFLLILLSPGPGCHSLDPLPPLL

SEQ ID NO: 104089 - protein, 121 aa, Oryza sativa
  Clone ID: PAT_MRT4530_101456C.1.pep
PADVNVTSLRVFHACVNIPSSSCAVDSATVAGTSPSLPHANRTVNSSRIREALCSTAGKCNLRRKNTPLLNTINTYVNSNQRTLKRAGVNTIHVIEEVNTFTDDVDIRIQNPTGQAFIGAY

SEQ ID NO: 104090 - protein, 611 aa, Oryza sativa
  unsure (1)..(611): unsure at all Xaa locations
  Clone ID: PAT_MRT4530_101457C.1.pep
MADGHHWNIVKIPPIVQELAAGVHEPPSQYMVGEKDRPAIAGSDMPEPIPVVDLSRLSASNGEDSAGELAKLRSALEDWGLFLVNGXFGTIMEGSILSEMINVTRGFYKLPLEEKQKYSNLVNGKDFRIEGYGNDMVVSEKQILNWCDRDVLHEYTMRCREITSLVLARLARLLGLREGYFVDMFDEDATTYARFNYYPRCLRPEDVLGLKPHSDGSVITVVSVDDTVSGLQVLRQGVWYDVPVVPNALLINMGDGMEIMSNGLLKSPVHRVVTNAERERVSVVMFYALDPEKELEPAPELVDDEKRPRQYAKMKIKDYLSGFYETFARGTRVIDTVKMEGKGKEQDVEMKEPSVATILTSFENSFDGFGSMSTPLYQTATFKQKIAEIAHYHGALVLVDNSIMSPVLSRPLELGADIVMHSATKFIAGHSDLMAGILAVKGESLAKEIAFLQNAEGSGLAPFDCWLCLRGIKTMALRVEKQQANAQKIAEFLASHPRVKKVNYAGLPDHPGRSLHYSQAKGAGSVLSFLTGSLALSKHVVETTKYFNVTVSFGSVKSLISLPCFMSHASIPSAVREERGLTDDLVRISVGIEDADDLIADLDHALRSGPA

SEQ ID NO: 104091 - protein, 77 aa, Oryza sativa
  Clone ID: PAT_MRT4530_101458C.1.pep
FSAVLRRVCLFPHRSIGNSSRFLSLVPPPSLFPPLLCLPSFFFSFSNPLPPWLLCFPPIFPLCIIIGLIQFKKNTPH

SEQ ID NO: 104092 - protein, 867 aa, Oryza sativa
  Clone ID: PAT_MRT4530_101459C.1.pep
MASLLNSSPSSPCEPTHARPQPRRPHPIPIPANPPPTSPFLQTLAHALMSTAADPSSLSGDSSPTSSGDAESSSSPSSSAAAAGGSDDPAPVDQVVASGSGAGGDGDAAAAVPTSPRIGMYFETEEDAYEFYKAYAARLGFVVRKSNKSKNSRHTVTRRLFVCSKQGFRQEPKKPPQDEAAAASPPPPRCPDSRTGCLASLTIKLLPSANAFRVTDFATEHNHPLASAAPAVSLALLPPSSVRRSYKKRKRGVIVSRIFVCSREGVSARAKPESIAIVSNNASTGPSGTPRPGPPPTRTGCQARMVIKITPCRTYRVAKFVPEHNHPLANPDSVHKLRSHKMRARAHELGAGELHRRKHGKGVQLGDAGAVLEYLEELQVGNPSVYYAVGVGPDGKSAANFFWADAESMIDYRSFGDVVCFDTTYELNGYGRPFALFVGVDNHKQMLVFGAALLYDESIESLKWVFKAFADAMCGKQPDTVLIDERPECAMAAAEVWPRSSHCTSVWHIYHNSKRHLKQVFEGSKSFANALSHCLFECDDEVEFLSAWEKLIEKHDVGENEWLNKLFLEKEKWALPYWRALFSADILTTLRKDNMINDIKRELSEQEDILQFLRRYETMLEEHRSKKLQADVDGSQVTLPIPSLRMLKQASSAYTPEAFKMFQGEFEAYMNCMSFPCGGLGTISEYKITLDEKPSESIVKFDALDGSATCSCRKFESVGIQCCHVLKVLDLKNIKELPEQYILRRWRKDARSVRIGEEPSGGSSSMRSASEVRFSTMCRFLSLIASRAARSEEATSYIESQSSVLLKHLDDILQTGYPDIGNHVVASSSQPISFVGNQLPDHTSQARGVPQTTNGINLNISAKIIYY

SEQ ID NO: 104093 - protein, 214 aa, Oryza sativa
  Clone ID: PAT_MRT4530_10145C.1.pep
MGRIQYAAVARGAVVMAEHGDAAFPNAGAVARQILDRLSAGDGGGGGDCNISYTQDLHVFHVKRTDGVTALCMADDAAGRRIPFAFLEDIHGRFVKTYGRAALTALAYAMNDEFSRVLGQQMDYYSNDPNADRISRMRGEMDQVRNVMIDNIDKVLERGDRLELLVDKTATMQGNTMRFKRQARRFRNTVWWRNVKLTQVPCKRSSAVAIFLPT

SEQ ID NO: 104094 - protein, 317 aa, Oryza sativa
  Clone ID: PAT_MRT4530_101460C.1.pep
MADGHHWNIVKIPPIVQELAAGVHEPPSQYMVGEKDRPAIAGSDMPEPIPVVDLSRLSASNGEDSAGELAKLRSALEDWGLFLGSILSEMINVTRGFYKLPLEEKQKYSNLVNGKDFRIEGYGNDMVVSEKQILNWEITSLVLARLARLLGLREGYFVDMFDEDATTYARFNYYPRCLRPEDVLGLKPHSDGSVITVVSVDDTVSGLQVLRQGVWYDVPVVPNALLINMGDGMEIMSNGLLKSPVHRVVTNAERERVSVVMFYALDPEKELEPAPELVDDEKRPRQYAKMKIKDYLSGFYETFARGTRVIDTVKMSE

SEQ ID NO: 104095 - protein, 111 aa, Oryza sativa
  Clone ID: PAT_MRT4530_101461C.1.pep
HASAHASGGFYKLPLEEKQKYSNLVNGKDFRIEGYGNDMVVSEKQILNWCDRFYHIVEPESRIAHSLWPTQPPSFRDVLHEYTMRCREITSLVLARLARLLGLREGYFVDM

SEQ ID NO: 104096 - protein, 94 aa, Oryza sativa
  Clone ID: PAT_MRT4530_101462C.1.pep
VPVVPNALLINMGDGMEIMSNGLLKSPVHRVVTNAERERVSVVMFYALEPAPELVDDEKRPRQYAKMKIKDYLSGFYETFARGTRVIDTVKMSE

SEQ ID NO: 104097 - protein, 476 aa, Oryza sativa
  Clone ID: PAT_MRT4530_101463C.1.pep
MSAAAAAAAAAAIPTSLGRLFHLRPTPNPSRNLSGSSAQPLLRLSYHPRLTLSRRMEAPAAIADSHGGGDLSASAVGAEALGAVAAPDFDVEMKEPSVATILTSFENSFDGFGSMSTPLYQTATFKQPSATDNGPYDYTRSGNPTRDVLQSLMAKLEKADQAFCFTSGMAALAAVTHLLKSGQEIVAGEDIYGGSDRLLSQVAPRHGIVVKRIDTTKISEVTSAIGPLTKLVWLESPTNPRLQITDIKKIAEIAHYHGALVLVDNSIMSPVLSRPLELGADIVMHSATKFIAGHSDLMAGILAVKGESSLAKEIAFLQNAEGSGLAPFDCWLCLRGIKTMALRVEKQQANAQKIAEFLASHPRVKKVNYAGLPDHPGRSLHYSQAKGAGSVLSFLTGSLALSKHVVETTKYFNVTVSFGSVKSLISLPCFMSHASIPSAVREERGLTDDLVRISVGIEDADDLIADLDHALRSGPA

SEQ ID NO: 104098 - protein, 92 aa, Oryza sativa
  unsure (1)..(92): unsure at all Xaa locations
  Clone ID: PAT_MRT4530_101464C.1.pep
FFPRGTRSEDGKLGAFKKVAFSVATKLGAPVIPITLLGTGKLMPSGMKGILNSGSVKLIIHHPIQGNDVEQLCSEARKVIXNALILNGYGVH

SEQ ID NO: 104099 - protein, 210 aa, Oryza sativa
  Clone ID: PAT_MRT4530_101465C.1.pep
GGGVPSWQRLFRRRSFGAAMIGVSVEVCRRKPILGLPESAMATSLGRCRASTLPLLDRTLQVKTKSSWTGNGDVFDAMAFLKALSRSAARPGPRLFFNVLCEELQLVVAVPVGKSGTYAGFPSGTEEVAHMLEIKGASSKTMTFEAPGIPKKRHRVASLHPAQNTSKNIKNIQEHINMNIKNILPNHREPSKLLIPIKNTITKYTSRIDR

SEQ ID NO: 104100 - protein, 516 aa, Oryza sativa
  Clone ID: PAT_MRT4530_101466C.1.pep
MAAANAGAMVRFVAAFLAAVLVMMVPCAPRAAAAAVGVNWGTVSAHRMPAPVVVELMRANRIGRVKLFDADQAALRALMGSGLQVMVGITNEMLQGIAASPAAADAWVARNVSRYVGPGGADIRHYEASTCQSRTQGMQRWYIAVGNEPFLTSYQGQFQSYVLPAMTNIQQSLVKANLARYIKLVVPCNADAYQSASVPSQGVFRPDLIQIITQLAAFLSSSGAPFVVNIYPFLSLYQSSDFPQDYAFFDGSSHPVVDGPNVYYNAFDGNFDTLVSALSKIGYGQLPIAIGEVGWPTEGAPSANLTAARAFTQGLISHVLSNKGTPLRPGVPPMDVYLFSLLDEEQKSTLPGNFERHWGVFSFDGQAKYPLNLGLGSPVLKNAKDVPYLPPRWCVANPGRDLNNVENHLKLACTMADCTTLYYGGSCNAIGEKGNISYAFNSYYQLRKQDAQSCDFDGLGMITYLDPSIGDCRFLVGIDDSRTSTIYSSGDCSRRRFGLWILAFLVIGFLQIGVYL

SEQ ID NO: 104101 - protein, 51 aa, Oryza sativa
  Clone ID: PAT_MRT4530_101467C.1.pep
MARGIGRYCSGLENDAFSGCCISIVRFGNPEKSEGSREVAAPELQFGELAA

SEQ ID NO: 104102 - protein, 189 aa, Oryza sativa
  unsure (1)..(189): unsure at all Xaa locations
  Clone ID: PAT_MRT4530_101468C.1.pep
VASLPAVAVRRPASGGDPGVALERRXGVRARAGAAAAAEIETAVXGWPSEGRKRATXNGCVLAILGLATLGPATALSTDALHAPSASHDTPTSSALPPRPRTGKGRXVSRVGIPSKMAASGGGFFCTCSGGVEGGRSSADGGGGGAADGCGRRAKPADNDATPRELGGICIKHSLAGSRVNRQGATDED

SEQ ID NO: 104103 - protein, 32 aa, Oryza sativa
  Clone ID: PAT_MRT4530_101469C.1.pep
LHYSTPELSNLSAMVRSSTALLAQLRTMSGEE

SEQ ID NO: 104104 - protein, 180 aa, Oryza sativa
  Clone ID: PAT_MRT4530_10146C.1.pep
GDCNISYTQDLHVFHVKRTDGVTALCMADDAAGRRIPFAFLEDIHGRFVKTYGRAALTALAYAMNDEFSRVLGQQMDYYSNDPNADRISRMRGEMDQVRNVMIDNIDKVLERGDRLELLVDKTATMQGNTMRFKRQARRFRNTVWWRNVKLTAASVFILLVIIYIVLVYMCHGFTLPSCI

SEQ ID NO: 104105 - protein, 66 aa, Oryza sativa
  Clone ID: PAT_MRT4530_101470C.1.pep
MTTDPPRGPLVAVGGDITDKNREYHGRWFQVGSCSYSGGVVLAKRIGTTDSGESGAAWEQTGGGSM

SEQ ID NO: 104106 - protein, 65 aa, Oryza sativa
  Clone ID: PAT_MRT4530_101471C.1.pep
LCNHRVDGYHSPGEHIDPSAARLVVVVVRVLRMPVVVVQAGVLRLGLVAYRVIRSLQHQPSICSV

SEQ ID NO: 104107 - protein, 189 aa, Oryza sativa
  Clone ID: PAT_MRT4530_101472C.1.pep
MELHLVLNFWVKNVLKVCMRPKSYNSKGSADHFAFTPASPAHSLHPNPSLSRRFHDPSAADSSSSSTYRRTTSSTSTSTSPTSAANPHHCRHIFASSSSPTAIDRFDNGISHLNSFLRRQRTAIGELGFGGRPASRSMKIVLAAASTKKTRAGSAAASVGAQGGGGASRGGAHWPPPPPSQARQPPLPG

SEQ ID NO: 104108 - protein, 54 aa, Oryza sativa
  Clone ID: PAT_MRT4530_101473C.1.pep
MCGRDTIRRGIRSCRSLRTLFLEERHITDKGGEWLHESAANNTVLVTLNSYMTE

SEQ ID NO: 104109 - protein, 136 aa, Oryza sativa
  Clone ID: PAT_MRT4530_101474C.1.pep
LTLRAGTILGFTVEDTIVLVKSSCSPSLPTSSRHRPADASSVPRPPCHAAASTPQVLQRHLANPATLQRQARPGVQLDVAILATKHLPKPERLSYSMFSSLFFWKLQHVQSKYPTTFALIDFVCLYEWEWHRLTSS

SEQ ID NO: 104110 - protein, 76 aa, Oryza sativa
  Clone ID: PAT_MRT4530_101475C.1.pep
NFFSIGAWYLMEFGPPVMYLIIWELVVFAIKSDGFICKGLGQRHYDMKEKFPPAFDDEILNGPLSFFFKKTLFGVE

SEQ ID NO: 104111 - protein, 636 aa, Oryza sativa
  Clone ID: PAT_MRT4530_101476C.1.pep
MVDEIGMDILTIALPAVLALAANPITALVDTAFVGHVGSTELAAVGVSISIFNLVCKLLNVPLLNVTTSFVAEQQAVDAAEIFSPRIGNEISIPQEKASKQRRFLPAVSTSLALAAGIGLMEMVALILGSGTLMDIVGIPVDSAMRVPAEQFLTLRAYGAPPVIVALAAQGAFRGFMDTKTPLFAVGVGSLVNALLDAIFIFPLGLGVSGAALATVTSEYLTAFILLWKLNNKIVLLSWNIIGGDVVRYLKSGALLIARTIAVVLTFTLSTSLAAREGSVPMAGYEICLQVWLTISLLNDALALAGQALLASEYAKGNYKKARVVLYRVLQIGGITGVALATILFLGFGYLSLLFTDDPAVLDVAQTGVWFVTVSQPINAVAFVADGLYCGVSDFAFAAYSTVQISILVIFHCIVLFAGAVSSAVLLVAAPKFGLGGIWAGLALFMSLRAIADHKDTQHEQESYGPIVSGGPISSKDRAGVGGRAAEAQPSRKNIRKERLRPEGDDDEGIKGFGIGIGEGKMPCLNVSTNVNLDGVDTSAVLADASKTVATIIGKPEAYVMVVLKGSVPMAFGGTQEPAAYGELVSIGGLNPDVNKKLSAGIASILESKLSIPKGRFYLKFYDSKRSDFGWNGTTF

SEQ ID NO: 104112 - protein, 131 aa, Oryza sativa
  Clone ID: PAT_MRT4530_101477C.1.pep
MDISEPNKGYASCGSVFDLCLTQPNTRRHPRQSLPCHAPAFRLVRHTSRARAPHRVMPSCVGPPPTKRPKARAKGCAATGARVIPSPRASPSGWSDNGHHGITPSPGVEHLVGAGCAAATGLLGQCGWRGV

SEQ ID NO: 104113 - protein, 91 aa, Oryza sativa
  Clone ID: PAT_MRT4530_101478C.1.pep
MAPETLMVYYGYRVHPQTHGYTIIAFHPRRARLPVAEGEAATGGAMRLQASEAEGGGRTGQWEASTAAAMDTRAARPYRSCDCCPIPTARG

SEQ ID NO: 104114 - protein, 71 aa, Oryza sativa
  Clone ID: PAT_MRT4530_101479C.1.pep
LKTLNNSTSSTFPPQILLQFNLSSTHSSIAESNLHCHMTLLHLCTKAKRDMESRYRFLMVNFIGEFIPLNL

SEQ ID NO: 104115 - protein, 107 aa, Oryza sativa
  Clone ID: PAT_MRT4530_10147C.1.pep
MASTYFPDLCFDRMAQADKTIRHQSPSDIVSSLAAVPDLRPSMENAHAEGDVAVELPDGFALILAIVFLHVMTIKDNNYITNRKTILKLYWTKQKIATKLYFKSKEH

SEQ ID NO: 104116 - protein, 55 aa, Oryza sativa
  unsure (1)..(55): unsure at all Xaa locations
  Clone ID: PAT_MRT4530_101480C.1.pep
EQLMRLIDKSYRYLSASNNKCTGRRWIHXGLHAFFGRFYQDYRSSWPKDGGGSAY

SEQ ID NO: 104117 - protein, 348 aa, Oryza sativa
  unsure (1)..(348): unsure at all Xaa locations
  Clone ID: PAT_MRT4530_101481C.1.pep
MESAWTNLPGEIMELIADKAGDALTGRALSRSVCRSWRAAVPETPRLLLPAAAARGAGDEYALVFPLSRGWSVVVDVRDTSCRLSHLATGATAPLPRLNAVRATAGSRVVHLXDTEHAGTGDEQFWIKIKFLWYSMFLESDLQFSHLLRFAVHVPAAASTDGMLIMMYHPVFAMDRGGTTAVIDAATLEVLDLVDAPPGTRNVSNKLLGTANGDDTVMSLDYLHLVALPSKLLVVRVRVNKSSSEPEGFDVFELGRQDHRDGEGKLAWREVAGDDVGGNYDLFLDDHHATFGGGGGGAGGDSGSRIYYVHDGKEAYCYSKRHGELECVYSAPEGSEEQCSTMPSWFVP

SEQ ID NO: 104118 - protein, 123 aa, Oryza sativa
  Clone ID: PAT_MRT4530_101482C.1.pep
MAQLGGALLGLASVMPLASATHACAAQPTVRGRRQWRSATMRGWRDSRRGAHASSSGGASSESGRWASNLGLAAGPSDGAVAVGALNGVREDDGYGTLFESSGVCLELLKKRGVMSWALGRES

SEQ ID NO: 104119 - protein, 234 aa, Oryza sativa
  Clone ID: PAT_MRT4530_101483C.1.pep
MENIYTLVPPPHNTRDRGDIALPFRRTGGRVGRTCDTASLPQPGRAAAWWRAVVRGPKAVARRHGAGPQRSCGAAARDHAGRTGSFLGEPGMAVLCDCRRKAARWISWSEDNPSRRYLTCARARDGGCTFWSWYEPETTPYLRQVLNDLHNVVRGLKEEKSILRASLVSARAQIDELTAVHNGDVADWTRKLKEKDDLACELRARVVQLEEGRKLLLLIVAGLVLLIVALWLRG

SEQ ID NO: 104120 - protein, 91 aa, Oryza sativa
  Clone ID: PAT_MRT4530_101484C.1.pep
MAYLGGSPIHHLRACYLATLSTATSIRRHVDPHLRRRFSVVITSIPTSSTSICRPRIDQRQGGRGELELIAFLAVASKRGRAEAAQLRRES

SEQ ID NO: 104121 - protein, 1609 aa, Oryza sativa
  Clone ID: PAT_MRT4530_101485C.1.pep
MAEPHVVPETLREQLVSVFRETFDVEPKSRARTYRKPYPDFYDTVPYPRGFRVPDFIKFTRDADVELRLAHLTSVKQKYNEPVVDYIRRFRDTRNRCFSLALSDKDLAELAHSGLLPHFKEKLEDDDLMSSDDENVDMCVAEWSWASKSKPFVCSALKPVSQKNWQEEMKFTFDVAKCDRIFDYLLQEKQIKLPNGHVIPSPEELKRSAYCKWHNSHSHATNDCNVFRRQVQSAINEGRLRFAESPKMQLDSNPFPVNVIDFENSKVLVRPSQAESTKNKAVIVSDGGMHTVKTPSSGSGQSSLPRMIKPRSPEIGRWKVNESRNKATKRVEKPKPTFKDLSAKYEGRAGKGVASRPNNFKRPRSPPMQGFEGPDRRWEDFHASPPYPPFGPPMPLPWGPPPVGFPPCPPWGWCGPWVPPAPMTYEPFHPMPYQPFHPVPYGPFHPVPFEPFHPGWEAPRRPVFDRLSWPRDDRSNQRNRSYDEKNGGLVNKVHRVKEGGDSGGNSSAVLAAKNDQSTSGNSHVSNKVISTAVATEQAQVNSAPTATVPAQMNRTAITAVPAEMNSSSAAVPAADCGGGSCGENVSMQPGKGKQLQWCPPDIGHTRKRRLQRLRAQELRQSKAEKMREEIFNDINPEPMVRVRREWRAKQVAASVQENSDEEHDLLECGSPVIRDGSPLPERMDINMVFTLPSEFRVVDEEIAQLCLAPKDVIFEKPDESSRHMKPLYIKGHINGRPISRMLVDGGATVNLMPYSVFKKLGREDSELLKANLTLNGFTGEPTEAKDIISMELTIGSKTLPTAFFVAEVQEQYRSNKNDIWEAIDDFDEVEKLGQGFSSADPLEKVDIGDGTIPRPTFINQNMTADYKVKVIGLLREYVDCFAWEYHEMPGLSRELVEHRLPIKSGFRLYKQPPRRFNSNMYDWIKEEIDQLLKAGFIRPCRYAQWISNIVPVEKKNTGKLRVCIDFRDLNKATPKDEYPMPIADMLINDASGHRVISFLDGNAGYNQIFMAEEDMSKTAFRCPSFVGLFEWVVMTFGLKNAGATYQRAMNLIFHDLLGVILEIYIDDIVVKSECMDHHLADLCLAFERMRQYGLKMNPLKCAFGVSSSKFLGFIVHERGIEIDPAKIEAIRKVTAPQCKLDMQKFLGKTDVIKYMLQKPILSGRIGKWAYALVEYDLAYESLKSMKGQIVVDFIVDHRINDDMKRVSYSSVCPWKLYFDGSACREEQGVGVVLISPRGNIFETSVHLEYFCTNNQAEYEALLRGLQILESMDVKNIEAYGDSLLVVQQVSRNYQCFDGSLNMYLEKCLEIIANLDDFVIKHISREENVLANNLAQQASGYRVSRDGLLLKCLSLDQSKVAMGEVHEEHIIHRFGIPQTLTTDQGSSFMSHQVREFTESFKIKLLCSSPYYAQANGQTESSNKTLIRLIKKKIEEHPKRWHEVLSEALWAHRISKHGATKVTPFELVYGQEAILHVEVNLDALRLARQNNLSAVDYHNLMMDGIDEVSDERLKALREIEKDKLRVAKAYNKKVKEKSFQIGDLVWKTILPVGSKDNKFGKWSPNWEGPYRIVEIVPGNSYFVQSLRGYKLPRAFNGRYLKRYYPSVWQDA

SEQ ID NO: 104122 - protein, 395 aa, Oryza sativa
  Clone ID: PAT_MRT4530_101486C.1.pep
MSLLLLLLLLLLLSLFSGVSAEVPLTRTHVTSLPGFNGALPSRLETGFVRQKFFAIMFYLTMTRYVTVDEENGAELFYYFFESEGDPGSDPVLLWLTGGDRCSVLSALFFEIGQQPNSKQAPLSPKSVRSCGPLKLVIEPYNGSLPRLHYHPYSWTKVASILFVDSPVGAGFSFSRDPKGYDVGDVSASLQLVKFLSNWFGGHPEYLTNPFYVGRDSYAGKIVPFIAQKISEDIEAGVRPTLNLKGYVVDNPTTGERIDYESKVPYLHGVGIISDQLYELLNEVSKPHILYKKCIYMSLIPKFESMDRKILKEELGILKHRPPRPSIQCVSYSNYLSYFWANDNVTREYLGIKKGSVDEWIRCHDNDLPYTKDIKSSIQYHHNVTLNGYRALVYR

SEQ ID NO: 104123 - protein, 80 aa, Oryza sativa
  Clone ID: PAT_MRT4530_101487C.1.pep
KCRFFSPFVPFLWQIYRYLHFATRIYCAMGNGTAVALGFGIGRDHFPWFIQKQEISSVIGIGRDHFSRDLFSCFVYKKIT

SEQ ID NO: 104124 - protein, 101 aa, Oryza sativa
  unsure (1)..(101): unsure at all Xaa locations
  Clone ID: PAT_MRT4530_101488C.1.pep
KTARMFLGAQEKCAPFRKTGVSFKKVPVXGQAFPKFWFKCFPGGWALFPSHFAALGGFLFCKAPFFPLFKGKGGFPPLVKWASVKGAEGQPGPPPGGGDFS

SEQ ID NO: 104125 - protein, 100 aa, Oryza sativa
  unsure (1)..(100): unsure at all Xaa locations
  Clone ID: PAT_MRT4530_101489C.1.pep
MTVVTVGMVGNTLXPSLGANPHHPGEALDRMAXGGFGRTPWFGQTXGRPNLAQFWLAASSVVLLRRLVNFGPVCHINSEFLAHSYICLVLNIVRLIYHLC

SEQ ID NO: 104126 - protein, 182 aa, Oryza sativa
  unsure (1)..(182): unsure at all Xaa locations
  Clone ID: PAT_MRT4530_10148C.1.pep
YLYINIDNSKKIYIMKSRVRQGHIIYFGYKYDPRPCKQINDSSXRHLFYFHCFXDEFLLSSWVATSSISSKRHIFRNRLYIIDIYSRSGRFNFILLLSLLXSGSLHIGPILNDMSSAIQPIGYRLNQLACSETKSNXFGPTLELSKSSRPVSCVMTVNLYLKYISHIFSNKCKNVKTTTGSG

SEQ ID NO: 104127 - protein, 83 aa, Oryza sativa
  Clone ID: PAT_MRT4530_101490C.1.pep
MTARIFSCIRSKCEEGTSEGSHGSSPPCVGRARGEAKIALAEGGKGAACKIPCPPSPPICRRPPAQYKIALAEGGKGAACKFR

SEQ ID NO: 104128 - protein, 48 aa, Oryza sativa
  Clone ID: PAT_MRT4530_101491C.1.pep
TLWSIYELLHSDSRGRKLKQLTEGMQHNHVILGMHIHTGRITFLQLIS

SEQ ID NO: 104129 - protein, 223 aa, Oryza sativa
  Clone ID: PAT_MRT4530_101492C.1.pep
MNGMNMNATDTEACPVPLELELLAHPFPEYQVSTTEENSCGGSQLHQVMGAATDPGYLETIKRLPPFRIGHTKIISNTYSDTGSKAAQQQQRNQPRKRKEDHLDHLCAYMGNCAVTQHAVSWADDGEWELPESGEEGTAPPRSGAHMTEVTIRITKRQLQELVDKRAAAAGGGHGYHVYRKSRRSAAELLADIMNAGEVYHQHYRVAHWKPALQSIPEAAMES

SEQ ID NO: 104130 - protein, 133 aa, Oryza sativa
  unsure (1)..(133): unsure at all Xaa locations
  Clone ID: PAT_MRT4530_101493C.1.pep
RRPVPPAPPPPPPPISSSSFLPCLSTPXSDPWPPPPRPPPSSSSVLSPQSPQPPNHPSCRTNSPCATPPPAKQTHRQQRGNRAQEARASLRPPPSARGTPWPGASGGRNDRTTQRAGRARARAEAGSGKRSEL

SEQ ID NO: 104131 - protein, 309 aa, Oryza sativa
  Clone ID: PAT_MRT4530_101494C.1.pep
MAAGEARAQLQYGFYNTSCPGVEEVVRSELKGIFSNDTTLRAGLLRLHFHDCFVRGCDASLMLNSHNATAEKDADPNLTVRGYEAIEAVKAKVEATCPLVVSCADIMAMAARDAVYFSDGPEYEVETGRRDGNVSNMAEALTNLPPSDGNVTVMTQYFAVKNLTMKDMVVLSAAHTIGVAHCTSFSKRLYNFTGAGDQDPSLDPAFAKQLAAVCKPGNVASVEPLDALTPVKFDNGYYKSLAAHQALLGSDAGLIDDSLTGAYVRLMTNDTNLDTFFADFAVSMINMGRVGVLTGTDGQIRPTCGIYVD

SEQ ID NO: 104132 - protein, 1564 aa, Oryza sativa
  Clone ID: PAT_MRT4530_101495C.1.pep
MVEVLEAEEAVAPTPTPSGSGDSGENRDPRHHRHGSQSPPRREPSRREDPTRSSGTALSPPPGGGRSRRVGARRRLDYGDGGSPQGALQVVGALLRHPQVNPEPETPVRRWLDDVANLVTAAQRQLATGGQSTATGCRAFVASLQNVWWPPKFRPNLTEKYDGSINPSEFLQIYTTIIVAAGGDDRVMANYFPMALKAHAVVYAFRNGVRHNRMLEKIASKEPKTTAELFELADKVARKEEAWAWNSPGTGAAAAAAPESAPRSKRRDRRGKRKPARSDDEGHVLAAEGPRGPRAKERLPAISRAPPPPPAEAGFKAMRRELLAAVPTHEAIRKACWSEVKLTFDQSDHPTVLARGGKLALVVSPTIHNVKMKRVLVDGGASLNIISPAAFDALKAPGMKLQPSLPIIGVTPGHTWPLGHVELLVTFGDSTNFRTERIDFDVADLNLPYNAVLGRPALVKFMAATHYAYLQMKMPGPAGPITIFSDVKVALACAEQRADNLAAATGPQAPEAPASRAPKKRLTLADEEGALISFLRANSDVFAWKPSDMPGVPREVIEHRLAVRPDARPVRQKVRRQAPERQTFIREEVARLLEADFIREVIHPEWLANPVVVPKANSKLRMCIDYTDLNKRMTRITLSNQIGRNVEAYVDDLVVKTRRQDTLLQHLAETFDSLRSTRVKLNPDNLFPRHRSKSRENTRDREDAPPSKLRDVQCVAGCMAALSRFISRLGERALPLFKLLKRPRPFVWTEEAEQALNQLKAYLTSPPILVAPGPEEPLLLYLAATPHVVSATLVVEREETEQEVPPARDGPSSPKAPSPREDPEAPGGEGEALAGGPEPCDPKIIRNPPGAPEQARSGSSAPDNTNRPARTVQRPIYFVSEALRDVKTRYPQAQKMLYAVLMASRKLRHYFQAHRVSVVTSYPLGQILHNREGTGRVVKWAIELAEFDLHFEPRHAIKSQVLADFIAEWAPVDDPVPSEPPPSPEEKEDPNADIRGGHWIMHLDGSLTLQGAGAGVTLTSPSGDVLKYVVRLDFRATNNMAEYEGLLAGLRAAAGMGIRRLLVLGDSQLVVNQVSKEYQCTDPQMDAYVREVRRMERHFDGIELRHVPRRDNTLADELPRVASARAPLPPGTFEERLVQPSARPNPSRGSNDMPSAPIPSNSRPLEPEGDRAEAEKLARISKRYVLVEGTLYRRAANGILLKCVSREQGIELIADTHQGECGAHSASRTLVGKAFRQGFYWPTALQDAQEWVRRCKACQFHAKQNHQPAQALQVIPLSWPFAVWGLDILGPFKAARGGYQHLYVAIDKFTKWPEAYPVVKIDKHSALKFIRGITSRFGVPNRIITDNGTQFTSELFGDYCDDMGIKLCFASPAHPKSNGQVERANAEILKGLKTKTYNVLKRHGDSWLEELPAVLWANRTTPSRATGETPFFLVYGAEAVLPSELSLGSPRVTLYSETNQDDLRRDDLDYLEERRRRAALRAARYQQSLRRYHQRHVRARSLQVGDLVLRRVQSRLGLSKLSPTWEGPYKVICVPRPGSVRLTMEDGTELPNPWNIEHLRRFYP

SEQ ID NO: 104133 - protein, 41 aa, Oryza sativa
  Clone ID: PAT_MRT4530_101496C.1.pep
SSYSTILQNYAPYAPRFNGPGNLPTAQANGSPQGLQFRRNP

SEQ ID NO: 104134 - protein, 87 aa, Oryza sativa
  Clone ID: PAT_MRT4530_101497C.1.pep
MLMLCVGLMLLKSLELSDTEVGSSGLQHLSGLRNLESINLSFTLVTDTGMKKISALNSLKSVNLDNRQITDVGLAALTSMYYMLQLW

SEQ ID NO: 104135 - protein, 1418 aa, Oryza sativa
  unsure (1)..(1418): unsure at all Xaa locations
  Clone ID: PAT_MRT4530_101498C.1.pep
MKRVLVDGGASLNIISPAAFDALKAPGMKLQPSLPIIGVTLGHTWPLGHVELPVTFGDSTNFCTERIDFDVADLNLPYNAVLGRPALVKFMAATHYAYLQMKMPGPAGPITIFGDVKVALACAEQRADNLAMATGPQAPEAPASRAPKKRLTLADEEGALVSFLRANSDVFAWKPSDMPRVPREVIEHRLAVRPDARPVRQKVIHPEWLANPVVVPKANGKLRMCIDYTDLNKACPKDPFPLPRIDQIVDSTXVSSRGIEANPEKIRAIERMRPPXKLRDVQCVAGCMAALGRFISRLDERVLPLFKLLKRPGPFVWTEEAEQALNQLKAYLTSPPILVAPGPEEPLLLYLATTPHVVSAALVVEREETEREARPGSSAPNNTNRPRRTVQRPVYFVSEALRDAKTRYPQAQKMLYAVLMASRKLRHYFQAHRVSVVTSYPLGQILHNREGTGRVVKWAIELAEFDLHFEPRHAIKSQVLADFIAEWAPVDDHVPSEPPSSPEEKEDPNADIRGGHWIMHFDGSLTLQGAGAGVTLTSPSGDVLKYVVRLDFRATNNMAEYEGLLAGLRAVAGMVIRRLLVLGDSQLVVNQVSKEYQCTDPQMDAYVREVRRMERHFDGIELRHVPRRDNMLADELSRVASARAPLPPGTFEERLVQPSARPNPSRGSNDIPSAPTPADPRPPEPEGVDPDPPPRPPEPEGVDPDPPRQVAWMTDIRAYLDGNTHPEDRAEAEKLARISKRYVLVEGTLYRRAANGILLKCVSREQGIELIADTHQGECGAHPASRTLVGKAFRQGFYWPTALQDAQEWVRRCKACQFHAKQNHQPAQALQVIPLSWPFAVWGLDILGPFKAARGGYQHLYVAIDKFTKWPEAYPVVKIDKHSALKFIRGITSRFGVPNRIITDNGTQFTSELFGDYCDNMGIKLCFASPAHPKSNGQVERANAEILKGLKTKTYNVLKRHGDSWLEELPAVLWANRTTPSRATGETPFFLVYGAEAVLPSELSLGSPRVALYSETNQDDLRRDDLDYLEERRRRAALRAARYQQSLRRYHQRNPSPRRATATASFATARGSPAASYFPLSTPRAPLPPHTRGRRPFHRLQPRRAAASVDVDSRRCLPQLRKDEEDLGRRPSSPEIRRSSSFLGRRSRATPSALRPRKPPLGNRRRRPLPPRRPPLPVRISPPFLFFRSPFLPTAASWGASPSPCAPLSSGHPPPFHVAGCCSRLPPPPCPLAASPLPPPRHVSAEPASCRARAPAAPPRGRPIGFGPIRAVGSRGPAVDRLGGPGPRWTGAFVPLTVRVSGSVQDNKLPAESEHLALDQSQSQFVFKEEAPATSDSTPPSLQQTSTAKSPPIPEATNATYSGYGFQEQFLQSVQLSMEDVRQGTSQRVVPQVGQFSFEESTMQLDTEVKLEAGQSCQ

SEQ ID NO: 104136 - protein, 72 aa, Oryza sativa
  Clone ID: PAT_MRT4530_101499C.1.pep
MLKTLREDGVDANSEQYHLAKELLRSRTRRTVFKRFDSKETRLKWLQWSWQNRKAMYVHRLSLYGLAIIVRR

SEQ ID NO: 104137 - protein, 86 aa, Oryza sativa
  Clone ID: PAT_MRT4530_10149C.1.pep
IEAQENKCNIVQNRENCRNYPKQVFLRGLTRKYRTNLKETRCIVTLKNICIARLIGLYILERIKTHRLVSYAIYNSPRAEFLQPGD

SEQ ID NO: 104138 - protein, 133 aa, Oryza sativa
  unsure (1)..(133): unsure at all Xaa locations
  Clone ID: PAT_MRT4530_1014C.1.pep
SLSVRITDNAYLLFYDLWNTPIMYTFTYTDRFHVYRXNLFQITENISTSQAISKVLLRSLLGGKDDTRYKRDPRERCKASNFIANTPTIVYEARVREAKSPRDLVELIGICCFLVPTYPNTQLIRCTSMTRRH

SEQ ID NO: 104139 - protein, 91 aa, Oryza sativa
  Clone ID: PAT_MRT4530_101500C.1.pep
QERKGKETVLAPMCIFLKGGQGANTLGGPPPWAAADAPPGRRRKKGPRAPTLEIFCSRPNFFSPPDKPGEPGQKKQRAGRKKPCPPQAGGR

SEQ ID NO: 104140 - protein, 85 aa, Oryza sativa
  Clone ID: PAT_MRT4530_101501C.1.pep
MSLRRCHRTVEHRTTPSLLGMLTQVKCLVVVETQEMYAARRQAEEDRRAPRPPLIVSHTRRRRGERPPQRRTRLKNASDKDCSTR

SEQ ID NO: 104141 - protein, 277 aa, Oryza sativa
  Clone ID: PAT_MRT4530_101502C.1.pep
MVAWAWPLVFLVSCCCSWTQRRILVAATTDANDVTVLNALFTSLNSPGQLRGWQVNGGDPCGASWQGITCSGSSVTAIKLPSLGLSGNLAYNMNTMESLVELDMSQNNLGGGQNIQYNLPNKKLERLNLAGNQFAGNVPYSISTMPKLKYLNLNHNQLQGNMTDVFSNLPSLSTLDLSLNSLTGDLPQSFTSLSSLKTLYLQNNQFTGSINVLANLPLDNLNVGNNRFTGWIPNELKKINSLQTDGNSWSTGPAPPPPPFTAPPPSRNRKKSPGRHS

SEQ ID NO: 104142 - protein, 80 aa, Oryza sativa
  Clone ID: PAT_MRT4530_101503C.1.pep
AVPVKAPSRKAVDQTGSSNAAFQRLAEEIRLGAVNVPKERNFKDCKSCRTADCAVHQLATFGSAHAALRVCVYTSFMCTF

SEQ ID NO: 104143 - protein, 63 aa, Oryza sativa
  Clone ID: PAT_MRT4530_101504C.1.pep
VGVFPLQVKRVSLNQAFPLKKNPSLWGRLFFVRAKEYIQKKSGPYFFRGFIWEELFLRKLLMW

SEQ ID NO: 104144 - protein, 86 aa, Oryza sativa
  Clone ID: PAT_MRT4530_101505C.1.pep
DASFVVFESIEVQNILTVVIALSGIHGSLREQNTSLINLCRLTHEVPPGATATAAFSFHSTAPRAEFLQPGGSTSSRAAAKTVEVF

SEQ ID NO: 104145 - protein, 92 aa, Oryza sativa
  unsure (1)..(92): unsure at all Xaa locations
  Clone ID: PAT_MRT4530_101506C.1.pep
ARGSWSASSAASSPSTASSRTRMSCCWLLFFFTSPFDRCTEIEGRACHGRSTYSRPLSALHCLLHIGSSLSTPXAFAPTTASPARRPATTEG

SEQ ID NO: 104146 - protein, 71 aa, Oryza sativa
  Clone ID: PAT_MRT4530_101507C.1.pep
SQRLFRIRVQHLVLHEPCVQVQIVVGQNVSEHGAALVEPQSLHCESQHHLVVGSESSAGESQGSCVGRVIG

SEQ ID NO: 104147 - protein, 518 aa, Oryza sativa
  Clone ID: PAT_MRT4530_101508C.1.pep
MSLMRGGFGFSPAVAALYCAALVVAGGLGSRPVLGCYSRIFSFGDSLTDTGNYVRLTAGRKPSSPYGAPPYGRTFFGRPTGRASDGRLVIDFIAQEFGLANVTAIQVGAGPADFPHGANFAIISSTANNASFFARKGLDITPFSLDTQMFWFRTHLQQLTQQLNGGGGGGGSILSDALVSLGEIGGNDYNFAFNKGVPRETVRAFVPAVVDKLAAAVEELIGMGARAFVVPGNLPFGCAPLYLNRFRGAAASEYDARTGCLAWFNKFAEFHNRVLTARLDDLRRLHPDVTIVYADWYGAMTSIFQAPGKLGECRGRAVEVKRTWNSAVSGSDASGSYAIMHPNSKWADRGTVTPGRARASWIPVAAAAGAWDIDVDGGGIERVERWLRRRAATPLALESEGVSEVSRDAVGVGRGAGASICLEPVGGGASWTPVAATASVGRRRWRHRAGFTNALGSCCGNQSVPCGKAGCTVCEDPSTYVSWDGTHPTEAVYKLIADGVLHGPHASPVPLAKTCPPT

SEQ ID NO: 104148 - protein, 203 aa, Oryza sativa
  Clone ID: PAT_MRT4530_101509C.1.pep
MAANPGNKIRNAKLVLLGDVGTGKSSLVLRFVKGQFVEFQESTIGAAFFSQTLAVNDETVKFEIWDTAGQERYHSLAPMYYRGAAAAIVVYDITNAASFTRAKKWVQELQAQGNPNTIMALAGNKADMVEARQVPAEEAKTYAQENGLFFMETSAKTAINVNDVFHEIAKRLLQGQQAQDTPAGMVLNQRPAERMVSSSSCCS

SEQ ID NO: 104149 - protein, 128 aa, Oryza sativa
  unsure (1)..(128): unsure at all Xaa locations
  Clone ID: PAT_MRT4530_10150C.1.pep
GVRGPWTFANPRVRAFLRWWCGARPCCGXGGGDDDYAFYYSFFXDAAAAAASPLGLGDAVAVSFGGRLRLRGGGGVGACGGAPVASGMVGPVGGGVGGFGLSRSFVSLLPSLAVLVGGGSLRPCRCLR

SEQ ID NO: 104150 - protein, 349 aa, Oryza sativa
  Clone ID: PAT_MRT4530_101510C.1.pep
MTMHLLSGQRLLLPIPCGACYRSPPSPAIKPSPLGLRPFTKSSSSLPLHLHAVSPATVATDGSSTSAQPDSWAEFASRVSGEWDGFGAEFTAAGDAVELPENVVPEAYRDWGVQVFDWQTQCPTLADPAAPCDLHYRLVRLLPTVGCEADAATVHTSHQRHASSASAFAYSAAGSYVAAWPRGPAPVLEVEHCVVHPDNREVRVRLVQTVALAKEARLRGVKVFSEQWYGPYRNGDQLGGCALREAAFAAGEKLAASDVTGQWQSDAASAARFSGELDPETGKFAGLTPDEPGERLSRDDGDGIVTLPKQLWSSFKENGKDEFVCEVGWVLGHGSAITSRLSTEYTAKK

SEQ ID NO: 104151 - protein, 142 aa, Oryza sativa
  Clone ID: PAT_MRT4530_101511C.1.pep
GSARVGRHCTATASLSSPNPTTERDEPQAGPALTPPNCTPPCTPATNTGFKPVGSANRADSSSSRLACTQSSAKNLTAKAADAPCATQPHKLEQHHPGLACLPLPTHTTCCTTQHVSVKESGLDAFHRHVVLLQPQASEQNT

SEQ ID NO: 104152 - protein, 26 aa, Oryza sativa
  Clone ID: PAT_MRT4530_101512C.1.pep
PYICRELAIFKPLNLYGRRPCQIFPP

SEQ ID NO: 104153 - protein, 193 aa, Oryza sativa
  Clone ID: PAT_MRT4530_101513C.1.pep
MANLAASLLFLLAVASSATVPAHGRRDLLPTRIKLVRGADAGAGAVAGGDKMECVYTVYIRTGSIWKAGTDANITLELAGADGNGVGITDLPSWGGLMGEGHSYFERGNLDIFSGRGPCMAAPPCWMRVASDGTGPHHGWYCNYVEVTVTGAHKGCAQQLFTVEQWLATDAAPYKLEAIRDKCSAAGAGAAAA

SEQ ID NO: 104154 - protein, 64 aa, Oryza sativa
  Clone ID: PAT_MRT4530_101514C.1.pep
MAVRDRRTNDGSGSQAPSPAGEKKEKEGGDSWDPCWQVIVAHHVEIEPSPIPSQVLFTLGEKEK

SEQ ID NO: 104155 - protein, 66 aa, Oryza sativa
  unsure (1)..(66): unsure at all Xaa locations
  Clone ID: PAT_MRT4530_101515C.1.pep
HSRTSTSAMGDTWPLVCPDFVIWPCNRQHLRISHSPTTKWXRKRGVKQKTPHSQPPHSIGLQELDP

SEQ ID NO: 104156 - protein, 228 aa, Oryza sativa
  unsure (1)..(228): unsure at all Xaa locations
  Clone ID: PAT_MRT4530_101516C.1.pep
AGIRHEGEWKRKLQRMVDRLRDSFXCRQHALELIFTDEGETHLSADMYISMDNTVEEPEWAPSLIFQELYAKLNRMASIAADMFVGRERFATLLMMRLTETVILWLSEDQAFWEEIEQGPKPLGPLGLQQFYLDMQFVIIFGQGRFLSRHVHQVILDIIDRAMAAFSATGMNPDSVLPGDDWFMDVSQEVVSMISGKGRAANGDREINSPTASVSAHSMSSFRSHGSS

SEQ ID NO: 104157 - protein, 330 aa, Oryza sativa
  unsure (1)..(330): unsure at all Xaa locations
  Clone ID: PAT_MRT4530_101517C.1.pep
KEIPRSMDTSTLLIALTLVLLLLLLTARRRRSGRLRLRLPPEPPGLPLVGHLHLFRKPLHRTLARLAARHGAVFRLRLGSRRVAVVVSSAPAAEECLGAHDVAFAGRPRLPSAGILSYGWSTMGTAAYGPYWRHVRRVAVAEILSAHRVRQFAGAHAREARATARRLCRAASRQRHGAGAAAGRVRVELKSRLFELLMNTMMAXSATRPTTDDDGEVSEEARWFREMVEETMALSGASTVWDFLPAALRWVDVGGVGRRLWRLRESRTRFLQGLIDDQRKEMEHDGDGRELPAAAARPRSMIGVLLSVQRQDPEECPDQLISSLTALIFS

SEQ ID NO: 104158 - protein, 98 aa, Oryza sativa
  Clone ID: PAT_MRT4530_101518C.1.pep
QVDSAAVFHNASTRFCDGARFGLGAEVGISTGRIHARGPVGVDGLLTTRCILRGSGQVVNGDKGVVFPHSSTSLVSGEVACEGAVVEQFFADAHRAPP

SEQ ID NO: 104159 - protein, 37 aa, Oryza sativa
  Clone ID: PAT_MRT4530_101519C.1.pep
GWETNISEFSASNMLTDCRDWPYITQKENSIISLKGQ

SEQ ID NO: 104160 - protein, 864 aa, Oryza sativa
  Clone ID: PAT_MRT4530_10151C.1.pep
MGRVERILGGYEDPAHQIFLHAPEALIKNREAEAWERRKSWWRRRGTQQQQQQQPRGRPRRRKQEEKARKWCDDIYGFQAFLGIAIYVAMWLGKVAAVATCIALSSKRLEKQDYLESGDNEKGDHQNIRWSLNIFYSLVLAQGIIFICMLLNPLTVYFVLKVRRKYKLFEPSGLKIIYRYKKYNYLGFIAGNVRATLNMHLVTFAKNLAVSNTIDDQLAGVRAMDRILMSVEFRSLALRRLRASMEPDDLGKLIDMLGFVSTMEEEQNIIRGHAARVVLKFSPDLMLQSYPQILYLISSSLLSTSNKRVCKCNMDSDLVWFGLHILDKLTDNPENCRKAKDDDSDLLLPMIIDLANLCGHGHGNSVRSNTTISDSWIEQEIIPLLQKEDDIPLPFINKIDQEIIVGMALNILSKLIAVPGEAGEKLRKETSKDLHFLTNTGMIMEHVEATRVISCLAVDKEARQDIGKLPEIIKKLKDCLLSKTPYVNMTKVAAKLLLMEYTSEELLNRVLLFIEENRTVEDQSFSLPISAFIEELYLDQLPQSVVQRLDLEDVLSSPRVNHSEAAAKALILLTTGCENNVEAFLKGINEKELNKIVNVLSSEDRDKEKRRALAQFEGRHHLDPETLRIVKKIILAEGEEQETSMHAKLLQNLRAYSGPKEFDEYMKLIDAALPKVLKAVVDAVATLEDPSSSENLNHVKDDLWIKQGKVLESFIGLAVQICRSPNATSDFSTALKDANLTVHTFIKKLKKILEVYRSPSTDFPCIRVSTLELITWMVEENSSYREILLKCGIYEELNEVARTARKLESFKLFHCGVGIPTDGPIECISSRATELQEKLQQSPNFEKRYICYGEHASSISVLIA

SEQ ID NO: 104161 - protein, 84 aa, Oryza sativa
  unsure (1)..(84): unsure at all Xaa locations
  Clone ID: PAT_MRT4530_101520C.1.pep
LAIVACNASARXDALSQSYRQYQLQSHFLLQXQVLNPXXELGGGGDIILXTXXWXPVTFELINNQVMLFLCXQHLRLVLQQFLL

SEQ ID NO: 104162 - protein, 82 aa, Oryza sativa
  Clone ID: PAT_MRT4530_101521C.1.pep
EKGDKQAHVGMNALILRIGFRDAKNLGVLLSPLIAFPTPTGETTPATLGTTWCFFPNFTGFEGATTLFGIGLIANFYVLRER

SEQ ID NO: 104163 - protein, 47 aa, Oryza sativa
  unsure (1)..(47): unsure at all Xaa locations
  Clone ID: PAT_MRT4530_101522C.1.pep
FFFLTSSSLIPFNSWLTANEFCCLNCSGNNTPQASSTAWTKPTSWRX

SEQ ID NO: 104164 - protein, 45 aa, Oryza sativa
  unsure (1)..(45): unsure at all Xaa locations
  Clone ID: PAT_MRT4530_101523C.1.pep
GWGXNTFFFFFFLFIYHILLTSYPPNPHQKIQTKKLSHSQSPKTI

SEQ ID NO: 104165 - protein, 341 aa, Oryza sativa
  Clone ID: PAT_MRT4530_101524C.1.pep
MATASGDQSAGSAARASKLRYPLRSASRGKGAADAPPTSGSVARRPKPSLDVSKSVCGLDLSSVKDNSAKPPRRHSIQTKPGVSPRPTPTGTITPVSLVRSRRSDSQGKFDTPISEVSMSTARRKFSTLSSTSYWMTQIRLAEAASKHSISLGFFKLALESECEPLDRMRDELKAYVVRHGLATELEEPVKDILQVYNIVEDLEKLKITVNSSEQPKKSDKAAHSATNVSPKGNLKPRSLNSDAAQSKEAAKKDNIQKKPDAKVRGSYNRNPAKEAITKNTGKKAKKQVKGQKEDCNGGSEALPVGTEQEPVDVVKEVTNEDKENMGDSEMPMDLGIAQEI

SEQ ID NO: 104166 - protein, 315 aa, Oryza sativa
  Clone ID: PAT_MRT4530_101525C.1.pep
MSSKKIELDHKDMVHDSAIDYYGKRLATASSDSTVKISSIGGKSAPSQLLATLSGHYGPVWRVAWAHPKYGTILASCSYDGRVIIWKEGAGGHWSQAHVFTDHKSSVNSIAWAPYEVGLCLACGSSDGTISVMTMRADGGWDTARIERAHPVGVTAISWAPATALGSLAGSGELVYKLVSGGFDSVVKVWGFVNGGWKLESALPSDVHTDCVRDVAWAPVLGLAKATIASASQDGKVVIWSRGKVGDKWEGKVMHDFGSPVWRVSWSLTGNILSVAAGENNITLWKQASDGQWEEVMKVEPTKPESSEEVKKAEQ

SEQ ID NO: 104167 - protein, 648 aa, Oryza sativa
  Clone ID: PAT_MRT4530_101526C.1.pep
MARKHGWQLPAHTLQIVAIVVFFLLVVAFYAFFAPFLGKQILEYVAIGVYTPVAFAVFILYIRCTSINPADPGIMSKFEDGFINVPANSDGLQGINLPQKGNSTIGTQSPTSTCRSSLDGHSNQRGLSTRDANDCRKPDESEQAANGEEALFCTLCNAEVRKFSKHCRSCDKCVDGFDHHCRLAIEFGVGIAVIVLCFVDKNALSNIQDKLGNGMTRAPFAVIVGLFTLLSLVACIPLGELFFFHMILIRKGITTYDYVVAMRAMSEAAPEDDEEAHITYSPSNSATTGFSVGSSLGLHHKGAWCTPPRIFIDQDEVIPHLDPGMVPSTVDPDAAGYAERANKSKKPVKISARSLAKLDRNEVMKAAAKARASSSVLRPVDARRGHEGDLSSSGNASVRSSMSVDYSGTKESRGEMRLSPLQNSYPQSLASQDDYETGTQTASSLSSPVHIHKLASHSQFHAPPHQPPPPERPVPGIVPGIVRPPVPTTQITNPMFQSATSYVRENRRASVVWDQEAGRYVSVPAQTRAVPGLDLPARTPRFLANPTGESSNHGKNLAPANASSSAISSGQPSERLTYTGQSIFFGGPILSTSGTNAQRSEAGTRARPDGSSDPPNAFQRDTRGERARTGSFPVFAPGTFQKNPPFDK

SEQ ID NO: 104168 - protein, 64 aa, Oryza sativa
  Clone ID: PAT_MRT4530_101527C.1.pep
TPGQRNRTSLCIFSQKRPCIFFARCRLVNSDFVFLVLEAQLSFPAMVAKQAFFLRHRRWFVFRG

SEQ ID NO: 104169 - protein, 187 aa, Oryza sativa
  Clone ID: PAT_MRT4530_101528C.1.pep
MAGGSTNHKLLTEAAVGGGRRKKAAAPHGRPASSTPAQDTGELLPGVRTAGELLPRRTDCRRDPPGAPTLTSSFPARGRPVSSSPARGLPVSSFPGARTAGELHPRVRTLASSPVVRGWLASSTPAHGVRGWHASFSPARGPPESSRDGRRAPPPRTDAGELLSLHTDGRRTPLHAPSPSPPPPPRL

SEQ ID NO: 104170 - protein, 182 aa, Oryza sativa
  unsure (1)..(182): unsure at all Xaa locations
  Clone ID: PAT_MRT4530_101529C.1.pep
MLIVVITTRWGTGDSRSWPLSVSPVAAKMMRHCLRSPCLLAMVRGCRRRKLSPPPAHGRPASSTPAQDTGELLPGVRTAGELLPRRTDCRRDPPGAPTLTSSFPARGRPVSSSPARGLPVSSFPGARTAGELHPRVRTLASSPVVRGWXPESSRDGRRAPPPRTDAGELLSLHTDGRRTPLH

SEQ ID NO: 104171 - protein, 89 aa, Oryza sativa
  unsure (1)..(89): unsure at all Xaa locations
  Clone ID: PAT_MRT4530_10152C.1.pep
RGPPPPRRRRPRRGRSRSXPKKRGXPPPPQRXGYRQHGAEAKHRGKGCGAAARPAGESAAVAGLRLARRIGGERRRARPGERGDRGDAV

SEQ ID NO: 104172 - protein, 114 aa, Oryza sativa
  Clone ID: PAT_MRT4530_101530C.1.pep
KWRGSGRPWVVAADVEAGEIAAEGAVVVVEEARWPPPSRRPSPFSYRSRDGGGGEDCGRGGGRRRGWCGEVVAAATVVVEACEHSTKNQARGTVFLLNRAAKVVPVPVFFQFNR

SEQ ID NO: 104173 - protein, 767 aa, Oryza sativa
  unsure (1)..(767): unsure at all Xaa locations
  Clone ID: PAT_MRT4530_101531C.1.pep
PTRPLGGNSSQLPPLDVPLPGVIISPVLPDFVEPSKTKITTLPNGIKIASETSPIPAVSVGLYIDCGSVYETSSSSGTSHLLERMAFKSTTNRSHLRLVREVEAIGGNVFASASREQMSYTYDALKCYAPEMVEVLIDSVRNPAFLEWEVKEQLQKIKSEISEVSGDPHGLLMEALHSAGYSGALAKPLMASESAVNRLDVATLEEFVSENYTAPRMVLAASGIEHDELVSVAEPLLSDLPSVKRPEEPKSVYVGGDYHCQADSTSTHIALAFEVPGGWRQEKTAMIVTVLQVLMGGGGSFSTGGPGKGMHSWLYLRVLNNYGQIESFSAFSSIYNNSGLFGIHATTNPDFVSSAVDLAARELHEVATPGKVTQEQLDRAKEATKSSVLMDLESRIVASEDIGRQVLTYGERKPIEYFLKTVEEITLNDISSTAKKIXPLTLASWGDVACCVFVQTHANIVLPVLHFNIESDVMASWLSHLPIHRCQLSFPAAQASYATPGIDSALLLDVDDMAGGDAGLNEGLKKQAKPRLRLPKPAAKRSESEFLRSRPLALLMASSHIILPPDDDDEEQRRLEEEEDEDPWARSGPPPAAPEHAMKAALPFSATCVRISRDSYPNLRALRNASSVSLADAAYVKISEGDFGYVLDDVPHLVDHLPDAPTYPNPLQDHPAYSTVKQYFVNEDDTVPQKVVVQKNSRRGVHFRRAGPRQKVYFESDEVKACIVTCGGLCPGLNTVIRELVCGLAHMYNVSKIYGIQNGYKGFWVGF

SEQ ID NO: 104174 - protein, 44 aa, Oryza sativa
  Clone ID: PAT_MRT4530_101532C.1.pep
LVLYHNYSHLYFCSDSHKTVRNSIDRGRKILKVRTREKNISITH

SEQ ID NO: 104175 - protein, 84 aa, Oryza sativa
  unsure (1)..(84): unsure at all Xaa locations
  Clone ID: PAT_MRT4530_101533C.1.pep
ATKSSVLMDLESRIVASEDXGRQVLTYGERKPIEYFLKTVEEITLNDISSTAKKIISSPLTLASWGDVIHVPSYESVRRKFHSK

SEQ ID NO: 104176 - protein, 58 aa, Oryza sativa
  Clone ID: PAT_MRT4530_101534C.1.pep
MRGTRMLTDSLHAGMLRRSSGEARHEAAVKLWLPRGEPGLAPTDPAPAFPNYWHARFP

SEQ ID NO: 104177 - protein, 124 aa, Oryza sativa
  unsure (1)..(124): unsure at all Xaa locations
  Clone ID: PAT_MRT4530_101535C.1.pep
MVALSGSHTIGRCVALQLLQQPALXSSGPNAGQDPSYVAALATQWRSARSRRRPGAGAHGLDAVTPNTFDTNYHAAIVANXGIANSPDSFQTDFAADNVKMGSIGVLTGNAAGGTIRTNCRVAS

SEQ ID NO: 104178 - protein, 71 aa, Oryza sativa
  Clone ID: PAT_MRT4530_101536C.1.pep
YSNSFTLARDVPLYPQDTIPHMLPYPEVPPRHPSKTKGMDSPATPTDFSPLLSRSLIIMSTTFKTMCSQPA

SEQ ID NO: 104179 - protein, 80 aa, Oryza sativa
  unsure (1)..(80): unsure at all Xaa locations
  Clone ID: PAT_MRT4530_101537C.1.pep
EGSEPWFLSPSKHITLREDLDTLRLISKPAPDYSTSLDDERVCETPFELISVFEDDTXGLRRTEFVSGQQGTEHCEIESH

SEQ ID NO: 104180 - protein, 69 aa, Oryza sativa
  Clone ID: PAT_MRT4530_101538C.1.pep
VQAQAQPLLAFTPPPIWGLPPKFYSAPRERCHCGGCLVLNCTNKIVPPLEKKSEIMGCDCLNLGSYQFK

SEQ ID NO: 104181 - protein, 53 aa, Oryza sativa
  Clone ID: PAT_MRT4530_10153C.1.pep
AICFSSICSASLQSYAHDDISVGSWMMGLNTTYVDDDRLCCGSSRQEKVCSHA

SEQ ID NO: 104182 - protein, 88 aa, Oryza sativa
  Clone ID: PAT_MRT4530_101540C.1.pep
RSTSSGSSTPRSSRAVSESSKRINVSCEMLFVVGRRRQMKRLRQRLLLRPSISDSDKIQVCFVCAVRPVYCRNDYNHTIIPQFHVGRL

SEQ ID NO: 104183 - protein, 469 aa, Oryza sativa
  Clone ID: PAT_MRT4530_101541C.1.pep
MSSSSCAAGAEATGLVAMDCLVAAQEGVVKSKRIILRRWHGRRSSSSAAAAAAKRGCSTVDPAAGVKKQLEELFDDDDLFQGAFGGGINGGGGDDEEGWWKERCFAVDDDDGGVWEALIEQEGLFWFGSFWGRTTEQVLSARLGRKPEDIIKLDANENPYGPPPEVAKALGNLKFPYVYPDPESRQLRAALAEDSGLESEYILAGCGADELIDLIMRCVLEPGDKIVDCPPTFTMYEFDASVNGALVIKDVAQIVKVVEQEKPKSIFLTSPNNPDGSIINDEDLLKILDLPILVVLDEAYIEFSSLQTRMSWVKKHDNLIVLRTFSKRAGLAGLRVGYGAFPLSIIEYLWRAKQPYNVSVAAEVSACAALQNPTYLEEVKNLLLQERDRLYDLLKEIPFLKPFPSHSNFILCEVTSGKDAKKIKVEDLAKMGVMIRHYDKKELKGYIRISVGKPEHTDALMKGLKALQL

SEQ ID NO: 104184 - protein, 45 aa, Oryza sativa
  Clone ID: PAT_MRT4530_101542C.1.pep
VTATGDKADSLCFIEVVAHKDDTSKELLEWGSRVSAANSRPPNPQ

SEQ ID NO: 104185 - protein, 426 aa, Oryza sativa
  Clone ID: PAT_MRT4530_101543C.1.pep
MDFSVRARIQSPHRSAAHFVAGEGGRRRPATSRVSFRSMASAASVEEPAAAAAAAAETKRGPSGASFIREHLRSLAPYQPILPFEVLSARLGRKPEDIIKLDANENPYGPPPEVAKALGNLKFPYVYPDPESRQLRAALAEDSGLESEYILAGCGADELIDLIMRCVLEPGDKIVDCPPTFTMYEFDASVNGALVIKVPRLPDFSLDVAQIVKVVEQEKPKSIFLTSPNNPDGSIINDEDLLKILDLPILVVLDEAYIEFSSLQTRMSWVKKHDNLIVLRTFSKRAGLAGLRVGYGAFPLSIIEYLWRAKQPYNVSVAAEVSACAALQNPTYLEEVKNLLLQERDRLYDLLKEIPFLKPFPSHSNFILCEVTSGKDAKKIKVEDLAKMGVMIRHYDKKELKGYIRISVGKPEHTDALMKGLKALQL

SEQ ID NO: 104186 - protein, 1431 aa, Oryza sativa
  Clone ID: PAT_MRT4530_101544C.1.pep
MSSASMAGACSFLVAAAGKPPRRSSLQRCFMTREGSKRSGGVNGRAQWRNDSVGGQSSRAYNGLNGSVVLPAEEVDVEAGGGKEELELGAPELRGGGGTSGQHGERGGGVPIYDECGGELRLEVAGPKEGQATGEKARCGGGDEEPQPVAEHVLLQGDSTEDAIGGGEEGVGKELEPRESWGQRGGRGDRRRVAEREKIGLVRGSGRLASSPSPHLQRHNTCLRAFTTLCVTSARLSTVSRALCSSGVRSRPLADSLGFPDKIGRRSSRGGQGRNGSGGGDSAGPARKTDKCHNCGKLGHWAKDCRSKPKQEQAHVVQEEDEPTLMLMTGGCIDVVEETGAPCVTPAPPAPRPRLDVVELVEQKVFAALDDATDHDNKRWILDTGASNHMTGSRAAFSDIDTNVTGNVRLGDGSLVRIGGRRTILFACKNGEHHMLHKAYYLPCLAANIISVGQLDETGFKVLVEDGVMRVWDEQHRLLARITRTPGRLYVLDINLARPVYLMARAGEDAWRWHARFGHVNFTALRKMGREALVRGLPVLSQVEQVCEACLAGKQRRAPFPQQALHRATEPLALLHGDLCGPVMPATPSGNRYFPLLVDDYSRYMWLVLLATKDAAPDAMKRVQAAAERKSGRKLRALRTDRGGEFTVGHFTEYCAELGLRRELTAPYSPQQNGVVERRNQSVVSTARSMLKAKGLPGMFWGEAVNTAVYLLNRCSSKSIDGKTPYELWNGVTPAVHHLRTFGCVAHVKVTAPTKKLDDRSRPMIFVGYELGSKAYRVYDPATRRVHVSRDVVFDEEAQWNWDGEAATNVDSDFTIEYTTVYHPATATPTQTGTEHGGAPASPRSPASGSTPTTPPVAEVSPVEFVSPPPDVEDDLDADHDDAPLRFRRIDDVLGPATPPGQAVRELSEELFAVTAEEPASFAEAEQLSCWRQAMIEEMRSIEANKTWRLVDPLARQRPIGLKWVYKAKKDAAGNITKYKARLVAKGYVQRQGIDFDEVFAPVARLESVRLLLAHAACEGWAVHHMDVKSAFLNGELLEEVYVAQPPGFVVDGQEHKVLRLDKALYGLRQAPRAWYSKLDASLLSLGFHRSDSEHAVYMRGTGEQRLVVGVYVDDLIITGGNPGELKQFKEEMKGTFQMSDLGLLQYYLGLEVNQTEDGITVNQRAYAEKILQTAGMVASNPSLTPMETRLKLSKMSNAPSVDATDYRWIVGSLRYLVNSRPDLAYSVGYVSRFMEKPTTEHLAAVKRVLRYVAGSIGYGCHYKRKKDASLVGYSDSDLAGDVDTRKSTSGVFFFLGDNLITWQSQKQKVVALSSCEAEYIAATTAACQGVWLARLLAELQGEEADAVTLRIDNQSAIMLSKNPVFHDRSKHIDTRYHYIRECIEEGRVKVEFIGTNEQLADILTKSLGRDRFMELRSQIGLVEVQTPRKV

SEQ ID NO: 104187 - protein, 171 aa, Oryza sativa
  Clone ID: PAT_MRT4530_101545C.1.pep
GVADGARVEVGLLVVAPRPEWCAQVLSLRLVLPGLPSHVRRHAPVARPYCPRHRFQLLAQTKTGGGGETPAWAGRPRAAPLPAAHGGFLPPPAYARAAVPSCGPREKKRREEKRWKGEGKKRLTRGAPPESVAVSDKTGVKTPEGRRLPWFYKLGTPGYLVLWLGDDFVTR

SEQ ID NO: 104188 - protein, 81 aa, Oryza sativa
  Clone ID: PAT_MRT4530_101546C.1.pep
MGVAALEFMRDASNRRDPQRCARASHVRRDSLACNSSSGWAGLGMGRLGLVGMMSRRKKGDFRMRQTKQPLKNLDLEIRKH

SEQ ID NO: 104189 - protein, 61 aa, Oryza sativa
  Clone ID: PAT_MRT4530_101547C.1.pep
MAVARASRKVDLDEGGNVCANARSRQKLRRSADGEDELSFRTNFSNIAEIVSSTVHRRPEC

SEQ ID NO: 104190 - protein, 86 aa, Oryza sativa
  Clone ID: PAT_MRT4530_101548C.1.pep
QDFIALEASWRPSGEQHTRMASSVIRKIKASAEQNWIHGSIHRTGRPSSKLSRTSLLSATVKLSILGSRERCHPIDLERRGEEQET

SEQ ID NO: 104191 - protein, 94 aa, Oryza sativa
  unsure (1)..(94): unsure at all Xaa locations
  Clone ID: PAT_MRT4530_101549C.1.pep
SLACFLIANKGFIGVSADFMTSDLQPMYDLIFGSXLLYIVSSRLVYTRLYYXADCLYIIIYIEHIADCLNPIAIGWYRHRLXNHYIGLSADRLF

SEQ ID NO: 104192 - protein, 101 aa, Oryza sativa
  Clone ID: PAT_MRT4530_10154C.1.pep
MELWFTLSGEPTRSMRMHMLLEDSFCPYFSSSNFELRQLYSESRSHQKGLVVGDLASSAIRSPEDADSGAKQTIGTVSGGTCRPQERMILTHHFVLRSIRF

SEQ ID NO: 104193 - protein, 775 aa, Oryza sativa
  Clone ID: PAT_MRT4530_101550C.1.pep
MASIGWHLSLEPNIDSFTVADNKLVLLNFEQQQLVHWMMPPRFRCQDYLLPLLLALSPAAAAAREVEYHHCHCDGGGGGGGGGLWSMDSIFRWQKVSDLLIAAAYFSIPLEILYFVAGLRHLLPFRWVLVQFGAFIVLCGLTHLLTAFTYEPHPFMVVLLLTTAKFLTALVSFLTAITLLTLIPQLLRVKVRESLLWLKARELDREVVLMKRQEEASWHVRMLTHEIRKSLDRHTVLYTTLIELSRVLGLTNCAVWMPAAGEMCLTHELRRDGGGEDGVVGVDDADVVEVRGSDGVKLLGPDSVLAAASGGKEEGTGAVAAIRMPMLKVSDFKGGTPEVIQTSYAVLVLVPPAGKSWGRHEMEIVEVVAGQNRELLQARRDALMANEARQAFQGVMSQGMRRPIHSILGLVSMVQEEALAPEQRLVVDTMARTATVVSTLVNDVMEMSADSRERFPLETRPFHLHAMIRDAACVARCLCDFRGFGFAVHVENALPDLVVGDERRIFHVLLHMVGNLIGRTEPGHVTLRVRAADDDVLDDRLGQRWDPWWPSYSTGYSSVKFVIGVKRQQNGDAGSPLSRRPSGKGIDLRLSFSMCRKLVQMMQGNIWAILDPQGLPESMTLVLRFQLQSPLTSSSLGGSFEQKHSSPSCQIAGLKVLLIDDDDDINLVVARKLLEKLGCVVSSPPSGSGFLSSVGSSAAAFQLVMVNLEMKRVKALDVATRISQYRSGRWPIVMAMASDQKAWEKCAQSGINGILKKPVILQELKDELARILQST

SEQ ID NO: 104194 - protein, 377 aa, Oryza sativa
  unsure (1)..(377): unsure at all Xaa locations
  Clone ID: PAT_MRT4530_101551C.1.pep
MALVSFLAAITLLTLIPQLTHEIRKSLDHHTVLYTTLIKLSRVLGLTNCAVWMPAFGEMCLTHELRRGGGDDCVEVVGVDDADVVELRGSDDVKLLGPDSVLAKASGGKQQGTGVVAAIRMLMLKVADFKGGTPEVIQTSYAMXEESRAMRDWLAEQNRELLQARRDXALMANEARQAFQGVMSQGMRRPIHSILGLVSMLQEETLAPEQRLVVDTMAHTASIVSTLINDVKEMLADSRDRLPLETRPFHLHAMIRDAACVARCLTGRTEPGHVTLRVHTDDDDVLEDRLGQRWDPWQPSYSSGYSSVKFAHSRRCSSCSRRHLTGEREGVRGKERKEIFDKWAVSFLKIKNLQTGLPCRPKPLAKLLGEFSSGIDS

SEQ ID NO: 104195 - protein, 836 aa, Oryza sativa
  Clone ID: PAT_MRT4530_101552C.1.pep
MLLSTWTPGCFQGNKILLRSLITWYYLEFMPKLRPFYFLFYLTLPSCATDSPPISDKSSSIFLPLAQQQQLVHWMMPPRFRCQDYLLPLLLALSPAAAAAREVEYHHCHCDGGGGGGGGGLWSMDSIFRWQKVSDLLIAAAYFSIPLEILYFVAGLRHLLPFRWVLVQFGAFIVLCGLTHLLTAFTYEPHPFMVVLLLTTAKFLTALVSFLTAITLLTLIPQLLRVKVRESLLWLKARELDREVVLMKRQEEASWHVRMLTHEIRKSLDRHTVLYTTLIELSRVLGLTNCAVWMPAAGEMCLTHELRRDGGGEDGVVGVDDADVVEVRGSDGVKLLGPDSVLAAASGGKEEGTGAVAAIRMPMLKVSDFKGGTPEVIQTSYAVLVLVPPAGKSWGRHEMEIVEVVAGQVAVALSHATLLEESRAMRDRLAEQNRELLQARRDALMANEARQAFQGVMSQGMRRPIHSILGLVSMVQEEALAPEQRLVVDTMARTATVVSTLVNDVMEMSADSRERFPLETRPFHLHAMIRDAACVARCLCDFRGFGFAVHVENALPDLVVGDERRIFHVLLHMVGNLIGRTEPGHVTLRVRAADDDVLDDRLGQRWDPWWPSYSTGYSSVKFVIGVKRQQNGDAGSPLSRRPSGKGIDLRLSFSMCRKLVQMMQGNIWAILDPQGLPESMTLVLRFQLQSPLTSSSLGGSFEQKHSSPSCQIAGLKVLLIDDDDDINLVVARKLLEKLGCVVSSPPSGSGFLSSVGSSAAAFQLVMVNLEMKRVKALDVATRISQYRSGRWPIVMAMASDQKAWEKCAQSGINGILKKPVILQELKDELARILQST

SEQ ID NO: 104196 - protein, 199 aa, Oryza sativa
  Clone ID: PAT_MRT4530_101553C.1.pep
MASREDDRAGRGGGGGRTEQERRPSKAWGILIFGLIGATTATFAPQGPKCYLKIARALQMGKPCARQVAQVRRSVDWVYSQFNKMQTTSWRNASNSSNRGSFSEDARRRYYQRMQQEYEEEQERVQRIRHMQSVFNRERNKFRRSYEAWRENGPPGGYNYVPRDDWYWQTDTSHSEHKNRRTYTPAGPRIYFTAILSIK

SEQ ID NO: 104197 - protein, 41 aa, Oryza sativa
  Clone ID: PAT_MRT4530_101554C.1.pep
LQAGSFTLNYHRANSKISDEHNEAHRGWATCLWSHSDTAGI

SEQ ID NO: 104198 - protein, 266 aa, Oryza sativa
  Clone ID: PAT_MRT4530_101555C.1.pep
MEYVVQGIIETQHVDALEVLLQGLSGVPKERVRVHELCLKSGPNLGVVPSEVRLLCDLAQSTPSWTIRHVGGAMRGAGAEQISVLVRSIVESKASNNVLRYFYGIGYKLDHEVLKGGFAFRFHRGAQITVTVTSVSKMTKLHATNEAVPITPAIQLVEITAPAAADNYNDVVSAVTSFCEYLAPLLHLSKPGNSTGIVPTAGAAAASLMSSGGGGGGMTMRMLKICFLYGSIYFKRLSLKLQLRIVWPGQQCNAWATREGPSGKPL

SEQ ID NO: 104199 - protein, 66 aa, Oryza sativa
  Clone ID: PAT_MRT4530_101556C.1.pep
VCAKPCIILCSPSDGRQMILCYIYQTLPIDASRTITYIFVEEELSVDILQIAGWIGDSVSISHRLD

SEQ ID NO: 104200 - protein, 47 aa, Oryza sativa
  Clone ID: PAT_MRT4530_101557C.1.pep
RGLMECTILEGRSPHSMEVKYLLYITTHTIKKSYYILTSTILTLSPS

SEQ ID NO: 104201 - protein, 51 aa, Oryza sativa
  Clone ID: PAT_MRT4530_101558C.1.pep
EFSPSISLASTPAASPARDSLTPPCAGPFLPCRRRPCLDDTGTKFTAGRLH

SEQ ID NO: 104202 - protein, 94 aa, Oryza sativa
  Clone ID: PAT_MRT4530_101559C.1.pep
SGEGDRMPLSTTHLTQGARRRARHGQGQSDCRLAGYAASEPCWQALPFLSPGSSNRNSESDACPVLDLYYYVRVKLLIRSMSSHENGMDRGRKE

SEQ ID NO: 104203 - protein, 296 aa, Oryza sativa
  Clone ID: PAT_MRT4530_10155C.1.pep
MAKLLSSLAKLSQPTPLAICGSHHLPYPFPLLGSNVAKKESRWCNLIGDRGRGNGAASVASRRWSRQWRLVVQAGEACRTTAIVRRSSVAVALADASKRAHAAICLNPRRHPNPANTLRASASDLLGNKQASGALVCAQFSALDYLVGVAAGALLAECSHSVHHPTSPHRCACWIPPRCATPPRTDLAGGVDSGPHGLRTPALAHVTDGGPAGRTPGPHQQQQQQDYGDTRACGAGGGDNGAEQEAHGGGVRRRRQQRNTIMTRRAGGHATAEFRSLCITSGKKEKKAMGSAWQVK

SEQ ID NO: 104204 - protein, 110 aa, Oryza sativa
  unsure (1)..(110): unsure at all Xaa locations
  Clone ID: PAT_MRT4530_101560C.1.pep
MAPSTKELLVAHPPQKIPQALNMAGAPYVKKGGRHKEGKNELYHDTKFACAQQIGDQCGFHVCHNMSTLLREKGRAGFKISPINXPAIRGELCAFILAEIMNKKGRFHAK

SEQ ID NO: 104205 - protein, 132 aa, Oryza sativa
  Clone ID: PAT_MRT4530_101561C.1.pep
MAVAGEGAASIPTGGANEGAEDTRQGSKNEREPAASESYRLRTPPLLPSRHWVGASPHARSYGGEGAAVAAVVVFTKGCRNLTSHRCHRATTPSRFWVAAGILRRINVDVWESTSIRAVEGAASIHARDNTN

SEQ ID NO: 104206 - protein, 62 aa, Oryza sativa
  Clone ID: PAT_MRT4530_101562C.1.pep
GGGLGDDGSSGGEGGGDGSSDGEDCGGGFGDGEERRRHARRSSSSCSSSGDGEDCGGKSGDR

SEQ ID NO: 104207 - protein, 41 aa, Oryza sativa
  unsure (1)..(41): unsure at all Xaa locations
  Clone ID: PAT_MRT4530_101563C.1.pep
LAILFRXFYTFDLVEDHPVKYGMMSILSMAVGLKVRVASSV

SEQ ID NO: 104208 - protein, 319 aa, Oryza sativa
  Clone ID: PAT_MRT4530_101564C.1.pep
MRVKDEGVIAVEDDFAARRRRLRRRVREKARPLAGGWVDDVVVEQDEAVAVVDYGEKGFFDFVGVEVVQVEGAGDGWPRRLRPCRRRGAGEEAAESWHADLDKDAAERAGEERSREGVHFTHTTLLTRITQPVGISHVGRPPSFHDKAFPKPPQVGPTCRPLLPPPAAAPQAGRRRNRHRRRRFPRFPRPLRPYRTPTSPPSPRISRPQPLGSPPHPAIGAAASAIPRSTSSAVLPSNSIAGARISSHSGPPGARRRHPPVSRRCRSPSLLPRAGRAPRAAASAAAAVFAPSAAASRRRLPSLATVCARAALAITGRPA

SEQ ID NO: 104209 - protein, 348 aa, Oryza sativa
  unsure (1)..(348): unsure at all Xaa locations
  Clone ID: PAT_MRT4530_101565C.1.pep
MIYPQAIGLGGDRVRRIWRKGSGARTRLGRPAGAEKVKRAKPEDLTPAAGDSIPQATLDGSDETNLFKTSPTGKNFNSGFAPVXAGNGQPPFRAAVNPEADQPDTPADPTPSRPPSPGASREPXDVSKGWGGADMRAPLDRGTXRGRGGDWQAGPTGAASQGGGGKRRGARSVRLGFKPAGRLWRGRRRARTVASDGNRRREAAADGAKTAAAAEAAARATLAAALRGGRRGKGRERXERGRPILTEGLGRREGGATANGNDERREDDGDGLREDLEKRLGGVREREVVHGARHNRSKAAAMVEAHRSXEEMRAPAMELDGRTADEVDLGMADAAAPMAGCGGDPSGC

SEQ ID NO: 104210 - protein, 161 aa, Oryza sativa
  Clone ID: PAT_MRT4530_101566C.1.pep
PDSGYAAACGDAAGDWILFTSPTPFNRCVLLRCPSVSFEDGGVLLDGVNERLLTEERHYVNLSRGSIPAARGGDGGAGDIFYQRVCIPAEDGGVIALDWPDNLDLGKEHGLDSTVFIVPGTPEGSMERGIKVFVLDALKNGYFPIVMNPRGCGGSPLTTPR

SEQ ID NO: 104211 - protein, 398 aa, Oryza sativa
  Clone ID: PAT_MRT4530_101567C.1.pep
MGLAHRRLLLLLLHLLLLVAAAAEAAAAGAGRKEKGIGGGGGLRFRGGSGTFKVVQVADMHYADGRRTGCLDVLPSEAAGCSDLNTTAFLYRLFRDEDPDLVVFTGDNIYGFDATDAAKSMDAAIAPAINMNLPWAAVIGNHDQEGTLSREGVMRHLVGMKNTLSRFNPEGIEIDGYGNYNLEVGGVEGTLLANKSVLNLYFLDSGDYSTVPSIGGYGWIKASQQFWFQQTSSNLQTKYMKEEPKQKAAAPGLVYFHIPLPEFSSFTSSNFTGVKQEGISSPSINSGFFASMVEAGDVKAAFIGHDHVNDFCGKLNGIQLCYAGGFGYHAYGKAGWSRRARVVSVQLEKSDGGEWRGVKSIKTWKRLDDPHLTTIDSEVLWNRGSNGRRKKNPDGKMR

SEQ ID NO: 104212 - protein, 145 aa, Oryza sativa
  unsure (1)..(145): unsure at all Xaa locations
  Clone ID: PAT_MRT4530_101568C.1.pep
ARPRSPQQPQPQPPQPXVLRPLASTTAAVAPPPTPPPSPPRHREEXPLRARHPPPLQLPSDPQPPTPATXRPLAGPLAPATRLEPPACHSPPAATTVAPPCLPRPPMPPTLSCLPPPPPPPPXPPRPPTLSANAANSTPPTPPTR

SEQ ID NO: 104213 - protein, 230 aa, Oryza sativa
  Clone ID: PAT_MRT4530_101569C.1.pep
EVIYNVNARLDLADLNIKPELQLQPNGDDYHMPEARYTLSREKKIKFCKFLKETKFPDSYAANIERCITAEGTSLHGLKTHDCHILLQRILPAGMRGILDDDICLVIAELGKFFRELCSQTLNKDILVRMKTEIPAILCKLEKLFPPAFFDVMVHLAVHLPDEAMLRGPVQFGWMYPVERRLYTLKRSVRNKARPEGSIAEAYVADEALTFCSRYMEDVETRFNRAPRNP

SEQ ID NO: 104214 - protein, 201 aa, Oryza sativa
  Clone ID: PAT_MRT4530_10156C.1.pep
MPIAASRDASRGTWAVGFPEWPATTPPRRGDYYYLSVLDLDSLSPLAVSRRRRLLSEWPCVAWWKAVSERGDCTYGTTCLFVPQEVTGGSPQSISRIRVAARIQADGGVGPLARVGKGDGDAGPTDNGGGPACFSGLHYKAPLPRPSAGGHRCGAVATPSVTDEVAPSALLLGHIAPQQRKRVWKVVGPTDGKWSRLAKFG

SEQ ID NO: 104215 - protein, 54 aa, Oryza sativa
  Clone ID: PAT_MRT4530_101570C.1.pep
GLSNPKNLSAALGKFLWKVPFSNGYPPIKKANSTPFLAGFHFLSPYIRAALWGG

SEQ ID NO: 104216 - protein, 332 aa, Oryza sativa
  Clone ID: PAT_MRT4530_101571C.1.pep
MAPHVAAPNRPMDQPESAAASTSEESESASASHRAIWLDSVSISVRIPIPPRVATAAAATGFLAKPPPPLAPLVMSSSSSSSSQGGGRRRPMSRALIEQHRPWDVVDNMALIIIDQTYAAALGIPGRREMGDGSVEVSSAVDADDPDSPVLTINASATRCCVAFDTPRRDAVPYKKFTSPKRKTRPDHRLARTIVSVSPATLYLSHRSDCVGGDSDSKDYWSCAEVAPDVAAGGALAILDTIMLRLEAAIHLEENILVNAMEFNCGTSSVLEVVAETRNALEEMRREMDLPEMMQRRLHKRRHVVVGDAAAADHDDESAEKVFKKFRTMRCR

SEQ ID NO: 104217 - protein, 75 aa, Oryza sativa
  Clone ID: PAT_MRT4530_101572C.1.pep
KYSRPCSVNPLRERLEGMLFHTLCVVWNYSPCNPLQSSSISSKPNKPLAGLAERRGQLNLFSENTWSNQSNSASF

SEQ ID NO: 104218 - protein, 135 aa, Oryza sativa
  Clone ID: PAT_MRT4530_101573C.1.pep
MQPSLPFLTMLLDPGWEGKGRQPDLGGGNAAADLPRPPLHAYVVAARPCLAAVRPAPPAIGLPLPPSTGSRRDRGGKARQGWMSPPPSVTVPVPCRRRRQPSASPSWIPPPPRVAVVGSRRPRRRMPTVAEGEES

SEQ ID NO: 104219 - protein, 67 aa, Oryza sativa
  Clone ID: PAT_MRT4530_101574C.1.pep
MAPSLLLGHTTRRPYVTLYAPCVPRPAGLFLVGVVLSERARQASVALAVARRKVVEEEEGAEGKGRL

SEQ ID NO: 104220 - protein, 107 aa, Oryza sativa
  unsure (1)..(107): unsure at all Xaa locations
  Clone ID: PAT_MRT4530_101575C.1.pep
GETVQQQQFGDRTGQVEFQGRSSXDPKMGFEPLXWGSGGGDQTXLFDLTSTVXIMHTGVKVNGRRLTKIRVVSTFLDSDHSFFFLTQKYIFYTHKVKFDEVVFLIFI

SEQ ID NO: 104221 - protein, 186 aa, Oryza sativa
  Clone ID: PAT_MRT4530_101576C.1.pep
MNVSEMNRAGGGRTSAEQSHQELGEDELKWPDDGWGGGRQGKAGEEEGIGGQQRGDGRRRGGGGDAGKGLSQRVWWRAPRLKWATNLEVACIVEEEILRLDAAIVHATRVVVPDSKDKLPKVVLCEVLYHAAGRVEQGEQLVASGEVEDEVDLVAVVLLGENGRLPLDGYGMEILAAAEAMAGVGE

SEQ ID NO: 104222 - protein, 135 aa, Oryza sativa
  Clone ID: PAT_MRT4530_101577C.1.pep
MGAFATPEIARIRQELDILRFMIATEPAFFGLDLDLLQLLFPLLDLFSAALGRRPALAPPPAGQTPSRRTSPRADPEPARRRPAPAPTQVARCRLAPAPACPADQHPASPPSPRTVGQHPALPTSHASAEPARRR

SEQ ID NO: 104223 - protein, 381 aa, Oryza sativa
  Clone ID: PAT_MRT4530_101578C.1.pep
GCRNRHEAKACNQNKGRDMVHSIEVLGNREAAMLFEEVVSESRSTKAGQKKKNEKPPDRIWEICGGLPLAIVTMAGHVACNPHKTQRKWNDVCNSLFPDTLDTRFNKSDTLNPEGVTKILNYCYNDLPADLKTCSLYLSIFPKGFKISRKRLTRRWVAEGFVSEKQGLSVEDVAESYFNHLVRRKIIRPVEHSINGKVKTCQVHDMVLEYIVSKSNEENFTTVIGGHWLVPMHSNKVRRLSLQSIDSNHGKAVEKMYLSHLRSLSVFGSLNQLPSHSFKIGLVQVLDLEGCTGFEQKHIKEISKLLLLKYLSLRRTDIDKIPEYIGQLQYLETLDIRETNVEQLPKSIGQLNRMSNILGGNKITRKALKLPEEIKNETMRA

SEQ ID NO: 104224 - protein, 174 aa, Oryza sativa
  Clone ID: PAT_MRT4530_101579C.1.pep
FFYFILFFILFFFIYFFILFLFIFLYGFKKRKGAKDSKKGKKKASNREKKKKKKGGGEKKKKKKKKKKGQKKKKKKKKKTKKKEKKKKKKRQKKKKKEKNEKKKRKGRKKPGKPKKKNPGQTWKEGHGKGTPRGGPKTGPPGPERPIRGAPGAPGGGPRGAGAGSSGRGRGTRG

SEQ ID NO: 104225 - protein, 96 aa, Oryza sativa
  Clone ID: PAT_MRT4530_10157C.1.pep
LHLFSSTEHILCLSQLVLFQIVSVGILARYSNNAPCCGELIVWSCLNSRIALTALDLLSVSSIIISSHVGTLGSILITLKHFCLSMTLGMIWRWYY

SEQ ID NO: 104226 - protein, 140 aa, Oryza sativa
  unsure (1)..(140): unsure at all Xaa locations
  Clone ID: PAT_MRT4530_101580C.1.pep
IIHKTLNPPNPRRRRRSIYRLLRSYLRACPKKLAPAGAPYVRPPCCRRCRRWRCCSPSSSSASPTPSPSPSWRSGSSAPTAAHPSXPRPASAGRPSASSSSPASSRSPSSSPPSDSPPTVTPSPARSTTCATRSKPCRMI

SEQ ID NO: 104227 - protein, 102 aa, Oryza sativa
  Clone ID: PAT_MRT4530_101581C.1.pep
MDSPCLPLLPFPLLSMRQQRAQARAVAGEGKSDGLGHEVSRRQRQLEGRIQCPLPFPHESRHHFASHAHSSTNSGDWRARFGLPSPPAQIPPPLRPPCAWIC

SEQ ID NO: 104228 - protein, 190 aa, Oryza sativa
  unsure (1)..(190): unsure at all Xaa locations
  Clone ID: PAT_MRT4530_101582C.1.pep
MDLEASHGKVSIPGAVTQQYRWAQCGTGRALDQGGASSSPSPSTAVAAPVYAPTPRDRALRTPHSGYHYDGTARPFFEGWNFKVSIPECRQSFCFMYFCXNPLFRDGMSDLEXFIHGSRFTGVGAHILGAFDKYICQFTEKFNNFWGSRHELMLGNTFIPNNGSTPPEGEVPPRQXSFYTKEGLFMWHPI

SEQ ID NO: 104229 - protein, 168 aa, Oryza sativa
  unsure (1)..(168): unsure at all Xaa locations
  Clone ID: PAT_MRT4530_101583C.1.pep
LMTGHXYPSRTGRRSNLLARLVIXDPRTTRCSSXNLLRRACALGGEEVHEAVADLVIDAVQLGVHRAAAHEPVHLAVSAAGLDELVRLVEGLVEAAQHVPRRRRRRLAGSRGLVVVVAQDAGDSPRAVGELQALGLVLASLLRHRGDLHRQLYHRAHEAEQRRRLHGS

SEQ ID NO: 104230 - protein, 52 aa, Oryza sativa
  unsure (1)..(52): unsure at all Xaa locations
  Clone ID: PAT_MRT4530_101584C.1.pep
SKLWSDGKISVALLVYACTXGCAHGMYHLLSPIAIWFLDFLSYLFFPDHDFY

SEQ ID NO: 104231 - protein, 475 aa, Oryza sativa
  Clone ID: PAT_MRT4530_101585C.1.pep
MDLAAAAVAVSFPRPAPPPRRCAPRRHRRALAPRAASSSPSPSTAVAAPVYAPTPRDRALRTPHSGYHYDGTARPFFEGWYFKVSIPECRQSFCFMYSVENPLFRDGMSDLDRVIHGSRFTGVGAQILGADDKYICQFTEKSNNFWGIQVHIFLGVLFVLDVVCIPCIYKGRHELMLGNTFIPNNGSTPPEGEVPPQCFCIKEFKSKYVPNVQTARWEYSTRPVYGWGDVTSKQKSTAGWLAAFPFFEPHWQICMAGGLSTGWIEWDGERFEFENAPSYSEKNWGAGFPRKWYWVQCNVFSGASGEVALTAAGGLRKIGLGETYESPSLIGIHYEGKFYEFVPWTGTVSWDIAPWGHWKLSGENKNHLVEIEATTKEPGTALRAPTMEAGLVPACKDTCYGDLRLQMWEKRNDGGKGKMILDATSNMAALEVGGGPWFNGWKGTTVSNEIVNNVVGTQVDVESLFPIPFLKPPGL

SEQ ID NO: 104232 - protein, 76 aa, Oryza sativa
  Clone ID: PAT_MRT4530_101586C.1.pep
WGPPPPPAARAADLSAARCPLPSRRPTRPLPRPCGGSARSARRPPSLAIPAEVALGLGGPGWRARVHRLVSSSEVA

SEQ ID NO: 104233 - protein, 67 aa, Oryza sativa
  Clone ID: PAT_MRT4530_101587C.1.pep
MEWPRGWGAGPPGWSGGRDGDGVKHSQHSVVERRTGASEMMERSACRRVEPSVIEGKEMAYVTLRFS

SEQ ID NO: 104234 - protein, 60 aa, Oryza sativa
  Clone ID: PAT_MRT4530_101588C.1.pep
QPLKRGDWRIGKSWGPKHYCYKQNLKTPELLALSKILNWGLPNFWKTFSSGGITRKGLAN

SEQ ID NO: 104235 - protein, 222 aa, Oryza sativa
  Clone ID: PAT_MRT4530_101589C.1.pep
LTTMASFTPNCSTLFFFLVFLAAVFVSAAAASEHGRVLEEDQNIRYRVEDSELPDLYYEICMYAREHRPCRRVMATIPDLKFKLSGQVDLALLLSHVIANRSAEAKALADPLLAAAAAKKGGDELPKCLASCAASLDDVSKAMSGLPADIDVERYPKVQSFLRNKFESGAAPPLCKSGCPDKTSTADEAAIADKFHAIWALMDCAETLAQYYVLPPPPPPKR

SEQ ID NO: 104236 - protein, 98 aa, Oryza sativa
  Clone ID: PAT_MRT4530_10158C.1.pep
MEPSATRWRRTAMAAGRIEGDGGTGWLGDGDGAVDAGMRERWSGGCGRDEARSWVGINSSSDRKSNNPPPVPPSLWPGSQRYSVISYLRSDSRICPTV

SEQ ID NO: 104237 - protein, 315 aa, Oryza sativa
  Clone ID: PAT_MRT4530_101590C.1.pep
MAAAAQATVAPSISSVARQPQRFPAPSTSGNSKFPLFKTSCLAMSHGLVSNTAVSSQPNDGAAKLIQPVVKMCGITSAKDAETALEAGAKLIGMILWPNSKRSVALAEAKEISRVAQSYGAESVGVFVDDDEETILRVSDSCDLNLVQLHGDESRSLLHVLSKNNRIIYVLNANDDGKLINALPDEKYELDWFLVDSAKGGSGKGFNWQKFQMPSVRSKNGWLLAGGLHADNVCDAFYALKPNGVDVSSGICAPDDHNDYSGVWRLTSFCLLNVENEAESLLKQAVHLFSMVVVNAIGVKVEIVTKFLRILLVMQ

SEQ ID NO: 104238 - protein, 88 aa, Oryza sativa
  unsure (1)..(88): unsure at all Xaa locations
  Clone ID: PAT_MRT4530_101591C.1.pep
SWLLPLSTLLSTSLLFLYPXFLSPILXIPIPFLLTTLILPILFILYSIYYNHFRPFXYLFHNPXLXIIFFIIITLFXXSSTFXILPFF

SEQ ID NO: 104239 - protein, 108 aa, Oryza sativa
  Clone ID: PAT_MRT4530_101592C.1.pep
LNANDDGKLINALPDEKYELDWFLVDSAKGGSGKGFNWQKFQMPSVRSKNGWLLAGGLHADNVCDAFYALKPNGVDVSSGICAPDGIRKDPTRISSFMRNVESLGRSQ

SEQ ID NO: 104240 - protein, 198 aa, Oryza sativa
  Clone ID: PAT_MRT4530_101593C.1.pep
MDPAAAMMKLAGRSSYETHGRGWIRRRHTWAQVDPTAAELVRGLRLQRCSWVGVSGSGDDARGRGCIRRQQELGTGGSDGGGARERTSAATVLVGGREWIRRRRSRARVYPAAAGILATISRRFFSKSIQPVERSSTVAPFHPTQRAQPMERTSGHLQERGMRGRAAEDMPAATQCSCSLPGCYCCITGEEMSSARSG

SEQ ID NO: 104241 - protein, 305 aa, Oryza sativa
  Clone ID: PAT_MRT4530_101594C.1.pep
MMTSRMFSAMQMLIMVVVALAGLAAGARAGDIAIYWGQNGNEGTLAQTCATGNYRFVIVAFLPVFGKGQTPVLNLAGHCDPASNGCTGVGADIKSCQSLGIKVMFSIGGGVGNYGLSSRDDAKQVAAYLWNNYLGGTSPSRPLGDAVMDGIDFDIESGGGMYWDDLARYLKAYSRQGSSKKPVYLTAAPQCPFPDASLGVALSTGLFDYVWVQFYNNPPCQYSSSNGVGNLASAWKQWTSIPAGRVFLGLPAAAEAAGSGFVETSDLVSKVLPVVKKSPKYGGIMLWSRYYDGLTGYSDKVKSSV

SEQ ID NO: 104242 - protein, 188 aa, Oryza sativa
  unsure (1)..(188): unsure at all Xaa locations
  Clone ID: PAT_MRT4530_101595C.1.pep
MATAFHTIAAARPRLPLAAFACLCPGPRPATRKLSLTSTAVSTIDSAPASSSDAKKTTTVFVAGSTGRTGKRVVEKLLERGFGVVAGXTDVGRARRSLPQDPNLQLVRADVMEGTDKFVPCTLGRGAGRLGDGGSGGRCVPCCVRGGGRHGGHRQVGRCDPWRRRRRLCDGVPAVVRSLCSMEGLPAN

SEQ ID NO: 104243 - protein, 88 aa, Oryza sativa
  Clone ID: PAT_MRT4530_101596C.1.pep
PGSLANIYSYTSWWAVGEVTCFPLWVPCLSPRPSFCLLAPPQGCFLMWVTPRKDSFGSGRAPLLFVYQRSFFVGLRLSFGSINMYWEA

SEQ ID NO: 104244 - protein, 696 aa, Oryza sativa
  Clone ID: PAT_MRT4530_101597C.1.pep
MGISAAAAAAPFLLLVALLLLLPSPAAAFSFTYNFTSADTAPSGIAFQGDAFFNKFIRLTRDERIGPITSSAGRAFFSRPVPLCDPVSRRRASFSTAFSFSIAAPDPSAASGDGLAFFLSPFPSVLPNSSAGGLLGLFNSFSRGGAAAAHPRPLVAVEFDTYKNEWDPSDDHVGVDLGGIVSAATVDWPTSMKDGRRAHARVAYDGQAKNLTVALSYGDAAAAAALTDPVLWYAVDLMEYLPDAVAVGFSAATGEAAELHQVLYWEFTSSIDTKEETVILWVVLGLCGLLLVLVAAGVLWFVSQWRKAGELADGDIDEEMGYDELADEEFFVESGPRRFRYSDLAAATKNFSDERKLGQGGFGAVYRGFLKELGLAVAIKRVSKGSTQGRKEYAAEVRIISQLRHRHLVRLVGWCHEHRGDFLLVYELMPNGSVDRHLYGGGGGSKKAGGAAPPLSWPTRYNVALGLASALLYLHEECPQCVVHRDIKPSNVMLDATFSAKLGDFGLAKLVEHGSQPHTTVLAGTLGYLAPECVITGRASRESDVYSFGVVALEIACGRRPAELDEEDPSKARLVPWVWELYGKRAILEAADQRLNGKFDLEQMERLMVVGLWCAHPDHAHRPSIRQALNVLKFEAPLPSLPPKMPVPSYFPPPDLVAPVSVEGTSSTDGPGVSECGSSGSNAGGGSGINDRLLDP

SEQ ID NO: 104245 - protein, 598 aa, Oryza sativa
  unsure (1)..(598): unsure at all Xaa locations
  Clone ID: PAT_MRT4530_101598C.1.pep
MGSTSGIDDFVFPPGQTFRFGSLDFITDILGKISLHDSGSNQLGRDXSTPFDLPNLAKIYPKTFLRGTASNHSGETTKISSPSSSSAQDKPTYPPITMWLLDDLPTXIRIKVAFPLGRPNLXSAKIVSSFREVGVILQPLGSCSSIEIASYFSSSTNSSHXDTKIIDYDDFNDDYDFDNFAGFDDYYNDFDDDYALLYFGVFMAXNETDGQRVGQLVDEERARLEQERREQEXLRLEREHQEQDRLRSACERQEQERCXEGRRRALAESRRRARQLIGQTVIDDTNVFLTQQQXNVVGAITLLDTIIPNTLDHVTPTLDRMKTMIAATIPYNLGDSRQPTASTYTPSGSRLPSLRXRDYREPERSRTNSRMPHAGREHREQLVHSPAVGHRGHRADAEYQNSSRALVDLRETLNARRGERNDRRHQHSHAFTNDLCRVNWPAGFKLTGIEKYDSKTDPESWLTIYTLANRVVGGDSKAIVNYLTIALADLARNXAHRVTXGTIGSWSELRDHFIANFQGTFEQLGTHFELYSVIQKPDEPLRDCSRHFSEKRNKISDINDDNIVAAFTKGVRNELLIGKFGRKPPRTLSLRIENMNSF

SEQ ID NO: 104246 - protein, 67 aa, Oryza sativa
  Clone ID: PAT_MRT4530_101599C.1.pep
EQAHSSLAKRDCESRALHLFSSYEWRGTMASDTTAAMALVPTASHHHHHHHVKQLQLPPSVFVSVPL

SEQ ID NO: 104247 - protein, 56 aa, Oryza sativa
  Clone ID: PAT_MRT4530_10159C.1.pep
MAYGAHGALVFTAHGYSRSPQQPSSTQCKRTATMAKFKHASMGHSMFGGAKFKKWK

SEQ ID NO: 104248 - protein, 73 aa, Oryza sativa
  Clone ID: PAT_MRT4530_1015C.1.pep
GLTGVYINYYLLVDQHVVCSQKRIRSSITVKNSTKLYAFSLPKERLVGGGHIISKESINCKDETKGGNTVHRF

SEQ ID NO: 104249 - protein, 757 aa, Oryza sativa
  Clone ID: PAT_MRT4530_101600C.1.pep
ARAPPPRPRAGARGNKKLQERVPIRRTAWRLADLAILFLLLALLLHRVLHDSGAPWRRAALACEAWFTFMWLLNVNAKWSPVRFDTFPENLAERIDELPAVDMFVTTADPVLEPPLVTVNTVLSLLALDYPAAGEKLACYVSDDGCSPLTCYALREAARFARTWVPFCRRHGVAVRAPFRYFSSTPEFGPADGKFLEDWTFMKSEYEKLVHRIEDADEPSLLRHGGGEFAEFLDVERGNHPTIIKVLWDNNRSRTGDGFPRLIYVSREKSPNLHHHYKAGAMNALTRVSALMTNAPFMLNLDCDMFVNNPRVVLHAMCLLLGFDDEISCAFVQTPQKFYGALKDDPFGNQLEVSLMKVGRGIAGLQGIFYCGTGCFHRRKVIYGMRTGREGTTGYSSNKELHSKFGSSNNLKESARDVIYGNLSTEPIVDISSCVDVAKEVAACNYEIGTCWGQEVGWVYGSLTEDVLTGQRIHAAGWRSTLMEIEPPAFMGCAPNGGPACLTQLKRWASGFLEILISRNNPILTTTFKSLQFRQCLAYLHSYVWPVRAPFELCYALLGPYCLLSNQSFLPKTSEDGFYIALALFIAYNTYMFMEFIECGQSARACWNNHRMQRITSASAWLLAFLTVILKTLGFSETVFEVTRKDKSTSDGDSNTDEPEPGRFTFDESTVFIPVTALAMLSVIAIAVGAWRVVLVTTEGLPGGPGISEFISCGWLVLCFMPLLRGLVGSGRYGIPWSIKMKACLLVAIFLLFCKRN

SEQ ID NO: 104250 - protein, 98 aa, Oryza sativa
  Clone ID: PAT_MRT4530_101601C.1.pep
GKSNGGLKFLSKKRGGAPLFPQQTQALGAVKLAQPPVNFFEMNPSPVQEISQLKISTPLMPDLGNSLPKAFFWGPLFFFCNIKQSTAFGHFKKKQPHK

SEQ ID NO: 104251 - protein, 125 aa, Oryza sativa
  unsure (1)..(125): unsure at all Xaa locations
  Clone ID: PAT_MRT4530_101602C.1.pep
RIPHITFCLPYVFITISSRXSDFDGKMLEAAKDLGASEVTTLRKIVLPLALPSIISGWLLSFTISLDDVVVSSFVTSPSYEVLPLKIFSLVKTGVTPEVNALATIMIIFSLSLVVLSQLVLRKKV

SEQ ID NO: 104252 - protein, 446 aa, Oryza sativa
  Clone ID: PAT_MRT4530_101603C.1.pep
MAREVLKVLEAGLAEIALELGILLEAGRGKVEEVGTSMVDGNQMLVPMAEKMAGLDRRILEILKVVLPVPLPFCQFPPVPAGGGGTSLLAAGSGLAQFGGVAAQLGGGMIAGGVAQGSTAAQHGVGLTGAGAQTSSDSGGNGSVLAGISPFGDNVHLPGGVGGDQHLTAVGETVDGLGFFHIPLSAGQRIKHDSKVALVKVTRGQMTVQNVVSGLERLIPGNWKWVVEENGDNTFRTIFTSTAELKRMVEWGTIHTKVGDAEMKIIERGVGNEVKYVLPKAVGSILGITKMVDMNFTRRYDIARLQVLVLDPSLIPDVVDVAIGDNLYELCFKVEQENGFDVPEPIGMDNSGDREEGKGTSFGPSTQVLPPVVKGSSVSDEEFDGLVEESAGAESVKSHESLAVKLAAVPDAILSPARQSKRRASDSDQLTLQRAEKIKAGRNLEV

SEQ ID NO: 104253 - protein, 114 aa, Oryza sativa
  unsure (1)..(114): unsure at all Xaa locations
  Clone ID: PAT_MRT4530_101604C.1.pep
RRPTTAGATAKHGAQSIAPNAPLVQPTAPVSAPAPXVQQQSIQQTPPRQQVAQPIQQQGLFQNYQGGNLNYQYQPPSPQVQYQQGGSAQPQFVPQYNQFEPVPQQAQGAPQQRP

SEQ ID NO: 104254 - protein, 872 aa, Oryza sativa
  Clone ID: PAT_MRT4530_101605C.1.pep
MERKNQRPVHGGGGQGSFAARANFHPGHGEGGFQGARGRFGRNRFGARNFGGGRQGQGGRGWNGNGGQPNAGSHGGGDGWFGQEKFRNTEGGFGLQARPIFGHNPGLRFGQSPTFSFGLQPVPLPFGQFPPVPAGGGDASLLAAGSGLAQFGGAAAQFGGGMIAGGVAQGSTAAQHGAGLTGAGAQTSSNSGGNGSVLAGIAPFGDNVHLPGGVAGDRHLTAVGESVDGLGFFHIPLSAGQRIKHDSKAALVKVTRGQMTVQTVVSELERLIPGNWKWVVEDNGDNTFRTIFPSAAELKRMVEWGIVHTKVSDAEMKIIERGVSNEVKYVLPKVWVQCKGLPSELREFLIIWAVGSMLGITKMVDMNFTRRYDIARLQVLVLDPSLIPDVVDVVIGDNLYELCFKVEPENGLDVPEPMDMDNSGDREDGKNMDGSDVQDKGLTVSDEEFDGLVEESVGAGSVKSHESLAVKLAAVPDTILSPTRQSKRRASDSDQLTLQRAEKIKAGRNLEVQNVKDKVISSSLSKLGFIDANNDSNFVNAIKDIRSLEEARLSDCISLKDKHNSTVFPENELTDDQLEDNSVLEKLCSEIMEEVMDTGGDYDYNLYITSDSMISPSIKKRSDKKVRLMGSRTQIISDLTKEQQLDFIALSETVKRDFTSSALKNLCGGKDFLWHCKPPRGCSGGWLLRDGFVDMVKEIWLSVDEGNTSLERWQAKIRRLRQFLRGWAKQTSGTYKKEKKALLEKLDLLDKKAESTLLTQEELNAKHYMRNRLACLLREEEIKWYQRAKTKDILEGDSNTKYFHLVANGKHRKTRIYQLQDGDHIINGDANLKAHITTYYKGLFGPPDESSLTLDESLIGDIPQVSSLENNR

SEQ ID NO: 104255 - protein, 365 aa, Oryza sativa
  Clone ID: PAT_MRT4530_101606C.1.pep
FHNLDRRTMLLADGSVRTYFALPPDYPFELTPLPQLPHLPRGAGHEVWPPHHPPPPPQQQQLQLAQHDAKRKHLAEHDEGFHSRHPKQPRFEAAPPQQQQLPPHAAVDRHALRRAFLKYAKMLNESAAQRRSYLEGGRVPCLACGRSSKDFADVHGLVMHAYNPPNVDSFIDHLGLHKALCVLMGWDYTKVPENSKAYQSLLPDLVQASREDLIIWPPTVIIHNTATGRKKDGRAEGLGNKEMDKKISELGFAGGKSKSLYGKEGHLGLTLIKFANSPAGLKEAERLADFLERQDHGRIGWLHARANQSVGSDNSPLLVETDNRTGEKRRILYGYLAISSDMDELDSDSRKRASLKSKREFDPSD

SEQ ID NO: 104256 - protein, 171 aa, Oryza sativa
  unsure (1)..(171): unsure at all Xaa locations
  Clone ID: PAT_MRT4530_101607C.1.pep
ILVAADLHSSYQRPRVSTYNKIMNGPXSHHTNXAKDCFIYKXFAEQYATQLKKPTDTEHSTSTQKKDDTDQGQPGFQDPRKELNHIFGGPQDYESKRKXKLIDREINAVQPETPQYLRWSEVGIKFDRSDHPDRVVHPGXYPLVLDPVVRNINWRRRLIYPGRRRHVGLQE

SEQ ID NO: 104257 - protein, 81 aa, Oryza sativa
  Clone ID: PAT_MRT4530_101608C.1.pep
PHTGVALAALFKLRDQRIIGPNDRTVVVSTAHGLKFSQSKIDYHDSKIEDMACKYANPPVSVKADFGAVMDVLKKRLKGKL

SEQ ID NO: 104258 - protein, 148 aa, Oryza sativa
  Clone ID: PAT_MRT4530_101609C.1.pep
MGTKVPITCCMRCPWTHYHDTVTHVAINQIQGTIEIHLKRNAPRAPGATSCGLCSGCICHKPPKHSPSWVVLGVHLQFAPEYGPPRVVLGAHLQPAAKYDPSWDVLGVHLPPRSTAECLEEHICMDPTKPRIECEAVYTNPACDWDNT

SEQ ID NO: 104259 - protein, 73 aa, Oryza sativa
  Clone ID: PAT_MRT4530_10160C.1.pep
IVIIDGYRKNVGLIDKVRRLSVQFFYSKYTKVPSNIKRSQVRSLTFFGLLKCMPSITDFKLIRVLNLQLVGHS

SEQ ID NO: 104260 - protein, 84 aa, Oryza sativa
  unsure (1)..(84): unsure at all Xaa locations
  Clone ID: PAT_MRT4530_101610C.1.pep
KXXPFXXTFXXYPXXXXXVFXKXGXPINXAPQSRXGAXQXGVIXILXGXIIFLTSQXGKXFVLIWGXLXXXFFKICRNKPSFXI

SEQ ID NO: 104261 - protein, 817 aa, Oryza sativa
  unsure (1)..(817): unsure at all Xaa locations
  Clone ID: PAT_MRT4530_101611C.1.pep
ANPDLHHWKNTFKSWPSLEKXPPEKSWITWYKRVXANKKVHWDKIGIGQALALTIANSAKDGPLMAAATYFWSSTINAFLFNHGPMTPTLINTTMITGLDVTSSANPMSMNTKNQFDFKTKSIGGWSGYVAAYMGKGPITPREHVAFLLMWLEKFLFCGSSYGPTTNWQFVAEALESKKQFPLGKILLGNLYQMLNNASAKIAVGSVVGVGGPWWLLQTWLNLMVMKVVNRPSVTKAEFPRLEPIVEDARKMVTPAPPTGWDFSTGDSIRDEVWSRFGSPVHFSSHFSRSTFRLVVDVPRSSFRLTSSSVALALRAAIGGSPSDLHVDPLIDRSFTFLVCSKKVGLWIYSLRSFSCKDFSVRYFLWKNGGPDWRREWDLWQAEQYNEWTIVKRRYSSGNRSQHLIKASSVFDRLKFDIPSSPKRITQKSDSIVSKEIFLANSDPKAVGLFKFGSAMVRDLLVYAPPFMYDGIHQVNFVRHDQSPNWRGAPFTRTVWFLLLDFPLDYINMQYICLVVSSFGQLEEWYQNDPIEGKVLVRAMFKDFDSVPRKIVLQDPTSGAGESWTISVFTLEGDFADIFPPDEDLPPTGPNNDENPDGNDDDDGMEIEISLPPSPRKRGKKRTPFVDSQVRRSGRLLALKDGFKNILQEDPNMGVGKPRGKAVKKLKQLAEKIGSEMCGTSLEEVSSLVDLGEAQFNPFGKIMGMKDYYRLAAEFYYGTLDLDPLNHSFIILVPKKSVPKVLVNGIPRKNFHCKRGVRQGDPLPPLLFVLGAELLQVIVNRAYAMGHLSKPFPSDFDPNFPIVQYADDTLLYLKASG

SEQ ID NO: 104262 - protein, 56 aa, Oryza sativa
  unsure (1)..(56): unsure at all Xaa locations
  Clone ID: PAT_MRT4530_101612C.1.pep
KPCTPRVHEDSSSWSGYCQSEVVERLCRGNSHSLGRXGHVLGKSRSTGKVYIHCSV

SEQ ID NO: 104263 - protein, 703 aa, Oryza sativa
  Clone ID: PAT_MRT4530_101613C.1.pep
MGGFKNTLQEDPNMGVGKPRGKAVKKLKQLAEASGIVFPSDSLSSTDLNPDISCESESDLTSVIPADCDISLLQKIGSEMYHIPCVVQIGIDIPKADIFRFETFWIEHDGFFDLVPFGKIMGMKLQDFFHANQSLASLDQPFGISKLDKIIKNLPIDRAPGPDGFNGMFVKKCWPIICQDYYRLAAKFYSSTLDLDPLNHSFIILVPKKSVPEGINDYRPISLMGISLKILTKILADRLQKCHHSRREIVLLKLDFEKAFDTIEHEAILLVMEAMGFSATWLGWIRKIFSSASSSSVLINEVIVNRAYTMGLLSKPFPSDFDPNFPIVQYADDILLYLKASGKAQNLAAVFGCQLGSLPFTYLGLPLGTTKPKTVIDSIDRARRHCLWRGSEVNSNKKSLAAWDKVCKPKRKGGLGVLNLSIQNQALLIKFLEKFYNKKDLPWVNLVWSSCYGNSVPHLTNLKGSFWWRDICKLMDVFRGIARCHLKSGNTCSFWYDVWADQPPLFHTMSKLCSFAQNQNASVSDFPSIEAEGNFTLPLSVQAFQEFQELTSSLVDIELVNENDAWSYIWGNMKYSSQKLYTLNFRAIKPPVHFLWLWKCKAVSKVKVFGWLLMMNRLNTKFMLDYKNCAPPDCDLSCVLCQSVAVEDLMHLFFLCPFAQNCWSLLGITWDTTLPLEGMFIRGKLDYQGSCFMEKFLYAAWHI

SEQ ID NO: 104264 - protein, 122 aa, Oryza sativa
  Clone ID: PAT_MRT4530_101614C.1.pep
MRRRRRRRLLPLPRAGGWCVQTHGHADAAGEPRSLEGEVRHARTRHTKIASADRDWLCKPPNWHLWRAGAPSTSEVATTTTTYRSLWPKLTCRLQKATLHTPAQTGELHAPMTVEPIRPHEI

SEQ ID NO: 104265 - protein, 80 aa, Oryza sativa
  Clone ID: PAT_MRT4530_101615C.1.pep
ARVVIEVEENKKEPEKPSAEQNEEEQPNTSIIPEHSPETSDVIAVEEKTREPEIEAEVLKETNDYESRLTETEKAEPVVA

SEQ ID NO: 104266 - protein, 1533 aa, Oryza sativa
  Clone ID: PAT_MRT4530_101616C.1.pep
MVTPAPPTGWDFSPGDSIRDEVWSRFGSPKVGLWIYSLRSFSCKDFSVRFFLWKNGGPDWRQEWDLWQAEQDNEWTIVKRRSSLGNRSQHLIKASSVFDRLKFNIPSSPKKIAQKSDSIVSKEIVLANSDPKETPSSSPEVARSLVVASESQPQRNPSPAPMANTNPNPHRFLRVGQVVHQGGDRVPRIDLSAATKPPRSHEEYAIALVEPILPEELWDDHRILISEYIEQVQHFTVRRSFPHASAVGLFKFGSAMLRDLLVYAPPFMYDGIHQVNFVRHDQGPNWRAAPFTRTGWFLLLDFPLDYINMQYICLVVSSFGQLEEWYENDPIEGRVLVRAMFKDFDSVQRKIVLQDPTRGAGESWTISIFTLEGDFANIFPPDEDLPPAGPNNDENPDGNDDDDGNQDNIWQFGPHPMVLAEEDQDWNQAAVGHQAMDLEQAAPENMGQIDNNHGWNLVANRGLIFTLADAFKDAFNSWSANSLANLALHPARLNFNLRNEIVSYDSFSFESSAIILSPEPLAVIPPQAVMPVLPEDPFGSMVEHSCPSTPTGMEIEISLPPSPRKRGKKRTPFVDSQVRRSGRLLALRDGFKNTLQEDPNMGVGKPRGKAVKKLKQLAEASGIVFPSDSLSSTDLNPNISCESESDLTSVIPTDCDISLLQKIGSEMCGTSLEEVSSLVDLGEAQETKRSSFDHSYIKKFAPKRFDQFAFSPSVGASGGIVIERFAVKITFTSYHSGLVWTIVSVYGPCTGPERNNFLSWLHQLNIPDDDLWLILGDFNFYRSVTNRNRPGVDMNDIFLFNAMISDLGLVELPLKGRAFTWSNMQHSPLLEQLDWFFTSTAWTLTFPHTLVKLLARSTSDHTPCVVQIGTDIPKADFFRFENFWVEHDGFFDLVQSIWQSHGYEGCSQFEFMPFQRQELFHANQSLATLDQPFGISELDKIIQNLPIDRAPGPDGFNGMFVKKCWPIFCQDYYRLAAEFYSGTLDLDPLNHSFIILVPKKSVPEGINDYRPIPLLGISLKILTKVLADRLQKVILEIISQNQYGFIKGRTIQDCLAWNFEFLHQCHHSRREIVLLKLDFEKAFDTIEHEAILLVMEAMGFSATWLGWIRKIFSSASSSVQVNEIPGKNFHCKRGVRQGDPLSPLLFVLGAELLQVIVNRAYAMGFLSKPFPSDYDPNFPIVQYADDTLLYLKASGKELFTLKALLQTFQLGTGLKFYNKKDLPWVNLVWSAYYGNSVPHPTNLKGSFWWRDICKLMDVFRGIAKCNLKSGNTCFFWYDVWDDQPPLFHTMPRLCSLAQNQNASVSNFLSIEAEENFTLPLSAQAFQEFQELTSSLLDIELVNGNDVWSYIWGNMKYSSQKFYALNFRVIKPPVHFLWLWKCKAVSKVKVFGWLLMMNRLNTKFMLDHKNCAPPDCDLSCVLCQSAAIEDLMHLFFLCPFAQNCWSLLGITWDTTLSLEAMFIRAKLDYQGSCFMEKFLYAAWHMWKQRNGFIFEQKIPSFITWRQLLKGDLFLLLFRISARYHDVIISWINGL

SEQ ID NO: 104267 - protein, 992 aa, Oryza sativa
  Clone ID: PAT_MRT4530_101617C.1.pep
MNDIFLFNAMISDLGLVELPLKGRAFTWSNMQHSPLLEQLDWFFTSTVWTLTFPHTLVKPLARSTSDHTPCVVQIGTDIPKADIFRFENFWVEHNGFFDLVQSIWQNHGYEAFLDSIENLRDLTVLEWNFKILIRNKLLLYLKYKQTYWQKRCTIRWAKFGGENTKFFHAMATESFRRNAIPSLVDSSGLVCTRHEEKAHIVWSPFSSRMGCSQFEFMPFQLQELFHANQSLASLDQPFGISELDKIIHNLPIDRAPWPDGFNGMFVKKCWPIICQDYYRLAAEFYSSTLDLDPLNHSFIILVPKKSVPEGINDYRPISLMGISLKILTKVLVDRLQKVILEIISQNQYGFIKGRTIQDCLAWNFEFLHQCHHSRREIVLLKLDFEKAFDTIEHEAILLIMEAMGFSATWLGWIRKIFSFASSSVLVNGIPGKNFHCKRGVRQGDPLSPLLFVLGAELLQVILSKPFPSDFDPNFPIVQYADDTLFYLKASSKELFTLKALWQTFQLGTGLKVNFNKTCLIPINVDEGKAQNLAAVFGCQLGSLPFTYLGLPLGTIKPKSAYYGYSVPHLTNLKDSFWWKDICKLMDVFRGTLDELFLTKKLLQKYQIAFHASLMFNMICAKKLKQPHDVLDCSTCTLSKMKLKDALGRVEYMEDVVKNNEVLSCPKCRKSKGVMVDCENCANLEKEVSYLKNSLQRFSDAKKNLNMILDQSKVSTHNRGLGFNPYAHHTRHPPVVLGVGARSDICLLDLLVVCLSTGFLNFYYHLTPSTKALVARKENVWIVDPGCSRHMTGDKNWFSSLKKTSKTESIIFGDASTSAVLATGLVKVNEKFELKNVALVEDLKYNLLSVSQIVDEDFEVHFKKTGSKVFDSCGDSVLNISRYGRVFKADFDNPVSPVITCLVAKFDKDVMFWHRRLRHVGFGHVTRLSGLDLVHGLPKLKKDLDLVCTLCRHAKMVASSHAPIISVMTDTPGQLLHMDTVGPARVQSVGES

SEQ ID NO: 104268 - protein, 67 aa, Oryza sativa
  Clone ID: PAT_MRT4530_101618C.1.pep
WFPNTALERLWCQVEEMPNAGPSVDQFHRIKKLLHGSLISHLQQVVVDSHDELSSLGGRKGMGSHSN

SEQ ID NO: 104269 - protein, 163 aa, Oryza sativa
  Clone ID: PAT_MRT4530_101619C.1.pep
MDTTSFPAVWAVVGPGVAGAVFGVGWWFWVDAVVCSAAAVPFLHYLPGLFASFAALMFNCVKREDANYNYYSPYDDSEWRSVGNFSHDLLIHGYQCYRCLWLKLWLFVSYVVSFVSLAGAVGFLVQDALTDTGPSAWTGVAGVLQSVFVLISGLMYWTCHSED

SEQ ID NO: 104270 - protein, 89 aa, Oryza sativa
  Clone ID: PAT_MRT4530_10161C.1.pep
RSPELSSSWHCRRRRRWRAPTQGRTPTSLPSSSRRARRSPPQAARRAQLRRRTTSPPAPRSRARRTASPRKRHRRRRAHRGRAPRRRRS

SEQ ID NO: 104271 - protein, 2195 aa, Oryza sativa
  Clone ID: PAT_MRT4530_101620C.1.pep
MATEAERGGGAARVDEDGGVPAVGGRNEGVDEIGEDAAMPKQAMPKREEMADRDEEQILYDTIAEGSSQYWNEEEGNEDPNQYLNEEGNVERDAEGNQQGHVERDVEGNQEEEASGSQPSVGQKRARGQRGAAKKLEGRHIITEVEEDGRPSAPAEAAKNYVRHSGWVVRDNVPVSTVYWRRTRARGDHESFVPDSEKEMLWTTMLETFTLPAGIEDKVKRWTLKKMAEQFQSFKGELYKKYILKGQTPNFDTFPKLRDHWDEFVAYKTGEQGQAMMERNKENAAKKMYHHHLGSGGYSVAMLKWEEMEASLIERGIEPATANWPERSKFWYYAHGGTLNPADGSLGTFRPDRDRDELTLALQTPEHPGRTRGKGVIPWKIGFKEDIHTHRSRMRSKRDTEAKIADLEFRVSSYDLSMQEEVARKVDERMAAHRSHDPQPTIPPAMVSPSGNRSSCASTGQVVSGMAIPTDPSGTYHSRPIPAGYSKVEVELVEGAYEDLELDYPGGDGSCTVSSSCSASTVSTSGSSTDSSSGSCTDSSSGSYTYSSASSSSGTFKVKGPPAPPPAHTRATKKAKVDAAKNKDPGYDCTQEELDAYVASEVKRQFKPRSPEKKIPVDPSVRNFFRGMSAPVKEAIKLSDYERTLKKASSGKSKPVPQLGEQPNQEIKPLVTGEDMTIEEFIIDTSLTTDQLLGVEPLEKAELKDMYKLGKPLVKPELVQSLPTQMYKFHQLYMEMSATGREMIGARIRDPDFLQGDDILWINFKGIYQVYQLDALDVSIMSCWILMEIQRARRRRVFDTEFIDPRRVNVAMLDQYPQETEDNLVHLLKAQHYKTFILLPYNTEFHWVLLLFDLSACTVNVYDSMDKKESTFDKVFELIDRAWYRFRHLVRGNWRERLRRRFKFPKVGLWIYSLRSFSCKDFSVRFFLWKNGGPDWRRKWDLWQAEQDNEWTIVKRRSSSGNRSQHLIKASSVFDRLKLDIPSSLKKIVQKSDSIASKEIVLANSDPKGQVVHQGGDRVPRIDLSAATKPPRSHEEYAIALVEPILPEELWDDHRILISEYIEQVQFVRHDQGPNWRAAPFTRTGWFLLLDFPLDYINMQYICLVVSSFGQLEKWVILLIFFPLMKIFPHAGPNNDENPDGNDDGDGNQDNIWQFGSHPVVLAEEDQAWNQAVVGHQAMDLEQAAPENMGQTDNNHGWNLVANRGLIFTLADAFKDAFNSWSANSLANSALHPTRLNFNLENEIVPYDSISFESSAIILSPEPLAVIPPQAVMPVLPEDPFGSMEEHSCPSTPTGMEIEISLPPSPRKRGKKRTPFVDSQVRRSGRLLALRDGFKKTLQEDPNMGVGNPRGKAVKKLKQLAEASGIVFPSDSLSSTDLNPDISYEFESDLTSVIPADCDISLLQKIGSEMCGTFFEEVSSLVDLGEAQETKRSSFDHSYIKKFAPKRFDKFAFSPSVGASGGILVGWNSFGGSDIVIERFAVKITFTSNHSSVVWTLVSVYGPCTGPERNNFLSWLHQLNIPDDDLWLILGDFNFYRSVTNRNRPGADMNDIFLFNAMISDLGLVELPLKGRAFTWRHEEKAHIAWSAFSSRMGCSQFEFMPFQLQELFHANQSLASLDQPFGIFELDKIIQNLPIDRAPGPDGFNGMFVKKCWPIICQDYYRLAVEFYSGTLDLDPLNHSFIILVPKKSVPEGINGYRPISLMGISLKILTKALADRLQKVILEIISQNQYGFIKGRTIQDCLAWNFEFLHQCHHSRREIVLLKLDFEKAFDTIEHEAILLVTKAMGFSATWLGWIRKIFSSASSSVLINGIPGKNFHCKRGVRQGDPLSPLLFVLGAELPQVIVNRAYAMGLLSKPFPSDFDPNFPIVQYVDDTLLYLKASGKELFTLKVLLQTFQLGTGLKFYNKKDLPWVNLVWSAYYGNSVPHLTNLKGSFWRRDICKLIDVFRGIAKCNLKSGNTCSFWYDVWDDQPPLFHTMPRLCSFAQNQNASVSDFLSIEAEGNFTLPLSAQAFQEFQELTSFLLDIELVNENDVWSYIWGNMKYSSQKFYALNFRVIKPPVHFLWLWKCKVVSKLKVFGWLLMMNRLNTNFMLDHKNCAPPDCDLSCVLCQSATVEDLMHLFFLCLFAQNCWSLLGITWDTTLSLEAMFIRAKLDYQGAVSWRNSFMLLGIYGSKEMGSFFSKRSLLSSLGGNS

SEQ ID NO: 104272 - protein, 48 aa, Oryza sativa
  Clone ID: PAT_MRT4530_101621C.1.pep
DLINTSRPFPNSALNTLQKNFVLKTSIIVKIYKATSYKNRGMFDPVYN

SEQ ID NO: 104273 - protein, 709 aa, Oryza sativa
  unsure (1)..(709): unsure at all Xaa locations
  Clone ID: PAT_MRT4530_101622C.1.pep
ANPDLHHWKNTFKSWPSLEKXPPEKSWITWYKRVXANKKVHWDKIGIGQALALTIANSAKDGPLMAAATYFWSSTINAFLFNHGPMTPTLINTTMITGLDVTSSANPMSMNTKNQFDFKTKSIGGWSGYVAAYMGKGPITPREHVAFLLMWLEKFLFCGSSYGPTTNWQFVAEALESKKQFPLGKILLGNLYQMLNNASAKIAVGSVVGVGGPWWLLQTWLNLMVMKVVNRPSVTKAEFPRLEPIVEDARKMVTPAPPTGWDFSTGDSIRDEVWSRFGSPVHFSSHFSRSTFRLVVDVPRSSFRLTSSSVALALRAAIGGSPSDLHVDPLIDRSFTFLVCSKKVGLWIYSLRSFSCKDFSVRYFLWKNGGPDWRREWDLWQAEQYNEWTIVKRRYSSGNRSQHLIKASSVFDRLKFDIPSSPKRITQKSDSIVSKEIFLANSDPKAVGLFKFGSAMVRDLLVYAPPFMYDGIHQVNFVRHDQSPNWRAAPFTRTVWFLLLDFPLDYINMQYICLVVSSFGQLEEWYQNDPIEGKVLVRAMFKDFDSVPRKIVLQDPTSGAGESWTISVFTLEGDFADIFPPDEDLPPTGPNNDENPDGNDDDDGMEIEISLPPSPRKRGKKRTPFVDSQVRRSGRLLALRDGFKNILQEDPNMGVGKPRGKAVKKLKQLAEKIGSEMCGTSLEEVSSLVDLGEAQVIKLKTIGPSNDEA

SEQ ID NO: 104274 - protein, 264 aa, Oryza sativa
  Clone ID: PAT_MRT4530_101623C.1.pep
MDLEQAAPENMGQIDNNHGWNLVTNRSLIFTLADAYKDAFNSWSANSLANSALNPTKLNFNLGNEIVPYDSISFESSAIILSPEPLAVIPPQSVMPVLPEDPFGSMEEHSCPSTPTGMEIEISLPPSPRKRGKKRTPFVDSQVRRSGRLLALRDSFKNTLQEDPNMGVGKPRGKAVKKLKQLAEASGIVFPSDSLSSTDLNPDISCESESDLTSVIPADCDISFLQKIGSKMCGTSLEEVSSLVDLGEAQVIKPKAIGPSNDEA

SEQ ID NO: 104275 - protein, 428 aa, Oryza sativa
  Clone ID: PAT_MRT4530_101624C.1.pep
MLRRSKKQKLAKEDEEDARIRDTESPSSVYLVVGHGVTRPSYSLFKVNPHLPANADDGGDTPLPLLPYLAHLTGKHYMSFVSVRSRRHAPWIVGVGGSSARNYGPDETIVFDTVMRKEISGPKLLSTKLCPILLPFGDKIYALARRPAVTGDVNFVPWFEVLDLSVARVDDDASDRLVGCEWRPLPRPPFFPWDLTPTDYIFPPVVTVKSHVAVASYILLSITGQTGTHMFDVETEEWRKLDDNDLPFHGRAVPLQGTGTLYLGLSNTTNAITAYRIKVVSAVQPPPLQAQASHLQGACPASAVASPSITPTGCLSLSIVEIRMVTNFEDEEEIVSTGRFIFLDHLPDRPGFCSFTWSNDDPLQFSSLPEHTKELLTIRAYTTEGPLSQDYLESTRTLVISNQWKQVYSICDTVRGLSFPCLAGAISL

SEQ ID NO: 104276 - protein, 90 aa, Oryza sativa
  unsure (1)..(90): unsure at all Xaa locations
  Clone ID: PAT_MRT4530_101625C.1.pep
MSSEFAANGGIHGSLTGISIGVGVSSTQKVWRSLQAFGDIAFAYSFSNILIEIQDTXIKAPPPSEAKVMKSATRLSVVTTTVFYMIPRSH

SEQ ID NO: 104277 - protein, 820 aa, Oryza sativa
  unsure (1)..(820): unsure at all Xaa locations
  Clone ID: PAT_MRT4530_101626C.1.pep
MNDIFLFNAMISDLGLVELPLKGRAFTWSNMQHSPLLEQLDWFFTSTAWTLTFPHTLVKPLARSTSDHTPCVVQIGTNIPKADIFKFENFWVEHDGFFDLVQSIWQNHGYEGNAAKNISVKLKALRKGLKKWSKSLSKLQLLIKNCNAVIAFLDSIENLRDLTVLEWNFRILIRNKLLLYLKYKQIYWQKRCTIIWAKFGGENTKFFHAMATESFRRNAIPSLVDSFGLVCTRHEEKAHIAWSAFSSTMGCSQFEFMPFQLQELFHANQSLASLDQPFGISELDKIIQNLPIDRAPGPDGFNGMFVXKCWPIICQDYYRLAAEFYYGTLDLDPLNHSFIILVPKKSVPKGINDYRTISLMGISLKIXTKVLADRLQKVILEIISQNQYGFIKGRTIQDCLAWNFEFLHQCHHSRREIVLLKLDFEKAFGTIEHEAILHVMEAMGFSATWFGWIRKIFSSASSSVLVNGIPRKNFHCKRGVRQGDPLPPLLFVLGAELLQVIVNRAYAMGHLSKPFPSDFDPNFPIVQYADDTLLYLKASGXELFTLKALLQTFQLGTGLKVNFNKSCLIPINVDEWKAQNLAAVLGCQLGSLPFTYLGLPFGTTKPKVIDFAPLVDRIERRLTSNASFLSYGERLTLVNSVFSSLPTYYMCTLMLPKTVIDNIDRARRHCLWRGSEVNSNKTSLAAXDKVCKPKRKGGLGVLNFTIQNHALLIKFLDKFYNKKDLPWVNLVWFAYYGNSVLHLTNLKGSFWWRDICKLMDVFRGIAKCNMKSGNTCSIWYDVWMINPLFFTLCQSFVLLLKNQNASVSVSRPGKLHFPER

SEQ ID NO: 104278 - protein, 142 aa, Oryza sativa
  Clone ID: PAT_MRT4530_101627C.1.pep
LLMMNRLNTKFMLDHKNCAPPDCDLSCVLCQSAAVEDLMRLFFLCPFAQNCWSLLGITWDTTLFLEAMMFIRAKLDYQGSCFMEKFLYAAWHIWKQRNGFIFEQKTPSFITWRQLLKGDLFLLLFRISARYHDVIISWINRL

SEQ ID NO: 104279 - protein, 98 aa, Oryza sativa
  Clone ID: PAT_MRT4530_101628C.1.pep
RSSGEELVHRPPPPAACRPRAAPPHAACARRPPPVQLLPARRPWRLEKRGERKRGGEGREEEADAWGPRGFHAESAATWDKTGLKTVLGPSLHWFCKL

SEQ ID NO: 104280 - protein, 208 aa, Oryza sativa
  Clone ID: PAT_MRT4530_101629C.1.pep
MNAIFHISEDKLHFWTSPTAIAVAVDGDGDEDEDDRHGGQRRAREGQWWCMDDDICERDTKILSMCCSSGADMYSSASMLYVAQAFIVGVKTERILSDPIRSESVRSEDMEQQQQMTAATASRHMYELVRAISSHQKILVCQMHHLSVTTVSTILACTHLADRVGRIRTKFFLLSFTPPCEGARFEKEIEQRLSGIFGVLKMWEYALK

SEQ ID NO: 104281 - protein, 184 aa, Oryza sativa
  unsure (1)..(184): unsure at all Xaa locations
  Clone ID: PAT_MRT4530_10162C.1.pep
YDRLTANGPDDVSDDVTTGGGGSAARACMLAGERRHGDADGRHQRVADGTANSPATKATAEDQRTATATRLKRRRSSAXRRRRCSGGLRRQRRGGRGRRSSRATATAGATVATAAQGCTALGIFRRREAKARVATGRGDTGGPFKGARRRRRKPTAAATAKESSDLXEESRSDSNSNQTHSKPI

SEQ ID NO: 104282 - protein, 45 aa, Oryza sativa
  Clone ID: PAT_MRT4530_101630C.1.pep
MRHKMRMLPTVPVASRDESRPFGAAATGARRIRATSAHSHTSEQV

SEQ ID NO: 104283 - protein, 72 aa, Oryza sativa
  Clone ID: PAT_MRT4530_101631C.1.pep
VSDQKRKKDNKKKTKKGNTELYKEHGTQMVKQTQSAIHGGCPVVDGVKWSASNWMRLKEFVFSMDDANNDAF

SEQ ID NO: 104284 - protein, 134 aa, Oryza sativa
  Clone ID: PAT_MRT4530_101632C.1.pep
GTPGARGWSQGKKKMGASPKGFRPTLLRGSRPTPPGKMGGPVMGGKLGPSKFKTPGLRGPGAPKGNGPRVSNRGGFPGGNVPGVPGPGLGTKPRPLIIEQKARAEAWSPPLGKGYWVDRGGPNCPIKEKKGGGF

SEQ ID NO: 104285 - protein, 126 aa, Oryza sativa
  Clone ID: PAT_MRT4530_101633C.1.pep
MCSYRLYRKKNWEMLAEILDHAVNTLGYTSVHKLLNKGSYVVAVAEMLTSTPLEIWDLRFAQALSSMEIVMAGKACHQCRQMKRNFAVACTQVKKKGVCPIKYCHRCLLKRYDENDEEVGQMEAWI

SEQ ID NO: 104286 - protein, 670 aa, Oryza sativa
  unsure (1)..(670): unsure at all Xaa locations
  Clone ID: PAT_MRT4530_101634C.1.pep
MDLKRRDEGAEESFVKPLQLKVKDYPLLGVHISECQIYDLENHMICYQVSNLFSFYGSLWICLVVFIPFNIFPTAIPQKRRDFTMISSQHKRRPCENKYCREYLVNICNQSAEGVAQKVWNFSKCRGMCSYRLYRKKNWEMLAEILDHAVNTLGYTSVHKLLNKGSYVVAVAEMLTSTPLEIWDLCFAQALSSMEIVMAGKACHQCRQMKRNFAVACTQVKKGVCPIKYCHRCLLKRYDENDEEVGQMEAWICPKCRGICNCSCCSLLCLAWXRKKGQQPTGRLVHTAKKGEQGAADEESTGRSLRIENSVEELLVEGDQIKLKGNIVVNKNFDGESSLAKDKNGSILGYNSAVSSPNKKVLPRGSLVTNILGADLEVKDVGPAIQLYEFCNSFGEIFQIRKGQPEQILQDIARDQEVEIVPELIAGFHKNLLSVIKEDRGEKNSIYITNGDAWLNDLGAYINELAFMSKELHLEFVNKGTLGYNKLSPCKLHVLNLLCDEALSTVKLRKLIEEQNGRAAERRNDAKAKLRAAKAKEKELREGLKNDMKEGATPIEGNRNQLISDIKKAKEVKLTAIKEKKLGTVLRSKPLMLEDREAYWKLDGYSNNKMLLLQEFDNENFTGNDIWFEFTEDEEKTIENHAAIRKVSLVLVLQGQVSPHGYKYVHPESL

SEQ ID NO: 104287 - protein, 47 aa, Oryza sativa
  unsure (1)..(47): unsure at all Xaa locations
  Clone ID: PAT_MRT4530_101635C.1.pep
IPPRQKHXTLELTPNSNTHTNGSPSSXRTPALCSLCSQKKGNLNPGG

SEQ ID NO: 104288 - protein, 124 aa, Oryza sativa
  Clone ID: PAT_MRT4530_101636C.1.pep
PRVREKELREGLKNDMKEGATPIEGNRNQLISDIKKAKEVKLTAIKEKKLGTVLRSKPLMLEDREAYWKLDGYSNNKMLLLQEFDNENFTGNDIWFEFTEDEEKTIENHAAISPHLLCRKSSSA

SEQ ID NO: 104289 - protein, 132 aa, Oryza sativa
  unsure (1)..(132): unsure at all Xaa locations
  Clone ID: PAT_MRT4530_101637C.1.pep
MGINMYTRGHCNLSLDQYYSGASPPSFLRFYLSTGGIWHLTRGCIGSVRSSTKGXVLRSVGPGESIGYIGVVQGCIASISWIALVWLIYLPTXISIISLALCLEARLVSIGLYYCWGICKFATVFFNFARMP

SEQ ID NO: 104290 - protein, 133 aa, Oryza sativa
  Clone ID: PAT_MRT4530_101638C.1.pep
SGRRSRPLFMCQSHTIGRAIGTPLKKRNKTPRRGPAQHISRASERLTKDSDQDQNDRTKAKNDALQFLTLNLKQTTALRPATFISEDLPTCSLGASLISFRRSRRTNAPCDVPLASHTTSFVMKQRTKPTYGS

SEQ ID NO: 104291 - protein, 138 aa, Oryza sativa
  unsure (1)..(138): unsure at all Xaa locations
  Clone ID: PAT_MRT4530_101639C.1.pep
NKRGGEAPGTQTATDKTAATTATPATPPPEGAGGPRQHRQSRGRARPRRRRRTTTSRGGSRRRRRHHPRTASRRRSTRRKRNGREGTPPPPXRYHREHRRRQAVRGSWRRRRRLPPRLEVVRRRRRGRLRPRICRRRH

SEQ ID NO: 104292 - protein, 271 aa, Oryza sativa
  unsure (1)..(271): unsure at all Xaa locations
  Clone ID: PAT_MRT4530_10163C.1.pep
MTSPPAAAARRLGLAXLAGERRHGDADGRHQRTKATAEDQRTATATRLKRRRRSGRRRRRCSDGLRRLRSSGRGRRRLGEHDGGLPERRRRLKRRQRTAGAAAATAALGHTALGLFRRREAKARVATGRGDTGGPFKGARRRRRRPTAAATAKESXGLGEKKADPIRTRIKLIPNRFSRSFQRRKGRGDPGDHFPSINSAREGKERPDWKXGGGGGKARVSARGGRRSXTGGPHLSAGGRALARGGLGRLGRGERREGFGPTFGPKPKEDF

SEQ ID NO: 104293 - protein, 847 aa, Oryza sativa
  unsure (1)..(847): unsure at all Xaa locations
  Clone ID: PAT_MRT4530_101640C.1.pep
MTRYKPLVLPLMLILLHTQLIIVPSSSAATYANHTGALPPAVVPCLPDQASALLRLKRSFSITKNSSSTFGSWKAGTDCCHWEGIHCRNGDGRVTSLDLGGRRLESGVESSVLKEPNFETLIANHKKLRELYLGAVDLSDNGMTWCDALSSSTPNLRVLSLPNCGLSGPICGSFSAMHSLAVIDLRFNDLSGPIPNFATFSSLRVLQLGHNFLQGQTSFYGEIPSSIGNLKYLKNLGVGASKLTKLRKLVLYECNFSGKLPQNISNFTNLSTLFLNSNNLVGTMKLASLWGLQHLRYLDISDNNLVVVDGKVDSSSTHIPKLQILALSGCNITKFPDFLRSQDELLWLDLSKNQIHGAIPSWAWESWNDSGVASLILAHNKFTSVGSNPFIPLQIDWLDLSNNMFEGTIPIPQGSARLLDYSNNMFSSIPFNFTAHLSHVTLFNAPGNNFSGEIPPSFCTATELQYLDLSNNNFSGSIPSCLIENVNGIQILNLNANQLDGEIPDTIKEGCSFHALYFSGNRIEGQLPRSLLACQNLEILDAGNNQINDIFPCWMSKLRRLQVLVLKSNKLFGHVVQSLTDEESTCAFPNAIIIDISSNNFSGPLPKDKWFKKLESMLHIDTNTSLVMDHAVPSVGLVYRYKASLTYKGHDTTLAQILRTLVFIDFSNNAFNGSIPEIVGELVLTHGINMSHNFLTGPIPSQLGGLKQLEALDLSSNQLSGVIPQELASLDFLEMLNLSYNKLKXKIPESLHFLTFTNSSFLGNNDLCGPPLSKGCINMTILNVIPSKKKSVDIVLFLFSGLGFGLGLAIAVVVSWGITIRKQDIIHAKERIRRGSDAGGRRSGKGA

SEQ ID NO: 104294 - protein, 251 aa, Oryza sativa
  unsure (1)..(251): unsure at all Xaa locations
  Clone ID: PAT_MRT4530_101641C.1.pep
AKPVKQKLWRFAPDXKQAIREELDKLLKAGFIREVLHPEXLANPVMXACPKDHFPLPRIDQLVDSMAGCELLSFFNAYSGYHQISMAKEDEEKTTFITHFGVFCYTKMPLGLISTGNTYQCEIQGALGDQIGWNVAAYVDDAAVKTKTGDTLIDDLRETFNNLRRHRLKLNSEKCIFGIPSGKLLGFLVSGRGIETNPEKIKAIENMKSPTRLKEVQKLTGCKAALSCFVARMGERGQAFFALLKKQDKFK

SEQ ID NO: 104295 - protein, 105 aa, Oryza sativa
  Clone ID: PAT_MRT4530_101642C.1.pep
FPRRASRTRRLHRQAFCPVDVVKTRRGCTPSTSSPPRQRRPPRRTTRPPPPPPPVVRPRREEGSGNECVHAYLGPRKKEEGVTCPARTRATVAQLASELVKLQTC

SEQ ID NO: 104296 - protein, 501 aa, Oryza sativa
  Clone ID: PAT_MRT4530_101643C.1.pep
MAAAASSVLAYLLVVALLAIVPLVYFGWVARRRGEGGRLPPSPWGLPVIGHLHHLAGALPHHAMRDLARRHGPLMLLRLGELPVVVASSAEAAREVMRTRDIEFATRPMSRMTRLGIIFAPYGDRWRELRKICTVELLSGRRVQSFRPVREEEAGRLLRAVAAASPGQAVNLSELLSAHAADSSVRAIMGDRFRDRDAFLAMLERGLKLFAKPALPDLYPSSRLAMLLSRMPRRMKQHHRDMVAFLDAIIQEHQENRSAAADDDNDLLDVLLRIQREGDLQFPLSSESIKATIGDMLVGGSETAATTLHWIMAELVRNPKVMQKAQDEVRRELIGHRKVTEDTLCRLNYMHMVIKEALRLHPPGSLLLPRECRRTCQVLGYDIPKGATVFVNVSAIGRDPKYWDEAEEFIPERFEHSDVDFKGTHFEYTPFGAGRRMCPGMAFGLANVELTLASLLYHFNWELPSGIHAENLDMTEEMRFTTRRLHDLVLIPVVHVPLPTI

SEQ ID NO: 104297 - protein, 723 aa, Oryza sativa
  Clone ID: PAT_MRT4530_101644C.1.pep
MARGGRQRRRGEAQAIAAGALLMHGPSAPANPMLSPTTMPNNNVVAVEAVGASPAAGVGVGGRWWWGCDDDEHGATEEKFVAALRMVETEMEAAARAVPVAVVVGVGAAMRELAAAWRAAQDRNKSGADMNDIFFNDIISSLGLLEIPLKGRKYTWSNTQQNPLLERLDWVFTSAPWTLAFPNTTVVPLTRNISDHVPCVVKIDTKIPKSPIFRFENYCVQMEGFFDIVQQEIDSLISIVPADKALGPDGFNGFFMKKCWHIIAQDYYRLASHFHAGCTIWKSCSSYITLVSKKNSPETVNDYGPISLMGLSLKFLTKLKANRLQGVILKLGKTIQDCLAWSFEYIHQCQQSKREIVFLKLDFEKAFDTIEHSAILSVLQHMDFPEKWMQWVQMVFSSASSTVLLNGVPGNSFKCRRGVRQGDPLSPLLFVRGAELLQRVMNKAFELDLISKPINENDGSGFPIIQYADDTLILLKASQKEIFCFKTILNMFAQSTGLKQGRVVFGEATTHPQLEKFLAFWDRVCTPKDKGGMGVINLRVQNIALLFKHMVKLYNGVELPWVKLISQTYYVSRVPHLVLNKGSFWWRDITSLSDIFRGIAKCTIQSGATALFWNDLWNDDFKCTSYPNLFSVTLYKNDSVRTMCLRPMEDSFVLPLSDDACGEFLQLQEELNHLQLQLGRSDVWSFIWGTGQPSNVSPLVPMTGAHRFHVFAYTVVSGSPSGK

SEQ ID NO: 104298 - protein, 882 aa, Oryza sativa
  Clone ID: PAT_MRT4530_101645C.1.pep
MADLNPNPLRFLHQGHIVHLGGNLRVPRVDLTFPQRPVRRHEEFCLALVEPPVPEQDWDHHRMLILHHILDEHLFEVRNSFRHASAVGMYQLRSAMHRDALVHSEPFVYDGVLSVTFVKHDQGPNWRASQCHREGWFLFLVFPLDFVDWYHLNLATATFGQLSFWLERDQIKGRVLIRAKFKDNDFVPRKIVLHDPVGMGGGGESWTVSVFLLEGDFINMAPDEDLPPAGPQPNPNGPDDDDDPNVGNIWQMGQPPAGPGDLDDLVQQQQAAKAEVEDAWGQDYPMGQVMEVNPNGLLALVPIVSEDASASVPAIAVRGRVQGCSRIRRKKNCKWIPEWVLASQGMGVDMCSLTPEEVVESSLGGSRHTTQTWSLTCVYGPCGGPEKSDFVPWFKNISIGDQKNWLFSSDFNFYRSVQDRNKSGADMNDIFIFNDIISSLGLLEIPLKGRKYTWSNMQQNPLFESSYITLVPKKNSPETVNDYGPISLMGLSLKFLTKLMADRLQGVILKLGKTIRDCLAWSFEYIHHCQQSKSEIVLLKLDFEKASDTIEHSAILFVLQHMDFPEKWMQWVQMVFSSASSTVLLNGVPGNSFKCRRGVRQGDPLSPLLFVLGAELLQRVMNKAFELDLISKPINENDGSGFPIIQYDDDTLILLKASQKEIFCFKAILNMFAQSTGLKVNFNKSSLYPLNLSHDNASLLAGILGCSIGSLSFTYLGLPLGTTRPRVVDFAPLVNRAERRLTARSMFLPQGARLTLINSVLSSIPTYYMCSLQLPVTVIKAIDTARKNCLWRGNNPSSTRKSLAFGDRICTPKDKGGMGVINLRVQNTALLLKHMLQARSDVWSFIWGTGQSSNVSPLVPMTGAHRFHVFAYTVVPGSLSGK

SEQ ID NO: 104299 - protein, 104 aa, Oryza sativa
  unsure (1)..(104): unsure at all Xaa locations
  Clone ID: PAT_MRT4530_101646C.1.pep
STSHGLLLKRDLLTAMAELQCQGYWSFALSTLHVARAEPWXRPNLTLYATFVSSSPVTEDGTTAAVDALVEAFXLVVRAKTRAGRSVYEVAVRMGGCKVDKYMY

SEQ ID NO: 104300 - protein, 452 aa, Oryza sativa
  Clone ID: PAT_MRT4530_101647C.1.pep
SREQEKEWVFVAPKKRVSDSLRQPGRSYAQATQQRVIPMKSVFDRLKESLKVTGGDTPAITVPVTKVPETKLVANPKIQNVRDLKSLRRLSRSLLAFSNLLLRILFKPPQPKVPCQWQTSTLTLIVSAIKVTLCIWEEICVSLELISPSLKGLFEFCVALVEPPVSEQDWDHHRMLILHHILDERLFEVRNSYRHASAVGDFINMAPDEDLPPAGPQPNPNGLDDDDDPNVGNIWQMGQPPVGPGDWDDLVQQQQAAEAEDASPSVPAVAMPNRGKKVQDPVQDPKIQEFLANLDKLTRSEYPRHPYFYPMSGLNEKIDLLCKEKGTMHQFLASSSVPAAIDVPPFSPVCEAPALPVLPKAPIKKRDVKTLLYNPYRRQSARLQQNKEEAELQVDPRMDIGKPRGKSAKKLKELAGLQMGVDMCGLTPEEEVESSMGSERRKKMPRPDMEEK

SEQ ID NO: 104301 - protein, 151 aa, Oryza sativa
  unsure (1)..(151): unsure at all Xaa locations
  Clone ID: PAT_MRT4530_101648C.1.pep
YSHPPEGGPDVXYHYFIQGLPFVTNDRGXGXTLGPGGRSLQSKIINXXETGRWRGFRFMXFXXKQAMRDXIXGMNGKELDGRNITGNEAQSRRSRGXGGGGYSXRGGSGSYSGGGYSDGGGGGGYSPAREGGYCGGGGYGGRRGGGGYGGG

SEQ ID NO: 104302 - protein, 180 aa, Oryza sativa
  unsure (1)..(180): unsure at all Xaa locations
  Clone ID: PAT_MRT4530_101649C.1.pep
SIHLECLVDMFSTXEIDSLISIIPADKALGPNGFNGFFMKKCXHIIAQDYYRLAAHFHAGCTIWKSCSSYITLVPKKNSPETVNDYGPISLMGLSLKFLTKLMADRLQGVILKLVSENXYSFIKGKTIRDCLAWSFEYIHHCQQSKSEIVLLKLDFEKASDTIEHSAILFVLQHMDFPEK

SEQ ID NO: 104303 - protein, 69 aa, Oryza sativa
  Clone ID: PAT_MRT4530_10164C.1.pep
SMFWGAKLVFLSNCLGGGPPSPVEGVFSLGGFPLKSPVFPKVLPPNMGVQFFDLVLDPVFLLMFSPPWV

SEQ ID NO: 104304 - protein, 95 aa, Oryza sativa
  Clone ID: PAT_MRT4530_101650C.1.pep
FRPIPFSALFTCPFSSSPDSPRTAPPLARPAARPPPRRERILTAEASSLIRAIGLVASPLRPTRASCPVTNYLLPHWLPWFGIGRPFVSLRCGIQ

SEQ ID NO: 104305 - protein, 336 aa, Oryza sativa
  Clone ID: PAT_MRT4530_101651C.1.pep
MADLNPNPHRFLNQGHIVHLGGNLRVPRVDLTIPQRHVRHYEEFCVALVEPPVSEQDWDHHRMLILHHILDEHLFEVRNSYRHASAVGMYQLRSAMHRDALVHSEPFVYDGVLSVTFVKHDQGPNWRASQCHREGWFLFLVFPLDFVDWYHLNLATATFGQLSFWLERDQIKGRVLIRAKFKDNDFVPRKIVLHDPVGMGGGGESWTVSVFLLEGDFINMAPDEDLPPAGPQPNPNGPDDDDDPNVGNIWQMGQPPAGPGDLDDLVQQQQAAKAEVEDAWGQDYPMGQVMEVNPNGLLALVPIVSEDASASVPAIAVRNRGKKDQDPVQDPKSRNS

SEQ ID NO: 104306 - protein, 149 aa, Oryza sativa
  unsure (1)..(149): unsure at all Xaa locations
  Clone ID: PAT_MRT4530_101652C.1.pep
LSLSAHFSSPPAIHPRPRGGWSRTPPRGEHGREGEEEIASPSPSSISSGSGDGAHFTKLFSRLFXKKEMRILMVGLDAAGXTTILYKLKLGEIVTTIPTIGFNVETVEYMNISFTAWDVCGXDKILLLVWLYFQNTHGPYFLFLLSIYR

SEQ ID NO: 104307 - protein, 34 aa, Oryza sativa
  Clone ID: PAT_MRT4530_101653C.1.pep
MADLIVQALGSAKSGGGDSCGDDYGVEVVHNADK

SEQ ID NO: 104308 - protein, 51 aa, Oryza sativa
  Clone ID: PAT_MRT4530_101654C.1.pep
RTSTANKLLLDLLYVPRFEISMRHPQRRITGNHRDNACPRRRVGKKDNEKC

SEQ ID NO: 104309 - protein, 98 aa, Oryza sativa
  unsure (1)..(98): unsure at all Xaa locations
  Clone ID: PAT_MRT4530_101655C.1.pep
QNRVSSPPSLPPFPLXXXESRGXNHHXVGPLKFXXSXXXGHXKTQLIXRXNQXXXSLPVRVWGXPXTPGXPGNPAXGXGLLEXERXGKICXPXXXXXS

SEQ ID NO: 104310 - protein, 165 aa, Oryza sativa
  Clone ID: PAT_MRT4530_101656C.1.pep
STLEDPLLEGYRDSNWISDADKIKATSGYVFALGGGTGSWKPCKQTILTRATMEGELTALDTATVEAEWLRELLMDLPVVGKPMPAILMNCDSQTVIIKVNSSKDNMKSSRHIKRRLKSVRKQKNSGVIALDYVQTARNLADQFTKGLPRNVIDSASREMGLIPT

SEQ ID NO: 104311 - protein, 58 aa, Oryza sativa
  unsure (1)..(58): unsure at all Xaa locations
  Clone ID: PAT_MRT4530_101657C.1.pep
MVVALTRPPASTVHCFRRKKXAVADSYCKPGRSLFKGNRRPIELVKPEMLRLKXFEPI

SEQ ID NO: 104312 - protein, 99 aa, Oryza sativa
  Clone ID: PAT_MRT4530_101658C.1.pep
SPRSACRGLSHRRSPGTLKPSRRAPSTPCPQCEPQAPTTSSSSHSSPSISSPLQPFPTAASREAIPQTPSLQAHKEPPTVCPPQQQNRLQFARTLHPWQ

SEQ ID NO: 104313 - protein, 125 aa, Oryza sativa
  Clone ID: PAT_MRT4530_101659C.1.pep
MPSSAPPTAAASRDALVGAACPRAPSPTPVPTRRRLPRVPARRHPSPTPVPTRRRLPRVPARRHPSPTPVPTRRRLPRVPARRHPSPTPVPTRLRLPRVPACRRPSPTPIPMRRRLPRVPARRRP

SEQ ID NO: 104314 - protein, 235 aa, Oryza sativa
  Clone ID: PAT_MRT4530_10165C.1.pep
YFGLEIDGFEFVSDSFFPKFPSPSPAAVGLCRRLRAPLKGPPVSPLPAATLAFASRRRKRPSVVRPCAAVAAVAPAVAVAREDRRRGRQVVAVLVRRFATVGDRRSIVAVVKPKTAAVSTSSPSPSVGRPPSLWSSVSSPCRLKARGGGSPSLRPSPPTGSAQPPLLLSAIASSTSTSRPVDPLPRAREQPDLASMSSGAAKSAPPLLPRLPPCHGLLVTASLRPDLTTLSAGAR

SEQ ID NO: 104315 - protein, 357 aa, Oryza sativa
  Clone ID: PAT_MRT4530_101660C.1.pep
PIDVVVEHVLKQILSQETQYLPITRGSNVVLLINGLGATPIMELMIAARKAVPELQLEYGIAVDRVYTGTLMTSLDMAGFSITIMRSDENILQRLDAPTKAPAWPVGSEGNRPPAKIPVPVPSSPSGKDDEILTEPQELSKQGCILEAAIEAGAKEIINIKDNLNEWDSKVGDGDCGTTMYRGATTILEDLKKRYPMNDAAGTINEIGSTVRRVMGGTSGILYDILCKAAYASLKQNTSIGANEWADALEASVAAVSKYGGASAGYRTMLDALIPACTVLKQSLKAGDDPVTAFIASSEAASAGAESTKQMQAKAGRSSYIAPDLVASVPDPGAVAAAAWYRAAAHAVKSKLHASDS

SEQ ID NO: 104316 - protein, 140 aa, Oryza sativa
  unsure (1)..(140): unsure at all Xaa locations
  Clone ID: PAT_MRT4530_101661C.1.pep
PCKGKQGLWPVFFFGPSFRPFQVPWPVLVHQQGFSPYNXFVRPPFGKTASPFLQKGGFQLKNTQVWPPPPLGGPPFPFRGLYIVRAKGPQLQPPRFGGLPFGRNWAPAPTLLAFYGPPKNGVPPRGFGAPRPLPPPGGVL

SEQ ID NO: 104317 - protein, 683 aa, Oryza sativa
  Clone ID: PAT_MRT4530_101662C.1.pep
MSTSASPSTTPSAEYAEHLSDLVATPSLSHERHYFLGPIGNLDPTEFISAETNRIPFRLANQNLGHWKNTFKSWPSLEKTAPEKSWAVWYKRISASKQALALTIANSAKDEPLMAAATYFWSNTINAFLFNQGPMTPTLLDITMITDLDVTSSANPMSLNTKNQFDFRTKSKRLFLAEALDTKKQFPLGKILLGYLYQMLNNASAKIAVGSVVNAGGPWWLLQTWLNLVAMKAVNRPAVTEAEFPRLEPITDDDGEERTHRRCMSYGEYASTPADAGAKLSAELLKDWFCSFYEGFQKDARVWFPYEDSVNLDLPADFRFEDINHERYQKSREVFAAAISPCILPVSIHQGRNIQVSYEFYHPMSSARQFGMGQLPIGLFFADKIQCRGDISSTLMMDRLLNIPGPPLASIDNIELARFWSKNFDRWWGEWKQHIFHQSASMCMIDLFPDVIPQTTESSPPRKSNSGRDIEYAPGHLPNGGGLTPPVIGYHAPKTSSLLQGQMREPADVGRKRKTKASVIDPSALAPKKKIKKNKPKPADDLPALDPSIGQALDEEEIEEDVDQAAAEKKKTAVRKKSAATTLKPATPALADLFSFDIKDYFDEEAEEESTSKALAPLDETIKRTLEDISLWLGSSLDSLVADCGSIRARFAEIQAFILDDLANIITPAVYLEQHQFKLEKAK

SEQ ID NO: 104318 - protein, 188 aa, Oryza sativa
  unsure (1)..(188): unsure at all Xaa locations
  Clone ID: PAT_MRT4530_101663C.1.pep
MLIKDRFTGNPERLTVLTTSGSTSGEGGRDGVGSAGVSSCPAAGFTAAHEGTTHSXVRSGGETLAWCEWLGEGYAKGIFMISPLAVPCSSGWLGLLHHGVALDSDXLILLNXYYNIFTAFNFCFXMPALCKXTFSLPGIYPASYLLFRYDLLSTVGSTQSCSLXPHTRAEVLPSWSFLGEVGFVAAVK

SEQ ID NO: 104319 - protein, 194 aa, Oryza sativa
  Clone ID: PAT_MRT4530_101664C.1.pep
LLSWPLSCLYLSLSLSISPVSTLPLKRSSQRGVGVEQLAGHGIRRRREGVGGGAVEGNHDDGRPNPAKTGGGGSGRGGSSGGCGIRDDDDDLDGDGIHDHNLLAATMAGGGGRPWPGWIQQALDGCDQVVADLARPLPTDPLERIISSGALASLIIAAVEVAEAKSHRRRLPERLAGEEEGDRARRDCSSSVDD

SEQ ID NO: 104320 - protein, 103 aa, Oryza sativa
  Clone ID: PAT_MRT4530_101665C.1.pep
RLIALETQLVTIWHKHVALEMGPVQLRTQPPSILRINLLNMDISSGKMISFCLHPTLFAGISRHSLLVELCLHLPQRSSPQILVLCLRHAHIRRFLHVGPWFS

SEQ ID NO: 104321 - protein, 871 aa, Oryza sativa
  Clone ID: PAT_MRT4530_101666C.1.pep
MSFGGMFDGAGSGVFSYDAGGGGGGGGVHNSRLLPTPPVPKPGGGFAAPGLSLGLQTMDGSQLGDVNRSLAMMGNGGSGSGGDGDSLGRGREEENDSRSGSDNLDGASGDELDPDNSNPRKKKKRYHRHTPQQIQELEAVFKECPHPDEKQRMELSRRLNLESRQVKFWFQNRRTQMKTQIERHENALLRQENDKLRAENMTIREAMRNPMCASCGGAAVLGEVSLEEQHLRIENARLKDELDRVCALAGKFLGRPISSISSPGPPSLQACSGLELGVGSNGGFGLGALGASAAMQSIPDLMGGSSGLTGGPVGSAAMRLPAGIGGLDGAMHAAAADGGAIDRAVLLELALAAMDELVKVAQMDEPLWLPSLDGGFETLNYDEYHRAFARVVGQCPAGYVSEATRESGIAIISSVDLVDSLMDAPRWSEMFPCVVARASTTDIISSGMGGTRSGSIQLMHAELQVLSPLVPIREVVFLRFCKQHAEGLWAVVDVSVDAVLRPDQNGGGGSSSSSYMGCRLLPTGCIVQDMNNGYSKVTWVVHAEYDETAAHQLYRPLLRSGQALGARRWLASLQRQCQYLAILCSNSLPARDHAAITPVGRRSMLKLAQRMTDNFCAGVCASAAQKWRRLDEWRGEGGGGGGGGGGDGEDKVRMMARHSVGAPGEPPGVVLSATTSVRLPGTLPQRVFDYLRDEQRRGDWDILANGEAMQEMDHIAKGQHHGNAVSLLRPNATSGNQNNMLILQETCTDSSGSLVVYAPVDVQSMHVVMNGGDSAYVSLLPSGFAILPDGHNNGASPSPAEVGSGASPNSAAGGGGGSNNTGSLVTVAFQILVNNLPTAKLTVESVDTVSNLLSCTIQKIKSALQASIISP

SEQ ID NO: 104322 - protein, 81 aa, Oryza sativa
  Clone ID: PAT_MRT4530_101667C.1.pep
MPAVHGGGAAGRGEEVHGSGSAAGRGEEVHDGVAVTGCGAGAVDAGEERLAGVGEEVEERPAAAEVVVEEDTPLLAGGATL

SEQ ID NO: 104323 - protein, 154 aa, Oryza sativa
  Clone ID: PAT_MRT4530_101668C.1.pep
KATTPGRTPTCLQILLACSKCTSPRASVLLHQSYHFIGRTCSRRRRGRRRRRRRRVGYQRRVHEGVGGEVGGDGLRHAPASGATSRHLAPPLGERRTLADAEKLLLLHGCRSSRACSRISSGISNSSSLPEGFSDLSRCYCKRRESRKMAICRP

SEQ ID NO: 104324 - protein, 176 aa, Oryza sativa
  unsure (1)..(176): unsure at all Xaa locations
  Clone ID: PAT_MRT4530_10166C.1.pep
GGKGEGIGGNISPIQFHTGAARHCGFGGGGGARRGQGRRERRKKGVHGWVPPVSEGGGRAHTSAALAREXGGGRVGPGERKDGGGMVSLTLSVSVGGPHGWLQLLSNGQLCHAERRADLRTARFDGEEREKKVRTGKEWRGKRRREGEEGKSGPSSSRVLDGRGVIGFMGFGPGVA

SEQ ID NO: 104325 - protein, 47 aa, Oryza sativa
  Clone ID: PAT_MRT4530_101670C.1.pep
SVKKACNEAVYLASHICILVLSHGHHTNKVCSRGLYRRYVINVHQSQ

SEQ ID NO: 104326 - protein, 155 aa, Oryza sativa
  Clone ID: PAT_MRT4530_101671C.1.pep
MNIPNIVPPAKLILEPRSTRSINQEDEIDCWSLAVWRQLCKLEAATAATIKLETRGAGNGICLLSLHSSQIHQQRHRALRAPITGESPAMRSPSSSQSRRWGSCGGARSHMRSVLVRRVGGAPLAGSGRGWVAPVGGGRGWERELVGGGNGGECL

SEQ ID NO: 104327 - protein, 194 aa, Oryza sativa
  Clone ID: PAT_MRT4530_101672C.1.pep
MASALAASTAVCSSPLASASASASSARRLRAVPPSRGIRYQALRADSGFAGNRRGGGRGASVVCAVQGQDTSIQVPEVTKSTWQSLVMESELPVLVGYWATWCGPCKMIDPVVGKLSKEYEGKLKCYKLNTDENPDIASQYAVRSIPTMIRLRQSLDTPRGYRRQHRQQHKQLRHITSNGGVGVPPTTTWIGMT

SEQ ID NO: 104328 - protein, 913 aa, Oryza sativa
  Clone ID: PAT_MRT4530_101673C.1.pep
MAEHHPPRLPPSAAGAAATSWPELLTPFDLSRLRATLASRPLTPRRLGRLLALPLSPATSLLLLTWYASSHPALSSLPLRPLLAGGDPDRALSLLDSLPPGFLPLRESLLLPLLRSLPPGRALHLLDQLPRRFGVQPSFRSYNVVLSVLARADCHADALALYRRMVHRDRVPPTTFTFGVAARALCRLGRADEALALLRGMARHGCVPDAVLYQTVIHALCDQGGVTEAATLLNEMLLMGCAADVNTFDDVVRGMCGLGRVREAARLVDRMMTKGCMPGVMTYGFLLQGLCRVRQADEARAMLGRVPELNVVLFNTVIGGCLAEGKLAEATELYETMGLKGCQPDAHTYSILMHGLCKLGRIGSAVRLLREMEKKGFAPNVVTYTIVLHSFCKNGMWDDTRALLEEMSAKGLTLNSQGYNGMIYALCKDGRMDEAMGLIQEMRSQGCNPDICSYNTIIYHLCNNEQMEEAEHMFENLLEEGVVANGITYNTIIHALLRDGRWQDAVRLAKEMILHGCSLDVVSYNGLIKAMCKDGNVDRSLVLLEEMAEKGIKPNNVSYNILISELCKERRVRDALELSKQMLNQGLAPDIVTYNTLINGLCKMGWMHAALNLLEKLHNENVHPDIITYNILISWHCKVRLLDDAAMLLNRAMAAVCPVGDRRIMQILPDKNFKLYLHTKGDDFQHSLGCVKPSCPAGKDRCERKTGRCWRAARRRPGQGGEQLERIIRALVRRTRHSRGRGAGIAGRALGLLPLASLDMEDNTTMMAPLPKGTPEPATPTPTPSRLAEGLRWCPSCALHQNEFWWSHRITASPMGGHIFAAPSPSPDYSPETPLHIPTPVIPLEFLLIGTLAARRGAPPFYMAAWGSGESSAPPPTPLFPDPRRIIKNGHVPAKTSGSGKPSRPPSSSEWEV

SEQ ID NO: 104329 - protein, 64 aa, Oryza sativa
  Clone ID: PAT_MRT4530_101674C.1.pep
MAASAAEGSIRIREAESRPLSGLGSFKARPANSYVGYGPVILAALFKKIETFSIYLVKHFRSTW

SEQ ID NO: 104330 - protein, 406 aa, Oryza sativa
  Clone ID: PAT_MRT4530_101675C.1.pep
MSCLGWFKKRRSSKSKESSGRRGSTTTTVSAVSTSRSDDSGAVRPASKSTGSTSSHRSISSLYEERGHGQLRDFDYDELQAATNGFSRAQKLGEGGFGSVYKGFVRSSPADGKAADRLAVAVKCLNQRGLQGHKQWLAEVQFLGVLEHPNLVKLLGYCAVDGERGPQRLLVYEYMPNKSLEDHLFVRAYPPLSWNRRLQIILGAAEGLAYLHEGQVQVIYRDFKASNILLDKDFRAKLSDFGLAREGPTGANTHVSTAVVGTHGYAAPDYIETGHLTVKSDVWSFGVVLYEILTGRRTLDRHRPQGEQKLLEWVAQFAPDSRNFRMIMDPRLRGEYSVKAARDIAKLAESCLLKNAKERPTMSEVVDVLRRAVQSQPDPPPPPAAAAAASGKGKRVDVAPQPARRR

SEQ ID NO: 104331 - protein, 52 aa, Oryza sativa
  unsure (1)..(52): unsure at all Xaa locations
  Clone ID: PAT_MRT4530_101676C.1.pep
SFTRLFSRSYFIFGRSQQIPRXQSRIGAHHRHKASVDGTLCAGQKESQQRLA

SEQ ID NO: 104332 - protein, 99 aa, Oryza sativa
  Clone ID: PAT_MRT4530_101677C.1.pep
GVVLKAELRQRPRRSGGATWPRRWSSASTGSTRVAAELGVDLSKATAGRRRRWGSRSGRRLVLGVLSLAAAEPALSSARSSSAFLAAAQERAARLSSAF

SEQ ID NO: 104333 - protein, 50 aa, Oryza sativa
  Clone ID: PAT_MRT4530_101678C.1.pep
MSVGIVLEGSTVRKRERGIIQVRAAMERKGDTTCSVPALPVREKDPHGLH

SEQ ID NO: 104334 - protein, 94 aa, Oryza sativa
  Clone ID: PAT_MRT4530_101679C.1.pep
MVHSRYMYLNGMMKTMWHGTSQSLEFFRLSGQENHIIAGLFVTLYNLWSVRNIDSRYAVAPENPTNVAKRIAYQLEEWANLHERKTNAVRDLRA

SEQ ID NO: 104335 - protein, 51 aa, Oryza sativa
  Clone ID: PAT_MRT4530_10167C.1.pep
ILAANAITRSDEATAISSTATRGAIVNPTKKKKIFVACSPTRAIVISLTHL

SEQ ID NO: 104336 - protein, 359 aa, Oryza sativa
  Clone ID: PAT_MRT4530_101680C.1.pep
LLLLAAVCLVAAASAGGADAAERKATTVGVYELRKGDFSIRVTNWGAVIMSVVLPDSRGKLDDVVLGYDTIAEYVNSSTYFGALVGRVANRIAKARFVLDGKAYHLYPNDGKNTLHGGHRGFSKVIWTVKEYVGGGDSPYITLYYRSFDGEQGFPGDLDAYVTYQLSSPYVLALRMNATALNKATPVNFLQHTYWNLGGQGRGDVLGHTLQLSASRYTPLDEELLPSSGVVAPVAGTPYDFRHPTPIGARIRQVMGGRIAGYDINYVIDGEGMRKVAAARDGASGRALELWANQPAMQLYTGNWLNNIKGKGGKVYQQYGGFCLETQGYVDAVNHPEFPSMTVRPGQVYRHDMAFKFSF

SEQ ID NO: 104337 - protein, 112 aa, Oryza sativa
  unsure (1)..(112): unsure at all Xaa locations
  Clone ID: PAT_MRT4530_101681C.1.pep
TKYRCSTLXFGDRKRIANLGNVCNLPQAKTIEXSNFLFRGFGDSSMMYLNVEDYWDGIXDCHHLPSTSDKSVGYTTNKAKPWLVSLAPFFLMDTDFEALXPLAWWLGPFGGI

SEQ ID NO: 104338 - protein, 230 aa, Oryza sativa
  unsure (1)..(230): unsure at all Xaa locations
  Clone ID: PAT_MRT4530_101682C.1.pep
EVSLQPQAQGQGAQGSEPRAAAQAAGGDGAQSRVRRWRVGARSXRTERLHRVLGKARRRQYQSLLGAAEARRMRDKEAEASNAARHIGELEERVARLRAEAAARQAKALADQFTARRXPPTTRRHSASPRRPPSLRPPPPSAPPLAVLPSRSRSRSRPSTTTTPVAQVIEKETVREMTRSLALPATLSYLRPSNISSLSQPHTTGAPLDHFFAPLLFLPPWLMMATTRGG

SEQ ID NO: 104339 - protein, 75 aa, Oryza sativa
  Clone ID: PAT_MRT4530_101683C.1.pep
MSEDASVGASSSTVKAGDDPEATIEINIKTLDSQVHKLRVKKNVPVLVLKEKIVEATGVPVDQQRLIFRGRVLKD

SEQ ID NO: 104340 - protein, 87 aa, Oryza sativa
  Clone ID: PAT_MRT4530_101684C.1.pep
EFSIFGPQRCCTCMCRGIPIRFRLRDITCFTDHLVNLLPRFYQMVEGEIYCKWTPLVLSLRGPGRYKEAYDTQCNSILSTSLTTRIV

SEQ ID NO: 104341 - protein, 524 aa, Oryza sativa
  Clone ID: PAT_MRT4530_101685C.1.pep
MEKSSELWLLWAVFSASLVFLYLTIRRRSGAGAGGKPPLPPGPTPLPLIGNLLDLRGGVIHDKLAALARVYGPVMMIKLGLNDAVIISSRDAAREAFTRYDRHLAARAIPDTFRANGFHERSAVFLPSSDERWKALRGIQGTHIFTPRGLAAVRPVRERKVRDIIAYFRDHAGEELVIRQAIHTGVLNLVSSSFFSMDIAGMGSETARELREHVDEIMTVFAQPNVSDYFPFLRRLDLQGLRRSTKRRFDRIFSILDDIVERRLVDRGERGGEGGASSNSSKSKHQYDGGDFLDALLELMVTGKMERDDVTAMLFEAFVAGGDTVAFTLEWVMADLLRNPPVMAKLRAELDDVLGGKDQSAIEEHDAGRLPYLQAVLKESMRLHSVGPLLHHFAAEDGVVVGGYAVPRGATVLFNTRAIMRDPAAWERPEEFAPERFLAREGKAPVDFRGKEADFIPFGSGRRLCPGIPLAERVMPYILALMLREFEWRLPDGVSPEELDVSEKFMSVNVLAVPLKAVPVKVIN

SEQ ID NO: 104342 - protein, 41 aa, Oryza sativa
  Clone ID: PAT_MRT4530_101686C.1.pep
TGPHKYGGIQTWRYAACQSVDQVILCVSLLGESVSHYQPCQ

SEQ ID NO: 104343 - protein, 66 aa, Oryza sativa
  unsure (1)..(66): unsure at all Xaa locations
  Clone ID: PAT_MRT4530_101687C.1.pep
RNEDYRSAGCPALTRTFLRDXKQIFKNNNGTPFLFPNNGTGALENPPTNTLAPGDQNRSVLVRPVN

SEQ ID NO: 104344 - protein, 163 aa, Oryza sativa
  Clone ID: PAT_MRT4530_101688C.1.pep
MVSLRLIAAFAPAPPPPPPPRPRRAPPSAARLASNGIAFVTVAAVAAASPPAIAALAAEPANALSLPTWAVHVSSVAEWVTAMALVWDYGERTGLKGWKGLSWGMVPLLGGAMCACTWHFFYNSESLEVLVALQGALTVIGNITMCIAAFRIFKASQESSKSS

SEQ ID NO: 104345 - protein, 70 aa, Oryza sativa
  Clone ID: PAT_MRT4530_101689C.1.pep
SRRHQFFNAKTALLGAQPAANLLQRTRERGWFISFFLHHNVPRFTKNPARNLTVRQGQLTVTGRTAGPTS

SEQ ID NO: 104346 - protein, 406 aa, Oryza sativa
  unsure (1)..(406): unsure at all Xaa locations
  Clone ID: PAT_MRT4530_10168C.1.pep
MPPRSVLPSPASVCSDPPRRAVDPTPMRPPAPATTAGAGGKVTPNLAMDAEGTRLLNLTVLQRLDPAVEDILITAAHVTLYDFNIELNQWSRKDVEGSLFVVKRNKQPRFQFIVMNRRNTDNLVEDLLSDFEFELQPPYLLYRNAAQEVNGIWFYNQQDCDAVAGVFGRILNAYAKVXKSPKYLSTKSEFEELEAVPTSAAIDGPLEPSSSSTVLVSNAPDESLTDYFSGAVNVGNVSITPMVGRTHQPIESVASSHVPLIIPSAAPTHQMGVPSGAASAPPLPVIDTNVHSSHSTNLVTPAFFAPPSSSSASLVAPASSFMPTASPFHPTSADAHRPAYGHGTPLLQPLPPPTPPASLTPVHNDEPVISRDKVKDALLRLVQLWLLFISDVREEIVQLCLDALLM

SEQ ID NO: 104347 - protein, 707 aa, Oryza sativa
  Clone ID: PAT_MRT4530_101690C.1.pep
MANYLPVALADSARSWLHVLPRGTIGSWAELHEHLIANFQGTFEWPGTQFDLYNIIQKPGESLQDYIRRFSKQRNKISDITDDVIIAAFTEGVRHELLVGKFGRKPPRTVKQMIEKAKKYAKAEDAVTASKQSGGTWKPKKDAPATGGSGSTNHKDRKRKPEDLVATTTPSSQLLSRINTFDKIMNIILTECGLNILFAKTLDDTQIPRTELKPSSAPFHGVILRLSSPLGQITLPVTFGTRENFRTENICFEVADFETAYHAILGRPALAKFMVVPHYTYMMMKMPGPRGVISLRSDIKQAVTCDKESCEMAQTREITLAREEIRLAASAATEGEVPAPKISKSGESDAKTKKIPLDPSDPTKTAIGRNVEAYVDDVVVKTKQKDDLIADLEETFASIRAFRMKLNPKKCTFGVPSRKLLGFMVSRRGIQANPKKINVILNMKPPSSQKDVQKLTGCMAALSWFVSRLGERGMAFFKLLKKTDNFHWGPEAQKAFEDFKKLLTTPPVLASPHPQEPLLLYVSATSQVVSTVLVVEREEDGHVQKVQRPIYFVSEVLADSKTRYPQALADFVAEWTECQEDTPAEKMEHWTMHFDGSKRLSGTGAGVVLISPTGERATGGFTHLFVAVDKFSKWIEAKPVITITADKARDFFINIVHRFGVPNRIITDEGPFIISEVTRPGSYRLKREDGTDIDNSWNIEHLHRFYA

SEQ ID NO: 104348 - protein, 176 aa, Oryza sativa
  Clone ID: PAT_MRT4530_101691C.1.pep
HYRILKLACLQVDSRGSPSVDFTGDCRMSFGLCNTLASFQRCMMSIFSDMIEDIMEVFMDDFSVYGKTFGHCLQNLDKVLQRCQEKDLLPPPVNIKGIRSFLGHAGFYRKLVEMEDRMPIPYPDSYENVAKAHTQERKRLYADVGDIESAFNNRQHGRPGLLHNDSWRAFRTFPIQ

SEQ ID NO: 104349 - protein, 183 aa, Oryza sativa
  Clone ID: PAT_MRT4530_101692C.1.pep
MSSPSKRREMDLMKLMMSDYKVEMVNDGMQEFFVEFRGPTESIYQGGVWKVRVELPDAYPYKSPSIGFVNKIYHPNVDEMSGSVCLDVINQTWSPMFDLVNVFEVFLPQLLLYPNPSDPLNGEAAALMMRDRPAYEQKVKEYCEKYAKPEDAGVTPEDKSSDEELSEDEDDSGDDAILGNPDP

SEQ ID NO: 104350 - protein, 123 aa, Oryza sativa
  unsure (1)..(123): unsure at all Xaa locations
  Clone ID: PAT_MRT4530_101693C.1.pep
NWSIAHNCGHGYSNSFTLARGAQQYPXDTSHRHVTVXAGHVTMLSDCDKTLRITPPNQXHYTSGFAPTPKPIVGSLPSCLGKSDSLIDRRRAPPNSITLTLAWEHQKGESYITSPAIAHTCLW

SEQ ID NO: 104351 - protein, 195 aa, Oryza sativa
  Clone ID: PAT_MRT4530_101694C.1.pep
MSSPSKRREMDLMKLMMSDYKVEMVNDGMQEFFVEFRGPTESIYQGGVWKVRVELPDAYPYKSPSIGFVNKIYHPNVDEMSGSVCLDVINQTWSPMFGEITLVLVIISTDLVNVFEVFLPQLLLYPNPSDPLNGEAAALMMRDRPAYEQKVKEYCEKYAKPEDAGVTPEDKSSDEELSEDEDDSGDDAILGNPDP

SEQ ID NO: 104352 - protein, 69 aa, Oryza sativa
  Clone ID: PAT_MRT4530_101695C.1.pep
HGELLDGASRRLPAPPGSMNFVTASATAFAGTTSFSSSLVFRTPAPSGHKRSPISSTFVTSLSVTNCSN

SEQ ID NO: 104353 - protein, 107 aa, Oryza sativa
  unsure (1)..(107): unsure at all Xaa locations
  Clone ID: PAT_MRT4530_101696C.1.pep
GPDVLKPCSLRDRLGWKTIKXHCXDAPSRDRSIQGNGRKGESTLPTSSRPRRRPSRNVRLTTGSSAEEGCCLALATRRCTYMRVLQTTTAGRYXRRSKVGSHTPLKK

SEQ ID NO: 104354 - protein, 1048 aa, Oryza sativa
  Clone ID: PAT_MRT4530_101697C.1.pep
MGSLLPKLGELLKDEYDLQTGMKEKVKSLSRELESVHAVLRKVGEVTPEQLDELVKLWARDVRELSYDMEDIVDTFLVRIDSSETDDRSVLRHLRKKMSRLFKRTKDRRKIAGAIKEIDKKLQEVEARRARYTVDSIITKPAGPASIDPRLQALYKRSTELVGIDGPVDKVIKMLSLGDDRNMKIVSVVGFGGLGKTTLAKAVYDKLKPDFDCGVFVPVGRVPDIQKVLRDILIDFGFKVSDVMILDERQLIDKLQNFVQKMRCFIVIDDIWDKKSWELIRCALQDCKCGSRVVATTRISEVATHVGDVYKMQPLSRDDCEKLLYARIVDSEGKCLDSPSVEACDKILKKCRGVPLAIITIASLLASKPMEDWPVVYNSIGFGHEGNDDVANTRRILSFSYYDLPSHLKPCILYISIFPEDYEINKNLLIWKWIAEGFVHVEHVGIGLFEVGEGYFNELINRNMIQLVKAENEGYISSCRVHDMVLDMVRSLSSEENFVTLWDSSEKQKLPRRNARRLALQSRSIKEQNGNQLASTSMEQVRSFIANDCDDISMLFPRFRVLRVLILEDCDDVEDVEGCGGNSVDHLGSLLHLRYLGLPDTDISKLPKEVGGLKFLQTLDLWNTGIKELPQAVGLLTQLLCLHTDRSTTVPAGLIGKLTSLQELWTWPGSAYYRDMDPVAGAASTRRFAKELGNLRELRVLRASIYAVDESTERDLMESLLGNLQKIQSVDIFGSPLERGVTWDAGFASRWRLRHLNLECFELSRLPASVNSSLLPNLSHLDMKVQVMQEQDMETLGRLPELRCLVLDSRYTKVVRIKNTGSDCYFKKLRFFTMGSSSILFDVQGSECAIMPSLESLAFSVHVRFLKDADLLCFKKLGLVNLPSSLQRVTVEINSWDAHDTEVEEAEAMLEHAAIVHPNHPIFQTTRPFGKYIMLLPDQEPSSTNPKVDRCDVNLRKNDGDHLDFRWLLMNPRVEKFCVSINCENASLEEVEEAEAAARYAVDVHPNCPTLELVRYGEDKMVLPNPQQQFAAENLFLQLVSCAKCDVK

SEQ ID NO: 104355 - protein, 910 aa, Oryza sativa
  unsure (1)..(910): unsure at all Xaa locations
  Clone ID: PAT_MRT4530_101698C.1.pep
VESYFHLGRFAAATPSSAAQPTTTRLLRELGVRVSRYTHEERRDIVLRYMQKRSGRXASSAPPPRAPSRQALAERRRRGARGQFLGKEGAKVYRPGIHELFERFRSQTVDKPEEDPEVPPEVIANAGGVPIVGMVFENEEKAYEYYASYAGNVGFSVRKGLWDKTVKNVARSRVFVCSREGFRSKNEAKRPRPETRTGCPARIAIKLVSNGKYRVAEFVEDHNHQLAAPFDIDMLKSERVLTKVQPGNRNASNIPPGCKNYIRAKSSTHMNSEDLGALMDYFRRMKSDNPSFYYAIQVDENDKATNVFWADARSIVDYHYFCDVICFDTTHRSNDCRKPLALFLGMNHHRQTIIFGSAFLYDETVESFKWLLETFKSAMCGKQPKTILTDRSAALKEALSLTWPGTIHRSCVWQIYQNAFKSLEHVFNTLEEFTHDFHHCMFDIEDDQEFDEIWNVIIKKYSLKGEEWLTKLYEDRENWALPYNRQIFFGDIKGMLQVETSCVGLREFLDCEKDLSKFFMFFESSMEKRRQEEIQADYQASEGAPRISLPLLWQAAKVYTPIIFELFRKEYELCMDCMAYSCGEFGSLSEYMITVKNKTKDQLVRFDSSDGTVACTCKKFENAGILCCHILKVYELRNVKEIRPQYFLKRWRKDAKVGSTDETNRFNFDSGTKSSVPERYAALCRSFYKIAAKAAENAETFALMASQSDRLVEEVERILQSTLANKSSVGPSIKNQLTSMVQNEYLLNSSNEVEKSTGKKKTEVYRHKSAVVTNKMQKTRKGGTHPDEAATGTRDGELNMTPDNRQSEARNSPNQFLPDQLMQVDFSSRQYXFLDVPFITVEQLFITGVXPCSGALYTPTMQQQAFPGNNQLTQGYPSDMHALQFVGANPQMEHQNGDQGQSSIPVWDFL

SEQ ID NO: 104356 - protein, 136 aa, Oryza sativa
  unsure (1)..(136): unsure at all Xaa locations
  Clone ID: PAT_MRT4530_101699C.1.pep
ELPEPERVALDQLMELVAAALPADEFDLPQRRLPSPAKAEEPGKEEEPKAAEAPAAEEPKAEPEAEAEAPAPEEXSAEEPKTEETAKEEEPKAEASAEEAKPAEPETEEKTVVVTEDEGTSKTVEAIEETVVVAAP

SEQ ID NO: 104357 - protein, 59 aa, Oryza sativa
  Clone ID: PAT_MRT4530_10169C.1.pep
DTLLEGDVLQDDFVGYRQRVLSLDRCTTSTSLFFFSFLYIIFFFFFFFFFFFFVKTIGY

SEQ ID NO: 104358 - protein, 107 aa, Oryza sativa
  Clone ID: PAT_MRT4530_1016C.1.pep
FWKDLPSSSCFWSESLDPVEPAVWISPVSGEAPAEALLGSDDGLTGSSTAIPVPISPHDPSAASSASAKSPASSTGPFSRETLSSCGSMLVSSPICTSSVSSVFREV

SEQ ID NO: 104359 - protein, 127 aa, Oryza sativa
  Clone ID: PAT_MRT4530_101700C.1.pep
LALSYLITFHLYLKATMKTPILSFQATFTRLQEHMEYPQAGVLSKTLLQDKTCQYTLFCLAANTEISEHTSTRNAVVQGIEGTGILTLEGKDISLDPGVFIVMPAHAPHALKAICNLSFLLTLSQPN

SEQ ID NO: 104360 - protein, 585 aa, Oryza sativa
  unsure (1)..(585): unsure at all Xaa locations
  Clone ID: PAT_MRT4530_101701C.1.pep
MAEEAKQETPAAAEVVVVEKADEVVAVEKAVEVEAEEKKVAEQEEEEEKKAEEAEEAAGGDEAAVIEGTGSFKEESNLVSELPDPERTALAQLKELVAAALAAGEFDLPPPPPPPPAKAEEPAKEEEPKAAEAPAAEEPKAEAEAEAEAAATEEPKTEEPKTEEPAKEEEPKAAAAAAAEEPKAEAAAEEAKPAEPETEEKTVVVTEDEGTSKTVEAIEETVVVAAPAAAAEAEAAAPKEELIWGVPLTGDDERTDTVLLKFLRAREFKVKEAMAMLKAAVLWRKRFGIDAVLAADLGLPELENVVFYRGADREGHPVCYNVYGEFQDKDLYEKAFGDEEKRERFLKWRIQLLERGILDQLDFSPSGICSMVQVTDLKNSPPMLGKHRTVTRQALALLQDNYPELTADGVSAPAWXLHADRARVGEVEGARGARRSRSWNGKAAEAHGGVQDGHRRSTPRRRPTAAAGDDAYPFYLLLGPVLVVMAGDGDTVEIPDTENFMVIRGRKQFLWXWSXGSLFTPDAEGGYTVIVQKTWKVPANEEPIMKGSFKVGEPGKIVLTVDNAASKKKKQLLYRFKVKSSSESA

SEQ ID NO: 104361 - protein, 349 aa, Oryza sativa
  Clone ID: PAT_MRT4530_101702C.1.pep
MKKFADVMAASLLLVVAGGLSTMAKVTMASRAGTMEARHDKWMAEHGRTYKDAAEKARRFRVFKANVDLIDRSNAAGNKRYRLATNRFTDLTDAEFAAMYTGYNPANTMYAAANATTRLSSEDDQQPAEVDWRQQGAVTGVKNQRSCGCCWAFSTVAAVEGIHQITTGELVSLSEQQLLDCADNGGCTGGSLDNAFQYMANSGGVTTEAAYAYQGAQGACQFDASSSASGVAATISGYQRVNPNDEGSLAAAVASQPVSVAIEGSGAMFRHYGSGVFTADSCGTKLDHAVAVVGYGAEADGSGGGGYWIIKNSWGTTWGDGGYMKLEKDVGSQGACGVAMAPSYPVVSA

SEQ ID NO: 104362 - protein, 83 aa, Oryza sativa
  Clone ID: PAT_MRT4530_101703C.1.pep
MGSEVDAGAIGWREQSALPAGRCNARLYGATADGRVEKPMTGHVFLIVFGLATGEMDHGAATKLASYLLKFDFAPYAPSSLSS

SEQ ID NO: 104363 - protein, 292 aa, Oryza sativa
  Clone ID: PAT_MRT4530_101704C.1.pep
MGFSELVQGGGGAACEKTTPVTTGEEEEDYCGNGGVSSFRICRPRALVAGSGSWSSLVPVGVLNKRRVCGDWRRSDRTGATWIKPGLGADGTDRARALPSMEKKAIDDDDDAPNRPSYGTYGNDPVARRASQKTTDRDGVRDGNGSGTMHGAGLSDGEKVTTITMDLASFDAADGLDTWTRKRLSGTRFRPRLTSRCASRTHALLPAVVRQQRGGGGLLLRQSGVALAWGKSAGVLRAEEVGSGVHGSAVVQGRRGVGLPEDLRAPAPHVKNGTAQVLAEMKLYRYVRTRSF

SEQ ID NO: 104364 - protein, 125 aa, Oryza sativa
  Clone ID: PAT_MRT4530_101705C.1.pep
MSGVRVAAKAPAAAAAWPYVEYMARWERQVERRQLFLRSYHFSRDVELSPRARARRVVWVGLRRLRRAAATGLRRLRARLRLCFAWVSRRRNIHRRGARFGRYGRLSGGAAHAPAPAASSSVCFW

SEQ ID NO: 104365 - protein, 82 aa, Oryza sativa
  unsure (1)..(82): unsure at all Xaa locations
  Clone ID: PAT_MRT4530_101706C.1.pep
NSSTQRKELRKVLLEPEEKHIATQWPDHHITSCAVTVIQNLPLQGDLVSCGLFVLKNMEHWQGNXLSKEYTHVSLVPNSCSP

SEQ ID NO: 104366 - protein, 353 aa, Oryza sativa
  Clone ID: PAT_MRT4530_101707C.1.pep
MLEKDRIAYFYDDNLGEDCPVFDNLFEFCQIYAGGTLDAARRLNHKTCDIAINWAGGLHHAKKCEASGFCYINDLVLGILELLKYHARVLYIDIDVHHGDGVEEAFYFTDRVMTVSFHKYGDFFFPGTGDIKDIGEREGKYYAINIPLKDGIDDSGFTRLFKTVIAKVVETYLPGAIVLQCGADSLARDRLGCFNLSIEGHAECVKFVKKFNIPLLVTGGGGYTKENVARCWAVETGVLLDTELPNEIPDNEYIKYFAPDYTLKVSNVNMDNLNSKSYLSSIKVQVMESLRAIQHAPGVQMQEVPPDFYIPDIDEDELDPDERVDQHTQDKQIHRDDEYYEGDNDNDHEDGAR

SEQ ID NO: 104367 - protein, 611 aa, Oryza sativa
  Clone ID: PAT_MRT4530_101708C.1.pep
MARSSTESRTRTTVSVVVLFGLCSFFYLLGVWQRSGFGRGDSIAAVVNEQTKCVVLPNLNFETHHSASDLPNDTGSTEVKTFEPCDAQYTDYTPCEEQKRAMTFPRDNMIYRERHCPPEKDKLYCLVPAPKGYAAPFHWPKSRDYVHYANIPHKSLTVEKAIQNWVHYEGKVFRFPGGGTQFPQGADKYIDHLASVIPIANGKVRTALDTGCGVASLGAYLLKKNVLTMSFAPRDNHEAQVQFALERGVPAYIGVLGSMKLSFPSRVFDMAHCSRCLIPWSGNDGMYMMEVDRVLRPGGYWVLSGPPIGWKIHYKGWQRTKDDLQSEQRRIEQFAELLCWNKISEKDGIAIWRKRINDKSCPMKQENPKVDKCELAYDNDVWYKKMEVCVTPLPEVKTMTEVAGGQLEPFPQRLNAVPPRITHGFVPGFSVQSYQDDNKLWQKHINAYKKINNLLDTGRYRNIMDMNAGLGSFAAALESTKLWVMNVVPTIADTSTLGVIYERGLIGMYHDWCEGFSTYPRTYDLIHANAVFSLYENKCKFEDILLEMDRILRPEGAVIIRDKVDVLVKVEKIANAMRWQTRLTDHEGGPHVPEKILFAVKQYWVVESKSS

SEQ ID NO: 104368 - protein, 58 aa, Oryza sativa
  Clone ID: PAT_MRT4530_101709C.1.pep
CQLTRSLSPPSFPLYSSRSYVFLYCVRLTFYHSLQLSPSVPLALIFFHITQDSLPSFP

SEQ ID NO: 104369 - protein, 127 aa, Oryza sativa
  Clone ID: PAT_MRT4530_10170C.1.pep
DLTGSWKVYEVSATPIFSEERQEIEAGALFVYLCMETVKKRSLPESSVFFGEEEMLDMQDVTMLWLPGGVTAYVDVDKDGILCIGVGWYSDEGINMVMERDYGTDGKLRDVRWKTEVKRRWNQPVLP

SEQ ID NO: 104370 - protein, 64 aa, Oryza sativa
  Clone ID: PAT_MRT4530_101710C.1.pep
MSINDVSGPGLGEAGRTLQSGIRGGQDVTKWYQSRLHVLALDTRTWPRGDIPGLGLIDGGVNLY

SEQ ID NO: 104371 - protein, 68 aa, Oryza sativa
  Clone ID: PAT_MRT4530_101711C.1.pep
NKGFIPPFLGFFGTVIIYFAFDCCDLVSIYIHLHINLSAFLSFRCTMHLLLGSILILHFRLAHRDTKI

SEQ ID NO: 104372 - protein, 240 aa, Oryza sativa
  Clone ID: PAT_MRT4530_101712C.1.pep
AEKQRARRRPGENHGYASSFTGRVDCKLPWKETMSFNCSAAPGNARMVADYFVDALGEEYRHMGEVYQEYCDVMTRLALDVTEVLAVALGLGRGELRGFFADGDPVMRLNHYPPCRQPHLTLGTGPHRDPTSLTLLHQDDVGGLQVLPDDAAAAAGGWRAVRPRADAFVVNIGDTFAALTNGRHASCLHRAVVNGRAARRSLTFFLNPRLDRVVSPPPALEYAGDERAFPTFTWREFLVL

SEQ ID NO: 104373 - protein, 180 aa, Oryza sativa
  Clone ID: PAT_MRT4530_101713C.1.pep
MSTTNSSSSVSVPAMDAHGQEEEEEPMQVQQQQAFRGVRKRPWGKFAAEIRDSTRNGVRVWLGTFDSAEEAALAYDQAAFAMRGSAAVLNFPMEQVRRSMDMSLLQEGASPVVALKRRHSMRAAAAGRRRKSAAPAPADQEGGGGVMELEDLGPDYLEELLAASQPIDITCCTSPSHHSI

SEQ ID NO: 104374 - protein, 107 aa, Oryza sativa
  unsure (1)..(107): unsure at all Xaa locations
  Clone ID: PAT_MRT4530_101714C.1.pep
MEFGWALRRPMRLSDSPRHERGLPAALRGVGLKPEVWCAWLEGVMRRVLSRPLSGMSLYVNFVVCVPWPVLDRGFIAHSAXNSIREFLGVTRNNLAASSILPRLNPK

SEQ ID NO: 104375 - protein, 63 aa, Oryza sativa
  Clone ID: PAT_MRT4530_101715C.1.pep
TLTRIFVRSNQPHLWEERRPQDYHPAADRACETHRVCIGCDQGYGGHVIGPLVTTNNWKAMVE

SEQ ID NO: 104376 - protein, 499 aa, Oryza sativa
  Clone ID: PAT_MRT4530_101716C.1.pep
MSAAAAAELPDDIVEKIISRLPPRSIVTGCRAACKAWRRLTSRPEFYRAYVPRPRPVAAKVTVKINTTRAADTIVRFELFRSHWNVDGAAVPPYRRVLSLGAAATTDKYSISSLVLGSWDGVLCMAMTTGGQGADFVGAYAHPATGRFHILHASGKTVGHYYYRKQLAPAVFRVQTIGDAAWRVGPAPPPKITMATTGHAAARSAALHGKLHWLVQSGGRWPAVRKLKLLAFDMSREKLRLKETPERMAAMDLETARISVLPAAAGKLCVFAVEDRGTTVSMWVLDDYHGDHRRSWQLKRRIDLLRDERGWRWRRNLWPALKQVEAVQGAEEEGDKVFVHTRGQVNAYSLRRGRWRGANDVARSVAGKVHVSMVRHEHGVLPLPHEVFSQKTSFLFSPRLARYLPPFGLLLFDPTIFNFPNMTTIFNLPKTPEDNPVPEDNLVPVFDPLDLLFPFSPKSERKIRDKNDRGRSPSKSATLEQRLNPAIKAKSKGKSLRKW

SEQ ID NO: 104377 - protein, 108 aa, Oryza sativa
  Clone ID: PAT_MRT4530_101717C.1.pep
MEEKRSWRSRALRQRGGGGGGDHGEPINECGGEGLEPTSGASATVPSRPKRSTDVPLVAGASRRRRCRHGHPGVGVGGHELRRQPPSYSTGGDLENWSAIKREAHAMN

SEQ ID NO: 104378 - protein, 96 aa, Oryza sativa
  unsure (1)..(96): unsure at all Xaa locations
  Clone ID: PAT_MRT4530_101718C.1.pep
MWAARHSPAQARPCLGRGLSGRHGPTDSPGQPTPYTLCAGPSLPAHRAGPAGRASVPVGRPRHGPAVGPXVPCLGRAKKPCHGPGLRASGLMAIYN

SEQ ID NO: 104379 - protein, 158 aa, Oryza sativa
  unsure (1)..(158): unsure at all Xaa locations
  Clone ID: PAT_MRT4530_101719C.1.pep
APRNISPDERDPLYNMFTDRIRASLRARLRPIAKNMAASSSSSSSACDPAMAAEWSGTVQRILGWLXPLAHNMLRWQSERNFEQKNVASSGTGVLLLQTLHFADQKKSEAAIVELLVGLNYLWKAGRELYAKAKKLVSGGGKRDEFTDYYSSNRMECR

SEQ ID NO: 104380 - protein, 400 aa, Oryza sativa
  Clone ID: PAT_MRT4530_10171C.1.pep
LSFCQDTPGQEESCHGEICKGQAALGPPIARRRGVRRCRWVPVMVDMLMLLVGEAMAPLLTRLYYNSGGNSLWMVTLAQSAGAPLLVIPFLLTPRAAAVGEPRPAPAASKMVAICVALGLVVGCDNLMYSYAMLYLPVSTFSLLAATQLAFNAVTSRLINAQRFTPLVVNSVVVLTFSAALLGVDDPSSSVGGGAGGDAVQRGKHAAGVVLTLSASAVYALILSLFEATFDKVIGAATPRWVLKMQISTNAVAATVSATALFASGEWRTIGGEMAAFKGGKAAYAATVVGVAVGWQAATLGAVRLIARVSSLFANVTGTLALPMVPVLAVALFGDKMTGTKVVAMLMAVWGFLSYVYQHYLDGRRAAAREGRVHAAAGCGIGALKIQIPSPFQLFKLISA

SEQ ID NO: 104381 - protein, 135 aa, Oryza sativa
  unsure (1)..(135): unsure at all Xaa locations
  Clone ID: PAT_MRT4530_101720C.1.pep
VCCDRNQTGGSNVLSLESRERALRNRLIIELKQLDGQVLVAHNILGYDXHGLWHRAQTSTGPRNMWWMIARLTLSLMPRLTKGNTLYGLGARTGLMTCIAGRILCDTYLCSSDLLKDARHSXTQLAETQLKKERK

SEQ ID NO: 104382 - protein, 171 aa, Oryza sativa
  unsure (1)..(171): unsure at all Xaa locations
  Clone ID: PAT_MRT4530_101721C.1.pep
PSSHQSSRRHRSPPRRSADVASVQSDSDEHISXRHEEDHEINLPVKRAXSGEAHSTTDAANMDDVFXVDFNNYMLKCKSVYXCPIIIFLNEEMVRVHFKAKRHAQAKKISGXGRLKLILNXGVLEEEQDTXERHDRTVALAQRVQKPKKDSSRQRQTSEIKHAEKCEKTTP

SEQ ID NO: 104383 - protein, 45 aa, Oryza sativa
  Clone ID: PAT_MRT4530_101722C.1.pep
PDLHKLLLALASWTTHVIDIHGFFTQELDDHPCIRHSRLARSNIN

SEQ ID NO: 104384 - protein, 107 aa, Oryza sativa
  unsure (1)..(107): unsure at all Xaa locations
  Clone ID: PAT_MRT4530_101723C.1.pep
VGGAVPPVRRQGCRGGGRRGGGHPVFHEDDQVAVHVSNIGFDSAILAPSISNALXFXPSILSGSFADIGPRRYMXDDHIRIDDLSSHLXSLLVCPLPSAFYVVXYGH

SEQ ID NO: 104385 - protein, 349 aa, Oryza sativa
  Clone ID: PAT_MRT4530_101724C.1.pep
MANSSTAAAAAYPLLVQRYGVAGVTPSSSSSSMATRVFSLPAMKLLDVNLSVEMCGNTFLETPQGLVLVLMTTSSPPASAFLLDPRDGSRVAELPPLGEGELPAHRRCVLSGRPPEPGCGVLVFDLESPALLFCRVGGERWSRHGYDIGCYDLPEEYCPVPKRRQLFDVAGVGGRFYFAENKGELGTLDFTGGGGGGGGGEAVVGAIAIPVLDYFPAGQVMSSSLTFLVESRGDLFLVAIAFEGYSIGGPYDVHVFRMDFSAAAPGPAWRRATDIGDRAFLVGGDNSSGASCSASGCGVKANRIYWINGFSEDEKRNLYVFSVEDGSVETFDTFESLPGAPRQTPFWLV

SEQ ID NO: 104386 - protein, 318 aa, Oryza sativa
  Clone ID: PAT_MRT4530_101725C.1.pep
MEGKDGRTTDAYCVAKYGPKWVRTRTILNTLNPQWNEQYTWEVFDPCTVITVVVFDNNQIGKNGDARDESIGKVRIRLSTLETDRVYTHFYPLLALKPSGLKKTGELHLAVRFTCTAWVNMIALYGRPLLPKMHYTQPISVMQLDYLRHQAMQIVAARLSRAEPPLRREVVEYMLDVGSHMFSLRRSKANFYRITSLFCGFAATAKWYDGIRSWRNPITTVLVHMLFLILICYPELILPTIFLYMFMIGLWNYRYKPRHPPYMDTKLCHAEFTNPDELDEEFDSFPSSRPADIVRMRYDRLRSVGGRVQTVVGDLATQ

SEQ ID NO: 104387 - protein, 72 aa, Oryza sativa
  unsure (1)..(72): unsure at all Xaa locations
  Clone ID: PAT_MRT4530_101726C.1.pep
MQMQIGVSFPFFLVMSMSPTWSNRQLLLLAQVNTSLLVKVLPGVRERGPKQXLRLNSHRPPPSTTTVPSSSS

SEQ ID NO: 104388 - protein, 768 aa, Oryza sativa
  unsure (1)..(768): unsure at all Xaa locations
  Clone ID: PAT_MRT4530_101727C.1.pep
MKGAMPPRPFMMPGPGGPMPPPQQFGLVETRPPLAAVLRPRFNIPGLHPSAAAASAAGKIASTYDLVESMRFLYVHVVKAKDLPAVSAAGTIDPFVEVKLGNFKGTTPVLGGNHNPSWKQVFAFSATHLQAHVLEVAVKAKDLAGGDDLIGRVGFDLSEVPIRVPPDSPLAPQWYRLENKRGEKTRGEIMLSVWLGTQADEAFPDAWHSDAHAAAGPGAVASTRAKVYFSPKLVYLRVAAIGAQDLVPLDASRPANFCVKLQLAGQVRRTRPGAPPGTLNPIWNEEFMFVVSEPFDEPLFVTVEDRVGPGRDEPLGRIMLPLNAAMPRHDHFGKPVEPRWYSLARPSDDPDKKEGKFASKIQLRMSLDFGYHVLDESTYYSSDLQPSSKHTRKPSIGILELGILGARNLIPMKGKDGRTTDAYCVAKYGPKWVRTRTILNTLNPQWNEQYTWEVFDPCTVITVVVFDNNQIGKXGIMCSFECYLLKXRLSTLETDRVYTHFYPLLALKPSGLKKTGELHLAVRFTCTAWVNMIALYGRPLLPKMHYTQPISVMQLDYLRHQAMQIVAARLSRAEPPLRREVVEYMLDVGSHMFSLRRSKANFYRITSLFCGFAATAKWYDGIRSWRNPITTVLVHMLFLILICYPELILPTIFLYMFMIGLWNYRYKPRHPPYMDTKLCHAEFTNPDELDEEFDSFPSSRPADIVRMRYDRLRSVGGRVQTVVGDLATQGSXVIAMLYLLRHPRFRSRMPSVPFNFYRRLPAKSDMLL

SEQ ID NO: 104389 - protein, 128 aa, Oryza sativa
  Clone ID: PAT_MRT4530_101728C.1.pep
YLRDKGKKLSAPCRPGFFSHQLGGVTPGGGQIFGPGYFFGLFFQPVGQNVPIPGVFFAKNFQGLGSPFFSWAFVPPPCRGSCPPVWLVESKEKWGFIKWGQKKKKKKKKKKKKKKKKKKKKKKKKKKQ

SEQ ID NO: 104390 - protein, 481 aa, Oryza sativa
  Clone ID: PAT_MRT4530_101729C.1.pep
MPAVEGMRDVVATVSGYHGDERHRLVRLIAETGASYVGAMSRSITHLVCWRLEGKKYDIARRLRTRVVSHRWFEDCLKEGRRLPEKPYMLESGEEAGPVPELPTFPRSRSKRNASMEDRCLKELPDDFCNTSYATDVLVVADSGSDCNHQRWSDSSLLKENFVGDRDNSKIGATHVKERRKRLKHAQNSTNEDALDAEDNISRLMARQGRYESSYTSSRSASNQKGDLLKLLHNDDASMMRKRNSLMKKETRTKLAGYLIESCENGSLTDSFDEPQMSDTPPTEDRRKIRKTRLRQSTLDSIYDYGEASEHDPEKSEDQENFELGESSRSFQSSDSSRQEPAFCTEKTNQGSIDIAADDDKGDDEKATLEEPTSCQGQAELSCVICWTDFSSTRGILPCGHRFCYSCIQEWADSLSSRGKVSTCPLCKTSFAWISKIDEAGTSDQKIYSQTIPCSTSTDTFIFDDRVYGLPESPVDVMKKD

SEQ ID NO: 104391 - protein, 102 aa, Oryza sativa
  Clone ID: PAT_MRT4530_10172C.1.pep
IDTLQRLYNFTHKIQFGAAKHQSVTKRFPYLALTPASPMGGPPYTTQVKVPMIKVPFAYTTITKARNASTPFIFTFEVLHLSVWGSHLMLAATEAAYGQHIQ

SEQ ID NO: 104392 - protein, 72 aa, Oryza sativa
  Clone ID: PAT_MRT4530_101730C.1.pep
FFFFFFCEYAKNPFFLLVWANKIVTHYSSSKSLECEKDRRKTYSSFSSYGGLKVKILPLELILSSKFMAIPK

SEQ ID NO: 104393 - protein, 116 aa, Oryza sativa
  unsure (1)..(116): unsure at all Xaa locations
  Clone ID: PAT_MRT4530_101731C.1.pep
ERIRTILYCAGFVVSEFYLETKATHSIKGTPPEGFGSSNHSADTPSIVYEAEGLKPKPPXEISSNNLDKDLADIGCXLTRGLNQYNLCLLAASMSYYVDPHTNVPQYPIYPVYEYS

SEQ ID NO: 104394 - protein, 78 aa, Oryza sativa
  Clone ID: PAT_MRT4530_101733C.1.pep
SFLGHTKGALQWAAEEPQLLLSTKRQTIRIDQEDVEHFGRHSWCFTYRHIHVTLGCRQPVSEDARLPREHWRRVQRLA

SEQ ID NO: 104395 - protein, 44 aa, Oryza sativa
  Clone ID: PAT_MRT4530_101734C.1.pep
HFLFHFLDRQAKCKFSFSFRMPLVICSQITKLKASAAPPLCPFQ

SEQ ID NO: 104396 - protein, 148 aa, Oryza sativa
  Clone ID: PAT_MRT4530_101735C.1.pep
QRSEFLYAASIAFNPMCSPAKIFFPSCLWSHQSLLVVAALFVPFGCPSTFAFGLALGRTSSGSPPPPLGSGCLSPFSVVRTGPYLCCSSCPVLPPYLGLGLLCVPIQVLVTEIYTSFFLSTFPPCRTNPVSANLLSSYSTLKILRILF

SEQ ID NO: 104397 - protein, 55 aa, Oryza sativa
  unsure (1)..(55): unsure at all Xaa locations
  Clone ID: PAT_MRT4530_101736C.1.pep
HCAXKVQSPSLLIPFPSPKPPRHRAPPPRXXRKSSXXXXSLGHXXPAXRPASRIS

SEQ ID NO: 104398 - protein, 124 aa, Oryza sativa
  Clone ID: PAT_MRT4530_101737C.1.pep
THRPTRVYRLEHSASTKLITTTTVLPLAAEQKKKRKRRERESSVAEGVAHLEPGGSPAAGVVLHGAHHRRRRRGGSGHGGESREEGKRRDETRSGEERGERRKSRRKRARESRLVFLQVGGFAA

SEQ ID NO: 104399 - protein, 96 aa, Oryza sativa
  Clone ID: PAT_MRT4530_101738C.1.pep
QTSRPACHDLLAFICMRVAGLSLSDIWHPIVGQMKTVSCTKFWKGDVCIISGYPLLTSSQTGVGNLGNANCKNQRCWKERCEDQRIQLFIINQRCR

SEQ ID NO: 104400 - protein, 501 aa, Oryza sativa
  unsure (1)..(501): unsure at all Xaa locations
  Clone ID: PAT_MRT4530_101739C.1.pep
VDRQCVYTVDRWSKEFIEGVYYFLSVANINKHKGFMCCPRKKXKNQKEYSTSRTFHAHLFQSGFMPSYNCWTSHGKLGVAMEXGELEEENISDCAPQXGGFQKNTKGEANGAFEDNDSVDDLGHMLHNVKEDCESEKVVQKLERMLADHKTSLCPGYEQGHKTLGTTLEFLQXKVKNGVSYKAFGELLKLVKNIIPEGNRLPXITFEAKXVVCPLGLEVQKIHACPNDCILYLREEYENLEECLVCKALRYKIRGDDPXSKKRVPPKVMWYFPIIPRLRRLFKNKAHARMMRGHAEERQQDGMLRDTPLMGCSDETSNEXFQYFGEDERNVRLGLSTNGMYLFGEMSSGHSAWPVTMCIYNXPPWLCMKQKYIMMPIIIXCQEQPGNDIDVYLRPLDEHLKLPGKKEGXFVSINDWPAPSNLSEQSNKGYKACTHCMDKTENTYMKHCRQVVYMGHHRFLISSHPFRKKGKHFEQNEDRRTKPKHRNGKVLFTLVKDLEAM

SEQ ID NO: 104401 - protein, 65 aa, Oryza sativa
  Clone ID: PAT_MRT4530_10173C.1.pep
MAGSVTRRGLDMTGFVLELRGMCVALGYPHGVDYCHVLINSSRNKNHFLKGIIELIKIRKEIGKH

SEQ ID NO: 104402 - protein, 72 aa, Oryza sativa
  Clone ID: PAT_MRT4530_101740C.1.pep
RWVIRGLASLFIGCVWGGGTWFGGCVLGPILPRQPTVDVKLFLQPTVRSKIFLGTFSSYLNYIKIPPSVISA

SEQ ID NO: 104403 - protein, 60 aa, Oryza sativa
  Clone ID: PAT_MRT4530_101741C.1.pep
PKTKILNNVLFGLRMYTAPKAAAEPAALRCHARPPRSAHGWLERVWIRVLWGWGSGGGCC

SEQ ID NO: 104404 - protein, 158 aa, Oryza sativa
  unsure (1)..(158): unsure at all Xaa locations
  Clone ID: PAT_MRT4530_101742C.1.pep
WADFLPAHLPPGGGXPPPAAAPAFGGSAASPAPPVVSSCPRAVAAPPRCRAVRSRPPLAPPSWSRLPGLCSAAAPACPAGRRSLRRPLPRPCRSGPPSPLPPCAFARALRLFAWWFASPGRPAPGRPAPPLPPVSPPLPSSRPATSRRPFTLRHPVSP

SEQ ID NO: 104405 - protein, 347 aa, Oryza sativa
  Clone ID: PAT_MRT4530_101743C.1.pep
MARCGSAIAAVAALLVLLGGHAAARIRVEHSGMVIRRPSSSIPSFREAPAFRNGEECGGGGRVDVAMTLDANYLRGTMAGVLSILQHTACPESVSFHFLAAGMDADLAAAVRATFPYLDLRVYRFDPSRVRGRISRSIRHALDQPLNYARIYLADTLPPDVRRVIYLDSDVVVVDDIRALASVDLGGHVVGAPEYCHANFTNYFTDAFWSDPALNGTFAGRRPCYFNTGVMVMDVGKWRAGGYTRRVERWMEVQKQTRIYHLGSLPPFLLVLAGDIQAVDHRWNQHGLGGDNVKGRCRGLHPGPISLLHWSGKGKPWIRLDARRPCAVDYLWAPYDLFRPSSPVLEE

SEQ ID NO: 104406 - protein, 241 aa, Oryza sativa
  Clone ID: PAT_MRT4530_101744C.1.pep
MGVTASLALVKKHVRLSASSPSFSTTLKPPQVHNGAETKQKRVIIADFATSDKQLRLRPNTPPHNLAVEALCKTPFNHTIVVTFFVIVVRSASSPVARAASTSLASLTPMPTLKALQLIELFLGVIFENSPSQDRESHPEVLALLSGTSGPLAVSSLSQDPFASSTQILSHYSEIESVDEGVGVIWRRIEGKHTPPLGYIYALSGADHLQPSPIPSTPFFIIGYAHAAHHLYWRPPDSKDE

SEQ ID NO: 104407 - protein, 250 aa, Oryza sativa
  Clone ID: PAT_MRT4530_101745C.1.pep
MSAAIRADRPRLPPVPAPLGLTIDAPRGLLLVVSAVDVAAHNSSSLPEFAATASASCAAASASRRATHRAPNAYRRSTWAYLQWLSRRKEFGKILCQNEDHYVRLFSSQKPCAQSAKDTILRIYVAHRKTLRGAPWGDGGRCHVGDLLQSYSARGGRFAKITLRFAGNSKMQLGTIFISMLKIQMTEILDRCTMDPIIISATMYDYVVTADDVDTLLAVDCTPMDDNTCQGELVTEYTNNGSKITCGFTD

SEQ ID NO: 104408 - protein, 157 aa, Oryza sativa
  Clone ID: PAT_MRT4530_101746C.1.pep
MGADPPVLPEGLEERTPARARVVRGWAPQVEILRHAAVGAFLTHCGWNSTLEGVAAGVPLLAWPMKADQFIDARLVVDLRGAAVRVAEGAAAVPDAATLARALADAVDGAKCGDVRAKAAALAAAAAAAVEEGGSSRVAFESMAKELETACMSPSFG

SEQ ID NO: 104409 - protein, 43 aa, Oryza sativa
  Clone ID: PAT_MRT4530_101747C.1.pep
PATHQGDATVLVVVSCGSLGPLYSLAQYYAVMVIVPRVDCILK

SEQ ID NO: 104410 - protein, 81 aa, Oryza sativa
  Clone ID: PAT_MRT4530_101748C.1.pep
MARWWPAWGREKRERWSFCLTKKDGALAGYLKGEKAVRGGGGKGGHGDGSGVQGRATAAGFSLLGPQEKGGPKERKEDLGP

SEQ ID NO: 104411 - protein, 119 aa, Oryza sativa
  Clone ID: PAT_MRT4530_101749C.1.pep
PTPPYIFSNRTGVFWLLTFKPISLPQKEPHVLPLGQRIIKKKKRKTDTHPTPKTPIPTKPPTPPPPQKKKKKKKKKKKKKKKKKKKKKKKKKKKKKKKKKKKKKKKKKKKKNGRWVLDR

SEQ ID NO: 104412 - protein, 188 aa, Oryza sativa
  Clone ID: PAT_MRT4530_10174C.1.pep
MDKAGGSGEAPPEPEPAAAATVKSIVVYPIKSCRGISVPQAAITSTGLRWDRPWLVMNSAGRAFTQRVEPKLALIEVEMPQEAFTEWQPTPDSHMVIRAPGLDPLKIPLGAKRATVDDVSIWEWSGSAYDEGDEAAEWFSSYFGKPTRLVRFNEASEIRETNPDYAQRYKVLVADDFPFLLASQGSVD

SEQ ID NO: 104413 - protein, 172 aa, Oryza sativa
  Clone ID: PAT_MRT4530_101750C.1.pep
MVEGGGGGGGGGPGMPMAELEQVFRRYDANGDGKISAEELASVLRALGAPLGPGEVRRMMDEMDSDRDGFVDLSEFAAFHCGPTPAHGGKGGDAKDQEAASEAELREAFRMYDADSNGKISARELHRVLRQLGDKCSVADCSRMIRSVDADGDGCVNFDEFKKMMGGGGGRR

SEQ ID NO: 104414 - protein, 701 aa, Oryza sativa
  Clone ID: PAT_MRT4530_101751C.1.pep
MAMMAMDTPPTKGMAVGMEVELPFPDDEEDESMVGGGVRVGKEKVKEMVMSGGGGGWEAVGICGMGGSGKTTLAMESFKDHKIRGYFSDRVFFETISQSANLDTIKMKLWEQISGNLVLGAYNQIPEWQLKLGPRDKGPVLVILDDVWSLSQLEELIFKFPGCKTLVVSRFKFPSLVTRTYEMELLDEEAALSVFCRAAFDQESVPRTADKKLVRQVAAECRGLPLALKVIGASLRDQPPKIWLSAKNRLSRGETISDSHETKLLERMAASIECLSGKVRECFLDLGCFPEDKKIPLDVLINIWMEIHDLDEPDAFAILVELSNKNLLTLVNDAQNKAGDLYSSYHDFSVTQHDVLRDLALHMSGRDALNNRRRLVMPRREESLPKDWQRNKDTPFEAQIVSIHTGEMKESDWFQMSFPKAEVLILNFASSVYYLPPFIATMQNLKALVLINYGTISATLDNLSAFTTLSDLRSLWLEKITLPPLPKTTIPLKNLRKISLVLCELTNSLRGSKVDLSMTFPRLSNLTIDHCIDLKELPSSICEISSLESISISNCHDLTELPYELGKLHCLSILRVYACPALWRLPPSVCSLKRLKYLDISQCVNLTDLPEELGHLTSLEKIDMRECSRLRSLPRSSSSLKSLGHVVCDEETALLWREAEQVIPDLRVQDGGTIHSAILTCSVFMQLTLQQQPKLAEKIEP

SEQ ID NO: 104415 - protein, 795 aa, Oryza sativa
  Clone ID: PAT_MRT4530_101752C.1.pep
MEAADTAIARWLSRHAPAHVLERVRRLRDEADARIGRLERRVEEVAAAQQQQQAAATALPPPAISLPFALPPPPPPPKAMAMMAMDTPPTKGMAVGMEVELPFPDDEEDESMVGGGVRVGKEKVKEMVMSGGGGGWEARRNLRHGRQRQDPRSPWKSSRITKSECSLTWFNTNPGMIICYFSDRVFFETISQSANLDTIKMKLWEQISGNLVLGAYNQIPEWQLKLGPRDKGPVLVILDDVWSLSQLEELIFKFPGCKTLVVSRFKFPSLVTRTYEMELLDEEAALSVFCRAAFDQESVPRTADKKLVRQVAAECRGLPLALKVIGASLRDQPPKIWLSAKNRLSRGETISDSHETKLLERMAASIECLSGKVRECFLDLGCFPEDKKIPLDVLINIWMEIHDLDEPDAFAILVELSNKNLLTLVNDAQNKAGDLYSSYHDFSVTQHDVLRDLALHMSGRDALNNRRRLVMPRREESLPKDWQRNKDTPFEAQIVSIHTGEMKESDWFQMSFPKAEVLILNFASSVYYLPPFIATMQNLKALVLINYGTISATLDNLSAFTTLSDLRSLWLEKITLPPLPKTTIPLKNLRKISLVLCELTNSLRGSKVDLSMTFPRLSNLTIDHCIDLKELPSSICEISSLESISISNCHDLTELPYELGKLHCLSILRVYACPALWRLPPSVCSLKRLKYLDISQCVNLTDLPEELGHLTSLEKIDMRECSRLRSLPRSSSSLKSLGHVVCDEETALLWREAEQVIPDLRVQDGGTIHSAILTCSVFMQLTLQQQPKLAEKIEP

SEQ ID NO: 104416 - protein, 76 aa, Oryza sativa
  Clone ID: PAT_MRT4530_101753C.1.pep
QTRSIGLCLTPKAWLGLQNISHQRERSEIQRHDGDAATVSGTIFFVTFSRDIGYTLMTPNRDLWGPVEILFAQIWG

SEQ ID NO: 104417 - protein, 81 aa, Oryza sativa
  unsure (1)..(81): unsure at all Xaa locations
  Clone ID: PAT_MRT4530_101754C.1.pep
MMVEQQNYRLKIMTTNQTVHQYCCFPLDVTQYLFLYSSCKPSSMPIQYRHRLMNMLRRQKXQNLKQPALYMAHLEHLMAFS

SEQ ID NO: 104418 - protein, 62 aa, Oryza sativa
  Clone ID: PAT_MRT4530_101755C.1.pep
MGAVRGGASIIRGCPGTRSVPGPCQEGSRYYQRQANLRATASSTEAVVVDLSGRHRLVILDV

SEQ ID NO: 104419 - protein, 46 aa, Oryza sativa
  unsure (1)..(46): unsure at all Xaa locations
  Clone ID: PAT_MRT4530_101756C.1.pep
AACIGRGGHGSHQAGNLPAPEGCTDSXXXXFXPTARSDDRRLLYTI

SEQ ID NO: 104420 - protein, 69 aa, Oryza sativa
  Clone ID: PAT_MRT4530_101757C.1.pep
MDALQLKDSNWGSKPNKLVPKKLGPEKKAWEAAENLPVEAPKAVGFLFFFKKVPPGITKAPALHLFLGN

SEQ ID NO: 104421 - protein, 491 aa, Oryza sativa
  Clone ID: PAT_MRT4530_101758C.1.pep
MEDAMSLEKTTNKDKMLRRRYSLNLPEHLPEHHVITSAEQSEKTISKSIADLVWEIAALEEEVVRKELHLLSLYRAAFDQHLGVSPRVSTQVDQEIHHQKSRKKADEGALRLRNIKESASYNLPTVSTVSDSKHGLSRSSSGHSSLANFLSASIAEYVPKISCKLSEDIVRCISAVYCKLASQPSQNLADFETLSTPSFSSSSSTFSLKHRVDSWSPRCHYNVNTSSDKYDSLNEKSEQYNGMIICPRIYMDAEKFEYASKMLETVRSLIKRLEKIDPTKMAHEEQLCFWINIHNALVMHAFMAYGLQEKRMKNTDMILKAAYNVGGLSVNAQIIQNSIIGCQSHRTSVWVRTLFTPLKKSASGSSIHPYALHPPEPLAHFALSTGAISDPPVRLYTAKKVNHQLDQARTEFIQASVIVRKQTIFLPKVLHHYAKDAALELPDLVEMACEIMPEAQQKEIRQCLRRRIDKCVEWIPFKSSFRYTIHRSLAE

SEQ ID NO: 104422 - protein, 95 aa, Oryza sativa
  unsure (1)..(95): unsure at all Xaa locations
  Clone ID: PAT_MRT4530_101759C.1.pep
MGGGPXKEKXEEEEXSXLHLXKPAGNKVFSNCXPGKXAXPXXXFRVYYXFPXPGXVPXLWXSQPXTPKNPISXXLLPPFXPPXXYXTPGKVSPXG

SEQ ID NO: 104423 - protein, 174 aa, Oryza sativa
  unsure (1)..(174): unsure at all Xaa locations
  Clone ID: PAT_MRT4530_10175C.1.pep
SFTLTILNYATGDPYAFLSVIYSTFCVLLLLPMALLAQPTLVRTDKIHWXTPRQGRFYGTCRFDYXYKXFEPTLRXRAGHESRGITRRPFECEXNEQIPRAPRYNLSIRRXVIEPQGLLXPRYSNTPGMVYIIQGRGSMGLTFPGCPATYQQQFQQFLPEGQSQSQKFRDEHQK

SEQ ID NO: 104424 - protein, 130 aa, Oryza sativa
  Clone ID: PAT_MRT4530_101760C.1.pep
LSEAVGLEMRGMGQDTAYHPGLYLTAAQREAVEALIQELPKFRLKAVPTDCSECPICLEEFHVGNEVRGLPCAHNFHVECIDQWLRLNVKCPRCRCSVFPNLDLSALNNLRPSSEPDRSSASEVTAATMA

SEQ ID NO: 104425 - protein, 407 aa, Oryza sativa
  Clone ID: PAT_MRT4530_101761C.1.pep
MAVICFEESIHLLLCLIGFRIMVSINWKRYRLCAHPLHIWIVVDYTTVFIFRLLMFVDNGLAAGMGLALDNVYTCLFVKFGHLRHFHLPEEGQKWGFLIWLLFSYCGLACIACVAVGKWLSRRHALQQRAQQGIPVSEYGVLVDMIRVPDWAFEAVGLEMRGMGQDTAYHPGLYLTAAQLDKISMYLFASDLRDAKKSLKTSGFVLRSKVTLKSSVIEQNDFKLVLLLQREAVEALIQELPKFRLKAVPTDCSECPICLEEFHVGNEVRGLPCAHNFHVECIDQWLRLNVKCPRCRCSVFPNLDLSALNNLRPSSEPDRPSASEVTAATMARYVRSSQPAGQSYLLRLQGLLLRQVVVRHGGGDDMASAENGASHVAAAVTAPATTGGVESELPSIVVDGGHQLPDR

SEQ ID NO: 104426 - protein, 145 aa, Oryza sativa
  unsure (1)..(145): unsure at all Xaa locations
  Clone ID: PAT_MRT4530_101762C.1.pep
GIHVGLTCHPQSRVGGELHADGVRSEAATTVEAERASARGDHGGVGAASKEVGVDVVEPSNXEERLEHASPAEASSRAASASDSEXYRLAARDIALATSNDRMSTFXRHPPPLPPPPXAPPLPLLVTGFTFLDDDVAMDNTLCTS

SEQ ID NO: 104427 - protein, 64 aa, Oryza sativa
  unsure (1)..(64): unsure at all Xaa locations
  Clone ID: PAT_MRT4530_101763C.1.pep
SLHGSKSGIFMLLSPTKSACGVNFLVFVSSHPMASHPSCDLSSMYVQLFHLICYGSXSKNKMHF

SEQ ID NO: 104428 - protein, 664 aa, Oryza sativa
  Clone ID: PAT_MRT4530_101764C.1.pep
MARLLGVSLLVAGLGCALLVAPSESAADDGINCPSHVYLSALLAFKKAIFEDPLAKLSDWNSKDENPCGWTGVGCSPFDSRVVTLELANSSLKGFLALEIESLSSLQKLILDHNTLMGPIPKGIGKLRNLIMLNLSTNQLDGPIPIEIGDMPKISKIDLRANRLDGAIPPEIGNLTSLTELQLSNNSLTGTIPGSNDSSMVSTNRDGQIGLCRLTQLTDMDLSYNYLAGDVPTCFMQIRRLSLVGNCFENNDTTNRPDNQCENSQKGNESSRVDGNQQKSFQQPLWLLILEVITAISLLTVLTLCTIAGLRRCKARSSRNSGTWTRAISWKENTVISIDDDLLANVPKISRQELAEACEDFSNIIGSTHDTVVYKGTMKDGSEIAVVSLSASVHYWTSYVELYFQKEARRTLHLVVEMARLSHENVAKMVGYSKESDPFSRMLVFQYPPNGTLYEHLHDGEGYQLSWPRRMKIALSIARALRYLHTEMQPPFAVAALTSSSVYLTEDFSPKIIDFERWRALLTKPGLSSGSIVNGSFNNIIDSRHRRFMDIQANTFAFGVILLELISGRAPVSKDTGDLVDWARKHLDQTEEFIKLVDPKLMNANHENLGIVCNVVNLCIDAEPCRRPSMNMITAILEEGIDTSPATVLRDSSLAWAEAEIAIS

SEQ ID NO: 104429 - protein, 129 aa, Oryza sativa
  unsure (1)..(129): unsure at all Xaa locations
  Clone ID: PAT_MRT4530_101765C.1.pep
QGGRCRRGRTVEPEERLEHASPAEACRHCCDAVERVELLGERERQEPRVVAWHERTHGLGAEAARASSRAASASDSEXYRLAARDIALATSNDRMSTFXRHPPPLPPPPXAPPLPLLVTGFTFLDDDVA

SEQ ID NO: 104430 - protein, 521 aa, Oryza sativa
  Clone ID: PAT_MRT4530_101766C.1.pep
MGKVSARGGGLVIDAPAVQTHAPNSTQVVGFLTLAVSGAVLLLPTGLCPSCCSQPHLDAYLQRVPGAVQACPEGALGVRCAIGDSEAAEAFCGGPCQAEMNLVLYIDGRRATGDGRARLVGEELGADEVDGDVAGGDASLSSSAAEDVALRSCFPKFRRHKLYPFTFTLLSPAVGRHAPRRSRRHLALVPPPILLPLAVVATRRPPGGGEEDVPAACLSRLVPSFLATHPTALPVAAITGAASQPSPPPRRPSSAADALLLSRPADRRLRSAPPPPAAPTSPCPTSPSPPPAHARRPWKGKGKERGRKKRLTCGTYTESADKTGCAEARRTEAVGPGWTVSAAVTAPGARLPPPSRQRGRQREEIAAAAGEAMIRLRAGFGAKAEIFFLLLFSLLLRQGRRGAAAAAAEGVDDGKVDILSFDVANAMSRAANLYPLAVGHRGGAAAHLLCLGSQAVRALVPGDDSWLLALTLAEKLDALNRVAEVATRLGRRCMLQALLGFDHVYADLLAGCSDAVAISSR

SEQ ID NO: 104431 - protein, 91 aa, Oryza sativa
  Clone ID: PAT_MRT4530_101767C.1.pep
GYYIFGGGTHLKIYLIGGHIKNNYLFLTTTPYQKHTITPTPPILHSNSKNSIFFIIKKRSPYPPILGSPLRALQTNAKQRSLTTYKNPAAL

SEQ ID NO: 104432 - protein, 138 aa, Oryza sativa
  unsure (1)..(138): unsure at all Xaa locations
  Clone ID: PAT_MRT4530_101768C.1.pep
CSFSGSPRKSPRGLRGDQDSRMNGEWSTSRCLEATHQQRFAAAFPEYYNIEARNEVXRAPGVSPRRLVVXSKCLVLPANANAHTLGYIVQGXAVHGMALRWSSETFHSVRARFELXVTXCLXVQSSIQKMRDEHQLAS

SEQ ID NO: 104433 - protein, 157 aa, Oryza sativa
  Clone ID: PAT_MRT4530_101769C.1.pep
MAEWSGNANASERSVVWAFGRLELDCAAVLCSVVESSTNSGANKGRKAAVVGRRSLASVGEKELAIPVRGERARQHVRRRSLSTWGRGPPPVQEEELVGRCGEEELRQRGKEELAGMCGEEVCRHGEEELRRRWGGAGVGRKKNSPAWEMNSSVAPR

SEQ ID NO: 104434 - protein, 74 aa, Oryza sativa
  Clone ID: PAT_MRT4530_10176C.1.pep
KKIKGKCTISCHYQLNIMCIWLNISSKVESLISLRGTTWRTVLLRNVFLHYGAQIVGHDNHSVITQKKASSWSS

SEQ ID NO: 104435 - protein, 89 aa, Oryza sativa
  unsure (1)..(89): unsure at all Xaa locations
  Clone ID: PAT_MRT4530_101770C.1.pep
XKSMFXSAQGXYIAPXKXEXXYXKCKLXXXSFIHXDSLXSSWVXVVAXXPDXLKAWAASEGIQHXXFKXAFXLIRXERSXVLAXMDSLG

SEQ ID NO: 104436 - protein, 45 aa, Oryza sativa
  Clone ID: PAT_MRT4530_101771C.1.pep
ATTTHAPLRQLVGSFVAALLFFFFFGSKMLKMHSSLQMIQLYIRC

SEQ ID NO: 104437 - protein, 63 aa, Oryza sativa
  unsure (1)..(63): unsure at all Xaa locations
  Clone ID: PAT_MRT4530_101772C.1.pep
YHRVPRLPLASACAAGAWLGCCVSGGGRAGSAAWCHATAVGSMSTSLELEAIHXWTSKLQGAY

SEQ ID NO: 104438 - protein, 381 aa, Oryza sativa
  Clone ID: PAT_MRT4530_101773C.1.pep
MAGVAALFASPAFPFPSTSSVSSCSCRFRPAVARAPRHQPPGRRVTRRFDEVEGVSKRRRGIGGGGGGGSQASSSSSRKDRGLAVDFKESQVSDFEDLEEDKFLNAVVKVYCTHIAPDYGLPWQKQRQHASTGSAFMIGDGKLLTNAHCVEHDTQVKVKRRGDDKKYIAKVLARGIECDLALLSVENEEFWRGTEPLQLGRLPCLQDSVTVVGYPLGGDTISVTKGVVSRIEVTPYAHGTSDLLGIQIDAAINPANSGGPAFNDHGECIGVAFQVFRSDEAENIGYVIPTTVVSHFLNDYQKNGKYTGFPCLGVLLQKLENPALRESLKVPSSEGVLVRRVEPTAPASKVLRKGDVITSFDGVAVGCEGTVPFRSTERIAF

SEQ ID NO: 104439 - protein, 412 aa, Oryza sativa
  Clone ID: PAT_MRT4530_101774C.1.pep
MEALLKLEKVQRVLSLMGSRGLSGSGSDSGASDGGGGDRFLAHFLLFLILHKNDYDILHYSKEACLNQYFSRLGSREGERTVRVLNTVLTARTEIAKEGKPEEWGPSCQVQPFDSLSMEKKALLVSDLLRKVNVDTLEEVCHLGSIECTSGEGRIIPASTYVNKAQSIFKFLPVLCFTESYIYQLDDLNEYNLQMVPGNDASLTVLERENRTSNEASLTGMLNVLDDLLQRQGLMTDQLERKLCQALSRNDKISIEDVMEAIHLKSFDYRVLNLLMYRLTGQQVNEVHMEFLSISEFLVEISDDLYDYEDDVMNNTFNILRMFAAIYGPSEAPKMLAKCIGEAEEKYERFSKKLDPTLSGSYWRRCEEATKEGGKMSGHAYGTWNIPPLIRDEEFFRLERSNKRDASAITIT

SEQ ID NO: 104440 - protein, 166 aa, Oryza sativa
  unsure (1)..(166): unsure at all Xaa locations
  Clone ID: PAT_MRT4530_101775C.1.pep
EXXGKGKXDAGFXGXXGQLGERGMYXQGGXXGVXPRVFPQSGXCKNDGPSGVVIEIQXRXELGNRPPXEMGLFPRXGSXRVQXIXSQXVWTXRXXNXRXXRXXXTXGXSXKXRIGXFXXXXNNGHVLGGVKTRTFRWHESSPQRXXXXLRQQXAXXPRRXQTMXXX

SEQ ID NO: 104441 - protein, 405 aa, Oryza sativa
  Clone ID: PAT_MRT4530_101776C.1.pep
MCCGVHLRQDAPLEAVNGGGRRTMTIATDAQIRQLSRGRPWPAAGGGPPPRLNKSGSSAAGGRGHAHRRRRRPSRHSSAGRSPRASYRVCQRQQGRRARSLELAPAAVGVAAPNLPHALAQPPAAWDTELGEARAERVAVYSGSVVGGSPEAEQDSTLAQSPVTQRPRPLPSKEPPHKLGRGSRDKVQQFMTITGASEKVALQALKASDWHLEGAFDFFYSQPQISLTNSRHLEDLYNRYKEPDVDMIMVEGVSQFCTDLQVDPQDIVMLVISWHMKAATMCEFTRQEFIGGLQSIGVDSIEKLREKLPSLRAEIKDDHKFREIYNFAFAWAREKGQKSLALETALGMWQLLFAERHWPLIDHWCQFLQTIDPQLSNYDEEGAWPYLIDEFVEYLTENGFVQLRK

SEQ ID NO: 104442 - protein, 250 aa, Oryza sativa
  Clone ID: PAT_MRT4530_101777C.1.pep
MHKLGRGSRDKVQQFMTITGASEKVALQALKASDWHLEGAFDFFYSQPQISLTNSRHLEDLYNRYKEPDVDMIMVEGVSQFCTDLQVDPQDIVMLVISWHMKAATMCEFTRQEFIGGLQSIGVDSIEKLREKLPSLRAEIKDDHKFREIYNFAFAWAREKGQKSLALETALGMWQLLFAERHWPLIDHWCQFLQVRHNKAISRDTWSQLLEFVKTIDPQLSNYDEEGAWPYLIDEFVEYLTENGFVQLRK

SEQ ID NO: 104443 - protein, 164 aa, Oryza sativa
  unsure (1)..(164): unsure at all Xaa locations
  Clone ID: PAT_MRT4530_101778C.1.pep
RTGGSFDGSGRGRCVTGDCASVLSCSASGEPPTTLPEYTATRSAPDPXAGDDFLDLSLVDGFNVPPCRXLPDDQRRRCRGHHGEVRASPSSVSQAAGGCASACGKFXRGDTNCCRGQFEASCPPTSYSMFFRGLCPDAYSYAKDDXTSTFTCPAGTNYRVDFCP

SEQ ID NO: 104444 - protein, 62 aa, Oryza sativa
  unsure (1)..(62): unsure at all Xaa locations
  Clone ID: PAT_MRT4530_101779C.1.pep
ARDQREPLADKICSLDMVFPELTTLRSYDLXQPGWMSVAWYPRYRIPTGPXLCDLDCRFLKL

SEQ ID NO: 104445 - protein, 44 aa, Oryza sativa
  Clone ID: PAT_MRT4530_10177C.1.pep
LLFPFLISNFFFIFKSVPQCFHILTFYTRTSLIFRTSSYLNFSY

SEQ ID NO: 104446 - protein, 186 aa, Oryza sativa
  Clone ID: PAT_MRT4530_101780C.1.pep
MTTAARTSATVLSRRLPSNPTPGRRRRRHLPLRHGAPPTTGRCRSIGGLAEYVPEHGLSPASDGSGMVLSLPRTLTPASRRFLETDDEHRDGPELFVVFTAVEVELCDDGDAQGIEYLGYQIPGVDEGAQHASEEEGEPSRTNREQSREALPKNLISAFSRCMTSKAEVPEICSPDRRCTPASGME

SEQ ID NO: 104447 - protein, 210 aa, Oryza sativa
  Clone ID: PAT_MRT4530_101781C.1.pep
MVHGAVAAGEMRSERRWSSPASSSVSPSCAAPNAFSLRDASPPSPASSTNHPHCRRVHLLPRHTAPILVLPSHLNASPSSLRGGHNEKVGTTRRAAPPSSLTRWHRWLPTSSSDIGIGGREKNQGHFCPKWHFGEAVLVGSGILLPGTPNVIFVGTEEDGIFAVELDSLSVRKVCELDKSQDLFFPFVSYYAESFLLSLSSSKLPAPAAN

SEQ ID NO: 104448 - protein, 80 aa, Oryza sativa
  unsure (1)..(80): unsure at all Xaa locations
  Clone ID: PAT_MRT4530_101782C.1.pep
FFFFFFFFFFVLNKMDTQSFLWMFVSKXLNYIMNEAPAGHYAKCPQTRMEXNINLVSSPNXYNGMQLLDLTYNMIKLACS

SEQ ID NO: 104449 - protein, 147 aa, Oryza sativa
  unsure (1)..(147): unsure at all Xaa locations
  Clone ID: PAT_MRT4530_101783C.1.pep
KYADDTLIFMEASAPXLFALKALLNSFALPSGLKENFAKSCMIPLNISEEKSCMLASTFGCSIGTLPFTYLGLPLGTSRPKVVDFSPLTDRIERRLTASSAFLSYGDRLTLVNSIMSSLPTYYMCSLSLPDGDITTSDRGSRACAFK

SEQ ID NO: 104450 - protein, 478 aa, Oryza sativa
  Clone ID: PAT_MRT4530_101784C.1.pep
MHTLPIKMKRGLLILWSLFCLSVANTAARNKANKPLEFDQLKIPSKYGSEKQDDLREKDRVRAMPGQMEEAEFNQYAGYVTVDAKAGRALFYYFVEAPHDPLKKPLVLWLNGGPGCSSFGAGAMLELGPFSVRSDNKTLYNKQHAWNTVANMLFVDVPAGVGYSYSNTTSDYYNIGDKKTTDDAYIFLINWMKKFPEYQGHDFFITGESYAGHYIPELANLIVSNNRAINSTNIKLKGVAIGNADLHDNVTLRASFDYYWRHAMISDRVYRAIQTSCGFNETYTNDCQNAMNLANKEKGNVDDYNIYAPQCHDASNPSPSGSSDSVAFGDPCTNHYVSSYLNNPEVQRALHANTTGLNYPWMDCSGLIFDNWKDSPETMLPSIKTLISSGTRIWLYSGDMDAVCSVTSTQYALDILGLPVETSWRPWRIDNEVAGYVVGYRGLVFATVRGAGHMVPYYQPRRALALLSSFLEGKLPPE

SEQ ID NO: 104451 - protein, 80 aa, Oryza sativa
  Clone ID: PAT_MRT4530_101785C.1.pep
GFFTKPGYLHWSNQQDYALENIGCMGYIQTHVRLRGIHYGYPKATEHLRHTRIWSNRSRSTMPIGPEENQRRRFMPVYVR

SEQ ID NO: 104452 - protein, 82 aa, Oryza sativa
  unsure (1)..(82): unsure at all Xaa locations
  Clone ID: PAT_MRT4530_101786C.1.pep
GTFSLNCFFLSSWPPNIXILSXXTFSSSXXXXQPSPFVHWVGGTKXISVIPKGIHGXCMGXFKSSPRQTLXNCPKCFLWDSR

SEQ ID NO: 104453 - protein, 80 aa, Oryza sativa
  unsure (1)..(80): unsure at all Xaa locations
  Clone ID: PAT_MRT4530_101787C.1.pep
FGKTVFDGVLRPGQLLIIPXQHYAVLKKVSXREGCQYIXAIKTNANAFVSLTHLTGKNSVFSCLXVDVVANAYRISREQS

SEQ ID NO: 104454 - protein, 66 aa, Oryza sativa
  unsure (1)..(66): unsure at all Xaa locations
  Clone ID: PAT_MRT4530_101788C.1.pep
CSFDHXRSLEVNRNGANDFNIKNDSXYRKGVAGDWANYLSPEMAAQLDXVIDDELRSXGFSFAGGR

SEQ ID NO: 104455 - protein, 58 aa, Oryza sativa
  Clone ID: PAT_MRT4530_101789C.1.pep
NKIFSLTHATCTYINQSKIRNTMTLLICQGALRTLATSQRKSHHQAHALIKRHKSHSA

SEQ ID NO: 104456 - protein, 73 aa, Oryza sativa
  Clone ID: PAT_MRT4530_10178C.1.pep
HHPSIHLVIKLVIDLNLNINVCANCCACCCCVCDFVGSVRPGLRLHVERHPHHVRLYCTLCKRIGERSHARPS

SEQ ID NO: 104457 - protein, 380 aa, Oryza sativa
  Clone ID: PAT_MRT4530_101790C.1.pep
MATPRSPSTRGDALLDSAPLLGGGGGGGGGRRRGGALRRPSLRGAARLLRRGGRRAMREPSVLVREAAAEHLEERQADWAYSRPVVALDLLWNLAFITVAAVVLVLSRGEDSPMPLRTWVAGYALQCVVHMVCVAIEYRMRRGQRDRAPASADEERGSDGSSSSSDDDVTEDDRRGSCTDCVSIAKHLESANTMFSFIWWIIGFYWISAGGEDVIRDAPQLYWLCIVFLAFDVFFVVFCVALACIIGIAVCCCLPCIIAILYAVSDQEGASEDDIRQIPRYKFRRTDEPEKQTADETGPFGGIMTECGTNQPIEKVLAPEDAECCICLSAYDDGAELRELPCGHHFHCACIDKWLHINATCPLCKFNIRKSGSSSGSEEV

SEQ ID NO: 104458 - protein, 70 aa, Oryza sativa
  Clone ID: PAT_MRT4530_101791C.1.pep
GIRVRYPTTEKPMGRKSFQPLWQKYKVDIAMYGHVHGYERTCPVYEGELYTHGYLPEHSFDFFTINDKLK

SEQ ID NO: 104459 - protein, 32 aa, Oryza sativa
  Clone ID: PAT_MRT4530_101792C.1.pep
VITGTNVMRGSGSERWEPTSDRQISHPQPQEI

SEQ ID NO: 104460 - protein, 253 aa, Oryza sativa
  Clone ID: PAT_MRT4530_101793C.1.pep
MKLAEKEGFGFGNGRPGSASALINHTLRLPPTHPRIVRVSNSPIFSCKIIEISREIIHPPMADRRAYLKRCVVALAAAAAEDAGEKIALMPCTAAHCVEQFAADKAMAARGSKRSGGTLVPVDGEEAILVPRGKLALSKKLVDKILSLERRELPHVADLLKDGGGGGDPNPSEAEKLLRKSVREMDRYNKKREDKLAECQAIIRRVRHGKGGYAVVDNNLEMRVAVSKAEGIFLDDAEMTDLIIDEGFNLASN

SEQ ID NO: 104461 - protein, 598 aa, Oryza sativa
  Clone ID: PAT_MRT4530_101794C.1.pep
MDRRTFHILCDMLRDVGGIEDTRNMPLEESVASFLYILSHHLKNRTIGKFFYRSGETVSRHFNLCLLAVLRLHQLLLKKPEPIPEDTTDDRWKYFKNCLGALDGTHIKVTVPTRIKGRYRSRKGDIVTNVLGCYYLVDAGYTNADGFLAPYRGQRYHLGRFTARNPPRSAEEYFNMRHASARNIVERSFGRLKGRWAILRSPSYFPIKTQCRIIMACALLHNLILQKMSSDPFEDEDEDEDEDEIPLDILEGELAEPEFISAISTSDDWTNFRNTLAHGIYGASWKLKHFLENVLAKKLPSSGLTAVPHIESRVRHFRTKFGAIEVMLTKSGFSWDDNRKMIQCEKQQNDDHCRKNNEAKGLYGVAFPHYDTLAAIYGKHIATGEGAEGLGEAVANMEKEIVQDIQDEEDEEDEERVSREMPRRSIDSAAARRSIDSATPRQSIDSTASSSKKRKKDSNKLKNTLSSDPFMDVFANVQGDLRDVTKHVGAMVASMQREAEIQEKAMAEEDPLQKIQNEAILECQKLGLTGTEVVNAAAAFVKVPAQMSMLLALPESLRREYVLKILAGNSLDQSCSVANATGNISLYFVIINYEAKKN

SEQ ID NO: 104462 - protein, 266 aa, Oryza sativa
  Clone ID: PAT_MRT4530_101795C.1.pep
MAMAKAKLISLSFADKCRVPLAVNLNSPSSSFLFLVLPRPIPGRLTTLLRSLGKLPPRIAMTGDVLFMKRSKVPVIADSLKKAILKEHKAASEASHSVSAILSSASAACRSRSEGLLSLLDQGSSYNILKFEIGSCVYIDSLGSSHKVDLDNFEPPKADLLLPFSARIIDGINRSDPRRRALIFFCFEYFNVTATDALLLSIDHHGFDVLAKVPEKAVLLDVPRQYVWREFRFSFKEAAKDIEDFCRMLVELEEEALQSMKSYSGL

SEQ ID NO: 104463 - protein, 57 aa, Oryza sativa
  Clone ID: PAT_MRT4530_101796C.1.pep
APSRGRGVGGGGGGGKELAHGAGGGLMTILTTNVRMLMNHVCKSYTDYNCMEHVHQP

SEQ ID NO: 104464 - protein, 116 aa, Oryza sativa
  unsure (1)..(116): unsure at all Xaa locations
  Clone ID: PAT_MRT4530_101797C.1.pep
VWXIXGIXNSRPIVPAXLTVEDLLKQIXYLLRSKWVPCLEFSKVGFVYREEPQVSRDTXXGRYXXTMWKLPMFGCTECHPKXLKEAPXKXKKAYPDAXVXNSASNVRAGLQFLASS

SEQ ID NO: 104465 - protein, 70 aa, Oryza sativa
  Clone ID: PAT_MRT4530_101798C.1.pep
MAASSGPDPGAGGGHHGWDLAGRRRGKQWGAVGEKFLAFWRGRGVVVTGNAHARCAPDHLGRPIMGTGES

SEQ ID NO: 104466 - protein, 56 aa, Oryza sativa
  Clone ID: PAT_MRT4530_101799C.1.pep
MSHLTQLKVASWSPTHAAPKIKVADGTVLQPPSETKHIAGRRGEERRGEERRAREA

SEQ ID NO: 104467 - protein, 64 aa, Oryza sativa
  Clone ID: PAT_MRT4530_10179C.1.pep
SSTRSLPRAPGKSPCQAHIVHERPRCPETLHNSQACHRSSTTVSRISKALSITRGLVSKLSIEG

SEQ ID NO: 104468 - protein, 39 aa, Oryza sativa
  Clone ID: PAT_MRT4530_1017C.1.pep
FLWASLVRLMDSLQTMLEREPFFPGLGERAQETEFSKLF

SEQ ID NO: 104469 - protein, 83 aa, Oryza sativa
  Clone ID: PAT_MRT4530_101800C.1.pep
WAITTFSHKKWVRLVWRTAIGDGRSRRLRPSSRPRAVVREACRAYWRRGEAGVSSSASLRAKAVNCVADGLERPSSRRFRWRI

SEQ ID NO: 104470 - protein, 64 aa, Oryza sativa
  unsure (1)..(64): unsure at all Xaa locations
  Clone ID: PAT_MRT4530_101801C.1.pep
FPFGGRGFLXPLAPKVXNGAGGPKFGTAAGFXXXXIAGXLISHXEXRGPVMVXSSPLKAXAFDN

SEQ ID NO: 104471 - protein, 113 aa, Oryza sativa
  unsure (1)..(113): unsure at all Xaa locations
  Clone ID: PAT_MRT4530_101802C.1.pep
RWCASRXPTATQEPRRMHTAARDTVRVVTAARPASVTAPEALRALRRCATPRTRAALAPTTKAGTASARRPTTTFPDWNSGRTSRDAETRSATAMDTASVILAKRSAAARDLE

SEQ ID NO: 104472 - protein, 88 aa, Oryza sativa
  Clone ID: PAT_MRT4530_101803C.1.pep
MSAAAAAAASSPAPRLESKVALVTGGASGIGEAIVRLFREHGAKVCIADIQDEAGQKLRDSLGGDQDVLFVHCDVSVEHDVSLADYAA

SEQ ID NO: 104473 - protein, 71 aa, Oryza sativa
  unsure (1)..(71): unsure at all Xaa locations
  Clone ID: PAT_MRT4530_101804C.1.pep
FTQRYQDVKKVLADTGLAPSEVRVYSPXVQNTLYLMGKAEFNLFAAISYVQLRMPNLQFITFNLGNKVSSR

SEQ ID NO: 104474 - protein, 68 aa, Oryza sativa
  Clone ID: PAT_MRT4530_101805C.1.pep
MSSVSDPQANGDHRPPAAEMEDTGVKVEEADAGETMEGVASIALLPSGAISGHFIRLPDSVCYGLHGT

SEQ ID NO: 104475 - protein, 35 aa, Oryza sativa
  Clone ID: PAT_MRT4530_101806C.1.pep
FFSLKVSDCLFWVLAYTAKLAYYMCLAFLIFLVSV

SEQ ID NO: 104476 - protein, 107 aa, Oryza sativa
  Clone ID: PAT_MRT4530_101807C.1.pep
MRPLVLRDYFGNLVLWLFPRCDVGELVTRSTHDTAEPIHRAVAGIDDAYFRSFVDFTSSRAVEADGLIPIADTAEVVVRPITVHMQGCRGEISGSYAGIPMYEVVVK

SEQ ID NO: 104477 - protein, 71 aa, Oryza sativa
  unsure (1)..(71): unsure at all Xaa locations
  Clone ID: PAT_MRT4530_101808C.1.pep
ANQPLHFLFLFSSSSRIRSXHWPSRSXSACASGVRVQRRXAXXXAEKTXTGXGRQGXXRATXPLQLXPXGR

SEQ ID NO: 104478 - protein, 604 aa, Oryza sativa
  Clone ID: PAT_MRT4530_101809C.1.pep
MSAARRLAPALRRRRRRSLCSSSSAGSPAAAAPTAASLLAELLSDPGPSASALALLRDTPSLSAPLYSLLAAPSHELTRASLALLLALPARHRVPPPSAPLLSAILSKLLARFSSPEPAARFLAASLAAGAPAPDVFAFNSILAALARVRDVPGMARIYALMQGCASVRPDVVTYGILVNGLCKAGRVGDALRVLDGMSRQDLDIRPDVVTLNTVVDGLCKSGRVQEALAFVEQRMSSVHGCPPNTVTYNCLIDAFCRVGNISMAYELVEKMENEGVPQNIVTLNTIVGGLCRAGRTGAALEFFREKRTVWPEGKGNAVTYSTLVGALLHTNNVGMAMELFHEKMSEGHSPDAIMYFTMISGLTQAGRLEDACSMASSMKEAGFKLDTKAYNILIAGFCRKKRLHEAYELLQEMKEVGIRPDVCTYNTLLSGSCKAGDFAAVDELLGKMIDDGCQPSVITFGTLVHGYCKVGKIDEALRILRSMDESGIHPNNVIYNTLIDFLCKRGDVDLAIELFDEMKEKSVPANVTTFNALLKGLRDKNMPEKAFELMDQMREERCFPDYVTVDVLMEWLPVIGETDRLKRFMQQGEHTASKRIVSDRTSA

SEQ ID NO: 104479 - protein, 1291 aa, Oryza sativa
  Clone ID: PAT_MRT4530_10180C.1.pep
MDVAAAAGVVGGFLQVVFDKYYGSKLEQWAARSGLHGDFLSLKNQLHMVRAMLEAGGGGNAPHNDSLRSLIVELKSAAYAADNVLDEMEYYRLKELVEDTSGRDGGAPSSSARQVVGRILVPAPLLSNPFKRARTGADEALQGQGADTDTPNFDQDAMSSKIKSISCCLEQIAGMVRRIIELDKLVSMASLGHVQPEVVVSLRQTSSFPTETKLFGRDESTNNIINLMLRTDMESRYNNFNVLPIVGIGGVGKTALAQSVYNHQRVVDSFQVRAWACVSDTLDVRRVIADLIDSIDGGQETPKFHRVPSLDATQRTLLRKIEGKRFLIVLDDVWVSSHWEKLCGPFSAGMSGSMVLVTTRQRKIAKAMGTFDSLTLHGLHDNEFWAFFLQCTNITEDHSLARIGRKIALKLYGNPLAAKTMGRFLSENHEEEHWCKFLNRNIWELKQEPDDVMPVLLLSYQHLPLSLQRCFTYCAIFPRGYKFTEQELIFAWMAQGLVPTPGEDQTLEDVGKEYLNELLSCSFFHIIESGHYMIPGLLHDLAQLVAEGEFQATNGKFPISVEACHLYISHSDHARDMGLCHPLDCSGIQMKRRIQKNSWAGLLHLKNLRTIMFSASSSIWSPGSEVVFVQSNWPSTIRLLSLPCTFRKEQLAAVSNFIHLRYLDLRWSRLEELPEAVCKLYLLQVLNIKHCPCLLHLPPRIANLLNFEHLIADEGKHLLTGVPCVGNMTSLLLLDKFCVRKTRGFDIGQLKRLRNLRGLLKVQNLENVDGNEEAAKARLSDKRHLTELWLSWSAGSCVQEPSEQYHVLEGLAPHSNVSCLHITGYRGSTTPSWLASNLSLSSLEYLYLDYCSELEILPPLGLLPHLRKLHIVNMHALRRIGSEFYSSGQVVGFPCLEGLFIKTMPELEDWNVDDSNVFPSLTSLTVEDCPKLSRIPSFLWSRENKCWFPKLGKINIKYCPELVLSEALLIPRLPWLLDIDIQIWGQTVINLRGGCLEVSEINANTSSGPINAVLQLHWLKHVSSFHIWAQDSLSVHPCKQKTEPSACNSEHMVNSLQTSAEKVEVTGYGITDELLSAILENEICPSSLSISDCPQITSLDLSPLRSLKSLVIHNCVSLRKLFDRQYFTALRDLEVTNASSFAEAWSELLGSRYAEWGQVTTSLESLTVDSTLFLNSPLCAVLTSLKKLTIHSDFRVTSLSRQQVQALLLLTSLQDLGFIQCCNLHSLPSELHKIYTLKQLEIDSCPCVESLPNNGLPEKLEKLIIRGCNRRLYTGASMMGSTSTKVHLVDR

SEQ ID NO: 104480 - protein, 376 aa, Oryza sativa
  Clone ID: PAT_MRT4530_101810C.1.pep
MEPDTDKLQSLQINPNKETNLVAVFKNDYVDDEDDEDMDPQVTLGFIEEPEGPEDWHLLLPQHFPNKAGGVPAWLDPVNLPSGKSRCCDFCGEPLRFVLQVVFHLYDKLQVYAPIQCKETAYHRTLFVFMCPSMACLLLDQHEQGKDRAGEKVCSRCRKSSYCSKKHQELHWRAKHKNECHQISGSHNASAIMPDAGKVFAGNIWPEYMVVDETEKVSCFASCENRSELLMEQGQSEEDDMTASLMDQFEVDDDNRCWASFLERISREQDQVLRYCRESTAKPLWVVYSGSLTNAAKPSCIYCNGPLCYEFQIMPQLLHYFHVENEPDSLDWATIIVYTCKGSCDQNVSYMEEFVWVQLSPATTRTNQSTCPPAGL

SEQ ID NO: 104481 - protein, 56 aa, Oryza sativa
  unsure (1)..(56): unsure at all Xaa locations
  Clone ID: PAT_MRT4530_101811C.1.pep
TRTGVTIDPNSLFDIPIKPLHEYQKPVLNLLGAGYRFQKFKGMXAEERHKSVTASG

SEQ ID NO: 104482 - protein, 86 aa, Oryza sativa
  unsure (1)..(86): unsure at all Xaa locations
  Clone ID: PAT_MRT4530_101812C.1.pep
HTGMRPYPIRLLRPLLARARTPAASRGFPPKNCSAQNPRKSATRTQPXLTPFSPSINSPGRPFPFPLSFPPFRNSLFLNISPPFSL

SEQ ID NO: 104483 - protein, 95 aa, Oryza sativa
  unsure (1)..(95): unsure at all Xaa locations
  Clone ID: PAT_MRT4530_101813C.1.pep
TEYRCSTSPSGDPXSISNSGNVCNLPKAKTIQGQQLMRGSGYSSMMYLNMEDYXTGLRAXHHLPPTSNSVGYTTNKAHPTWAPLGPGFQTNTLFM

SEQ ID NO: 104484 - protein, 383 aa, Oryza sativa
  Clone ID: PAT_MRT4530_101814C.1.pep
MGKGEVATRSKSQKSSATQNEQSTPTNPPTAYPDWSQFQAYYNPAGTAPMTPPGFFHPNVAPSPQGHPYMWGPQMMPPYGTPPPYAAMYAQGTPYQQAPMLPGSHPYNPYPGQSPNGTVQTPTSAGGTETDKSGKSKRKTPLKRSKGSLGNLDVVATKNKKAPAKPSASSSNEGSSHSESGSGSSSEGSSTNSKSGSRTKDGSEHGQGNDASNKGATAQSSAVEPVQASTGPVVLNPMMPYWPVPPPMAGPATGVNMGMDYWGTPTSVPMHNKVIAAPASAPSSNSRDVVLSDPAIQDERALAWQKRKQSNRESARRSRLRKQAEWEEVANRADLLKQENSSLKEELKQLQEKCNSLTSENTTLHEKLKELEGEKSNGNWYKE

SEQ ID NO: 104485 - protein, 315 aa, Oryza sativa
  Clone ID: PAT_MRT4530_101815C.1.pep
MKVKFWGKTSHNRGYLPIDTASSKGYLRHSPPPQQQAAVEALVVDIAARVGGGSGSDGEVLIRDVVHDTLFPVAAWFCFGERDVRDLQRVLREFELDVVVEGFGGSMLANLVHWWRLRRFVASGRRQAEVFLPLISQQRRTQHRGEHKFCPYVDSLLDLRVPVGDNAAAGEGKEEHRLSHCALTDDEMVGLVSEFLGSGTESTVSNTFPCRAAACGFMASGEAEGVSPLPRPKEVRMMPFGAGRRYCPSMGLGVAHACLLVAALVREFEGIYVRPRQKRPPVRHVSTVDGVVSIGKYPRLWDVFPQNFTFVVSLS

SEQ ID NO: 104486 - protein, 56 aa, Oryza sativa
  Clone ID: PAT_MRT4530_101816C.1.pep
KWLNTFGIKKLSLTNHYRIVPKCKTLPSGRWAGFELQIIRFQTNCLGWKKTSTDKY

SEQ ID NO: 104487 - protein, 167 aa, Oryza sativa
  Clone ID: PAT_MRT4530_101817C.1.pep
MAEQTERAFLKQPKVFLCPKKTTKGKKPGKGGNRFWKNIGLGFKTPREAIEGTYIDKKCPFTGTVSIRGRIIAGTCHSAKMNRTIIVRRNYLHFVKKYQRQVNLVAGYEKRHSNIPAHISPCFRVKEGDHVIIGQCRPLSKTVRFNVLKVIPAGSKSGAGKKVFTAA

SEQ ID NO: 104488 - protein, 143 aa, Oryza sativa
  Clone ID: PAT_MRT4530_101818C.1.pep
MGGPPFTTQVKGPMETGLSRTRVMWCRAASTSWERHDEPLNRSKEDDTGLMKRSGDAAKGLGLLIDRSETVKMHAHGTGIQSTDAESVDVGFVSLVHKTTRKKGFSSCRIKSNLRQKVKVNMVFEESCDVIAKEESDFAWQDD

SEQ ID NO: 104489 - protein, 47 aa, Oryza sativa
  Clone ID: PAT_MRT4530_101819C.1.pep
FFGGGPKLTGLNFDLSFKKFLPSPKPPFNGPFLFPLKKGPSFKPFPF

SEQ ID NO: 104490 - protein, 370 aa, Oryza sativa
  Clone ID: PAT_MRT4530_10181C.1.pep
MDTDKKLDLLLQLVEGNEKKRVEADERTRAEYLDLKRTVEARIPVVEKKVDELGAAFQELSTKVDVLETVILSALGYPAFTVGTITGTPERRKSAIVIRESRVEGLSLNGSKLLAGRRCRKAFLACFLNCVPFTPCEATEYLGSFPLPNIGVAARSKAFAFFGTELGSEDSAADFRTTGMGPYDSQRMMRGKADTSQVMLSTVKRLRGKIYKRLPRLATKLQAVETFVIPNLRREGSEVSECAPECFSLCSYLLSGYTKRDLRSNEATMKYLLMGGASSSILVHGFSWLYGSSGGEIELQEIVNGLINTQMYNSLGISIALISITVGLGFKLSPAPFHQWTPDVYEGVWFVRQIPTSISISEVFGFCKTP

SEQ ID NO: 104491 - protein, 53 aa, Oryza sativa
  unsure (1)..(53): unsure at all Xaa locations
  Clone ID: PAT_MRT4530_101820C.1.pep
WGERGRGSRGIIPPTXLHAGAAGCGGFGGGGGAWRGRGGGSGGRTGMTEHSCH

SEQ ID NO: 104492 - protein, 165 aa, Oryza sativa
  Clone ID: PAT_MRT4530_101821C.1.pep
MPLLWIEQSSSTAESFTASPAAIGGDSAQAPKTKGVDEARGEEAQLVTNCGSRATSKGEAAASRARRCSELTRSRSRKLAAPNEVFLAVLETALRGDYRTRIERKWGSPDCDGVEDFSRRRRRWHPRSRRIRGGVPRFLVAGGDGEEELALFRAQRVLTRVARGV

SEQ ID NO: 104493 - protein, 122 aa, Oryza sativa
  unsure (1)..(122): unsure at all Xaa locations
  Clone ID: PAT_MRT4530_101822C.1.pep
WCVXGSLMSCFWCLCLPLVFCSSLLGIEVSSMLLLCCCCXLLLCFSCLLVLMCCVDACSCFAMXSALLLLSSVLYLCCLLCVXCIWLSLCLXXLICISASLXLVLLCYAVCIVLCVCLISLA

SEQ ID NO: 104494 - protein, 121 aa, Oryza sativa
  unsure (1)..(121): unsure at all Xaa locations
  Clone ID: PAT_MRT4530_101823C.1.pep
RSSSSREQSREQQSSRAERDERRDETTTTHADDARLRPPVASPVGFRLLXRLLLLLGLTLGLLXFPXDSRESSLRLPHRLAYQTTRRDVATGPGRAGLPGSTTVGWGPETTRPEANNQTLX

SEQ ID NO: 104495 - protein, 95 aa, Oryza sativa
  Clone ID: PAT_MRT4530_101824C.1.pep
GKRRRGEGRERGIRPGRAASPPPSLSLSPPPPPPPYHHHHPPPPHDELLRLLSPAAFVRRRVGREGHLSLGSLPPIGARQPLPPTYGSAYGNGYT

SEQ ID NO: 104496 - protein, 458 aa, Oryza sativa
  Clone ID: PAT_MRT4530_101825C.1.pep
MAPAPAKAQPHVLLVSSPFQSHVNPLLRLGRRLAGKGLSVTFTTALRDGIRVFDDGDGGGGGVRVERLRGGGMWEPDDPRLRIPGDMARHVEAAGPAALEELIRREAEAGRPVACVVANAFVSWAVRVAGDVGLPCAILWIQSCAVLSVYYHYVYSLAAFPSGDEADSSGAVTIPGLPELDMDELRPLRIYTSDQEMWRQMLVGDLGSMTEKAPWVFVNTFDELEHEAVAGLRKHIPLIPVGPLVEPDDGGVDDDDVHGCTAWLDAQPRRSVVFVAFGSLVDIGHDEVVEIAEGLASTGRPFLWVLRDGNRALLPKDALIDACGGDRGKVVPWCEQRRVLAHAAVGCFVTHCGWNSTAEALAAGVPMVASPRWSDQRINTRFVVDVYRVGVRAPATPLTREALRLSVEEVTAGPEAEAMAARAAILGENARAAVGGGGSSDRGVQAFVDRITSGGAEP

SEQ ID NO: 104497 - protein, 109 aa, Oryza sativa
  Clone ID: PAT_MRT4530_101826C.1.pep
SSTDFPIYYSRYNCLGSLLGRCNGVGIMFIYMNALSHDGDCRVVFGSMSEVLRLLNIIIWGYMLWIRRGGPLMVTAQYGYSSARVYNPKLLFLGGYFSVFSPGWMAMTC

SEQ ID NO: 104498 - protein, 692 aa, Oryza sativa
  unsure (1)..(692): unsure at all Xaa locations
  Clone ID: PAT_MRT4530_101827C.1.pep
QEVVQEVWQQKVDSQGPSSILYVKMARAAKKLRHWGQRKISNLRPRLQIANKIIFQLDVAQGNRSLLSQELRFRAGLKGGSXLTLASLERISVWQRARIKXFKEGDANTYFFHMKXRRECVTAQVDYRXLSMNHDGHMARGYIDSVMGVADKENRVMDLQALGLVTADLSDLEPQFTEEGVWSVIKELSSKKAPRPDGFTGLFYISCWAMIKREVKLYNGNKHRVILLPVEGPMMLKDYWPISLIHSFAKLATKLMATRLREXGLGIGVIHTQSAFIRGRAIHDNFMFVEGTAQQFQWCHKTMIILKLDVTIXLVFWGFLFQMLQHQGFGLRWRNXIVELLLTADTSVGINGGRXEPFKPSRDLRXGDPRSPLLFPPTEEDAWPIKNIMNMFGAATGLRTNLMKSVITHIRCDETLVKMVQSILICRFEDFQISYLGXPLSLLRLTKEEAQPPMLAEWKPXLLHSGGQLRLIKTVXMALHFMAGQEEVSGGHCLVAWCMVCMPIEKGDQHKDLYLFGQTLCLQWSVXRQLTSTSDWPWPVPSMKPENGVNKAXFFAAMKYVVGEGKSIDFCRANWLPGGSIESTRPTLFSYVKITGLTLHKELQNHTWVQDIDGTPSNRVIXEYVNLWDAIEXIDGXFSVSSAYNMFCTARRNXSYGKLIWKTRAPSNVRFFMWLAINGRCKRTVVPEVTKH

SEQ ID NO: 104499 - protein, 211 aa, Oryza sativa
  Clone ID: PAT_MRT4530_101828C.1.pep
LVFLSSLSVLSRARGLSLGLLFRSLPSLYRSGGAEAAGSGARGEAAGDGWRRQVETVRPSGGRRHQRRWWRPPLHGSSVRRLRQRVAGGVAAARRRHPFARSDGRKGFRAAPPPNAPVALMLSLPPARVELVHKPDNHAKHFCRHTSPVTRHASCCLLFASKFIYDCLCLTFCIAGSDWEGGNTWVLGLLWGSKTRGREKKKKKKKKKKKK

SEQ ID NO: 104500 - protein, 139 aa, Oryza sativa
  Clone ID: PAT_MRT4530_101829C.1.pep
MKKKSKANSSQQIHHGKIIPAKSRRRRRAGNHDSTSPAARAPTRRGVLPRASVAAASAPHLPGVPLAAQASAAREESTTKRRKKVKGRRNERRGRAGDDEAHGDEDHAVGRHLQARGLERTGPRAVLSCDPNSFALNKG

SEQ ID NO: 104501 - protein, 538 aa, Oryza sativa
  Clone ID: PAT_MRT4530_10182C.1.pep
MELALYPWMIWHVQNENFILDSTRIFMKAFHLLLFQGSFIFPECILIFGLILLLMIDLTSDQKDRPWFYFISSTSLVISITALLFRWREEPIISFSGNFQTNNFNEIFQFLILLCSTLCIPLSVEYIECTEMAITEFLLFVLTATLGGMFLCGANDLITIFVAPECFSLCSYLLSGYTKRDLRSNEATMKYLLMGGASSSILVHGFSWLYGSSGGEIELQEIVNGLINTQMYNSPGISIALISITVGLGFKLSPAPFHQWTPDVYEGSPTPVVAFLSVTSKVAASASATRILDIPFYFSSNEWHLLLEILAILSMILGNLLAITQTSMKRMLAYSSIGQIGYVIIGIIVGDSNDGYASMITYMLFYISMNLGTFACIVLFGLRTGTDNIRDYAGLYTKDPFLALSLALCLLSLGGLPPLAGFFGKLYLFWCGWQAGLYFLVSIGLLTSVLSIYYYLKIVKLLMTGRNQEITPYVRNYRRSPLRSNNSIELSMTVCVIASTIPGISMNPILAIAQDTLFRSCGDVGLMGRDWLPTVRRT

SEQ ID NO: 104502 - protein, 86 aa, Oryza sativa
  unsure (1)..(86): unsure at all Xaa locations
  Clone ID: PAT_MRT4530_101830C.1.pep
MVGCEHMVLRVVLMTIKDRFTSFGCETLAVPPSSQRGQRLYLLYSMVHCGAPDXELGEDKPTGVAGSPCLVFKGVIMIQEGALRWS

SEQ ID NO: 104503 - protein, 103 aa, Oryza sativa
  Clone ID: PAT_MRT4530_101831C.1.pep
IHHKTTSLLVSAPRISSSPPPPQAHSSPPPTPLTISLFSCNSNHFAGLVLVPLLVASHCCNGGRREHLSFLTHSSPWPCSLFALLISLVLERHTHTNTASKLG

SEQ ID NO: 104504 - protein, 128 aa, Oryza sativa
  Clone ID: PAT_MRT4530_101832C.1.pep
TAARRSLLPSVSCPRRAPFFSPWAAELRFAPRGGSGPPPRLGPTSFVFPRGCQPLPPFFFPPTAGRPVDFHPQPAPLFLRPGAVSLRLVPVGTQEHYVYSSFRFFVATHRRCRGGEHDAGCTDSQLQI

SEQ ID NO: 104505 - protein, 94 aa, Oryza sativa
  Clone ID: PAT_MRT4530_101833C.1.pep
RNCCYGWGILDFPASIEACLALAVIFVIVFAILGVAYGFFAATVAVQRILQRHYHILTKRELTKEYVVEDLRGCYTPPKMDPEQEQRLRTLQLM

SEQ ID NO: 104506 - protein, 90 aa, Oryza sativa
  Clone ID: PAT_MRT4530_101834C.1.pep
VVSSYFLLWGTIIRGSPGFFFYYQKTRAPSRLGQFTNKVLVSGRAVPNRSPIFMSNIYGLQKGQNLPIKATPRVKMEIPPLNGLISFPPF

SEQ ID NO: 104507 - protein, 149 aa, Oryza sativa
  Clone ID: PAT_MRT4530_101835C.1.pep
GGTWSQRLPRHLHGGRPGAGGRLRPPPAALGPRRRPGARPPRRRLGCLPLARQGVGHVQGPQQAEAPVQADPRPRHCRRRRAPLRPRQPRARAGAARGALRRTSPSRGARRHRRGVPRSGLLGESRVLGRAQRPPPRHCCTLVPGGAHP

SEQ ID NO: 104508 - protein, 133 aa, Oryza sativa
  Clone ID: PAT_MRT4530_101836C.1.pep
MVQKIVIKVHMSSDKCRRKAMALAASTGGVVSVELAGDDRSKVVVVGDVDSIGLTNALRRKVDGSAELVEVSDASKKKEEEAKKKEEKEELVYYHHGYGYYHPGGVYHHHPGYGPHGCPCGCNPSPDSTCSIM

SEQ ID NO: 104509 - protein, 67 aa, Oryza sativa
  Clone ID: PAT_MRT4530_101837C.1.pep
MGALSILKDNKLGLEVVEYGTLQVLYVTTNVILGQLYGTSNLNFHKIWDVKILEKYWLLPERALLPT

SEQ ID NO: 104510 - protein, 77 aa, Oryza sativa
  Clone ID: PAT_MRT4530_101838C.1.pep
MATRSSGGDRSRVSASKLIPRRVGSGLVERGREHKGEEGRWEEGATGRRGARERRGAVRERREAVGGRGRVQVGRIK

SEQ ID NO: 104511 - protein, 43 aa, Oryza sativa
  Clone ID: PAT_MRT4530_101839C.1.pep
FVTLALAWTDGGALNYHGGVIRKHKVNRITPTIAHVIKLRTHA

SEQ ID NO: 104512 - protein, 688 aa, Oryza sativa
  Clone ID: PAT_MRT4530_10183C.1.pep
MAVADLAFDIPDLPTAEFTPPEAGTIIVISPEASVVYVIATPMLVIGRSTPPKAHSDRFGAPERVGGSWCATRDKTRSGNGVATKDVVIDDETGVSVRVFLPVDAAAAAAAAGRRLPLVVYVHGGAFCTGSASARMFHDYAESLSARAAAVVVSVDYRLAPAHPVPAAYNDAWAALRWAASRRLSDDTWVGDYADLSCVFLAGESVGANIVHNVAVRAGAATRNAGEVFDDDDDIDIEGMILLQPYFWGTERLPCETPDACWRTREPPPMLLPERIDALWPYVTAGNNNNGGDDPRIDPPAEAIASLPCRRALVSVATEDVLRDRGRRYAAALRGGAWGGEATLVESRCVEHCFHLLPEFGSHAETGVLMDRVAMFIAKGKTPPPISMLMEEERATKKTRSSAVVPACWRVPRGPRCTAQAVVGLRRAGFGVGNMIRLPSKAQKYHRVPAIALRKELEHGRGKDQHHMNTNKITSPSTSSRSYARTYKDGLVRKRLPLVCLRPWRRVLYRERLRAPRCSTATRSHSPRAPRQSPSPSTTASRRSTPVPAAYDDAWAALRYGSAPPAVAPAAARTKASTSKVGWGTDRLPSETPAAWRATALKLRRPEMRDGAWGGGATLVESDGEDHCFHLSSKFNNPNAVALLDHVVAEFIAMKGWIQPEGGEVSCPHYWREDYKSLHENPIKIFYM

SEQ ID NO: 104513 - protein, 423 aa, Oryza sativa
  unsure (1)..(423): unsure at all Xaa locations
  Clone ID: PAT_MRT4530_101840C.1.pep
MALTAAAASGGDAHDDEYAKLVRGMNPPRVVVDNEACDEATVIRVDSVSSHGTLLAVVQVIADLGLVIRKAYFSSDGSWFMDGQSLAAVSXFEFLLNSNPRQESAPGFNVTDRDGNKVLDDQTISYSPNGTSAVLDRNLGIXINLFVDLWFGWLIDFXTLEADDWYYPEVRNTVGIVPAEEYTVIELTGTDRPGLLSEVCAARAGMRCAVRSAELWTHNTRVAAVVHVTDDGGSGGAIEDEARIADISTRLGNLLRGQSGVRAAAAAAPGGLTHKERRLHQMMFDDRDYDGGGGAASSSPRGRSPTPATEVSVTPCAERGYTAVVVRCRDRPKLLFDTVCTITDMGYVIHHGAVSSEPRGGAYQEYYIRHVDGDPVRSEAERQRVVQCLEAAIERRTADGLALEVRTGDRAGLLSDVTRIFRE

SEQ ID NO: 104514 - protein, 71 aa, Oryza sativa
  Clone ID: PAT_MRT4530_101841C.1.pep
REVGGGRRGRASLRRLLTGIPPCAQIHRVDQSAGSPTLVPSMPLPPPPPPPPPPRSISMQPPRGDRPTDLG

SEQ ID NO: 104515 - protein, 66 aa, Oryza sativa
  Clone ID: PAT_MRT4530_101842C.1.pep
FFFFFFTKCIWPLPRGFCILEVLLFQTNKGSSHGITSQARWLHRCSFKLCCVGHLTFPLLGEKKLF

SEQ ID NO: 104516 - protein, 138 aa, Oryza sativa
  unsure (1)..(138): unsure at all Xaa locations
  Clone ID: PAT_MRT4530_101843C.1.pep
LGPVSWVGGXXLXVGSSXXLXXXLWVRFLLGVXGVLWXLXXVPRXLXVLPXRVACLRRRCLXXRRPRRGXLPRRAAGXAGCRGXLSASSXAASFPGXXPPLGAPRRXCXXGRXGSVLVVVRGLVPFSPPCLXGSXPCF

SEQ ID NO: 104517 - protein, 552 aa, Oryza sativa
  Clone ID: PAT_MRT4530_101844C.1.pep
MELSLSARLALPLSPAAGTARPRRPAAFACRCCSGGASHDGTTRRRWLASLLAATGAAVGIGVAGGDADAVSTSRRALRSAKIPESEFTTLPNGLKFCYRVTGRQTILCYFPFSECRVTSEALSRYYDITVGSGLKAVKGSRVAVHYVAKWKGITFMTSRQGLGVGGGTPYGFDIGNSERGNVLKGLDLGVEGMKVGGQRLIIVPPELAYGKKGVQEIPPNATIEASDSSSEVSVNRVQDDQRMMMEDVNSLKRMVSALEEQAASIESQFHDYCDMKEQESTYQKMQIMCLGMKLEQLESQNQRLEAAAAEIRASAEEFATMRARFDAMQSKSKKIWKKNKQDLDAIDERVLALDAREAEMATRCQGFEQFMEEMKQLTLQLQKEKGTNNENVEVIVERSMRKLGSSGRDVLDGLEALRDRWAADMEEMIYLGWITAWLQHDLLVLDGGEVGTPAAIIGDETPAQPRHKGEKVVVAVAPSNEVELCKAASASSSSSSEMRGAAEPSCMMGFVAGGCTSIGRPRLLRRLRGWAGGKGGSSRRQCKIEFPTSPM

SEQ ID NO: 104518 - protein, 423 aa, Oryza sativa
  Clone ID: PAT_MRT4530_101845C.1.pep
MAEERESFEGQWAPSDVTEENLKEMVAHGVLPAKEIIGWRPAYGEMFPTPDTHEVVEFALMKSDPPIAQRRSPRRQTGQAGGGPKIRSDTQPNTSQSANQSDFRKRKLVLSDDENDDAEKAGSKGVTGKQPRQANPKKKTSSRPMPKIRKSSRSFWKRPEPTDTETGPSKETGATAEDRLSDNQPATDNVETSNEPPTGNQSAEAGVGANQEPPTRNQSGTEQNNDIPEVEAQADSPPKTSAGVDSGTNSPVRAPMIGDEEEVLRIQSAEDSRPPILVKWWDDEMQPQGIVINKQKEDEEVCLLKKTLGQATRLVNAQFDVLVNKIKKLEGARDEVANAATPLVQAMFFNNNGPSSLDVVEIFDKLRATPDTYFKNIKEAGSMGAGLALAMTKSLYPKIDIDAVDGFEDGTSEEAALDLISDA

SEQ ID NO: 104519 - protein, 247 aa, Oryza sativa
  Clone ID: PAT_MRT4530_101846C.1.pep
MSRPPHPRCFPTRLTRALTGMAASARAVFPGAVGGAGIPPARTPPHRAGKRLALLLVSRHQISITPSHSTHHISISKQQQQKQIDRSIAMSVVILDGSTVRGFVADDDAFARSVDARFEALDANGDGVLSRAELRRALESFRLLDGAGFGSAEPAPLPAEVSALYDSVFEQFDADHSGAVDRAEFRDQMRRIMLAVADGLGSQPLQVAVDDEGGSFLLEAAEHEAASIAAKIDAQRAADAAAAADAK

SEQ ID NO: 104520 - protein, 450 aa, Oryza sativa
  Clone ID: PAT_MRT4530_101847C.1.pep
MDRMLKLKEQGLQGEQITRHFIKSRLAPINERSRAAFEFDGKHDPNREDPKSLEFKVMNERMYKIFSNAIVVSYSHLLPVVPYNAFNPPPPSDFRKRNLVLSDDENDDAEKAGSKGVTGKQSRQANPKKKSSSRPMPKIKTGPTVENRPSDNHPATDNVETSNETPTGNQSDEAGVGANQEPSTGNQSGTEQNNDIPEVEAQANSPPKKDANVNPGSSSPVRVQGPARPRPEVITGAMIGDEEEVLRIQSAEDSRPPILVKWWDDEMQPQGIVINKQKEDEEVCLLKKTLGQATHLVNRIHLRNEAKTATLEKLVPHLGTLEATRDQLREAKELARKTEHDLRDRIAELQDSNFELSGSSKGNTVKASKISELEKRIQALEKDKAELAKQRDSALKDVEDGTSEEAALDLISDAQKAADKIAADVVERFQDNDLKPTGSDNSDDERTESN

SEQ ID NO: 104521 - protein, 53 aa, Oryza sativa
  Clone ID: PAT_MRT4530_101848C.1.pep
ERVERDGWQTFWLVVGGGKKKRMEICLYWSVKIKHRCIAIKLFYFFICFILFC

SEQ ID NO: 104522 - protein, 494 aa, Oryza sativa
  Clone ID: PAT_MRT4530_101849C.1.pep
MSATAFVRTLRDIALSLFQTATPEFALMKSDPPIAQHRSPRRQTGQAGGGPKIRKLVLSDDENDDAEKAGSKGVTGKPRQAHLKKKTSGRPMPKIRKSSRKPSDIDPSGKGPKPTDMETGPSKETGPTAENRTSDNQPATDNVETSNEPLTGNQSAEAGVGANQEPPTGNQSGTEQNNDISEVETQADSPPKTSVGANSRTNSPVRVQGPACPRPEIITDTDKFVVQRIHLRNEAKTATLEKLVPHLGTLEATRNQLREAKELARKTEHDLRDRIVELQDSNFELSGSSKVQASKISELEKRIQALEKDKAELAKQRDSALKDVEDRKIKSQAQFDVLVNKIKKLEGARDEVANAATPLVQAMFFNNNGPSSLDAVEIFDKLRAAPDTYFKNIKEAGSMGADLALAMTKSLYPKIDIDAVDGFADGTSEEAALDLISDAQKAADKITADVVERFQDNNLKPTGSDNSDDERTESNCLCILMIMMMMVEAQFVQY

SEQ ID NO: 104523 - protein, 47 aa, Oryza sativa
  Clone ID: PAT_MRT4530_10184C.1.pep
LAGCRSATPRTPSCLLYASTRPVMLAGASPDAWVVSGNFRFRKMFIF

SEQ ID NO: 104524 - protein, 490 aa, Oryza sativa
  Clone ID: PAT_MRT4530_101850C.1.pep
MATQSRKRQEQSRLFLGSSCRRRAGKDDEQQQLFLQPLPERMEAAGRRPRPSQTHTYAGTPPARRSATAAATACAVSLCGKNGRVACDLHREFALMKSDPPIAQRRSLRQQTGQAGGGPKIRSDSQPNTSQSANQSDFRKRKLVPSDDENDDAKKAGSKGVTGKQPKQANPKKKTSSPPMPKIRKSSRKPSDIDPSGKGPKPTDTETGAPEQNNDIPEVETQADSPPKNDASANPGSSSPVRRIHLRNEAKTATLEKLVPHLGTLEATRDQLREARELARKTEHDLRDRIAELQDSNFELSGSSKVQASKISELERRIQALEKDKAELAKQRDSALKDVEDRKIKSQAQFDVLVNKIKKLEGTRDEVANAATPLVQAMFFDNNGPSSLDAVEIFDKLRAAPDTYFKNIKESGSMGAGLSLAMTKSLYPKIDIDAVDGSADGTSEEAALDLISDAQKAADKIAADVVERFQDNDLKPTGSDNSDDERTESN

SEQ ID NO: 104525 - protein, 697 aa, Oryza sativa
  Clone ID: PAT_MRT4530_101851C.1.pep
MDLNASPLPEEDEQPYEQQVEVDFAQEEHVESAVATMRREREERRKKLKREQQDEGSRLHSQQIRNDYAPYNRAGRGRIKEAPDGWMNCPAFGEPIDKIIPSKVPLDETFNDLVPPGKRYSSKQVVNKQRKAGREIAILKFFCETCALTAPPLVRNVHIIGMIGLVIDLTNTTRYYSPAEWTRQGIKHVKIPCKGRDAVPDNESVNWFVYEVMMFLDRQKQSKNPKYILVHCTHGHNRTGFMIIHYLMRTQVSCVAEAINIFAKRRPPGIYKRDYIEALYSFYHEVPEHMITCPSTPEWKRSSDLDLNGEAKQDDDDENGDLAPVHNEVEDKVITNDDVLGDAVPYDQQDALRVVCYRLLEMPPVRGHAQFPGSHPVSLNSENLQLLRQRYYFATWKADGTRYMMLIMRDGCFLIDRNFCFRRVQMRFPHRNLNEGLHEMTLIDGEMIIDTVPDSGLKRRYLAYDLMALDAVSKTKLPFSERWRLLEDEIIRPRYYEKKQFESGVKSNPMYKYDMELFSVRRKDFWLLSTVTKLLKEFIPSLSHDADGLIFQGWDDPYVTRTHEGLLKWKYPSMNSVDFLFEVGGDNRQLVFLYERGKKKLMDGSRIAFPNEDPSSISGRIVECSWNKEEGCWVCMRIRSDKSTPNDINTYRKVMRSITDNITEEKLLEEIHEITRLPMYADRIKQAQAKMAQHRRR

SEQ ID NO: 104526 - protein, 655 aa, Oryza sativa
  Clone ID: PAT_MRT4530_101852C.1.pep
MTEERESFESQWAPSDVTEENLKEMVAHGVLPAKEIIGWRPAYGKMFPTPDIHEPQPNKSKPCVVGGAGFQLRGTLSQKYFSMPFKTSNKGWHANWFYVQNPEPVLPGYSCLPPVYQDTWNSLPIGDEAAQALALMDRMLRLKEQGLQGEQITQHFIKSRLAPIKERSCTAFEFDGKHDPNREDPDSLEFKVMKERMYKIFSNAIVVSYSHLLLVVPYNAFNPPPPEFALMKSDPPIAQRRSPRWKTSQASGGPKIKPADQSDTSKLTNQSDSRKRKLISSDDEDPSGKDPTSTDTETGPSAETGLTAEDRPGNNQPATDNVDTNNEPPTGNQSAETEVSADQEPPTGNQSGSEPNRDIPEVEAQANNPPKTDTGASPGTSSPVRVQEPARPRLEIITGPMIGNEEERIHLRNEAKTATLEKLVPHLGTLESTRDQLREAKELAKKTEHDLRDRIAELQDSNFELSGSSKVQASKISELEKRIQAPEKDKAELAKQRDSALKDVEDRKIKSQAQFNVLVNKIKKLEGARDEVANAATPLVQAMFFNNNGLSSLDAVEIFDKLRATPDTYFKNIKEAGSMGGGLALAMTKSLYPKIDIDAVDGFADGTSEEAALDLISDAQKAADKIAADVVERFQDNNLKPTESDNSDDERTESN

SEQ ID NO: 104527 - protein, 755 aa, Oryza sativa
  Clone ID: PAT_MRT4530_101853C.1.pep
MVAHGVLPAKEIIGWRPAYGEMFPTHDTHEVVVFSYFFYGGFSLPTSNFFQGILDFYGISLHHLNPNSIVHIANFIHACEAFLGIRLHFALFRRIFFLKPQPNKSKPCVVGGASFQLRGTLSQKYFSMPFKTWNKCWHANWFYVQNPEPVFPGYSCLPPVYQDTRNSLPMGDEAAQALALMDCMLRLKEQGLQGEQITRHFIKSRLGPIKERSRTAFEFDGKHDPTREDPDSLEFKVMKERMYKIFSNAIVVSYSHLLPVVLYNAFNPPPPEFALMKSDPPIAQRHSPHWKTSQASGGPKIKPANQPDTSKLTNQSDSRKRKLISSDDEGDDAEKTGNKRVTGKQSKQTNPKKKTPSRPMPKIRKSSRKPSDIDPSGKDPTSTDTETGPSEETGPTAEDRLGNNQPATDNVDTSNEPPTGNQSAETEVSADQEPPTGNQSGIEPNKDILEVEAQANNPPKTDTGASPRTNSPVRVQGTARPRPEIITGPMIGDEEEVLRIQSAEDSRPPILVKWWDDDMQPQGIVINKQKEDEEVCLLKKTLGQATRLVNRIHLRNEANTATLEKLVPHLGTLEATRNQLHEAKELAKKTEHDVRDRIAKLQDSNFELSGSSKVQASKISELKKRIQALEKDKAELAKQRDSALKDVEVNKIKKLEGARDKVANAATPLVQNIKEAGCMRASLALAMTKSLYPKIDIDAVDGFADGTSEEAALDLINDAKKAADKIATDVVERFQENDLRPTGSDNSNDEKTETD

SEQ ID NO: 104528 - protein, 692 aa, Oryza sativa
  Clone ID: PAT_MRT4530_101854C.1.pep
MAEERESFESQWAPSDVTEENLKEMVAHGILLAKEIIRWRPAYALPEYSCLPPVYQDTWNLLSMRDEAAQALALMDRMLKLKEQGLQGEQITRHFIKSRLAPIKERSRMAFEFNGKHDPNREDPESLEFKIMKERMYKIFSNAIVVSYSHLLPVVPYNAFNPPPPEFALMKSDPPIAQRRSPRWKTIQASGGPKIRSVDQPDTSKSTNQSDSRKRKLVVSDDEGDDAEKAGSKGETGKQPRQANPKKKTSSRPIPKIRKSSRKPSNIDPSGKDPEPTDTVTGPSKETGPTAEDCPSDNQPATDNVETSNEPPTGNQSAEAGVGVNQEPPTGNQPSIEQNNDIPEVEAQANSPPKKDASADPGSSSPVRVQGPACPRPEVITGPMNGDEEEILRIQSAEDSRPPILVKWWDDEMRPQGIVINKQKEDEEVCLLKKTLDQATRLVNRIHLRNEAKTTTLEKLVPHLGSLEATRDQLHEAKELARKTKHDLRDRIAELQDSNFELSGSSKVQASKISELEKRIQALEKDKAELAKKRDSALKDVEDRKIKSQAQFDVLVNKIKKLEGARDEVANVATPLVQAMFFNNNGLSSLDAVKSFDKLRAAPDTYFKNIKEAGSMGAGLALAMTKSLYPRIDIDAVDGFADGTSEDAALDLISDAQKAADKIAADVVERFQDNDLKPTGSDNSDDEKTESN

SEQ ID NO: 104529 - protein, 90 aa, Oryza sativa
  unsure (1)..(90): unsure at all Xaa locations
  Clone ID: PAT_MRT4530_101855C.1.pep
MRQDHIVDAATTNALSGLXIDVISVTSILTEKGLTSNSFAMSYRRDGNARIRFEDHGGSNQEETLLDDNQRHSTCTTSISEITDGSILRE

SEQ ID NO: 104530 - protein, 82 aa, Oryza sativa
  unsure (1)..(82): unsure at all Xaa locations
  Clone ID: PAT_MRT4530_101856C.1.pep
MSSTANGSRRHRCPPTAIASRRRSHCRIRQPPPEPWLPPPPRRPRASRSQPPSPPPLSPAAXQPLPPSPPPPAASQPPAPQI

SEQ ID NO: 104531 - protein, 329 aa, Oryza sativa
  Clone ID: PAT_MRT4530_101857C.1.pep
MRNLSALSTSFSWEEISSAILHSPPNKSPGPDGYTNEFYKCFISTLKPDLIALFNSFHANAADLSGVNISYITLIPKKETPLGITDFRPISLLHSLPKLISKVLANRVQGEIPELIDPMQSAFIKGRSITENFILASDIVQCAIKRKKPTIILKLDFQKAFDTVNWDCLYLVLHRRGFDDTWINWIKQILETGQAHVLINGSTGESFKYRRGVRQVADVLQQMIQQAFHSEQLLHPLDSHSPPPTLQYADDTLLILKGSLEQAEIIKSILEEFAAFSGLQINFSKSTFVPIHMNEPEATAIAELLQCPISPLPCNYLGLGLPLSTAVTP

SEQ ID NO: 104532 - protein, 78 aa, Oryza sativa
  Clone ID: PAT_MRT4530_101858C.1.pep
QYVYEKERRGDYLGQTVQVIPHITNEIQDWIERIAMVPVDGEVDPADVYIIELGGTIGDIESTQFIEAFSQFSYRVGK

SEQ ID NO: 104533 - protein, 53 aa, Oryza sativa
  Clone ID: PAT_MRT4530_101859C.1.pep
SPDACQGRSWEVKGPLPRRPGYWNSKVMLGCHTAADDRNGDVLHVFGLIMAIN

SEQ ID NO: 104534 - protein, 231 aa, Oryza sativa
  Clone ID: PAT_MRT4530_10185C.1.pep
WIPGLQESIGANRNKRQSRKSRDENGDDGDDSGGNSARGGDSSTQKKPRVVWSVELHRKFVAAVNQLGIEKAVPKKILDLMNVENITRENVASHLQKYRLYLKRLSTDASRQANLAAAFGGRNPAYINMNSFGNYNAYGRYRTVPTAGHTQANNILTRMNSPSAFGVHGLLHSQPIQLGHAQNNLSTSLNDLGGLNNGNMIRGAQMSTILTGPSGNSFPNISNGAPLATAN

SEQ ID NO: 104535 - protein, 100 aa, Oryza sativa
  Clone ID: PAT_MRT4530_101860C.1.pep
MAWWRKGGASLRNVRGAPPICHAAMYDVQRRIIVLPITAAVARRRRLEWIDSGPATRVDLSGGGTGANELGGDVLNGGSSDDEGDRAISFSTGISSFLVP

SEQ ID NO: 104536 - protein, 52 aa, Oryza sativa
  unsure (1)..(52): unsure at all Xaa locations
  Clone ID: PAT_MRT4530_101861C.1.pep
CASHIERAVTXSLFTVTCVYEPSLXFYRYPVLDMAFTPLLCLRCEIAAASSX

SEQ ID NO: 104537 - protein, 183 aa, Oryza sativa
  Clone ID: PAT_MRT4530_101862C.1.pep
MATPASFHHPASPQPAIPGAAAAAVAACAAMAVSYVAVLYAPTALLRLPPPTSLHVFLHRRFLCAAFSSSASLLATASLLRVWSIGDSSVVLAVFGIRRDHLLQAVAIPLLLTSLVYAGSFVARLWLLANSCGGGYEEPEIGWAQRLAHRIRASVGDVMVWRNCVVAPITEELVFRACMSKVV

SEQ ID NO: 104538 - protein, 329 aa, Oryza sativa
  Clone ID: PAT_MRT4530_101863C.1.pep
MQRYGLQLRTKPAASSSSRAPPPPPARPLAAFADDGDDDVEADILRQSYKKRSQQKVEEQQKKAMEEDPSVFAYDEVYDDMKQKAALPKMQDRVVRESKYIAALKEKAEQRKREQDIIYERKLQKERSKEDHLYGDKDKFVTSAYRKKLEEERKWLEEEKRRQLQEEKEDVTKKKDLSDFYFGLSKNVAFGAQTHDNTKHAKPEKLDEKVQDAKTSKVGAEVSDRSPKHKRDSGEGAETANESRSVEEPATTQSRDSAAARSTEKNADVSLDAPQTQTPENTQPAPQTQNPQNTQPAQITDEHYKRNADALAAARERALARKKAKAQQI

SEQ ID NO: 104539 - protein, 117 aa, Oryza sativa
  unsure (1)..(117): unsure at all Xaa locations
  Clone ID: PAT_MRT4530_101864C.1.pep
MIASPPLHISPPFPSPHRPLPSPHLSSSPLPSLLLSPTAAPGGGGRQRGASSGXTQQPPPHRPHPQPPPRPPCPQPTPCHFQPPRHRCRHYDARLSWWSYPWFCSSSYHVSPPQWSL

SEQ ID NO: 104540 - protein, 408 aa, Oryza sativa
  Clone ID: PAT_MRT4530_101865C.1.pep
MASMAARSSRKRRSPPPRGLGDLHDDVLERVLARLPPATFFRLRAVCRRWSAAAASPTFLRACARVPSRDPWFLMLSGARPRPPLAFDAAGRSWIPCRAAPGGSDGGADAAVPVASSGGLVLYRAPGTGELLVANPLTGASRALPSPPGAHGGAPRLHAIAMYGSPYRVALFADELPDLSMSVFDSSRGSWEGPVALSRRPDAAALLPDDAPSQGGADDTVYFLSKSGDVVATNMQRSASKQYSSVVVAASSDGGDAVAYFLSHSGTVVACDTARRTFAELPRILPVYFEYSIDVVACDGAAYAVVLAEYLDTASLRVWGFAGGAWRQVAAMPPAMSHAFHGKKADINCVGHGGRLMVCVSSGEANGCFMCDVGSNQWEELPKCVNGDGEVNDFLAAFSFEPRLEISV

SEQ ID NO: 104541 - protein, 47 aa, Oryza sativa
  Clone ID: PAT_MRT4530_101866C.1.pep
SLGWWSSLATRFIFISFSPFFPPKSDIVDHSKGPEPPGDEHRNFRAG

SEQ ID NO: 104542 - protein, 111 aa, Oryza sativa
  unsure (1)..(111): unsure at all Xaa locations
  Clone ID: PAT_MRT4530_101867C.1.pep
PHSHLFGLHCTAXTLYEGCRASKVQTAPLGISFLRALTHYILGFRRTHQGSENYPLKLQHHRSXGPRHKANKGPNPVGHPEQWQVHKXDTASLWGKQRFPFWPSEVQWXRR

SEQ ID NO: 104543 - protein, 222 aa, Oryza sativa
  unsure (1)..(222): unsure at all Xaa locations
  Clone ID: PAT_MRT4530_101868C.1.pep
MPCCSAVLSAAAAAAAASRTPPWLHRLHAKGGLSFPSNLHIDDLLYGQHHALPHPPPPPPPPQPAKEPPPPTKPKHPKPKQQQHPPPPPPQKPPQGSTNLSLPNPSGSGSGNGNPPPSPXCSSPPSSPTSSSPPPPLLRSSRRSRPSASRTTRALGPTRPPAPARRTRTRPPRSRSRSAAAPTAPPMATARGVAGPRSPSSTPAPMGGRRRSCSSGEAPSGR

SEQ ID NO: 104544 - protein, 104 aa, Oryza sativa
  unsure (1)..(104): unsure at all Xaa locations
  Clone ID: PAT_MRT4530_101869C.1.pep
ASCSAAWEADGVQTQEASLLDRSPNSQTVXRPQTDQVSRPLXDRTQRGWMLQLDSVQGNSLVAQLFQGSSIANVCWHRVRHVCAQEDLRRLTKSIVLTIQLVYI

SEQ ID NO: 104545 - protein, 189 aa, Oryza sativa
  unsure (1)..(189): unsure at all Xaa locations
  Clone ID: PAT_MRT4530_10186C.1.pep
LKKKKKKKTKKKKKKKKKKKKKKKKKKKKKKKKKKKRRAVLRGSKFTSPCLRRFIFFLGPPNLSGGAVFLHRRAWETPGFPQFIRFAALPLFPGWVFAEGAPPFRLSHLLPPLFGFWAPPFSGPLGPGGVGVPPGVPFSFAGALAPVLLVFFLSFLALFAVFPRXVFFRGLPFGFPFFVFRALSPYFFF

SEQ ID NO: 104546 - protein, 337 aa, Oryza sativa
  Clone ID: PAT_MRT4530_101870C.1.pep
MAYSRQIFVCSAMAALLFSAVVSAQLSTDFYDETCPDALDIIESAVRDAVSKESRMGASLLRLHFHDCFVNANIIQKFRVDADGSVKQVGCDGSVLLDDTAAITGEKNAKPNKNSLRGFEVVDDIKSQLEDACEQVVSCADILAVAARDSVVALGGPTWDVELGRRDGTTASLDAANNDLPPPTSDLADLIKSFSDKGLTASDMIALSGAHTIGQARCTNFRGRLYNETNLDATLATSLKPSCPNPTGGDDNTAPLDPATSYVFDNFYYRNLLRNKGLLHSDQQLFSGGSADAQTTAYATDMAGFFDDFRGAMVKMGGIGVVTGSGGQVRVNCRKVN

SEQ ID NO: 104547 - protein, 52 aa, Oryza sativa
  Clone ID: PAT_MRT4530_101871C.1.pep
TMAFHPTTCPVLCCLVVGIWPPPLEIPFLLTLCLLVKGLCFNVVPSRLICFC

SEQ ID NO: 104548 - protein, 52 aa, Oryza sativa
  Clone ID: PAT_MRT4530_101872C.1.pep
SLKGDWGVDFVIVEGCCCRDQGDGDPIFHYLMNATRCRVLIKWYQSVVDHGT

SEQ ID NO: 104549 - protein, 47 aa, Oryza sativa
  Clone ID: PAT_MRT4530_101873C.1.pep
RVSPVKMHIFPSITCDVLSPSTAMGRAVPGCGISEHRTSQCNVESRA

SEQ ID NO: 104550 - protein, 67 aa, Oryza sativa
  Clone ID: PAT_MRT4530_101874C.1.pep
MGGETTGVSGGGFRRRLEYYLYSGEKKHVVAGIAIFAAIFGVPCWTAAARIVFVKGGDRLKSAWSLW

SEQ ID NO: 104551 - protein, 81 aa, Oryza sativa
  Clone ID: PAT_MRT4530_101875C.1.pep
MGGETTGVSGGGFRRRLEYYLYSGEKKHVVAGIAIFAAIFGVPWYFMSRGTKHQSHQDYMEKANKARSERLSSGQSSAPKA

SEQ ID NO: 104552 - protein, 120 aa, Oryza sativa
  Clone ID: PAT_MRT4530_101876C.1.pep
FHLSSNLKCQSGLVNHSSFLITSSTKHKRTQAPDNYMQLSFTPSTHSRTQAQTVCVSVRQGGRRRGAKNCGGGGGGERRKEMKGMSGPKLLVVHPASKGYNGVVSLSGAESPGPSAASNA

SEQ ID NO: 104553 - protein, 70 aa, Oryza sativa
  Clone ID: PAT_MRT4530_101877C.1.pep
MDYSGFGVSETSEEEEEDTYPARCEVSHSSNHSGKKPNRADGWTARTGRLFGEPVVNRLRSDRDWGMSLL

SEQ ID NO: 104554 - protein, 44 aa, Oryza sativa
  Clone ID: PAT_MRT4530_101878C.1.pep
SHTCTTAGHQTRECLGCELDSPPPPSRRRRRHRTLTARREVARC

SEQ ID NO: 104555 - protein, 200 aa, Oryza sativa
  Clone ID: PAT_MRT4530_101879C.1.pep
MAVVEQPQQQVVKLFNCWSFEDVQVNDISLADYLAVSSTKHATYLPHTAGRYSAKRFRKAQCPLVERLTNSLMMHGRNNGKKIMAVRIVKHAMEIIHLLTDANPIQVIVDAIINSGPREDATRIGSAGAVRRQAVDISPLRRVNQAIYLLTTGARESAFRNIKTIAECLADELINAAKGSSNSYAIKKKDEIERVAKANR

SEQ ID NO: 104556 - protein, 80 aa, Oryza sativa
  Clone ID: PAT_MRT4530_10187C.1.pep
RPPLKPYSRSPQSRHSSVQDAPNRNCNRHGRLHVVVSSARVLPSLRLRSTPHQAPLVVAAPLLILPLTLRSLNVVIGLRL

SEQ ID NO: 104557 - protein, 175 aa, Oryza sativa
  unsure (1)..(175): unsure at all Xaa locations
  Clone ID: PAT_MRT4530_101880C.1.pep
ALAARACACARQPPSDICSNALNGACQGALGWFAVAGLALYIAFFSPGMGPVPWAVNSVSYPEPFRALCGCMSATVNWXSSLIVAQTFLSIVGLVGTALTFLIIAGSTXVWPFIFVALYVPETKGLSFEQVELLWKERAWGNQGQSPEPFGRCTVVSQLSSCLPLLARVGGWLPF

SEQ ID NO: 104558 - protein, 363 aa, Oryza sativa
  Clone ID: PAT_MRT4530_101881C.1.pep
MAAARATLPLPRVPAPSPRPQLRPFPSLPARRGAVACGAGSAAAGVAASLRLGDVIEAQQFDRDALTEIFEVAREMEALERGSSSRGAGRSRVLEGYLMATLFYEPSTRTRLSFEAAMRRLGGEVLTTENAREFSSAAKGETLEDTIRTVEGYSDIIVLRHFESGAARRAAATADIPVINAGDGPGQHPTQALLDVYSIEREIGTLDGIKLGLVGDLANGRTVRSLAYLIAKYQNIKIYFVSPDVVKMKDDIKEYLTSQGVEWEESSDLLEVASKCDVIYQTRIQKERFGERIDLYEAARGKYIVDKKVLDVLPKHAVIMHPLPRLDEITIDVDSDPRAAYFRQAKNGLYIRMALLKLLLVGR

SEQ ID NO: 104559 - protein, 705 aa, Oryza sativa
  Clone ID: PAT_MRT4530_101882C.1.pep
MTPLHAAPHHAAAAAAVVSSPSSAPLLLRAKPYHPKAAACSFTVTATTPSRKAFLSCPDHGQAAAGAAPPRSAPASSPALISSVQDLYDFICSGPLVDRIGYTKEKIAGSIDRWLRCGVQVARLFRLNELHLSEAEKARIYHFYIPVFLWCEDQVTEHRAKYKDGDEIPPLVIGVSAPQGSGKTTLVFALDYLFRVAGRNAATLSIDDFYLTAAEQGKLRERNPGNALLELRGNAGSHDLPFSVETLESLLKLTKEGLKMKLPRYDKSAFGGRGDRADPSTWPEVEGPLEVVLFEGWMLGFKPLPNEVVKAVDPQLEVVNKNLEAYYDAWDRFIGSWMVIKIKEPSCVYQWRLQAEIAMRADGKPGMSDEEVMDFVSRYLPAYHAYLPTLYKEGPNGSNPDHLLGAGVGGGAATASGGGGGSGTARAQRPRLATAATLLGGPRGHGAVRDRAHDGGGKDSTAQEQKRRPAGGATVLGWLKGTQGGWRREADGGVRPGFPKAVANRDRRGIRKYGDRAGRHGRVLRRGGNDRRSAKEGEGRGEDGTTRRRDASGHGARRGGQEFPWRQSFAAWGKRSKGGGSTGVGFIEGVWERQGRFGGACELALGRRSRATSAFSWAARNGGWRGCDGRWRRWIVRWESNRERGLARLGVVKVGHGELARGVRGARCHGARCQAVELKDYLRGKQNEKSMFGGESKDVAVECDR

SEQ ID NO: 104560 - protein, 313 aa, Oryza sativa
  unsure (1)..(313): unsure at all Xaa locations
  Clone ID: PAT_MRT4530_101883C.1.pep
PVVGLGPLSSAYGRRGRRGXGDGVRRRRRERHGAGAEAEASDCGDTSGRSQGSRGWRRRRESKRGGRPTXGARPCARRRWKGRHGAGAKEEASGRSDGFGVAQGDSRRVAAQGSGLTGKRKXRRRRFCGGRGKADGGVRPGFPKAAANRDQRGIRKYGDRAGRHRRVLRXGGNDRRSAKEGEGRGEDGTTRRRDASGHGARRGGQEFPWRQSFAAWGKRSKXGGGSTGGWRGCVGQWRRWIVRWESNREHGLARLGVVKVGHGDLARGVRGTRYHGARCQAVEAGPQGLFERESKGEINVRGETKEVAVEYDR

SEQ ID NO: 104561 - protein, 80 aa, Oryza sativa
  Clone ID: PAT_MRT4530_101884C.1.pep
MAQWQRQIHIAVVSDVGATPPSARATGHRSSFHPHRRSPCRSAPSAVVLTPTQLQENKTYMLESLRLWLTFHKAMFGIEG

SEQ ID NO: 104562 - protein, 111 aa, Oryza sativa
  unsure (1)..(111): unsure at all Xaa locations
  Clone ID: PAT_MRT4530_101885C.1.pep
ARWKKALRRRRNPRNVARVDVEEVVDRTGSTFSSSCVLLTVLPCRSAPXTSGASTGVHTYRDGTPRADVLAPTRGSYTLGCNSKIPFRSTCQQRPLAERIDPPGIHKDHIG

SEQ ID NO: 104563 - protein, 104 aa, Oryza sativa
  Clone ID: PAT_MRT4530_101886C.1.pep
QLEVVNKNLEAYYDAWDRFIGSWMVIKIKEPSCVYQWRLQAEIAMRADGKPGMSDEEVMDFVSRYLPAYHAYLPTLYKEGPNGSNPDHLLVVDIDEKRNPMWGR

SEQ ID NO: 104564 - protein, 75 aa, Oryza sativa
  Clone ID: PAT_MRT4530_101887C.1.pep
LSFCGTSSSTFLTMKLDIYSDDEIYGCASEVLAEFLQCTTNSFYSDVFSVMINIALWLKFCCRWRWWRDRREQLY

SEQ ID NO: 104565 - protein, 661 aa, Oryza sativa
  Clone ID: PAT_MRT4530_101888C.1.pep
MPSLGAARDGGGGGEAGVTTAAAKATSTATLLSLLRAKSERSAEAEEKVEWVRSQLVGAGAEFDTPFGRRPLVYADHTASGRGLRYVEDYVLHHVLPFYGQYHLPCRFSSHAICELDHDVHGDGEVIDAMLVGNTHTEDSYVGSRTTRMARKAASYIKRCVGAGGAAGGDVALLFCGSGATAAVKRLQEAMGVAAPPGPLRERAAALLRPEERWVVFVGPYEHHSNLLSWRRSLADVVEVGAGDDGLLDLAALRRALRAPEHADRPMLGSFSACSNVTGVLTDTRAVARLLHQHGAFACFDFAARNSGPYVEIDMRPGEVDGYDAVFLSPHKFVGGPGTPGILLMSRSLYRLSSQPPTTCGGGTVAYVNGASERDTVYLAGVEEREDAGTPPIVGKVRAALAFWVKARVGRGGAVALRERAHADAAMAWLLGNPNVEVLGNVAAPRLPIFSFLVFPGDGDDRRLPLHGRFVAKLLNDLFGVQARGGCACAGPYGHALLGVGDELSLRIRAAIVRGYHGVKPGWTRVSFAYYLSGDELRYVLAAIDFVAAHGHRFLPLYAFDWATGDWSFRRAALKRQLMARELLHCHLGSSSATSSDSDGGEFQTARKTTAAGKVGGDVSADKFEGYLESARRIARSLPDTWQATVTVPEGIDPDIVLFRV

SEQ ID NO: 104566 - protein, 540 aa, Oryza sativa
  Clone ID: PAT_MRT4530_101889C.1.pep
MMKRKERSSELEVAVAGDDDDDRLSSLPDDVIGRILSFLPARQAARTTQLSRRWRRVWPAHVAALNLSVLDLPRRRRRCPGMIQREFAALAGEALLRFPTTGIPSISVEVDHYINVAADGWFGQAMERAVGSVRVTSLRGLVGWLPLPPCARAAAMAVAAPRTVLTLPGVDDRQVFGRLSELSLSLVRLGGGGERPLDEFLSSCCPRLRRLRLRGVRGRHAVRRLALHTLDHLEVLDIDGVDDLEALDVSAPNLRCLNVRSCFRGGGGDVAVTAPGIEAVVWHRSYPEHLAFRSGLARVRRLAGPLKLAAVGRRDLFDAPYTTQLLRSCSLAVGHLDMELVMPEDMALANWLGGGGGACEDLIRHLPELPRVTVLSLNIRWSFASGGGGGIAASLASLLSKTPSLTRLHIRTSPYCFSVFEGQEEVEAVAVAARGSWHMWMTDGEDDSRKPRLGRRLDSLREVSVDGLTGGDREEYSVVVELLLATIVPPSLERMSLAFHGHAAPAIIDDIAREIPLHFPIMATGRWERSPPSAVTWKSS

SEQ ID NO: 104567 - protein, 644 aa, Oryza sativa
  Clone ID: PAT_MRT4530_10188C.1.pep
MCNSGTSSSPSAPAPPPPPLTSFKHSSHLLRLVDDDADDGHALLLSKVAGEAQAIGRVSVPMAVTGLVMYSRALISMLFLGRLGELALAGGSLALGFANITGYSVLSGLALGMEPICGQAFGARRGKLLALALHRTVLLLLAVALPISLLWVTSTGYILKQLGQDEGVADAAQTFAAYASADLAVLAVLHPLRVYLRSQNLTLPITACSLFSVLLHGPINYLLVVRLRMGVAGVALAVALTDLNLLLALLCFLAISGAHRDSWVGPTSDCLRGWPALLRLAVPTATAVCLEWWWYELMIVLSGLLANPRATVASMGILIQATSLVYVFPSSLGQGASTRVSHQLGAGRPAGARRAAGAALSIGLVVGAAAATFMVSVRSHWGRMFTSDGEILRLTAVALPIAGLCELGNCPQTAGCGVLRGSARPASGARINLASFYLVGMPVGVALAFGARLGFAGLWLGLLAAQAACAVWMARAVAATDWDVEVARAKELTKASTTGSGTNHQHECNNSNTNTANAKANTKTTTSPAANNINAGGGGSSDNRGYVPISESGHNDGSDDLEKLEEGLMVATSGGCCGCGDALGVDTKAGDKQQCSNGGAGTAEGNAGQRRGSASSERAPLISVGDDEEAGEENDGDGGGGGHV

SEQ ID NO: 104568 - protein, 713 aa, Oryza sativa
  Clone ID: PAT_MRT4530_101890C.1.pep
MEYQTPELLNRGLDRSHRSYLSAVEGAELSTFCPRLSRQLLQIDPRFVERLREAGLIPLCRLVEDLANEKDPSRRWVVDQSLLAALVDRWRPETCTFHLPCGEMTPTLQDVSYLLGLPLAGSAVGPIDGAQGWAADITARFSHVQRQLGLGAPKALPHYITSGPSKMWLLQFTSDLLHPNADDYSVRRSLEAYLLWLFGWVMFTATEGRAVDKGLIYYARAIADAEDGSVPQWSWGSAVLAATYRGLCDACTKNNPTMIIAGCPLLLQLWVAERFSMGRPVMDQSPYEGGFRALHGHSAEDRPTMGTLWCRLERRYEHVQVRKGYKHFVMEFDRLQPDDVVWEPYSARAIMARAPLGLSFLCTRDKVYWMTLVPMVFDIVIEPHCPQRVMRQFGLRQHFPMVVERTVPPGVRLFNRSEQAANTQWTPRVQKYIDNWVLATEEVIDEVRAHTEATYLRYLRWYLPRTRTRVMFTPVDQQPHVAAVTEAYPRHRDQDYFVMLEAARRVIVDAEASIRLLDAGIVVTGEEHKMAFSRIRSSTNTIVRVLTYRANVNSVPPLAVPQHRPQAPVPGGQTSSSTGLSGLYQQGSTQAATSQHIAPLPKGFVRPSDVFAGVGPPMQGTCAPRPHVPLGVSIGNEFIPGGSTGVGSSAQGSQTTPTSDCHGKRRKPWKDRGFGQVLSLSYQFSIMSIPTQHVESIQLIHLYLTRLYLHTCI

SEQ ID NO: 104569 - protein, 55 aa, Oryza sativa
  Clone ID: PAT_MRT4530_101891C.1.pep
MLVSGTSVFDVLNREKAAIRFLGSFSRDYSLFVRDGSPSSPLACCAPSSTPATAS

SEQ ID NO: 104570 - protein, 50 aa, Oryza sativa
  Clone ID: PAT_MRT4530_101892C.1.pep
MQSLARHSLRALLNLLLLLLLTVVVPCCLPCVQACKDQWMTDASSQMHPA

SEQ ID NO: 104571 - protein, 140 aa, Oryza sativa
  Clone ID: PAT_MRT4530_101893C.1.pep
MELRFLLLVLVLLAPLLPGTTGDQQHAHLPAAAAGGNTTTAPSRDPLRIVVRASGSGTGGGASPSATAAAAAGDDASTPPPPQLSRPNRDLPTVPSPLDHEPVPTPPSPDFFPDSALRTIPANAIAMSAILLLLLIAATH

SEQ ID NO: 104572 - protein, 59 aa, Oryza sativa
  Clone ID: PAT_MRT4530_101894C.1.pep
YARGLQKTCLKTWGGHPENVKGAQNGLFLRAKANLLGKLGKYTNDGEAPKAKKGMFVKN

SEQ ID NO: 104573 - protein, 382 aa, Oryza sativa
  unsure (1)..(382): unsure at all Xaa locations
  Clone ID: PAT_MRT4530_101895C.1.pep
GRKKNCRSPPPTSGEPSAVHASPPTGGSPRPPRSGGGDATSAARRRGRAGRHAEAAGGGGGGDAASVASRFVKHVLKNRSNSGGPRLEFASGFWADASRSLSPEFAPPNSEVXYNSKKAGLSSSVSTCGMPALKGXEQGLLFSAQFQIRLVSPKLSSTPMAGRYYTPPTPHPPPENTLDVFMDGDAMAIRTTITLLHYLTTQFINEIAREQXRGGVLIVSIDTEWREDHEPDDKKCYKVVVLQLCVNRRCLVFQLYQASNEVPRELAEFLADAGVRFVGVGVDGGVRRLANECNLRVACAVDLRDAAAAVLGRPELARXGLKSLALIVMGTRMEKAKDITMSRWGEPTLTWEQVNYTCIDVYMSYEIGRRMLSDEPILAAPS

SEQ ID NO: 104574 - protein, 406 aa, Oryza sativa
  unsure (1)..(406): unsure at all Xaa locations
  Clone ID: PAT_MRT4530_101896C.1.pep
DAPTPQRRRRHTSDDTLVVHAGERRRAXIGGVAAEVTDYSIATPIVTGTARWFRDSADLVAFREGGGRRRRRRHSFEYARYGNPTVEVLEDKISAMEKAEATIVTSSGMNAIVATLLAVVPPGGHVVATTDCYSEARAFIRDRLSKMGIRTTFVDLDDMEALQSVLDQGNVTMFYADSLTNPHLKCVDVRRVAELCHQRGALVCIDSTLASPINQKPLTLGADVVLHSHHQVIGAGWETPWVTDFTTGMGVGFLNWHPNAAYMIIRGLKTMALRVEAQNRTALRVARLLERHPKVERVNYPWLESSPWHGVARKQMTGAGGVISFEVASDMRGAMRFVDALELPFIATSLGGCESLVQQPAIMSYWGKSEAEKTENGIKDNLVRFSFGIEKFEDLKDDILQALEKI

SEQ ID NO: 104575 - protein, 181 aa, Oryza sativa
  unsure (1)..(181): unsure at all Xaa locations
  Clone ID: PAT_MRT4530_101897C.1.pep
METTRTTRIVSILVSLVLLGQGDTYGYKYKXPRRRGDTINTVTTIKTHHETINSQHNQHXKPTYAKTSRRISTSEIRLDRPYPVPSEAGRRDLALSLIPSGTSSRRKATLLSTTSQTFRPPCRQQLDRLPHILYCLAYILAPTIPIPCKYQNCDIKRRHPQTRSLEPHPEPPAEPAKGGLR

SEQ ID NO: 104576 - protein, 106 aa, Oryza sativa
  Clone ID: PAT_MRT4530_101898C.1.pep
PLSKTFAPPKRSKITPPPSVEHLVSAGCAAATGLLGQCGWRGCAEVVCALPLLLLEGAGGRYAREDERRTPAPVADRRPPLFQPRRATRRRTSLFRHFVIPKELLS

SEQ ID NO: 104577 - protein, 77 aa, Oryza sativa
  unsure (1)..(77): unsure at all Xaa locations
  Clone ID: PAT_MRT4530_101899C.1.pep
IEQLRSMGLFSSAXAVLVSSLYSHVVXGGWSLXLGGGXXGWRRGSXVAXLLPGWDTLLHKMCPRGRPRRRAGRRRRG

SEQ ID NO: 104578 - protein, 47 aa, Oryza sativa
  Clone ID: PAT_MRT4530_10189C.1.pep
SQMMYILEVYKVFTRMSNVQMLVVVRIHVFLSVCVVCKCQTNLSERE

SEQ ID NO: 104579 - protein, 752 aa, Oryza sativa
  Clone ID: PAT_MRT4530_1018C.1.pep
DTENFTLEELLDEDEIIHECKALNTRLIKFMRVQLLRDKAQVEQLLRYIVEEVPEDSEKKRSFKFPFIACEIFTCEIDIILRTLVEDEELMDLLFSFVRPGHPHSTLLAGYFSKEHPDIVVHLVDLIGTTSIMEVLIRLIGADETIYSNYADTLQWLENTDVLEMIVDKFSSSKSAYISYTILTKQDSPEVHANAAEILSAVTRCAPPALAAKICSPSFVGRLFRHALQESRPKSVLVHSLSVCISLLDPKRLASASYQAFRSNLSHGTLVTASPETVDGMLESLGDLLKLLDISSAENVLPTTYGCLQPPLGKHRLKIVEFISVLLTIGSETAEQELINQSAVKRSIDLFFQYPYNNFLHHHVESIIISCLEVNRSQLIDHALNECNLVGKILAAERSSSLSTESNTPTLLSEGKVPPKIGNIGHITRIANKLIQLGNSNSIIQSHLQENSEWVEWQTTALVKRNEVENVYHWACGRPTSLHDRGRDSDDDDFRDRDYDVAALANNLSQAFRYGMYSNDDIEEAQVIERDDEDVYFDDESAEVVISSLRLGDDQDSSSLFTNSNWFTFDGDRGINDRLAASVPSSSPNSEETSLNTEETDEVQIGEDTSIEPQLESVSLENGPVEEAGDLADVSKQTDSNTEDEKLLCTEEEDLSKEAEESERHVDVRDGQVDIQAEDAAEGSCGDMGTGIAVDEPVSPSSEPNNASAGASPDTGDIHTAGSTGSNDSGAELHAKEDSQDGQKTDEPTTTE

SEQ ID NO: 104580 - protein, 178 aa, Oryza sativa
  Clone ID: PAT_MRT4530_101900C.1.pep
MASLTPEAEAPGGGALLAAGDDVTAANLLAAAVATEGPVFDMPDFKMGGKKSDDAAPTDAGDEDGGDDDGDEDGDFGEGEEDVSEGEGYDNPKGIDNNKKRGEPEENGEEDEEEPEGQEGGGGDDDDDDDDDNEDDDDDDDGGEDDDGVDEEEEDQDNEDDEEDDDEDSLQPPKKRKK

SEQ ID NO: 104581 - protein, 443 aa, Oryza sativa
  Clone ID: PAT_MRT4530_101901C.1.pep
MALSLAGSSAQHIQSHTTSVHKRDTPQLLATAGDVGAARAPAPSPTGGSGSGGRRSGSGTAAAPAGGSTPRPYPPPREAFEDTEKLIRQWDATPELLVFKGPEEDVAGYLDAVDVAVDPLLSGVGATTEAEAAGVVVQLAMASMEEELRHLMQILPLKYEGSTVLPKNRKGNTIVFKEWLLNRLPGSAGSYEFSTKLEEVAAGGGGSGDGEPLETEKTTGWGHLVATTLWRKRAGRWGGKGRRLAGEDLAGAVGVFRLAGEAGRPCGGAVVAQEHKLRPRALGVVIFVRDGEYKVCRKAPCRWVNYTSIPNAKKNSKINKRGNPHLHIIYKNNSQIYASIDDENDESMASYRMEILGANPNGASYIWRSKQASMPTVNTSTATKRSVIGDEEGYRSRGWVTGEKTWSGQHHLPRVRLKGKPHTQRNFVMPLAQSAKGEPKGYW

SEQ ID NO: 104582 - protein, 479 aa, Oryza sativa
  Clone ID: PAT_MRT4530_101902C.1.pep
MSCFPCSGSSGKGGVDAKSVAALSPGPRPAASAAPDRSNSSRGSGIKKDDSVRRGGSSANDGPAKIFTFRELAVATKNFRKDCLLGEGGFGRVYKGQMENGQVIAVKQLDRNGLQGNREFLVEVLMLSLLHHPNLVRLIGYCADGDQRLLVYEYMLLGSLENHLHDRPPGKKPLDWNARMKIAVGAAKGLEYLHDKANPPVIYRDFKSSNILLGEDYYPKLSDFGLAKLGPVGDKTHVSTRVMGTYGYCAPEYAMTGQLTVKSDVYSFGVVFLELITGRKAIDHTQPAGEQNLVAWARPLFRDRRKFCQMADPSLQGCYPKRGLYQALAVASMCLQENATSRPLIADIVTALSYLASNHYDPNAPSAKSSRTCPSTPKAKAHRRTTSVPDAQHAADSLNWNFPDLGRKETTRGEFEQDHSEGYGSGSSSGRNDGLDVPELLALHNGQNNSEADIYHKSSVKLDAHEKQRSGSGKGSRQF

SEQ ID NO: 104583 - protein, 136 aa, Oryza sativa
  unsure (1)..(136): unsure at all Xaa locations
  Clone ID: PAT_MRT4530_101903C.1.pep
WLKLAVDTPTWEASAWCPIFLSCHATPAAAVAEKPNTTTWLAYLSSXTLYNVDGWXAPYFFAXNVVVRPHDAATLPGHEFNLTKVVAKATGPCSGGGLGLPLPLPMQFPDLLRHRYRRRSTAHPPAACHLGLQLSP

SEQ ID NO: 104584 - protein, 156 aa, Oryza sativa
  Clone ID: PAT_MRT4530_101904C.1.pep
MAAAWLVVLLTVHRLLHLSGVSAVDRSQFPPDFLFGTSSSAYQVEGGYLEGNKGLSNWDVFTHKQGTIEDGSNGDTANDHYHRYMEDIELMHSLGVNSYRFSISWARILPKGRFGDVNPDGVAFYNALIDGLVQKGIQPFVTICHYDIPHELDERY

SEQ ID NO: 104585 - protein, 482 aa, Oryza sativa
  Clone ID: PAT_MRT4530_101905C.1.pep
MAAAWLVVLLTVHRLLHLSGVSAVDRSQFPPDFLFGTSSSAYQARRRNPHSTMLHNKSLSELCFFRLKADIWRVTKVSATGMSSLISKEDIELMHSLGVNSYRFSISWARILPKGRFGDVNPDGVAFYNALIDGLVQKGIQPFVTICHYDIPHELDERYGGWLSPEIQKDFSYFAEVCFKLFGDRIKFWTTFNQPNLSIKFSYMDGFYSPGRCSEPFGKCALGNSSIEPYVAGHNIILSHANAVSVYRNKYQGKQGGQIGIALSITWYEPFRNTTIDLLAVKRALSFGASWFLDPILLGDYPTEMREVLGQSLPKFTSKQKNRLQSTKLDFIGLNHYTTCYVKDCIFSPCEIDPVNADARVFSLYERDGVPIGYSQASNSNMTAKDFTNDTGRITYIQGYLISLASAIRKGADVRGYFVWSLLDDFEWNFGYTLRFGLYHVHYKTLKRTPKLSVDWYRKFLTGSLLRRKFRDESQLHKFNSY

SEQ ID NO: 104586 - protein, 245 aa, Oryza sativa
  Clone ID: PAT_MRT4530_101906C.1.pep
MLYYRRSHNSFSASERLNPSLFLWDTLRYSVVSTEIASRGRIASYSESKSCIESLRHELNSSNGFILSLLFRVAHSARNLSRLEVLLRFEGLQLLASSICSGTSGDKDLLNATKRKGIMPPMGDPTSEGGVFPDIQFWKQCADPVLAQDPFSSLLSTLFCLPVQFLMSTEFFIPFVHLFYVVCVVQALITCYGEETFDRSSFSNCLLNDVCQTMSTIDIAREYFVSKHIDPSCHPKDMVRRLTYP

SEQ ID NO: 104587 - protein, 954 aa, Oryza sativa
  Clone ID: PAT_MRT4530_101907C.1.pep
MVSSRDPGEEASAPPPPPPRRGEKRRMRGRTPSPEPASAPQTNGKWHPHESYRPEIDDAPVFTPTEEEFKDPIRYITSIRPQAEKYGICRIVPPSSWRPPCSLKEKNFWECTEFNTRVQQVDKLQNREPTKKKSQPRVQKKRKRRKRLRFGMTHRRPSANTSEDCADADEKFGFQSGSDFTLDEFQKYADEFKQQYFGIKGSDEIPLSEIKKKKKNWQPSVDEIEGEYWRIVVCPTDEVEVDYGADLDTSMFSSGFSKLSSDSNRRDPYGLSCWNLNNLPRIPGSVLSFETEDISGVVVPWLYVGMCFSSFCWHVEDHFLYSMNYMHFGEPKVWYGVPGADAVKLEEAMRKNLPRLFEEQPDLLHELVTQLSPSVLKSEGVPVYRVVQNPGEFVLTLPRAYHSGFNCGFNCAEAVNVAPVDWLPHGQCAVELYREQRRKTSISHDKLLLKTANEAVRQLWMNLSDCKSEQGVYRWQDTCGKDGMLTSAIKTRVKMEKAARGGNMALRYKKMDGDYDSADRECFSCFYDLHLSAVSCQCSPNRFACLNHANILCSCEMDRKTALLRYTIEELHTLVAALEGDPTAVYQWGQNDLGLVCPSGSTQYKKMDLGENTEFPDSATNVNHGCSLGSQDQYHYDPAKPAGYQQEKGIQIASEKHDKNKMVVNLESPATASNPSRSKSDCSGSLSLNHSSELPSSRIQTGNSTLASITTEKLFGVDIKSNLAQSSDGQVSQLAKPSSSQTDEVSKPAIAKYTVELLDSGTMMIGKKWCNQQAIFPKGFKSRVTFHSVLDPTRTCCYISEVLDAGLLGPLFRVTVEGLPEVSFTHTSPMQCWDSVRDRVNEEIAKQISFGKSGLPDFLSCNSLNGLEMFGFLSSPIIKEIEALDPCHQCLDYWLSRVSSVGTELPSESVMAAMVNDSTNPPIKLLGIEINRRESEQSSSFNNSCVRRSHLAGC

SEQ ID NO: 104588 - protein, 130 aa, Oryza sativa
  Clone ID: PAT_MRT4530_101908C.1.pep
MGHGWVCVDCGKVARSVGLAWPGLGWRDVWSESECTRGFGRVRNARSGWRVYSFDPWRRPGTVLTAEQFRVQTVHASSEETKLQGALVIRHLMDEDFGPDPKLGGGSRRNTPGSTPLGESHVGLRASSSL

SEQ ID NO: 104589 - protein, 109 aa, Oryza sativa
  unsure (1)..(109): unsure at all Xaa locations
  Clone ID: PAT_MRT4530_101909C.1.pep
MTNNMNLIMNKXCIDLISYLILLLTAATTGCTTRSTFEIDVKTDGRRNARTYVHVXLDMRATMDPTLTDSNLQMCGQMDYGHDYFQKGNIDRVKCIRDCMPYEPFNMEL

SEQ ID NO: 104590 - protein, 822 aa, Oryza sativa
  Clone ID: PAT_MRT4530_10190C.1.pep
MAAAAGEEVEAARWAEAEDERKEGLRRRRRYGLVEYRALPGYMRDNEYILRHYRCEWPLPQVLLSAFSIHNETLNVWTHLIGFFIFLVLTIYTATQVPNVVDLQSLQHLPDVLRNADLHKIQTELVACLPSLPHLSDLQKLKDELKSSWNSIEVLPSLSRWHLLELLSSCLPHRFTHSNETSLSVLQSMKEDIANMIAPQLIRPIPRWPFYAFLGGAMFCLLASSTCHLLSCHSRRLAYIMLRLDYAGIAALIATSFYPPVYYSFMCYPFFCNLYLSCITILGVATIAFSLLPVFQNPEFRTIRACLFFGMGASGVIPVIHKLILFWHQPEALHTTAYEVLMGLFYGIGALVLLKFNAYINCVYNRSLGSEMNVQVARILASQQTHPHMDLLRRVAVVAVLLSLPSRGRSGGGGSDLHPVVLVPGYGSNRLYARLTAAYEPAAPRCGAREGKDEWFQLWPIDAAASEPAQAPCLAEKMSLVYDPVADDYRNVAGVVTRVPSFASTRALVGWDPLVRQLEAMGHRDGGSLFAAPYDFRYAVAPRGHPSAVGERYFARLTRLIERASRLNGGRPAVVVAHSFGCALTYQFLRARPLAWRQRFVKHAVLLAAALGGFAEGMDGLASGAGSGLPNLAPPARARLARSQQSALWRLPTPMVFGDRPVVVTKNSTYSANNITEFLDAIGFTEGVQPYVTRVLPMWRALPAPMVPVTSMYGVGVRTPETFVYGEAGFEGTPEVVYGDGDGNMNIVSLMAAEEWSGVEGQILKVVRLPGVSHVGFFSDLALKKVVAEIQKAVSSIEVHRKEKIFSFLNNFEFTIPVPLGW

SEQ ID NO: 104591 - protein, 104 aa, Oryza sativa
  unsure (1)..(104): unsure at all Xaa locations
  Clone ID: PAT_MRT4530_101910C.1.pep
MQDCRYHYRQXDYACLEQNCHGDQACRRHGQHHHDQVEKQHCVQDCRQRLRXRLNKPTETMNKTASXALRDSITDGSDTSTTTTNVICSSACQTRCTGAMRETK

SEQ ID NO: 104592 - protein, 119 aa, Oryza sativa
  Clone ID: PAT_MRT4530_101911C.1.pep
MQMKAVAAVDKNEAWERAMAALHADGGDGHGKLRRMQTKTTTAVDNGGGLADTDEDAMRGRGMTWAHTAEDEDGGTDASEDGRTDAKDENNNRVRGVAGAVPQHGGASHTGVVPVPTWQ

SEQ ID NO: 104593 - protein, 34 aa, Oryza sativa
  Clone ID: PAT_MRT4530_101912C.1.pep
MGFLRCSRPTLLMQPKTMFHVKPKGLFGCFVPPL

SEQ ID NO: 104594 - protein, 67 aa, Oryza sativa
  Clone ID: PAT_MRT4530_101913C.1.pep
GSPVHVEPGSQDRRGAAHHEAPMWRPRGQPRGHGTWRRGVGHWRPAAGDAESDGKRGRGERRGVLTV

SEQ ID NO: 104595 - protein, 135 aa, Oryza sativa
  unsure (1)..(135): unsure at all Xaa locations
  Clone ID: PAT_MRT4530_101914C.1.pep
TVVHEIACAGHNRQTQLTITSTETADVSLATSMTADASARPSLTILAAYTISYSIPMINTRTTPRSAYLLNKNKKLQEESFSNVPAXTMLANDVALDIGYPDLPSSXATDSSIACYHGKFRYDCFTHKNAKLIRG

SEQ ID NO: 104596 - protein, 38 aa, Oryza sativa
  Clone ID: PAT_MRT4530_101915C.1.pep
TVTSHPVQPDPDAIVGYCLDGGGRYRRCMYTPGRVNAV

SEQ ID NO: 104597 - protein, 101 aa, Oryza sativa
  Clone ID: PAT_MRT4530_101916C.1.pep
MGRGVSSGGGQSSLGYLFGGGEAPKSAEKPAPVQKPAPSSSAEKLKEIPAGIQSSKANNYMRAEGQNCGNFLTDRPSTKVQAAPGGGSSLDYLFSGNKDGK

SEQ ID NO: 104598 - protein, 391 aa, Oryza sativa
  Clone ID: PAT_MRT4530_101917C.1.pep
MHKLMNLVDQNGLCGGINGLEIGPHALHYNSQPDQSIKEVIVSRKCAESVLRGAQVYIPGVLACSSHVEKGDKVAVSVAIEQPAEDDAHHEERKGLYIGQGITAMSRSGIFRVPHGVAVEMTERVVWRLVSRMVESKHTKGILWCISAHILAAIAILMKDQGEIIALDRSHNKVMDILKLAAEMDLNCIKAYKLDALKSVRKTNEAKYIGEAGSRTDAIVTLAEDSEPCINKVDAGTTNASEDSSTTSVVQTDLRKNLRRMRNGPGRNNCSGGRVENSKGFLPNSFDRVLLDAPCSALGLRPRLFAGEETLESLRNHATYQRRMFDQAVKLVHPGGVIVYSTCTINPGENEALVRYALDKYKFLSLGSQHPKVGGPGIVGSFERSTKKYTE

SEQ ID NO: 104599 - protein, 119 aa, Oryza sativa
  unsure (1)..(119): unsure at all Xaa locations
  Clone ID: PAT_MRT4530_101918C.1.pep
XGRPSXXXXVXVXXKXXFRXXXXGYYTCKTCXXLXLYXXLXNSRLPSXXXXSSXNXAXXFIXTNXWXXXLXNXLXXWXXPXLXXXTVXAXXXXLSSXXRIXXXXPSAXXPESLVSXGKL

SEQ ID NO: 104600 - protein, 160 aa, Oryza sativa
  Clone ID: PAT_MRT4530_101919C.1.pep
MANYLPVALADSTRSWLHRLPRGTIGSWAELCDHFIANFQGTFECPGTQFDLYNISDITDDVIIAAFTKGIRHDLLVGKFGRKPPRTVKQMFEKANESAAICTLVPAHNTQSGYGPVTVFSGLWRGSNVAKEERYEEDRVDDLNRLEEAREAALIQFLLT

SEQ ID NO: 104601 - protein, 35 aa, Oryza sativa
  Clone ID: PAT_MRT4530_10191C.1.pep
MLVELEAQQRLGAHRTALSGRFMHAVHEAGLDITG

SEQ ID NO: 104602 - protein, 328 aa, Oryza sativa
  unsure (1)..(328): unsure at all Xaa locations
  Clone ID: PAT_MRT4530_101920C.1.pep
MANYMPVALADSARSWLHGLPRGTIGSWAELCDHFSANFQGTFECSGTQFDLYNVVQKSGESLRDYIRRFTEQSNKISDITDDVIIAAVTKGIRHDLLVGKFGRKTPRTVKQMFEKANEYAKAEDAVIASKQSGTTWKLKKDTPTAGGXGSTNHKDRXIPRTELKPSNAPFHGVIPGLSSTPLGQITLPVTFGTRENFRTENICFEVADFETANHAILGRPALAKFMAVPHYTYMMMKMPGPQGVISLRSDIKQAVTCDKESCELSQTHEITLAREEIRLAASTATKGEVLATKMPKNGEGDAKTKKIPLDPSDPTKTAVIGAELDCK

SEQ ID NO: 104603 - protein, 170 aa, Oryza sativa
  Clone ID: PAT_MRT4530_101921C.1.pep
MAKRLPADGLAAIRAALRPSARGLRSRPSQGGKAGKPSAAPLDTPRNAAGAGASAGRAEVRDLAAACGLQEDDRVPLSEVVLDCTRRWFQDTLKEARAGDAAMQVLVGQMYRSGYGVNKNEHKAQIWTEKASRYRSTVWKVSNKRPGYNASDSDSDDSKETGKQSHVTGK

SEQ ID NO: 104604 - protein, 179 aa, Oryza sativa
  Clone ID: PAT_MRT4530_101922C.1.pep
MGRWKEREKDRVPGNCNVKEGEVGVILQPLGTVSTEQLDGYLSSPGVDSRPIEIVEHDDFGYHYDYRNLDNFAEGFEDNYMPLYFGIFMADNETEEKRQAQENAVAAITLLDTLLKEDALNQANHVVNILNQTKTMIAASVPINSASVRTPTGSRVPPLRSRDYHQPSLSVVSTGNMIY

SEQ ID NO: 104605 - protein, 327 aa, Oryza sativa
  Clone ID: PAT_MRT4530_101923C.1.pep
MAQPTWSARRVTAALVVMVVVVLAVAGGSWAQLSPSFYSYSCPGVFNAVKRGMQSAIAREKRIGASIVRLFFHDCFVQGCDASLLLDDTASFTGEKTANPNNGSVRGFEVIDAIKSAVETICPGVVSCADILAIAARDSVAILGGPSWDVKVGRRDSRTASLSGANNNIPPPTSGLANLTSLFAAQALSQKDMVALSGSHTIGQARCTNFRAHIYNETNIDSGFAMRRQSGCPRNSGSGDNNLAPLDLQTPTVFENNYYKNLVVKKGLLHSDQELFNGGATDALVQSYISSQSTFFADFVTGMIKMGDITPLTGSNGEIRKNCRRIN

SEQ ID NO: 104606 - protein, 127 aa, Oryza sativa
  Clone ID: PAT_MRT4530_101924C.1.pep
MSGREKREGAIGSGSGRGKHGDRSIAGGRPGLRAVVRPLFTTASLQLPAYNTQWSIYISHTSIVTSRAMGEHVWDPSVICCVYGVGVLIRYRLGISGVVSVFCGRQSHREPRADEWPASKRLGSYPA

SEQ ID NO: 104607 - protein, 364 aa, Oryza sativa
  unsure (1)..(364): unsure at all Xaa locations
  Clone ID: PAT_MRT4530_101925C.1.pep
YPLILMKLPDDLAAVFTTRASSPRGLGGIWPRPRSSLAPGNSPGVDSRPTKIVEYDDFGYRYDYRNLDDFDEGYKDNYMPLYFGIFMADNETEEQRQAXEKQKXRVRQEAERRRLEEERQTQERERLXREQQERERAAKEAEDRRQRALEAGRRARELIGQQDVEGTAVFRTPQQNAVAAITLLDTLLKEDALNQANHVVNILNQTKTMIAASVPVNPASVHTPTGSRVPPLRSQDYHQPSVSVVGAGSNHRSRDHGERSVHSPPDRRREHRAEHPHSPHRRRPVDLRETRGTIGSWAELCDHFIANFQGTFECPGTQFDLYNVVXXSGESLRDYIRRFSEQRNKISDITDDVIIAAFTKGIRH

SEQ ID NO: 104608 - protein, 1765 aa, Oryza sativa
  unsure (1)..(1765): unsure at all Xaa locations
  Clone ID: PAT_MRT4530_101926C.1.pep
MGFVSGIDDFIFPPGQAFRFGSLDFITNDFGKISLLDSDSNQSGRGQVSAPFGIPNSAEIYSRIISTESASNHSDEIQSTPTRPDQDDRAYPSILMKLPDDLAAVFTTRASSPRRPRRDPASAPIQSSSREVGVILQPLYTVSTEQLDGYLSSPGIDSRPTEIVEYDDFGYRYDYRNLDDFDEGYEDNYTPLYFGIFMADNETEEQRQAQVAEEQRVRQEAERRRLEEERQAQERERLQREQQERERATKEAEDRRQHALEAGQRARELIEQQDVEGTAVFRTPQQNAVAAITLLDTLLKEDTLNQANHVVNILNQTKTMIAASVPDNSASVRSSRRSRDHGERSVHSPPDQHKERRAKHPRSPCHRHPIDLRETINQRRAARGYIPHHSPDRYDNNVDGVAAFTSDMRRVDWPAGFKPTGIEKYDSTTNPESWLTVYSLTIRTAGGDSKAMANYLPVALADSARSWLHGLPRGMIRSWAELRDHFIANFQGTFERPGTQFDLYNXIQKSGESLRDYIRRFSEQCNKISDITDDXLVGKFGRKPPRTVKQMFEKANEYAKAEDAVTASKQSGTTWKPKKDTPIAVGSGSTNHKDRKRKPEELVATTTHSSRQRSRVNTFDKIMNSQCPHHPNSNHAAKDCFVYKQFAEQYAKNARKASDGDQSTSKKKDDDDDASTGFQDHRKELNHIFGGPLAYESKRKQKLTEQEINVVQPDTPQYLRWSETTIKFDRSDHPDRVVHPGRSLINGGSALNILFAKTLDNMQIPRTELKQSNAPFHGVIPGLSATPLGQITLPVTFGTRENFRTENVCFEVADFETAYHAKLGCPALAKFMALPHYTYMMMKMPGPRGVISLRSDIKQAVTCDKESCEMAQTREIAITQEDIRLASTTASEGEVPATKISKSGESEAKTKKIPLDPSYPNRKDAIKEELTKLLAAGFIKEVLHPDWLANPVLVRKKTGQWRIMQEQLTNAFSTQIGRNVEAYVDDVVVKTKQKDDLITDLEETFASIRAFKMKLNPEKCIFGVPLGKLLGFMMSHRGIQANPEKINAILNMKPPISQKDVVSMVLVVEREEEGHVQKVQRPIYFVSEVLADSKTRYPQVQKLLYGVLITVRKLSHYFQSHSVTVVTSFPLGDILHNREANGRIAKWALELMSLDISFKPRTSIKYQALADFVAEWTECQEDTPEEKMEYWTMHFDGSKRLSGTGAGVVLISPTGERLSYVLWIHFSTSHNVVEYEALLHGLRIAISLGIRRLIVRGDSQLVVNQVMKEWSCLDDNMTAYRQEVRKLEDKFDGLELTHVLRHNNEAANRLANFSSKREAAPSDVFVEHLYEPTIPRKETIEATDTQDVGMIEADWREPLIRFLTKQELPQDKDEAERISRRSRLYIIHEAELYKKSPSGILQHCVSLEEGRQLLKDIHLGICGNHAAARTIVGKAYRQGFFWPTAVSDADKIVRTCEGCQFFARQTHLPAQELQTIPLSWLFAVWGLDMVGPFKKAIGGYTHLFVAVDKFSKWIEAKPVITITADKARDFFINIVHRFGVPNRIITDNGTQLTGGVFKDFCEDFGIKICYASVAHPMSNGQVERANGMVLQGIKARVFDRLHQYAGKWVEQLPSVLWSLRTTPSRDTGQSPFFMVYGAEAMLPSEVEFESLRFRNFSEERYGEDRVDDLNRPEEAREAALIQSARYLQGMRRYHNRNVRSRAFLVGDLVLRKIQTTRDRHKLSPLWEGPFIISEVTRPGSYRLKHEDGTHIDSSWNIEHIRRFYA

SEQ ID NO: 104609 - protein, 610 aa, Oryza sativa
  unsure (1)..(610): unsure at all Xaa locations
  Clone ID: PAT_MRT4530_101927C.1.pep
MGFVSGIDNFVFPPGQAFRFGSLDFITNNFGKISLLDSDSNQSGRGQVSAPFGIPNSAEIYSAIISTELAPNHSDEIQSTPTRPDQDNRAYPLILMKLPDDLAAVFTTRASXSPRPRRDLASAPIQSSSREVGVILQPLGTVSTEQLDGYLSSPGVDSRPTKIVEYDDFGYRYDYRNLDDFDEGYKDNYMPLYFGIFMADNETEEQRQAXEAEEXRVRQEAERRRLEEERQTQERERLXREQQERERAAKEAEDRRQRALEAGRRARELIGQQDVEGTAVFRTPQQNAVAAITLLDTLLKEDALNQANHVVNILNQTKTMIAASVPVNPASVHTPTGSRVPPLRSQDYHQPSVSVVGAGSNHRSRDHGERSVHSPPDRRREHRAEHPHSPHRRRPVDLRETINQRRAARGYIPHHSPDRYDDDVDGVAAFTSDLRRVDWPAGFKPTRIEKYDGTTNPESWLTVYSVAIRAAGGDSKAMANYLPVALADSTRSWLHRLPRGTIGSWAELCDHFIANFQGTFECPGTQFDLYNVVXXSGESLRDYIRRFSEQRNKISDITDDVIIAAFTKGIRHDLLVGKFGRKPPRTVKQMFEKANEYAKAEDAITAKAKK

SEQ ID NO: 104610 - protein, 83 aa, Oryza sativa
  Clone ID: PAT_MRT4530_101928C.1.pep
KIVVVVVNLPSPQSLIRGGPRNRPRPRPPHGNFGPTQSYMVERRKNRLIPSKNAYFSSGLSSQALGRGPVCPGPGSLIYGPWY

SEQ ID NO: 104611 - protein, 77 aa, Oryza sativa
  Clone ID: PAT_MRT4530_101929C.1.pep
MAMVADGGGCGSDGGGYRRCYLWRRWLKAIIRLTGIAGESLAEPFGRLTTATPFGVVPLLRGVVLAYPFSFPTIFSG

SEQ ID NO: 104612 - protein, 73 aa, Oryza sativa
  Clone ID: PAT_MRT4530_10192C.1.pep
PVYTRTDGTTGTDTPTGPNQRHDGFTTYLLVPTDQLLTTGGPRAQPYGDRLTNHHGPRTNGHDIDSDHTGPPT

SEQ ID NO: 104613 - protein, 158 aa, Oryza sativa
  Clone ID: PAT_MRT4530_101930C.1.pep
GRVGATVFFSFGGGPKGSFPQRTPGVPNVFFFDIFWGGENPQIGARENFFWDHFLFFGGALCPLSPGVLDTVKPPGGGSGLRIPVGGRQFPFPGGAKRGGFPVEFAGLLGAPLFWRVKMGGVLGGKKKKKKKKKKKKKKKKKKKKKKKKKKKKKKKQK

SEQ ID NO: 104614 - protein, 66 aa, Oryza sativa
  Clone ID: PAT_MRT4530_101931C.1.pep
NFKKNIKREEKSENLGGVKGGGNQIILGWFNCLFLIGKNFWPICFLKFPNAGEKRFFILGPRGFFF

SEQ ID NO: 104615 - protein, 43 aa, Oryza sativa
  Clone ID: PAT_MRT4530_101932C.1.pep
GRVVLDIYNNLHVYLAYCAKIEASNAGQRQNLQPSSKAYGKPK

SEQ ID NO: 104616 - protein, 89 aa, Oryza sativa
  Clone ID: PAT_MRT4530_101933C.1.pep
MPDQIQIEPLRPPASPSRRRHRSKTRVKKGDIASMKRLNQALSRLPHEPAAIHSSGCETRFMEEGCNWLGLDSLVEEVADMFLDHGKRK

SEQ ID NO: 104617 - protein, 340 aa, Oryza sativa
  Clone ID: PAT_MRT4530_101934C.1.pep
RIATRFLLGALNGMLAPIKAYSIEVCRPEHQALGLSIVSTGWGVGLVVGPAIGGYFAQPAKQYPNVFSEKSIFGRFPYFLPCLCISLIALVVLISCIWLPETLHKHKDTEGEIEMIDNSRSTLEEDSHKQKSLYKNWPLISSIIAYCVFTLHDTAYSEIFSLWAVSEKRYGGLSFSSKEVGQVLAVAGAGLLVYQLFIYRSVHKFLGSINSSRIASALSVPILATYPFMTHLSGFRLGIALYLGTILKGVLSITIITGTSLLQNNAVSQSQRGAANGISTTAMSFFKAIAPAGAGALFSWAQERQNEAFFPGDQMIFFILNVIELIGLALTFKPFLAIPN

SEQ ID NO: 104618 - protein, 101 aa, Oryza sativa
  Clone ID: PAT_MRT4530_101935C.1.pep
QQPAGGGIPPDLGWIWDSSLSFSCGFFFLGTTPRVLREAAKKREMRYSDLKKIDRGVRRHFHDDITVVVLFLDSALVGKRFYGGPLLSLRGGDGASTLTQK

SEQ ID NO: 104619 - protein, 53 aa, Oryza sativa
  Clone ID: PAT_MRT4530_101936C.1.pep
MAADDYGLWAMWPANSLGPRQHNLLADREQDIFCGKDLSVEMMSINGSYRSDK

SEQ ID NO: 104620 - protein, 210 aa, Oryza sativa
  Clone ID: PAT_MRT4530_101937C.1.pep
MGATMQLVVGLAGVASSSPRLAPHCAVATATTTSSCSVRKQSCSCCGAAHLPRRLQHKQQRRCGIRVRAVETDAAAGGEAKAAPEEPPSVDFAFVAPRLLPDGTPDVHYRTACGGQKLRDIMLDNYIDLYGPYDKLLLNCEGGGECGTCIVEVVEGGELLSPKTDVEKELLKRKPKTWRLACQATVGNPDSTGQMVIQQLPEWKIHEWDK

SEQ ID NO: 104621 - protein, 85 aa, Oryza sativa
  Clone ID: PAT_MRT4530_101938C.1.pep
MSTVARLAKWATECHCWILDISNRDKNKSCGSVHPSTNIVYEFSSRHGKKTQVVLNLGFSQFSKAFMKVLWIDCGSFGFHRFVGG

SEQ ID NO: 104622 - protein, 381 aa, Oryza sativa
  Clone ID: PAT_MRT4530_101939C.1.pep
MAGAVRTGGKGTVRRKKKAVHKTGTTDDKRLQSTLKRVGVNTIPAIEEVNIFKDDLVIQFVNPKELQDVLPGIINQLGPDNMEHLKRIAEEMQKQVAAAGATAQAKEENDDDVPELVPGENFEESLSLGTENNHRKMEDEQKILCLAKSSLCSTMDEQQLAQYATLAGGGSVRRRADVADGYADHPAGEHGVEVGGVLDGVMITRQHLAVIFTYLVRTYTAVPHVSRRAGWTLRVTAATGGSENSDAGRAGFLATTVLGLDDGGHGLAAEGASGFLEIEGGGGGGRGLATARFDDDVARAIFLACAAAAAAGEMTLGAASAGRLGADVVRDMILLAGECEEMEDGLLAAAVDLTRELGNCGGIASPLDGYAAAAAAVDSAS

SEQ ID NO: 104623 - protein, 130 aa, Oryza sativa
  Clone ID: PAT_MRT4530_10193C.1.pep
TKWQLTCVPRDLIRGRLLRHARMAAWMLIHGCAGGGGGREPKIRASLIVQPTNVYKPHLSQPCWKRGEKIAHLPSEKSGFVGNLGMQNAILLRRRHHQHHTFSSFHSLLSLLCSLAGVHVQFDALLQTEL

SEQ ID NO: 104624 - protein, 215 aa, Oryza sativa
  unsure (1)..(215): unsure at all Xaa locations
  Clone ID: PAT_MRT4530_101940C.1.pep
CRRSSPTPASSPPPPPTSHLPSPRTRRPTRSCPARRRRPTSRRSPPPGSSLPPPPPPRRPRRSLARRHRQTSPSPSRGXPPPPPSISKKPDAPSAARPWPPSSNPKTVVARKPARPASEFSEPPVAAVTRSVHPARRLTCGTAVYVRTRYVKITARCCLVIWLPARVVSSSDAYHYTVKYAADLHAMFAGRVVRVPVGHVRPAPHRAAAGERSIW

SEQ ID NO: 104625 - protein, 158 aa, Oryza sativa
  Clone ID: PAT_MRT4530_101941C.1.pep
MNKERLMKMAGAVRTGGKGTVRRKKKAVHKTGTTDDKRLQSTLKRVGVNTIPAIEEVNIFKDDLVIQFVNPKVQASIAANTWVVSGSPQTKKLQDVLPGIINQLGPDNMEHLKRIAEEMQKQVAAAGATAQAKEENDDDVPELVPGENFEEVAQETKA

SEQ ID NO: 104626 - protein, 77 aa, Oryza sativa
  Clone ID: PAT_MRT4530_101942C.1.pep
HCHISRHRPLTEIHALYRNIEYLHRHSTEDMLHGDTGVECTCTGPLALLCTYPKRKPWKPLHNTDSHHTSCLSKQDP

SEQ ID NO: 104627 - protein, 453 aa, Oryza sativa
  Clone ID: PAT_MRT4530_101943C.1.pep
MDSLYDISCFAAGLAGNIFALALFLSPVTTFKRILKAKSTERFDGLPYLFSLLNCLICLWYGLPWVADGRLLVATVNGIGAVFQLAYICLFIFYADSRKTRMISFCLMAICHQERKRMVELCALPPPLSPPSAAPGWAVSRVGLRPRCPSLLALAAIPRVGRRGRRGEEEGRTDMWAPHVGEGGRARSNLGPDNGCDLNVIGDSFRRYGSRRAMFASYEAKGNVLFLSRNLKKIPPIHIPSSAIPAKITSNRLLSTCRFPRTPSLHGGGGGGGDHRTTDDDDGSNGRDQAATLSDVDRFLFDNFRSLYIHDGDNHQQRRQPPPSPGKFTQPAAAETSSSRSESVAEDARGTSSGDEDDNNSSTAIMLFSVDPYTDFRRSMQNIIEMHHGEEPQPLDWDFLEELLFYYLQLNEQSVHKYILKAFADLTAGAHVSCPARGKPQWADKSVRSRKHY

SEQ ID NO: 104628 - protein, 135 aa, Oryza sativa
  unsure (1)..(135): unsure at all Xaa locations
  Clone ID: PAT_MRT4530_101944C.1.pep
QVGGVVVRDNVRSADEENASDNPEGITGEQSPEAPPKTACRSLVRKMIPSGGEQEPQLCASKVFYIYRKPFLMRQRSFLFSRHGLGLTEKKTSLLSLICLPKKXXXNXPQLPPPSPPVDRSRKLVTNPRVRGRVG

SEQ ID NO: 104629 - protein, 85 aa, Oryza sativa
  Clone ID: PAT_MRT4530_101945C.1.pep
MVSGQSDRHRTGRRTPMDAATRIVPTEEIMHPTSGHGIADGKPSWATTYDGRSWRRRGASMPPLDGEIRRKGIARWGRRDATWGD

SEQ ID NO: 104630 - protein, 45 aa, Oryza sativa
  Clone ID: PAT_MRT4530_101946C.1.pep
SSVAPVRPWHCRSSQTTTSSRLPSPKRRRNAKEGAPKPRRASSVN

SEQ ID NO: 104631 - protein, 450 aa, Oryza sativa
  Clone ID: PAT_MRT4530_101947C.1.pep
MREIISIHIGQAGIQVGNACWELYCLEHGIEPDGTMPSDTTVGVAHDAFNTFFSETGAGKHVPRAIFVDLEPTVIDEVRTGSYRQLFHPEQLISGKEDAANNFARGHYTVGKEIVDLCLDRVRKLADNCTGLQGFLVFNAVGGGTGSGLGSLLLERLSVDYGKKSKLGFTIYPSPQVSTAVVEPYNSVLSTHSLLEHTDVAVLLDNEAIYDICRRSLDIERPTYTNLNRLISQIISSLTTSLRFDGAINVDVTEFQTNLVPYPRIHFMLSSYAPVISAEKAYHEQLSVPEITNAVFEPSSMMAKCDPRHGKYMACCLMYRGDVVPKDVNAAVATIKTKRTVQFVDWCPTGFKCGINYQPPSVVPGGDLAKVQRAVCMISNNTAVAEVFSRIDHKFDLMYAKRAFVHWYVGEGMEEGEFSEAREDLAALEKDYEEVGAEGADDENDDGEDY

SEQ ID NO: 104632 - protein, 55 aa, Oryza sativa
  Clone ID: PAT_MRT4530_101948C.1.pep
YYAKISLTLNKLFAATDTGIAHRTTTDGQIQKLSQEHRRTAHQHAPKAGGARAQR

SEQ ID NO: 104633 - protein, 410 aa, Oryza sativa
  Clone ID: PAT_MRT4530_101949C.1.pep
MATARGGGGVGWLVVVVAVVCLSCAAAAARSPAGRAHRHLKRLNKPAVKSIESPDGDIIDCVHISHQPAFDHPFLKNHTIQMRPNYHPDGLYDESKSGGGGEKPMVQLWHQGGRCPEDTVPIRRTKRDDLLRASSMRRYGKKRHPAPNPMSVDPNLLNEGGHQHAIAYVQGDKYYGAKATINVWAPKIEQPNEFSLSQLWILGGSFGEDLNSIEAGWQVSPDLYGDNNTRLFTYWTSDAYQATGCYNVLCAGFVQINSEIAMGASIFPISSYSGSQYDISIMIWKDPKEGNWWMQFGKDYVLGYWPSFLFSYLGDSASMIEWGGEVVNSQLDGVHTSTQMGSGHFPEEGFSKSSYFKNIQVVDSTNNLKAPKGVGTFTEQSNCYDVQNGNNADWGTYFYYGGPGRSSNCP

SEQ ID NO: 104634 - protein, 56 aa, Oryza sativa
  unsure (1)..(56): unsure at all Xaa locations
  Clone ID: PAT_MRT4530_10194C.1.pep
PSLFFKHTPKKNVKHSKKKILTLKPFPWTPXEASFFKNPPIFFPNIQQPFXLTPSF

SEQ ID NO: 104635 - protein, 734 aa, Oryza sativa
  unsure (1)..(734): unsure at all Xaa locations
  Clone ID: PAT_MRT4530_101950C.1.pep
MEKDKTEDKKRLAEKDVVLLVKDKEEDVTRLTKDKEAMGKLLKDKEDIIRLMKEKEEMVWMMREKENMVSLNNGRVEDKHQLTDKDVANSAKYRNEIIKLMKEKEDSNDTIMKLNIELEAMKSSYEGTRILLDSKKKEVLQLLMDKESIEYIVSQLKQELAIERSSHQTHIQELETRAFQANNNLDKXIKXMSFMLEDSKQEDLRLSSVSIRHEILHCQKRWSEEICDLGQSLKVLTNAAENYHATLEENRKLFNEVQELKGCKANSIAHLYADILNYQLLILYAYLSGNIRVHCRIRPFLPGEDQTSTTIEYVGDNGELILANPAKRGKEGHKLFKFNKVLGPSASQDEVFKEIQPLIRSVLDGYNVCIFAYGQTGSGKTYTMTGPENATEKEWGVNYRALNDLFHISRSRRDTVIQPNGLAVPDATMHPVNSSSDVIELMRTGLENRSVGATALNERSSRSHSVVTMHIQGVDLKTGVTLRGALHLVDLAGSGNAKTLMFVQVNPDVSSYAETLSTLKFADRVSGVELGAAKANKEGKDIKEFKEQLSLLKDKIAKKDEEISRLQLQSHNTPRATAKRADSLLKHSSSSPGISSLGSKIQHRRTASGGRIKIVGSRAGSDVDNFSDISDRHSEAGSMQSVDDIQQSREIMGLSKLSMSEMGHNSVDPELPCFGYDDSEGRLSDISDSGLSMGAETDCSMSSVVELTSLPDQDRVSGTQKEQHMAPSTPKDRL

SEQ ID NO: 104636 - protein, 442 aa, Oryza sativa
  Clone ID: PAT_MRT4530_101951C.1.pep
MGKGNGGAAKGETTVPRRKVALGWRGAAKAEGADEPRQSEQGEDAGDAAKKEKAPAAPRRRGLCGEDTRGTAMRFLWRESQAGRESSRIEPATEKKSRARGSTAGCPGHINTLLAARSESTQHKQAMAESDKNGEDKCEMRDTVDKKKQEWKLTWEEKVVEVLHIVRCRGFTEYNHKLLRSLPTRFHTHNIAFFDLDKESKLGRGPPVKKALASSEYWRMMDSVNVIAIKVTESDVSYPISIFGTVLARDVYDYRCIYLFRRGRDDAQIITSPEDTLLLTGPNRALAASDNIYFEFHLKIKGDEGVDKASGAVSIKGLVSSKFSGKVTAWTSGDDENKIILYDSEVKGTNRALGPGGSIDLTRRFVAVKLDDTLVLNVSVSEGDHHEEAELFELVVGHDDDEEECIRQQGPYELQVKVVWTAGLEESWRRSSGGVPAILVLL

SEQ ID NO: 104637 - protein, 1147 aa, Oryza sativa
  Clone ID: PAT_MRT4530_101952C.1.pep
MSSAAADRRRAEAVAWLRALLRGCGGGGGGQPLPPPHASEDDLRAALADGALLCAALRRLGCDPAAASDEGTGSAAAAAAAAGEGDVGRFLAAAERMGLPGFSPSDLDTGPVSSVVTCLLALRDQFVSHDVGGLSCSLPEKVMMQSMEFPRKENDPGTQNSEGRRKIPKNPAMSEPSSPLSQTTLSSISRHAGHSFHDVFQLRQGRYSDLPSSKISEMMKSTSLDNAPTQSLLSVVNVILDELVETKIGEIPYHLACLLRKVILEIERRISTQAEHIRNIIPVVIVACMQQNNLMKAREEKYKSRIRVLEALASGTSDQTHVNSNATNGKAHVSPDHAVHQMKMEKDKTEDKKRLAEKDVVLLVKDKEEDVTRLTKDKEDMAKLLKDKEDIIRLMKEKEEMVWMMREKENMVSLNNGRVEDKHQLTDKDVANSAKYRNEIIKLMKEKEDSNDTIMKLNIELEAMKSSYEGTRILLDSKKKEVLQLLMDKESIEYIVSQLKQELAIERSSHQTHIQELETRAFQANNKLEQRIKEMELMLEDSKTRVRDLEELLESRSQIWEQKEIRLNQFIGLQIQNIQDLRLSSVSIRHEILHCQKRWSEEICDLGQSLKVLTNAAENYHATLEENRKLFNEVQELKGCKANSIAHLYADILNYQLLILYAYLSGNIRVHCRIRPFLPGEDQTSTTIEYVGDNGELILANPAKRGKEGHKLFKFNKVLGPSASQDEVFKEIQPLIRSVLDGYNVCIFAYGQTGSGKTYTMTGPENATEKDWGVNYRALNDLFHISRSRRDTVMYKVSVQMIEIYNEQIHDLLGNSGSEKKYPFGSQALNQPNGLAVPDATMHPVNSSSDVIELMRTGLENRSVGATALNERSSRSHSVVTMHIQGVDLKTGVTLRGALHLVDLAGSGNAKTLMFVQVNPDVSSYAETLSTLKFADRVSGVELGAAKANKEGKDIKEFKEQLSLLKDKIAKKDEEISRLQLQSHNTPRATAKRADSLLKHSSSSPGISSLGSKIQHRRTASGGRIKIVGSRAGSDVDNFSDISDRHSEAGSMQSVDDIQQSREIMGLSKLSMSEMGHNSVDPELPCFGYDDSEGRLSDISDSGLSMGAETDCSMSSVVELTSLPDQDRVSGTQKEQHMAPSTPKDRL

SEQ ID NO: 104638 - protein, 188 aa, Oryza sativa
  Clone ID: PAT_MRT4530_101953C.1.pep
MLVNAESFAQPDKSSLISGSTSETNNRTLPRLESLVIWNCDRLEVLHLPPSIKKLDISCCEELQSLSGKLDAVQELNIESCQSLKSLESCLGELPSLQQLTLFDCESLVLPPSLQQRLDDIEEKELDACYEVPPRGSGRTRLGPEGRGAPTPRGFLLRVYGLDRSDRGLGGDRRSDARLAPSRQDEGF

SEQ ID NO: 104639 - protein, 157 aa, Oryza sativa
  unsure (1)..(157): unsure at all Xaa locations
  Clone ID: PAT_MRT4530_101954C.1.pep
LREGLRRFGXEFKDTEIGDIMEATHNDXNVTSTYEEFIAATLPLNKIEREEHLLAAFTYFDKDGSGYITXDKLQRACGEHNMEDSLLEEIISEVDXNNDGQIDYAEFVAMMQGSNVGLGWQTMESSLNVAFALLVVLSTTCITHESRHVCVKKKKKK

SEQ ID NO: 104640 - protein, 542 aa, Oryza sativa
  Clone ID: PAT_MRT4530_101955C.1.pep
MGNQCQNGTLGSDYHNRFPREHAVGYVQGDSYLDLKKFDDTWPEVNNFKPTAASILRRGLDPTSINVLGRKTADLREHYIIGRKLGQGQFGTTYLCTEINTGCEYACKTIPKRKLITKEDVEDVRREIQIMHHLSGHKNVVAIKDVYEDGQAVHIVMEPCAGGELFDRIQEKGHYSERKAAELIRIIVSIVAMCHSLGVMHRDLKPENFLLLDKDDDLSIKAIDFGLSVFFKPGQVFTELVGSPYYVAPEVLHKRYGPESDVWSAGVILYVLLSGVPPFWAETQQGIFDAVLKGHIDFQSDPWPKISDSAKDLIRKMLSHCPSERLKAHEVLRHPWICENGVATDQALDPSVISRLKQFSAMNKLKKLALRVIAERLSEEEIAGLREMFKAVDTKNRGVITFGELREGLRRFGAEFKDTEIGDIMEAAHNDNNVTIHYEEFIAATLPLNKIEREEHLLAAFTYFDKDGSGYITVDKLQRACGEHNMEDSLLEEIISEVDQNNDGQIDYAEFVAMMQGSNVGLGWQTMESSLNVALRDAPQVH

SEQ ID NO: 104641 - protein, 126 aa, Oryza sativa
  unsure (1)..(126): unsure at all Xaa locations
  Clone ID: PAT_MRT4530_101956C.1.pep
DIKNRNNSKRRRLYPVNVPPLDREAELPPLVLSFAALDPAPGVPSLGAAVVAADMVKTYGRRRGAXCGSTPQKPDHPPTRCRSXGEGVVSEALLVPISCARKRSEAGKQNSSSTGARGGGRTPVGK

SEQ ID NO: 104642 - protein, 542 aa, Oryza sativa
  Clone ID: PAT_MRT4530_101957C.1.pep
MGNQCQNGTLGSDYHNRFPREHAVGYVQGDSYLDLKKFDDTWPEVNNFKPTAASILRRGLDPTSINVLGRKTADLREHYIIGRKLGQGQFGTTYLCTEINTGCEYACKTIPKRKLITKEDVEDVRREIQIMHHLSGHKNVVAIKDVYEDGQAVHIVMELCAGGELFDRIQEKGHYSERKAAELIRIIVSIVAMCHSLGVMHRDLKPENFLLLDKDDDLSIKAIDFGLSVFFKPGQVFTELVGSPYYVAPEVLHKRYGPESDVWSAGVILYVLLSGVPPFWAETQQGIFDAVLKGHIDFQSDPWPKISDSAKDLIRKMLSHCPSERLKAHEVLRHPWICENGVATDQALDPSVISRLKQFSAMNKLKKLALRVIAERLSEEEIAGLREMFKAVDTKNRGVITFGELREGLRRFGAEFKDTEIGDIMEAAHNDNNVTIHYEEFIAATLPLNKIEREEHLLAAFTYFDKDGSGYITVDKLQRACGEHNMEDSLLEEIISEVDQNNDGQIDYAEFVAMMQGSNVGLGWQTMESSLNVALRDAPQVH

SEQ ID NO: 104643 - protein, 67 aa, Oryza sativa
  Clone ID: PAT_MRT4530_101958C.1.pep
NQTFGLSFISYYISYIINISQIKSLFYYYKKKSTISNLNPTLFFTKLFKNPYLNTINLINPTFLSMS

SEQ ID NO: 104644 - protein, 66 aa, Oryza sativa
  Clone ID: PAT_MRT4530_101959C.1.pep
LKYYSNRLTLIMSTEGVYLMPIDLHKYTIEIAGGKRDTEVRNGTEAREWTRYRAFIEQEQLWSGSH

SEQ ID NO: 104645 - protein, 266 aa, Oryza sativa
  Clone ID: PAT_MRT4530_10195C.1.pep
MASPQLQLQVLALLLLLATTATATATPTPTLIFLLGGQSNMGGRGGATNGPWDGVVPPECAPSPRILRLSPELRWEEAREPLHAGIDVHNVLGVGPGMSFAHALFRAIPPSTVIGLVPCAQGGTPIANWTRGTELYERMVGRGRAAMATAGAGAGARMGALLWYQGEADTIRREDAEVYARKMEGMVRDVRRDLALPELLVIQVGIATGQGKFVEPVREAQKAVRLPFLKYVDAKGLPIANDYTHLTTPAQVKLGKLLAKAYLSTL

SEQ ID NO: 104646 - protein, 118 aa, Oryza sativa
  Clone ID: PAT_MRT4530_101960C.1.pep
MRGGVEAANGGRTEGVRVVCGWEVCRPTTGGVWTAALEDNGMACRWRRFEGLFTLGALIGSLLDLDAGAILAIHPERIPGSQSYKMNTIEEKVHVIRGAREDAKVACRRESKCLAACC

SEQ ID NO: 104647 - protein, 262 aa, Oryza sativa
  unsure (1)..(262): unsure at all Xaa locations
  Clone ID: PAT_MRT4530_101961C.1.pep
AVAFPGVAAASSSPALPPIRGEIIGDAPPPASSGVAATTPSLAGCCSSPVRRPTSPSPPSTSQRRPLLRLLLSFAGTPPPPRRPLVSPRRRXFGSPFRRARAPADVAISTSGITAARSPSASPPLHPNTAGXCRLPSSSPRRPRSSSSSSSRRSRFCSSWRSSLRQADRVRRPXSSGEPLQPRRLRPRLRVAKRCTGRVSPSSKDRRRSRSLAVRLRRLRAIFAAPVHRRRSHASSRGASVVPKVLEAWFAVVAEGSEGCSL

SEQ ID NO: 104648 - protein, 138 aa, Oryza sativa
  unsure (1)..(138): unsure at all Xaa locations
  Clone ID: PAT_MRT4530_101962C.1.pep
ACSASAQFDVLGQRYKQYQLQSPVLLQQQELIPYNEFVRHQHGIAASLFLQSDALHLRNNQVXQQLALVAQQSHYQDINIAQAIAQQLQLQQYSGDYCDQTQAQAQTLMTFNLPSICGIYPNYYSARRSIDTCGGVWY

SEQ ID NO: 104649 - protein, 333 aa, Oryza sativa
  unsure (1)..(333): unsure at all Xaa locations
  Clone ID: PAT_MRT4530_101963C.1.pep
DGAARGRXPYHHATRRGNDDGERARRRXSETTEANGEGATSAAILGRRRDAAGATLGDAEVRTKTTXCSGSLDEXGRRTRSAXRRDQRHDERNWERREDDDDDDRGWRGDDDGSRQRLHGDEDGVEHAAAMPTTEAAPRDDEPARMNGEDDDGHRRCSGGGEARPRTTLPLXCRRWRWQRRPAHGHGGRGYRRRRRRGERRGRRGGGGVPAKPRSSRRRGRCCDVDGGDGDVGRRTGDEQQPAGDGVVAATPLDAGGGASPVISPRIGGSAGEEDAAATPGKATARPDGARARRERRLEVAGAGEREGRRREGVVRPREYAGGGFCKPCQVNQ

SEQ ID NO: 104650 - protein, 228 aa, Oryza sativa
  Clone ID: PAT_MRT4530_101964C.1.pep
DMEERNDVNMDKSDEILLPGFRFHPTDEELVSFYLKRKIQQKPISIELIRQLDIYKFDPWDLPKLASTGEKEWYFYCPRDRKYRNSVRPNRVTTAGFWKATGTDRPIYSTEGTKCIGLKKSLVFYKGRAARGIKTDWMMHEFRLPTLTDPSLPKKPIDKNIPLNDSWTICRIFKKTSSMAQRALCQTWGAQLPGTIDPDIFSTLQSVQASQFALEKTQKVGLSHAKHH

SEQ ID NO: 104651 - protein, 260 aa, Oryza sativa
  unsure (1)..(260): unsure at all Xaa locations
  Clone ID: PAT_MRT4530_101965C.1.pep
GDVGQRTGTAEGAAEGDVDEEKGEAGAAAVVFRRNRGAAGGEDDAATATEETATSVGVPATNSSRPKMVXWWRRHWXAGGGASPAISTRIEGGAGEERRLRCRGRRRHGARTELGREGEGRGRDSNATGRWRGCVSGGPRAKRRTRRGRKGSCEAEDGDGTAGRRTAEAAGGGWWHGRERRTAGRHDAATGELGKXLKRENGRRGFHFIGAGRDPAAMEGGRKKAWAFRVMEGAIQGGIRGEIKRKERGLIPPINFGIQV

SEQ ID NO: 104652 - protein, 667 aa, Oryza sativa
  Clone ID: PAT_MRT4530_101966C.1.pep
MKDFMKLYHQREIQLLVLLSFTLQMFLFFTGSLRRRNTNVFLRVSIWTAYLGADFTAVYALGYLSRHDDIQRQMSGGTQPLAFFWASFLLIHLGGQDSITAFSMADNNLWLRHLLNLVVQVVLAAYVFWKSPARHSAELLVSGVLVFIAGVTKYGERTLSLKYGRFKSLESSTGDHYKKRFPELNDSDHGYSKVVLDALCSMLNVHNVFAARNPFVNGPESNSPVVIARDTVQGTKKMLKVVELELAIMYDDLYTKALVLRTRIGMILRCTSHACSLLAFALFLTCDKRRYNGVDVAITYSLFIGGFFLDLSAVFIFIMSPWTWAWLKAQKCDRLASLSWFLFSSDIGWPEKRPRWSNSIGQYNLLNWVSGGDQPRSYNQKVVALVRRLSSLVGVGKEDLFWLSKTLDTEHVEADEKTMEFVVKGISSLSDEVSEQQQWQHLGPLLKKIRVCFVADMGCAIVVMHIFTQVYLNAVEAAAAGDEGGGDADDMVEVCRKLSNYMMYLFVNHPSMLPLNASSEATVVEFAKSREELSRTQQGSKMTLDELYNIIQQNKDGVSRQGTMEEMYKMILEEDVQPSWGAVEEMAAMWLRFLIFAAGRSNGKVHAAELASGGELITFAWLLMAREGLGESERRRVRLTSTISSISSADSAGAAADLKEAYAFFFN

SEQ ID NO: 104653 - protein, 228 aa, Oryza sativa
  Clone ID: PAT_MRT4530_101967C.1.pep
MLKFDQGLHLSMPTLREGAGGLSSWSATRTSVALRILEALHAKDAKRQNDGNGALTVAAQQAGDALNTSSRHFQPPIVVMKPARSTEKQPGVSLASVDPLAGFRNLRKLQARDAPCIGEHETSTNEKVHSRISRAQSKSDEPASRASSPRPTGSSSPRTVQRKAESERRSRPPVSPKSPSKKSSEAASPGGRTRTKPSQGKNHRDNEVSKSPRSRISMVKEIDISIMD

SEQ ID NO: 104654 - protein, 691 aa, Oryza sativa
  unsure (1)..(691): unsure at all Xaa locations
  Clone ID: PAT_MRT4530_101968C.1.pep
MRPPTPLPFLLLLLLLLVLLLPSPSAAAAGGADGWEAIGAAAAGGGPRRVASPGEQEAAAAGLLRRLLPSHARSFRFQIVSKGGVCGGSSCFRISNADGSRRNGAEILIQGTTAVELASGLHWYLKYWCGAHISWDKTGGAQLASVPLPGSLPQVKGTGVKIERPVPWNYYQNVVTSSYSFVWWDWKRWEKEIDWMALQGINLPLAFTGQEAIWQKVFKSFNVTDRDLDDFFGGPAFLAWARMGNLHGWGGPLSQNWLDQQLTLQKKILSRMIELGMVPVLPSFSGNVPSVFKKLFPSANITKLGDWNTVDGDPRWCCTYLLDPSDALFIDVGQAFIRQQMKEYGDITNIYNCDTFNENTPPTNEPAYISSLGSAIYEAMSRGNKDAVWLMQGWLFYSDAAFWKEPQMKALLHSVPTGKMIVLDLFADVKPIWXLSSNSSDESYLRCIXHNFAGGNERYGVLESIASSPIVSRTSHNSSMVVDGVCLEGIGHNPLVYELISEMAFRKQKVXVRIXLKIVSFRRYGQPNVHECLPKESFKWSXFNTKKIPRAHCGYNDTLLASDDNFLLGPWLEDAKSLARTENERKQYEWNARTQVTMWYDNTKTEQSKLHDYANKFWSGLLKSYYLPRASKYFSRLTKGLQENQSFQLEEWTKDWIAYSNEWQSGKELYAVKATGDALAISSSLFKKYFS

SEQ ID NO: 104655 - protein, 104 aa, Oryza sativa
  Clone ID: PAT_MRT4530_101969C.1.pep
RPIGAWLIRPPTDWDVAQFDPHHSRCLIVCLSCCDGRSMNYNAIRFSFTRVPSTYPPIPLQEFFTAHVLGIEWLLIQKCCEELPYFSMQGQIYFGGGGGSSLYC

SEQ ID NO: 104656 - protein, 149 aa, Oryza sativa
  unsure (1)..(149): unsure at all Xaa locations
  Clone ID: PAT_MRT4530_10196C.1.pep
MPIPVDLGEPDNRRFFVWVEDNIFTVLPPDAXDQYSGFNKWTVQKPAGGLTAINLLFPGAATAAQLLYGRPDSECSKPEDVDGVYCVEAQVHFVGEQLDGTEFVSTRENGIPQRFIVGQENVMHGLNLVVSAMRPGERAIFTIPPKLAM

SEQ ID NO: 104657 - protein, 521 aa, Oryza sativa
  Clone ID: PAT_MRT4530_101970C.1.pep
METGIFIQVRAPELSGKITFVSDAGHMLDQGSSINTRNGSIDRISNLPNELLYAIMSTLPALELVYTGMLSTRWRHLWTSSAYLNIDVNQFGRHRGQKFCNFVNRMLRQRGSSLLDALRLHSADTRDAGSWITYAIKRSSKVVEFSEDIDCEPFKLDYGVVDFTSICLKFLVLNNVCIDANVFYPINSSCPALENLELRDCSLEVPEISSGSLLHLDIDNCCLFEDLLISSSSLMSLCIKNPQHRAPMIMTLPCLEVAIVILDEFFHSTDDLADMDEGEEQDGEEINHGIVSGLTKARSIELIAPLREEVCEYCLQEPPTAPPLVKEFTADYLKKITIYFWLGDERKGDCPKYPPTVIGVQSWTSMPNLGLNGGDGESEGKLQKECSKISEFLQEFDGVPECWHSSNGVLEKAGIHFGEHFTRYYGEGKEEKLVKEAAHRFADGTLLTYGFHFHRYLPSMVTALAIFLARLHVLARESWSKDLTEPIDLLGCITPSPVPIGSGIRGYPDAWEKLPSHYGSG

SEQ ID NO: 104658 - protein, 184 aa, Oryza sativa
  Clone ID: PAT_MRT4530_101971C.1.pep
MSWHWNVHRSTTLSPQIWWRESDLTRVEARRSPHRPSRHVQHQQGRLAPRRDRWVAVVAVSSPPPSLSLSPWPGKPVGRWLMLTVAATTTTRPSHYQSSLPLPSVDPTASRHPTRSRHGSEWSPSPPPPPPVAAAYPTQPRHQSPPHQIQPGRRSRRSPLPPPPPPVAIAPPLSSARPGQMTRI

SEQ ID NO: 104659 - protein, 82 aa, Oryza sativa
  Clone ID: PAT_MRT4530_101972C.1.pep
MAVEAISEWLVARPHCQRPVPAWLTRYRACVFDGNGGAWTHEPSGLDERVITDQGHLLRRYDNRVREEHRSKSNRYHSGVPL

SEQ ID NO: 104660 - protein, 78 aa, Oryza sativa
  unsure (1)..(78): unsure at all Xaa locations
  Clone ID: PAT_MRT4530_101973C.1.pep
EKKRGKGEKVRECRKRKKREGKWKKGVKGKEGDERKRMKXEKRKGKRKRRKXRKNKKEEGKERGERIERKEEEERKKG

SEQ ID NO: 104661 - protein, 81 aa, Oryza sativa
  Clone ID: PAT_MRT4530_101974C.1.pep
RLLIHHASRRLTFGPPSSSAAHPSKWALIEALGSICAHRITRITRRTACSRRGRSSSETAARCQLRTTLAAYYTRANVRAA

SEQ ID NO: 104662 - protein, 140 aa, Oryza sativa
  Clone ID: PAT_MRT4530_101975C.1.pep
MASRDSLHRSTATADLLLGDAHWDRFQEAVLELRHDVTEAQAVLRRGNAARRGSRPPSGPNAGPKELCRLASATAAATKHLSPRLSFGSIAEEIEMAAAASIAVFMTTMFMLWPWHPHARRRQHLWPLHRRPRQRRGGIS

SEQ ID NO: 104663 - protein, 196 aa, Oryza sativa
  Clone ID: PAT_MRT4530_101976C.1.pep
QESRRERRGRSSPKKPHLRRVRAPAPTGREEGVANGERGGCHRGPRLHNGLRSLPAAAPLDLHPPELASHAAPRSGRGGGEALEPSRCPALSSSRRPLLLRHRAPVSPATAPPTSPLLHRRAPGPAAAPPGCPGAVSARAAAPPGSCFARPPRRRLHSGCCSTRPPRHGGRRRGERRPSIGARWPSRSNGPQPPRD

SEQ ID NO: 104664 - protein, 408 aa, Oryza sativa
  unsure (1)..(408): unsure at all Xaa locations
  Clone ID: PAT_MRT4530_101977C.1.pep
RSDAARPAAGPPPHRSPHSGMVERARALPLGGGPGATPPCPICTDLLNPPDFVPNPPTPPPPKNHTXIHLTYSYGLPAPPPPRPCRTPPPRDEGGQPPKGRNPCSSRIGGAARAPTASPPRRSPXPRTRSPAIERDPRNFDPHSAPPPIPLPGPSVSVHPPPDPSTPPADPEEEPCARGGIEDSSPXAIAPSLGSVRRFHYPLRGPPATAPSPRFRLPPPPLSSSAPHRPPRPPSDAAXPPPVPSPPPPPPPPLSPAPRPPPPPPPPPSPAPPLPPTPAPSFLLLYALLSGHSPAPSPSPPSTTKPPLPXPPLHRSTSRPGPPAPAQPRPLRDSASPXSPPLAAPSPSRVRLSPTRPAASRAPGVPPDAASTQPPRPAGPIHRPPVRPMLVRHSASGNTTTTRDRMDV

SEQ ID NO: 104665 - protein, 222 aa, Oryza sativa
  Clone ID: PAT_MRT4530_101978C.1.pep
MWVLLLLPSSSLSPFSLFFSPSSSPSVGGAWRQASPQRRRTAAPAVLSPSLVYPVIVAFSSSPAPLSAFLLFNHASSCSLSTSLPTFPALLKSCARAFNQSSRASAALVFISNGMELHCLVLMIGCGKDRYVRNALVSMYGKFGRLGDARKAFDEMPAKNAVSWNALVGAHRAAAALQTGRVHLEAYLMIKENPSTANSLWKMLAACRSSAWAHQSCLQVFS

SEQ ID NO: 104666 - protein, 382 aa, Oryza sativa
  Clone ID: PAT_MRT4530_101979C.1.pep
MGGGGDLSPSSAPSSPSSSSEPLPHEFAEYAAVSPAIDGESDGCCVCDDPEVEAFLHGGRLQDRSLREAKELIRRYKPGDLVEGVCGTKSGDYVLPDITTFLLVGPRDAGKSALVNRITRVFDKDDDPDAPDRAQVSCNSKSTGTSFLREYRVPRNSNSICIYDTRSLSNNHENNFKMLQRWMTKGLSHGDIITWDNDNYSKIQNIKSMGRQYSFLRCKTRKVNFVIFVVNGASVLESIENNNKNYIDMLHKTFMYPFLSFGDDKPAVVVTHGDRLTAQQRMHVRNELVELLGIPLQQIFDISGCDDYETDLSVLDMLRYCIQHAEQNFPIKKNYLLEMHGRETLKQIAVGLMGFDAVIETAIIFLCIVILLLRVSDKLVQW

SEQ ID NO: 104667 - protein, 105 aa, Oryza sativa
  unsure (1)..(105): unsure at all Xaa locations
  Clone ID: PAT_MRT4530_10197C.1.pep
FFFIFFLFFCFVLIDHLFYVLSFILYLFFLINCFFFFFFFFYIFFLFFILILFFYYYFFFYHIIXYLLIIFIYIDLFFLFSLSFLLVLFGHHFFNNLILISHLFF

SEQ ID NO: 104668 - protein, 57 aa, Oryza sativa
  Clone ID: PAT_MRT4530_101980C.1.pep
WEWRWATVGRAARTARRRGRRQVGVRRRGPVFFFAVGMALGMGAAAGGGGGWRRGSG

SEQ ID NO: 104669 - protein, 111 aa, Oryza sativa
  Clone ID: PAT_MRT4530_101981C.1.pep
MVERARALPLGGGHRRGGAPPPRSRTGGSRCDATMPHGLPAPPPPRPCRTPPPRDEGGQPPKGRNPCSSRIGGAARAPTASPPRRSPRRGRAHPRSSATRATSTHTAPPRP

SEQ ID NO: 104670 - protein, 90 aa, Oryza sativa
  Clone ID: PAT_MRT4530_101982C.1.pep
YALLSGHSPAPSPSPPSTTKPPLPRSTSPDLGEGVVATVLGFGESSGNDKVAAASGGLQAPASRTRPAVAPGGAAVFVRRAGARAAASSP

SEQ ID NO: 104671 - protein, 118 aa, Oryza sativa
  unsure (1)..(118): unsure at all Xaa locations
  Clone ID: PAT_MRT4530_101983C.1.pep
LTPKNFGESVSLVSQVTXIRLPRHEDSWRPSHEVFDEILXILENPDVELKIIEVLLKGCNNAENFVQKCKKLIIQNAPIILEHIKKFLKKRDFCNSIHVCGGKIIPARAGDLGALSAA

SEQ ID NO: 104672 - protein, 481 aa, Oryza sativa
  Clone ID: PAT_MRT4530_101984C.1.pep
MELLCIGTADTKLDELLFLAARLRSTLAATSSAQVQVSLVDVSTTKKVTSQDFKGTTFISRDAVLSCHLGVDQHELPSDRGEAITLMSEALQSFLKRRYESGTLLGAVGLGGSGGTALIAPALRSLPLGVPKLIVSTVASGQTAPYVGTSDLVLFPSVVDICGINSVSRVILSNAAAAVAGMVHGILMESNESDETATKPTIGITMFGVTTTCVNMVKERLSKEGYETLVFHATGVGGKAMEELVKGGFIQGVLDITTTEVADHIVGGVMACDDTRFDAIIDNKIPLVLSVGALDMVNFGARDTIPPDFTGRKIHVHNEQVSLMRTTVEENKKIAEFIADKINKSSSKVIVCLPQKGISAIDAPKMPFYDLEATSTLLDELCSRIEKTDNREVKMLPYHINDPEFANVLVDAFLSMDVKASNTISPENSMVQTNQDVNTKEYCSTQRTSDSSIIWRSPVDFPDARPALLKHLVGCERMVIY

SEQ ID NO: 104673 - protein, 55 aa, Oryza sativa
  Clone ID: PAT_MRT4530_101985C.1.pep
YITRIIRLVTCYLNLPSGYNIKLKVIQVLYKRSLCFFPALSNSKRVPHFVMYPRQ

SEQ ID NO: 104674 - protein, 56 aa, Oryza sativa
  Clone ID: PAT_MRT4530_101986C.1.pep
DGGDGSWRRWQRHGSAALGSGLELAVVGAARPGASGSGGGDLGQRVGGDLGRRHRH

SEQ ID NO: 104675 - protein, 50 aa, Oryza sativa
  Clone ID: PAT_MRT4530_101987C.1.pep
MTMSSAKLNAGFLLTAILAFQAPRATEVNSNLFRDYIVAMFRRGKFTEGP

SEQ ID NO: 104676 - protein, 86 aa, Oryza sativa
  Clone ID: PAT_MRT4530_101988C.1.pep
MARQGALSPSLGHTRADVGTGKGDASDDGGGRCGDRMAGADSGGDRAVGHHAVARIGPNVTWVRLREIHGRGNREELHVAMTMQDV

SEQ ID NO: 104677 - protein, 164 aa, Oryza sativa
  unsure (1)..(164): unsure at all Xaa locations
  Clone ID: PAT_MRT4530_101989C.1.pep
CLHLRICREKMVPFFCFTLSLTERCRARTSPPHQGPPPPHVLVRGHPPNTPKPYPLPPAPCPSPSPAPPPSGSXPPPPPPPPLAPPSPPSPSPSPRXSRPPPPSPPPPPPSSSSSPSPPLSHHRLRHRCRRRLAPPRPLPPPTSPSPRVVVAVARPRHHLRPPK

SEQ ID NO: 104678 - protein, 38 aa, Oryza sativa
  Clone ID: PAT_MRT4530_10198C.1.pep
TLLVGRQVMSRSIFCVQADAHHRSYSISDLLSSVRKAD

SEQ ID NO: 104679 - protein, 573 aa, Oryza sativa
  Clone ID: PAT_MRT4530_101990C.1.pep
MAEHEEQPYEGNGNGGDPAPASAYAEYPAPEGSPPAAAAKPTGFSDGATDGGRSQHETQPHDGRSSKSRERERERDKDKERDRDRDRDRRDRDRGDKDRDRDRHREHRDRSERREHHDRERSDDRDRRRGHDSERRRDRDRDGHRRHRSRSRSPSKGRDRRSRSRSRSRSSKRVSGFDQGPQAAIPALAAGAAPGQVPVVAPAISGMLPNMFNLTQTPPQAMTQQATRHARRVYVGGLPPTANEHTVAVYFNQVMAAVGGNTAGPGDAVLNVYINHDKKFAFVEMRSVEEASNAMALDGIMFEGAPVKVRRPTDYNPSLAAALGPSQPNPNLNLAAVGLTPGSAGGLEGPDRIFVGGLPYYFTEAQVRELLESFGPLRGFDLVKDRETGNSKGYAFCVYQDLNVTDIACAALNGIKMGDKTLTVRRANQGASQPRPEQESMLLHVQQQAQMQKLMFQVGGGALPTKVVCLTQVVSPDELRDDEEYEDIVQDMREEGCRYGNLVKVVIPRPDPSGAPVAGVGRHESALQVFLEFADVESSTKAKNGMHGRKFANNQVVAVFYPEDKFAEGQYDG

SEQ ID NO: 104680 - protein, 103 aa, Oryza sativa
  Clone ID: PAT_MRT4530_101991C.1.pep
MSKTSPRITANEEAEGSSALDASITDLVLSEYQLRRIDMIKKASNPGECTKTNIQLKMKKQIKAMIWIHQLPDSHRHVIYNTFSLQLHEKNNANLIHNRNHRI

SEQ ID NO: 104681 - protein, 51 aa, Oryza sativa
  Clone ID: PAT_MRT4530_101992C.1.pep
QAARMKSVVPYEMAPPFFFFFVVFLKSWAFSPNRINRNMRIQDGTTPNQSP

SEQ ID NO: 104682 - protein, 457 aa, Oryza sativa
  Clone ID: PAT_MRT4530_101993C.1.pep
MAASQAYLDKAQLRQSYRNVWHTDLTNAITADFTCCCLSLWCGPCVSYMLRKRALYNDMSRYVCCAGYMPCSGRCGESNCPEVCLATEVFCCFGNSVASTRFLLQDEFNIQTTHEELSEASQLISCISNMVYWTVCSCMQTQHKVEMDKRDGKFGPMTVPPMQQMSRIDQPVPPYVGKVKDEDHEQDKIGAMAAASSTTATTAILAAVIISLAGAATTVDAKFRAMQWTPAHATFYGDETASETMGGACGYGNLYASGYGTDTAALSTTLFKDGYGCGTCYQMRCVGTASCYRGSPAITVTATNLCPPNWAEDPDRGGGGWCNPPRAHFDLSKPAFMRMADWRAGIVPVMYRRVPCARAGGLRFALQGNPYWLLAYVMNVAGAGDVGDMWVKAGGGGGWVRMSHNWGASYQAFAQLGGQALSFKVTSYTTGQTILAAGVTPASWCFGLTYQARVNFS

SEQ ID NO: 104683 - protein, 148 aa, Oryza sativa
  Clone ID: PAT_MRT4530_101994C.1.pep
MQPRGGDGRAARGGGGQPARAHLDREEACGGRGGCAQRSPDEGDAVEEQQCERWGGADGGASTPAISNGRPGLGDFGRKPSPFRADSGDALEHHRNPARGIVVASLPSMVESLGENHTLVSKVADGGTISIETLLNASFGGLSSQTPV

SEQ ID NO: 104684 - protein, 162 aa, Oryza sativa
  unsure (1)..(162): unsure at all Xaa locations
  Clone ID: PAT_MRT4530_101995C.1.pep
MAASQAYLDKAQLRQSYRNVWHTDLTNAITADFTCCCLSLWCGPCVSYMLRKRALYNDMSRYVCCAGYMPCSGRCGESNCPEVCLATEVFCCFGNSVASTRFLLQDEFNIQTTQCDNCIIGFMFCLQQFACICSLVACIXGSEELSEASQLISCISNMVYWT

SEQ ID NO: 104685 - protein, 87 aa, Oryza sativa
  Clone ID: PAT_MRT4530_101996C.1.pep
MAAPATLAPCPCHRGTRAVVEVLTGQNGGASHTGAAPPTTAPAWLARPPSGGANHPGAAVGEGGASQCREGGFQAGGRAAPATLRGP

SEQ ID NO: 104686 - protein, 137 aa, Oryza sativa
  unsure (1)..(137): unsure at all Xaa locations
  Clone ID: PAT_MRT4530_101997C.1.pep
GGANHXLAPRLGRAAPASAARXEGFRLGGGRRQLPWXVVHEGGASRGPEAEXLRWGEEGGATTLAPRSWGGXQPLPGGRSENFEGGRKLVGPQRRGAHHSGLWYEGRRTLAGXPFGLVSTSTTALLPRWHGHGASVA

SEQ ID NO: 104687 - protein, 54 aa, Oryza sativa
  Clone ID: PAT_MRT4530_101998C.1.pep
QTVHFRTKGNVFPSDATFQLMEQKLALKLAIFTNTFSPVWNLFLSRMDIYCHKD

SEQ ID NO: 104688 - protein, 55 aa, Oryza sativa
  unsure (1)..(55): unsure at all Xaa locations
  Clone ID: PAT_MRT4530_101999C.1.pep
LSEKLRVSRLGEPRVCITHVRKLIAXTSASRARXVGPCRELRAMCGRASARTECV

SEQ ID NO: 104689 - protein, 98 aa, Oryza sativa
  Clone ID: PAT_MRT4530_10199C.1.pep
MATTDKRALLAAENGHGGGGPVTVSFNTNAIVLLALLVCGLGAVALHVVLQCALRVTPKLKGKSRGFYGVRAAVTYDPLETFYALLQSKVYLKHNISP

SEQ ID NO: 104690 - protein, 118 aa, Oryza sativa
  Clone ID: PAT_MRT4530_1019C.1.pep
KWGNPPLKMPLQIRVGQATWQANGLFYPGLGKKILNGLNKTKHGGLPTPLKPPVSPLGPKKQFCFGQIQKGVMGNAKNFCLFAHKLTALQFLEIWPANPGKGLMLPILTMGLPNSQEK

SEQ ID NO: 104691 - protein, 279 aa, Oryza sativa
  unsure (1)..(279): unsure at all Xaa locations
  Clone ID: PAT_MRT4530_101C.1.pep
MAALVPVLQAKTSVAIGDGQRTSFWHDSWLDCGPLSTKFTALFTHALDKQASVYQVLSTNSQACFVPRLKLTAXQLQELIASTSLIPSLDERKITNSAAGSLLSSRMVYESSFQSQPLCANWKFIWKSKAPPKIQFFAWLLVKERLPTKQNLLKKKIVTSDICELCNSEQETAFHXAFAASFWQKMGIQAAINSMSELAQLQKPHCLPAKHFQVFFLLCFXGLWNHRHDVIFRGMSISLPRLVAKCLEDAAHWAERLKIDDRIVVSVWKEIISSSLRIS

SEQ ID NO: 104692 - protein, 48 aa, Oryza sativa
  Clone ID: PAT_MRT4530_102000C.1.pep
STVRGTQIGRKWRVCSINNQDIRYYFAQSLQLYSYILMTVTCVGVVPG

SEQ ID NO: 104693 - protein, 445 aa, Oryza sativa
  Clone ID: PAT_MRT4530_102001C.1.pep
QKSHDAKLNLVPVEAAAEASCDGRYVYVLEVPRRFQMLTECVEGPKVFDDPYHVCVVMSNSGLGPVIPPAAGFHGCRYNTDQYALEVIFHNRMRRYECLTSDMAAATAVYVAFYPALELNRHKCGSSATERNEPPREFLRWLTSQPSWAALGGRDHFMVAARTTWMFRRGGAGDSLGCGNGFLSRPESGNMTVLTYESNIWERRDFAVPYPSYFHPSSAREVSAWQATARAARRPWLFAFAGARRANGTLAIRDHIIDECTASPPGRCGMLDCSHGLEGSITCRSPRRLVALFASARFCLQPPGDSFMRRSSIDTVLAGCIPVFFHEASTFKKQYQWHEPVDRRRYSVVIDPDDVVEGRVRIEEVLRRFSDDEVAAMREEVIRMIPRFVYKDPRVRFEGDMRDAFDITFDEIMARMRRIKNRMDLKTDSYTDDVPKYQQKYLQFL

SEQ ID NO: 104694 - protein, 54 aa, Oryza sativa
  Clone ID: PAT_MRT4530_102002C.1.pep
APFRIHGGGPCLIPWKGGVFSPKKGPFGQIWGNLFGKKIFSGGHFGTPLGGGGV

SEQ ID NO: 104695 - protein, 59 aa, Oryza sativa
  Clone ID: PAT_MRT4530_102003C.1.pep
MVASGYRLEWDCAAAAHAGQDQQQDVDDIAHHGGGGLAANLPMARKDSPRRPVVCGPSG

SEQ ID NO: 104696 - protein, 116 aa, Oryza sativa
  unsure (1)..(116): unsure at all Xaa locations
  Clone ID: PAT_MRT4530_102004C.1.pep
TIEEIRIAYRIGRSMEVQPELSLGPTLLGFGVGAGAGKSSSSSESDGSSDDGSRKRRKHFAWEEAVSHASLDLHLNDPLPMDWEQCLDLHSGRVYYLNRKTMRKGWVRPMXGARRQ

SEQ ID NO: 104697 - protein, 428 aa, Oryza sativa
  Clone ID: PAT_MRT4530_102005C.1.pep
MSQPDAAADDPSPSPSPNPPPPPVAWPEDGALTREWVAGLTATLDWCSRSLPADRLPDVLPAALVQRLVLAASVILHREPNLVRVDPRPDQAVVVVGDVHGQLHDVIFLLRDAGFPSDDRVFVFNGDYVDRGAWGLETFLLLLAWKVLLPNSVFLLRGNHESKYCTSVYGFEQEVNFKYKGQGPQVYRKFLRCFEDLPLATIIAGCVYTAHGGIFRGTIVMPSKRTKKGKKGNKYKANSSVDPTLMKLGSLDELLKARRTVLDPPWEGSNLIPGDVLWSDPSLEMGLSSNKERGIGLLWGPDITQQFLYTNNLKLIIRSHEGPDARDKRHDLLGMDNGYTIDHHVECGKLITLFSAPDYPQFQASEDRYNNCGAYIVLNPPDFSTPVFHSFEAVKPRPKANPYYDFEDVIDSDEELNLGAMDDGSASS

SEQ ID NO: 104698 - protein, 267 aa, Oryza sativa
  unsure (1)..(267): unsure at all Xaa locations
  Clone ID: PAT_MRT4530_102006C.1.pep
GGRSQLWVAERARGRRRPPEAEANRVHGDARWPXSSEPSRRAPSHLPVPGSAMETGGRGSTEDAGVNGDRESRSTTPDPNASSVMTHGAWVGGRACVGSSGGGHDSNNAGTLVPAPVPASSSSVSAGRPSRRPRWWRMWLRESEAVVMESTEQSWSCDDAFSRGPIFCAVSGGRNGLGLGIIIGTCEVMCVSDEGSSLEVSHHEKHPHIPAKEDVLIKLVDSMIKMLCTNGVWWLEDLQDLLACYLSLNAAEHHRTIVALFRRVILV

SEQ ID NO: 104699 - protein, 79 aa, Oryza sativa
  Clone ID: PAT_MRT4530_102007C.1.pep
SAGRLWKMDRFRTNILSRVVIVVTHALGTSGILAWTERVELLGQHRRCRRRWGQLHSMFGSAPFINFHCLFETVCLLVL

SEQ ID NO: 104700 - protein, 179 aa, Oryza sativa
  unsure (1)..(179): unsure at all Xaa locations
  Clone ID: PAT_MRT4530_102008C.1.pep
EPLFVGGLGLAHNGRFLETAFSTFGEIPEFQVINRSETGKXPGLGFLTFSSNQPMRKPFQGITAMEFDASTFPVNKAKSSRSEAEAEAASGQSVEAEDYGAAGGSVGVDGGGYGQRREXATTVAAATVAAVACAXAATSVATAAATAATPTGTGGTERWGPHGQVIYLSNRATIIIKKK

SEQ ID NO: 104701 - protein, 373 aa, Oryza sativa
  Clone ID: PAT_MRT4530_102009C.1.pep
AHGEDELGDGRSVWAVGEVRRAWRRGGGHIVDSIGEVRTAAHGGRSQLWVAERARGRRRPPEAEANRVHGDARWPVGSPSSLWAHGDARGHHRHCSSSSEPSRRAPSHLPVPGSAMETGGRGSTEDAGVNGDRESRSTTPDPNASSVMTHGAWVGGRACVGSSGGGHDSNNAGTLVPAPVPASSSSVSAGRPSRRPRWWRMWLRESEAVVMESTEQSWSCDDAFSRGPIFCAVSGGRNGLGLGIIIGTCEVMCVSDEGSSLEVSHHEKHPHIPAKADNSGGCPHHSHPLNKGPALIPNDKDLAQVGLAEAQQIKWVIVEDVLIKLVDSMIKMLCTNGVWWLEDLQDLLACYLSLNAAEHHRTIVALFRRVILV

SEQ ID NO: 104702 - protein, 330 aa, Oryza sativa
  Clone ID: PAT_MRT4530_10200C.1.pep
MDGGGGGRRPRAVFMAFGTRGDVFPIAALAAAFAQDQRQYGVVFITHSAHQSLSTHLADCNVRYMPVSSPPVLAAEQLESISCDSVQSNVEHDSFSQRKKTIQVEHRRECLSAVENVFGNDMSTHGDFIVINFFALEGWHLAELFQVKCIIAAPYFVPYSAPASFERQFKQSLPLLYKYFQEAPLNMVCWTDITHWMWALFMESWGSWRNDSLNLSPIPFTDPVTNLPLWYMREESPLLLYGFSKEIVECPVAESSEYQASALHCDSNLLFNGRLFCFSGSIPYSWLFPKCAVAIHYAGSGSTAAAFFAGIPQDGIGEALRILKESFAPN

SEQ ID NO: 104703 - protein, 86 aa, Oryza sativa
  Clone ID: PAT_MRT4530_102010C.1.pep
TSSRPGVEPSRGSSSGHLGFSMCPSQCSPSTATMSPHKTVCMRRPWSCTLMVCATLKPLMDVALGFVPCWRDKQPVSWIRMLVKRA

SEQ ID NO: 104704 - protein, 369 aa, Oryza sativa
  unsure (1)..(369): unsure at all Xaa locations
  Clone ID: PAT_MRT4530_102011C.1.pep
CAQHQSVLFTVLAVLVALVLGYFVVRCQRRQRRRRRRGAVLPSHGARADRFQSGGGTSGYGAGCAGGAEEALVRFPGGEGLTVXAILEAPGEVVAKSGHSTLYRAGLSAGEAVALLRFVRPVCAAAADEATAAARLLGALQHPNLVPIRALYVGPRGEMLLVHPFYAAGSLRRFLQEGINVSQKWGIICKLSIGIVKGLDHLHSGSQKPIVHGNLKTNNIMLDADFQPRISDFGLYLLLNPAAAQQMLEASAMQGYKAPELIKMREATRESDIYSLGVILLEMLAQKEAANSSSPNARDIHLPSSFKDLVLERKISDAFSSELVKQSKNSGKEQNLNAFFELATACCNPSPSLRPDTKRILKMLEEISR

SEQ ID NO: 104705 - protein, 62 aa, Oryza sativa
  unsure (1)..(62): unsure at all Xaa locations
  Clone ID: PAT_MRT4530_102012C.1.pep
FFFFFFYKNGDSIEVFDQIHPNSFEMRNRMEHYAXGEARLMVQSLNQAVVVIIHSSSISSRV

SEQ ID NO: 104706 - protein, 40 aa, Oryza sativa
  Clone ID: PAT_MRT4530_102013C.1.pep
CVAFLQKVHDVRLNISPVKCNLLPLSRSRSKCCQFCHNAA

SEQ ID NO: 104707 - protein, 69 aa, Oryza sativa
  Clone ID: PAT_MRT4530_102014C.1.pep
MHVVDGDSIWYTMEVLCTYGMRSRIWKESKFGTIGYIKFLSCTKRFPKVFKTLNMSLVRGFKLATSCIK

SEQ ID NO: 104708 - protein, 77 aa, Oryza sativa
  Clone ID: PAT_MRT4530_102015C.1.pep
NGLAFFEFFPLFVGILAPPFGNVCGLPLLFPLKKGPFFFEKMVLNGSLVKPSFPAFFAPLPLLGKPFLKSLFHPSGF

SEQ ID NO: 104709 - protein, 1034 aa, Oryza sativa
  Clone ID: PAT_MRT4530_102016C.1.pep
MGAAEEEIETLGERVTELTTNINNLLGTMQGLEKWIPSVDAGIKDLRSTVEGIAARVTDLEARPQATSAMATPMPDGHRGEEYHQGFDSGANSVQDRTLVKGKPIFHNSPVNFDLWENSKSGALGFQSGGRAGNSRLPKSDFPKFDGDNPKLWKTNSEKYFSMYQTYEERHSVESWSELCVAVHSKFGRDRYQQHLEELDGLSQMSSVEEYYSKFEELMHKVLVYNKGYDETFFVTKFVGGLKTEIKATIKLQKPRSVDAALFLAKTQEELLGEMNKKAPVKQTFKESYRTFNKTPYQGKGILGATPEEGKKLEEKPKWKERTQVTKVCAITCVGRAFGGVIGKKTIRLQGLIQNQELLILVDSGSSSSFIAEHVVDKLQLSTQDIVSTKVTIADGGQLSCTKVVPNVEWWCQGQSFASELKVLGLGSYDMILGMDWLEKFSPMWIDWKRKRMRFQHQGNNVTLTRVKDQTDHCRLILGRQLAVMANRGAISQMIHLCTIREEPEQQEKMPSDVQQLLQEFQQKKDGTWRFCVDYRALNNITVKNKYPMPVVDELLDELAGSQWFTKLDLRSGYHQIRLLEQDECKTAFRTHQGLRNLTEHVSHLKAVLARLQQYQLFVKISKCSFAQQYLEYLGHIIGIEGVATDPAKILAVQQWSPPKTQRQLRGFLGLAGYYRKFIQHYDILAKPLTELLKKDVPYKWTNVEQQAFDMIKHKLVQAPVLALPDFSKEFVVETDASGTGIGAVLMQDGHPLAFISKALSPRSQAMSTYEKECIAVLLAVDKWRQYLQHAPFVIHTDHKSLIHLNEQRLTTSIQNKAFIKLMGLQYKIRYKKGEDNRVADALSRKDEQQEIYAISTSQPKWLEMVVESYHKDPATMQLMQKLALQPEGMDDFALVDGAWYTVSMDFVEGLPKSGGYDTILVVVDKFTKFAKFIPLTYPFTALTVAKAFIHHIYDVFGMPQPYVQMSVVRRSCQKLCFRYFGPYKVLARVGAVAYRLELPTGSAVHPVVHVSLLKKALKPNIPMSNLKQFYGDN

SEQ ID NO: 104710 - protein, 57 aa, Oryza sativa
  unsure (1)..(57): unsure at all Xaa locations
  Clone ID: PAT_MRT4530_102017C.1.pep
KEIKKGRLGMFXKLGLFIRAXVSGEEVIETLSELLRDRFAFNLLTLISGDADISPKC

SEQ ID NO: 104711 - protein, 307 aa, Oryza sativa
  Clone ID: PAT_MRT4530_102018C.1.pep
MGSAKLIAVVLLPALLAFQAPMATAVNSNLFRDYIGAIFNGVKFTDVPINPKVRFDFILAFIIDYTTETNPPTPTNGKFNIFWQNTVLTPSAVASIKQSNPNVRVAVSMGGATVNDRPVFFNITSVDSWVNNAVESLTGIIQDNNLDGIDIDYEQFQVDPDTFTECVGRLITVLKAKGVIKFASIAPFGNAEVQRHYMALWAKYGAVIDYINFQFYAYGASTTEAQYVDFFNQQIVNYPGGNILASFTTAATTTSVPVETALSACRTLQKEGKLYGIFIWAADHSRSQGFKYETESQALLANATISY

SEQ ID NO: 104712 - protein, 230 aa, Oryza sativa
  unsure (1)..(230): unsure at all Xaa locations
  Clone ID: PAT_MRT4530_102019C.1.pep
FQQVFQEPIELPXHRDFDHSIPLTPDAKPVNIKPYRYAPTQKDEIERQIKTMLQQGIIQHSVSPFASPVLLVKKKDGTXRFCVDYRALNNITAKNKYPMPVVDELLDELAGSQWFTKLDLRSGYHQIRLLEQDECKTTFTTHQGLYEFKVMPFGLTNAPAXTFQGLMDTIFADMIRKFVLVFVNDILIYSQNLTEHVSHLKAVLARLQQYQLFVKISKCSFAQPHLKYLG

SEQ ID NO: 104713 - protein, 430 aa, Oryza sativa
  unsure (1)..(430): unsure at all Xaa locations
  Clone ID: PAT_MRT4530_10201C.1.pep
MTMEKRTSPQQPPTLLPTNCSTHFLYARAPTTAGVTPRQPHQSFRSYLAQMGGTGDDGAKAPAAAASMDVVSSSSSSSPAPAPSVLKSVLLSYAYVSVWITLSFSVIVYNKYILDPKMYNWPFPISLTMIHMAFCASLAVVLVRVLRVVAVPASPPMTPSLYAASVVPIGALYALSLWFSNSAYIYLSVSFIQMLKALMPVAVYSLAVAFRRDSFRSASMLNMLSSXISAGVAVAAYGEARFDAFGVMLQLVAVAAEATRLVLIQILITSKGMSVNPITSLXIAPCCLVFLTPPWYFAEXLRLSTCSGAAARPDVFVFGTNSLCAFALNLAVFLLVGKTSALTMNVAGVVKDWLLIAFSWTVIKDTVTPVNLVGYGIAFLGVAYYNHAKLQGLKAREAERRAASMATAKDGDAEAGARLLPEKDAGEQKN

SEQ ID NO: 104714 - protein, 1105 aa, Oryza sativa
  Clone ID: PAT_MRT4530_102020C.1.pep
MAEGVVGALIGKLGSALANEAASFASSIVCHEASALARLFGEIHEVKEELESMQAFLHGVERFKDTDETTGIFVKKMRGLTFEIEDVVDEFTYKLNDRHGGIAAKMKKRITHVKTWHRLAHKLHEIKAKLERADRRNVRYIMRGFDQESARRSTDHSKYKYEAFYVAREDNLVGIKTNKELLLNWLGDDLEQSSMITTVWGMGGVGKTTLVSHVYHTIKVDFDATAWLTVSNSYQVEDLLKHITSEFGIPSNATKLMENIHNHLQGKRYLLILDDVWGVDVWFNIRDAFPMDKNSRFVITSRNHQVALLATKNCIIEMKPLEEEHSWQLFCKEAFWKHEQKICPADIETLAHKFVDRCKGLPIAIACIGRLLSCKTPTYSEWEDVYNELEVQLTNNVIIDVNIILKVSLEDLPYNLKNCFLLCALYPEDYKIKRGKVTRHWMSAGFIPEKENKTFEEVAEGYLNELVNRSLLQVVDMNVAGKVTGCRMHDIIRILAITKANEECFCTIFDGTRTFSVEGARRLSIQCADIEQLSLSGATHHLRALYVFNNDICIHLLNSFLKCSNMLSTLDLSRVRIKSLPNEIFNLFNLRFLCLRHTGIEILSEEIGRLQNLEVLDVFNAGLSTIPKVIAKLRKLRYLYVGNLFLEDKYKVAVFTGTRVPEGIVHLTGLHSLQYVESNETILSHLGVFTEIRNLGVANTRTEHFSGLCNSIMKMIHLVHLRISALDDEQVLKVEALRLPPTLSILELKGQLEKESIHQSLSSLSHLHNLSKLVMAFSKLDQDSLYSLQMLHGLCFLHLMRAFEGEKLHFCAESFPKLRTLRVWDAPNLRQIEIEESAMQSLARLTLRDCPELMTIPDGIEHLAALEELHLEQIIKESAHGGYGRYRESKNSNQQPLIVYLCSALLLLSFLNREPDSPSISERFAGIREFVTSGIRAQVGRILARKKSQATLTQRMGAAEEEIETLGERVTELTTNINILLGTMQGLEKWIPSVDAGIKDLRSTVEGIAARVTDLEARPQATSAMATPMPDGHRGEEHHHGFDSGANSVQDRTLVKGKPIFRNSPVNFEIGESSERGAPGSQSGGRVGNSRLPKTDFPKFDGDNC

SEQ ID NO: 104715 - protein, 360 aa, Oryza sativa
  Clone ID: PAT_MRT4530_102021C.1.pep
MEEGGGGVDLVRTLPREQAKARKAWQRGKVRSQHGSNKARHVTITGAGSLVNGWLHGDGRWCLSITVGDVGCRIRPWPQLPRACPLAQPPASVVATHRVCCRLPPKIDISYFCGQQTSSWRYPTMGISKTEVNLLRLLDSAPRQQNQAKLIHYVTTSRELLEKLAAENTSEGISSIAKGRLNEYSERIEELAARLASLVPGYENAVEAIRKEESYLEGEQIRSPIALSPGLRRRLTALQEIEQPTNAKERNVAEPLRLDEAAQANIEKYRNLQEDLTDEIVELARQLKDSSLMMNQSVQATEKILDSTERAVAYSLAGTDRANAQAVEDLNRALISMSKPKTLFCHFAGSKQGLNIHVQA

SEQ ID NO: 104716 - protein, 712 aa, Oryza sativa
  Clone ID: PAT_MRT4530_102022C.1.pep
MEMDEVRGRWTSLGQMKATRAAARWDPGSGCQFGLNHRRPWVKAGVATDPAKIQAVQQWSPPKTQRQLRGFLGLAGYYRKFIQHYGILAKPRTELLKKDVPYKWTKVEQQAFDMIKQKLVQAPVLALPDFSKEFVVETDASGVGIGAVLMQGGHPLAFISKALSPRSQAMSTYEKECMVVLLAVDKWRQYLQHAPFVIHTDHKSLIHLNEQRLTPSIQHKAFIKLMGLQYKIRYKKGEDDRVADDLSWKDEQQEIYAISTSQPKWLEMVVESYHKDPATMQLMQKLALQPEGMDDFALVDGVIRFKGKFWLGNYHEAKQAVLLSLHSSGIGGHSGIQATYKRIKHLFMWPKMKKYVIELKLNIARHQACHTVSMDFVEGLPKSGGYDTILVVVDKFTKFAKFIPLTHPFTALTVAKAFIHHIYDVFGMPQVIISDRDRVFTGALWQELFWLADVKLNMSSSYHPQTDGQTERLNQCLESYLRCTIHACPTKWADCALGKSPYEVMFAKQPNQFGLVNLGESTVPGIQVWLQNRVHLNDILQQQLLRAQQRMKAQADKHRSERQFEVGDMVFLKLQPYVQMSVARHSCQKLCFRYFGPYKVLARVGAVAYRLELPTGSAVHPVVHVSLLKKVLKPNIPVSNDLPLNCFDNPDTVQPEAVLRRQLIKRGKLAVPYGLVQLSGLPASLATWENLRQLQARFPSSPAWGQAWCLLP

SEQ ID NO: 104717 - protein, 110 aa, Oryza sativa
  unsure (1)..(110): unsure at all Xaa locations
  Clone ID: PAT_MRT4530_102023C.1.pep
PXNNRGQGXXVXQWGITSXXKGKHPGXPPKAXXXXPXNKGRWGCKNXXKVCLKTPPFKNXXXPPXQPLXXXXXGANXXSKXWDSNSXVGEXPPXKGXPPKXGSTKXNKIL

SEQ ID NO: 104718 - protein, 129 aa, Oryza sativa
  Clone ID: PAT_MRT4530_102024C.1.pep
MAEVNATRVTPRGDWQSGGLWCSGAHAPVEVRWHWSNVGLPGEIPVCILFETSTAVVAALSSLLSLETSSSVRRVAAVVLMEEGGGTGGSVGGKSAEGICAGAARGGRGSGGGKHAEGKEQRRLTEEGS

SEQ ID NO: 104719 - protein, 135 aa, Oryza sativa
  Clone ID: PAT_MRT4530_102025C.1.pep
MSLTGGRCRLADRTDGRTAAAAAAAEKTHSVGSDNRCRRLSKGTCPRKLRPRTDPATYIANRDAKAPPPVTVQPTIDEGACTSDRHMSRLVRSMLAPYLASLPRFPGFRLLTGQRPHQIHATSAFLHATASLLHH

SEQ ID NO: 104720 - protein, 229 aa, Oryza sativa
  Clone ID: PAT_MRT4530_102026C.1.pep
MVQQRGCSMEEGGGGVDLVRTLPREQAKARKAWQRGKVRSQHGSNKARHVTITGAGSLVNGWLHGDGRWCLSITVGDVGCRIRPWPQLPRACPLAQPPASVVATHRVCCRLPPKIDISYFCGQQTSSWRYPTMGISKTEVNLLRLLDSAPRQQNQAKLIHHYVTTSRELLEKLAAENTSEGISSIAKGRLNEYSERIEELAARLASLVPGYENAVEAIRKEESYLEGEQ

SEQ ID NO: 104721 - protein, 266 aa, Oryza sativa
  unsure (1)..(266): unsure at all Xaa locations
  Clone ID: PAT_MRT4530_102027C.1.pep
MTIRKKYRLTRWDVVCQPKDQGGLGIHNLEIQNKCLLSKWLFKLINADGVWHDLLKRKYLYNKSITQVDRKQGDSHFWSGLMNVKSTFLNMGSWIVNNGEQIRFWEDRWIGNLAFKDKYPSLYAIVRRKTSSIATVMGYVPLNVSFRRALVGQNLVCWHQLCASIVHIQLNDLSDSFRWNFHQNGLFSVRSMYLALINNGYIERNKCIWKLKLPLKIKIFMWYLLKGVVLTKDNLARRNXNGSLRCSFCLKNEXLSNHLFMDCHFA

SEQ ID NO: 104722 - protein, 88 aa, Oryza sativa
  Clone ID: PAT_MRT4530_102028C.1.pep
MQNKVAENKAAVNGSQVHNVVLEGFLPFVNGFQDPFGNPMARERCTGMEERTDLAIWPEAQRPDPRNGHLARPKHDMAQQWAVPGPMP

SEQ ID NO: 104723 - protein, 113 aa, Oryza sativa
  unsure (1)..(113): unsure at all Xaa locations
  Clone ID: PAT_MRT4530_102029C.1.pep
VRVQQAASAIEGFXDAHDRFQSITHHESMVAAVMECGTDHTQEKKMCEEPQQKAKVAAIAEIQKLGLTGSEVVFAASIFAKEPNQMEMFLALPEIYKRDYIVQMLNGGQSLRY

SEQ ID NO: 104724 - protein, 55 aa, Oryza sativa
  Clone ID: PAT_MRT4530_10202C.1.pep
MVANAAFYTDGSHPLAATQRACAQPIQTRIPRARPEYGKSPSRIPRETSLRDAKY

SEQ ID NO: 104725 - protein, 77 aa, Oryza sativa
  Clone ID: PAT_MRT4530_102030C.1.pep
MKGEEEGENKENEGLKKGEGDESPLQSGSGSAPVYEGGGGESSHPRDLADLIFVVARVRGSSACLVVYVCLSDINWS

SEQ ID NO: 104726 - protein, 1010 aa, Oryza sativa
  Clone ID: PAT_MRT4530_102031C.1.pep
MEGAAPPASSGSEVTGAGSGKVDAGGGAAMEERFADLCKSKLGLDESITRQAMQLFKESKSILLSSMSSLGSGSPEEIERFWSAFVLYCVSRLGKAGKGKEDGGISLCQILRAFSLNIVDFFKEMPQFCIKVGSVLAGLYGSDWEKRLELKELQANVVHLSLLSRYYKRAYQELFLLNDAKPPENSAEPNAQASDYYRFGWLLFLVLRIQTFSRFKDLVTSTNGLVSVLAVLIVHIPVRLRNFNIKESSSFAKKSDKGVNLIASLCEKYHTSEDELSKAIEKTNTLIVDILKKKPCPAASECQQDRLSFIDPEGLTYFKNLLEEDSLKLSLLMLEKEYENAINTKGELDERMFANDEDSLLGSGSLSGGAINLPGTKRKYDVMASPAKSITSPSPMSPPRFCASPTGNGYCSSKMAPITPVSTAMTTAKWLRSTISPLPSKPSGELLRFFSACDKDVTDDITRRAGIILGAIFTSSSFGERICTSVRSTNRIDAIWTEQRKMEALKLYYRVLESMCRAETQILSGNNLTSLLSNERFHRCMIACSAELVLATHKTVTMMFPAVLEKTGITAFDLSKVIESFVRHEDTLPRELKRHLNSLEERLLESMAWEKGSSMYNSLIVARPTLSAEINRLGLLAEPMPSLDAIAAHHNISLEGLPPLPFQKQEHSPDKDEVRSPKRACTERRNVLVDNNSFRSPVKDTLKSKLPPLQSAFLSPTRPNPAAGGELCAETGIGVFLSKIAKLAAIRIRGLCERLQLSQQVLERVYSLVQQIIIQQTALFFNRHIDQIILCSIYGVAKISQLALTFKEIIFGYRKQSQCKPQVFRSVYVHWASRSRNGKTGEDHVDIITFYNEVFIPTVKPLLVELGSGTSPNKKNEEKCAADGPYPESPRLSRFPNLPDMSPKKVSAAHNVYVSPLRTSKMDTLLSPSSKSYYACVGESTHAFQSPSKDLKVINNRLNSGKKVSGRLNFDVVSDLVVARSLSDQNSASAAATTADIATKTPVKLEQPDC

SEQ ID NO: 104727 - protein, 64 aa, Oryza sativa
  Clone ID: PAT_MRT4530_102032C.1.pep
IAGGNMVTDILISCQWCVEKLHIQAEPLHMRVMCRMDLVQYPLQLPQGAVVTHEFTKEHQITCI

SEQ ID NO: 104728 - protein, 72 aa, Oryza sativa
  Clone ID: PAT_MRT4530_102033C.1.pep
PVDERLQGRYPSATTFSRFPAITVNGAQATVWLRIGTNSAVDWDMAEEEDGEWWRSGESRGYFVGFTLRAKP

SEQ ID NO: 104729 - protein, 264 aa, Oryza sativa
  Clone ID: PAT_MRT4530_102035C.1.pep
RSGTIPCSLSSDSSISSKYSSDSPSLSPSTSSPTSLGLSPASSNFSHTLVPSSRSPLHQSSNEEPSKSGLGSIRSPSKTSSIAERRGGFSSLKLPSFQKDLVLPPRVPTSLRREEEVTDKSNNNSVKQLTGVCCPEKCTGNTSTVHTKTGITERTDSISEACGNLQLLVYRWPSKEKLTTFTRKDLDPKSVLIFVTPEDSRSEAVKTVHIWVGGEYESSKCVDTVDWQQVVGDFFHLKELGNTLPVKVFKEHETENLLEVLNAR

SEQ ID NO: 104730 - protein, 146 aa, Oryza sativa
  Clone ID: PAT_MRT4530_102036C.1.pep
MATPGEFCWWFCACARGWFRLSVRKTKAEKDPNKPKRPPSAFFVFMEQFRKDYKEKHPNVKQVSVIGKAGGDKWKSMTDAIRGYVVVAVPCKDKAPFVTKAEKLKAEYTKKIDAYNNKQAGGPATSGDSDKSKSEVNDEDEGSGDE

SEQ ID NO: 104731 - protein, 201 aa, Oryza sativa
  unsure (1)..(201): unsure at all Xaa locations
  Clone ID: PAT_MRT4530_102037C.1.pep
MDFYDDDDDLLAQWWEXEELSDDDDYYIAAALLTNIEHKRTKRKRRSSVSGREIIHRDMFAGNIHXMEFMVNGKKYTMSYYLADGIYPSWATFVKTISNPXGLFAMVRDPARFWDTKTLWYIMSVCVIVRNMIVDTERDEDVDFDYDWXDSEVLRKEEHQXRNKPVLEKFLKIHKEIEDXHAHEQLXDDLVEHLXALHGAR

SEQ ID NO: 104732 - protein, 93 aa, Oryza sativa
  Clone ID: PAT_MRT4530_102038C.1.pep
MTLAARVRGIGFLEVPVLVALEGGPGVTGRTGGNGRRAAAGDAGQQLGGKAAGAWGRGVSVGGGDGRVAAEAGALDGRYRQSSTINLTKIMEN

SEQ ID NO: 104733 - protein, 109 aa, Oryza sativa
  unsure (1)..(109): unsure at all Xaa locations
  Clone ID: PAT_MRT4530_102039C.1.pep
KVQSGSPCSISTVNQNERPVLGALTVDALKQSSVTSSPRRSPSHNREKAILGTVGSSWSSPKQANAPCFSRSDSGTNGIPNTTSKYKKVHXHSTPFNVRLDKALKKSSA

SEQ ID NO: 104734 - protein, 100 aa, Oryza sativa
  unsure (1)..(100): unsure at all Xaa locations
  Clone ID: PAT_MRT4530_10203C.1.pep
SSHGQCRPPRRACCSRPCGLRSPPPPPPPAAHDERRRRWPSLSPPSPAPSPPPSTTTAPVSSXTPAFSSTALSTPSSSSPPPTTYWPLPFFLPYPPPLPP

SEQ ID NO: 104735 - protein, 481 aa, Oryza sativa
  unsure (1)..(481): unsure at all Xaa locations
  Clone ID: PAT_MRT4530_102040C.1.pep
PIRIHCPRRHHRPNCWPASPAAARLPLPPVLPVTPGPPSRATRTGTSRNPIPLTRAASVIGNLQRHIFRSPPQAEAPLLTGPLPPAGPAQRLAVAPPYKYAGRRSPQTLAASLSPPSSPRRDAAFALSQTLASASAFPSPPRRGRLRRRVPRPRPHPHPPSASAAAPSFPSRSRHPVRPRVVRLHQLPVLRLPVKIRHRAAFLRRRHPPSXLRLPFEICSPFSARRFLRCRQEGFNFDHTAEDIPPFATMANIRTVSSLGEVNGALQEMGINTIDQAHQVQFRLHKQTSLKEATEIKMMIQTGRHGFRLVNPELLNCKFKAKVKLDVCYKTMFNACMVQCDQELLPLEARIAQLKNLILSTDDQIPHRGPEVDQRNRGVQLMLYPEPPNDPDYEFGSANQRVPYQAAYANDAQRNAAVARDKRAQRAVWNTNLRLLEVKKSVLEKKKIELERVLREEFDKMIEEQSDLGVGYANYQFPHLA

SEQ ID NO: 104736 - protein, 245 aa, Oryza sativa
  Clone ID: PAT_MRT4530_102041C.1.pep
MYNNLFQTEANSSTNPESYSHFYQLMPRSKQALQIQNPDKPSHDWRRMIGGGQLVRRRGANHVPDEASVAIAMAAAAGGRLLIRMAHLAPPFAIFRSITEKRKEKKRRGWTQCMCRRTELDLAAAAPHHLCSTAAIFCARYSEREYVSLCGFGLQTPTNPGELQWQCSSHCQKPVPCNRTQFSSDPLRAISNANGLADLIISMVFLAARKREPNQEQHGSSNGVPWMALQIDLHNGSSNLLTSPE

SEQ ID NO: 104737 - protein, 370 aa, Oryza sativa
  Clone ID: PAT_MRT4530_102042C.1.pep
MSNPAAYYAAVARKQYFCYQCNRTVLLPASAAAAGALSCPECRGDFIEEVNVPAPAIIPFPFAFPPMMPTATSASAAAAAAASPTQSSSSSAATSPSSDLSAFLNSMLGPLNLRTDERMPGTTSAAGTATPEDEPDGFDAVTFFQNYLQNLMDGGANIQVLLDDASVGLAPGIGRVGGASFGDYFVGPGLEQLIEQLTENDPNRYGTPPAAKSALSTLPDVVVTDAMVAAADGAECAVCKEDFSPGEGAKQMPCKHIYHADCIMPWLDLHNSCPICRFELPTDDPDYEGRKKSNPQPTAGVDAGAASGSSTAAEEREESGESARLVERRFNVSLPWPFSGLGSQTPQQDGSNGGAGASGSKDGGASSDKK

SEQ ID NO: 104738 - protein, 219 aa, Oryza sativa
  Clone ID: PAT_MRT4530_102043C.1.pep
MSAARRGLPGPWVTPRAAGAWMTSPSTRSCTVFRSEETHVERVREVNGEADVEQDLEDADSDGVDYLSGDEDYVGREIHRPLPASRPPATARSTPPPPADGRHRERKSGCSLDAFLPTLQLYALLLAGITHSLTIAAVPGPKFTPIMALSRRFLNLIVDNGFPGSKSLRCIDLTLQNFFNATPPNRNGSESKVVAADACIQKQKNNNKEEEEAGASSMD

SEQ ID NO: 104739 - protein, 478 aa, Oryza sativa
  unsure (1)..(478): unsure at all Xaa locations
  Clone ID: PAT_MRT4530_102044C.1.pep
MSAARRGLPGPWVTPRAAGAWMTSPSTRSCTVFRSEETHVERVREVNGEADVEQDLEDADSDGVDYLSGDEDYVGREIHRPLPASRPPATARSTPPPPADGVIEKGKVLYALLLAGITHSLTIAAVPGPKFTPIMALSRRFLNLIVDNGFPGSKSLRCIDLTLQNFFNATPPNRNGSESKVVAADACIQKQKNNNKEEEEAGASSMDSIQLPSPIFNFQASSVAHHWEIGCFPLRGREVLCIDQNGCCFLFDGDTRNAVTMPGLCQPKRFPLSLFVPSTGVDNDSGSLFIMESVVKPESTSSGPRNDQFEAFVYRTPSPRRHLSSTCQSLPPPPFVRDPKFSNIRTKITSYAVVSGGSEMCISVEGAGTYCMDTVKHTWRHVGEWILPFNGKVEYVPELKLWFGLSAKTNHLAAADLSAMDDDCFQQPELLKTWMELSPPKNWWDLSNSHXCQPGLWQVLHCKVLLHSXISWATIMIK

SEQ ID NO: 104740 - protein, 510 aa, Oryza sativa
  unsure (1)..(510): unsure at all Xaa locations
  Clone ID: PAT_MRT4530_102045C.1.pep
MSAARRGLPGPWVTPRAAGAWMTSPSTRSCTVFRGEETHVERVREVNGEADVEQDLGDADSDGVDYLSGDEDYVGREIHRPLPASRPPATARSTPPPPADGVIERGKVVREREETMTGGARVRGYPSRVDLSLADLPTPIPAGCRHSVGGAGCSSFPSPAWRGCSLDAFLPTLQLYALLLAGITHSLTIAAVPGPKNFFNATPPNRNGSESKVIAADACIQKQKNNNKEEEEAGASSMDSIQLPRPIFNFQASSVAHHWEIGCFPLRGREVLCIDQNGCCFLFDGDTRNAVTMPGLCQPKRFPLSLFVPSTGVDNDSGSLFIMESVVKPKSTSSGPRSDQFEAFVYRTPSPRRHLSSTCQSLPPPPFVRDPKFSNIRTKITSYAVVSGGSEMCISVEGAGTYCMDTVKHTWRHVGEWILPFNGKVKYVPELKLWFGLSAKTNHLAATDLSAMDDDCFQQPELLKTWMELSPPKNWWDLSNSHXCQSGLWQVLHCKVFLHSXISWATIMIK

SEQ ID NO: 104741 - protein, 111 aa, Oryza sativa
  unsure (1)..(111): unsure at all Xaa locations
  Clone ID: PAT_MRT4530_102046C.1.pep
MSDVVPGATVGDMGPGGRSLGVPRHAPRALALLCPEALAQPPFGGGEQARREYDPSHRGVXSDGGHHKSSPINEGMTGLSPVSGEGRRWAPLKDKLXFSFQAKARVEFQSR

SEQ ID NO: 104742 - protein, 119 aa, Oryza sativa
  Clone ID: PAT_MRT4530_102047C.1.pep
MTTLLCRCFAYMPRLFLQKSSAVHDRTYSVTPPVFSVTTAVSGGVRLYLLDGRGGEMVSVRTVLHVVLNFAFLPRTSLRRGARACRIVVPHHKRVAINLTALLGPLASMVFDELLLRKG

SEQ ID NO: 104743 - protein, 130 aa, Oryza sativa
  Clone ID: PAT_MRT4530_102048C.1.pep
TARGGGAWQGSSGEGVRAARQRLQGRGLARRSDGAVARRRQRPLPGARSSRRPSRRRRGRPVSHHLRALMPGNAAPAAAPDGRLPAAEDEQLALDDVAGISELAKCFFSAHKVPVQDDATGGFALQEFTA

SEQ ID NO: 104744 - protein, 85 aa, Oryza sativa
  unsure (1)..(85): unsure at all Xaa locations
  Clone ID: PAT_MRT4530_102049C.1.pep
MSIFTPYCLCVRPGLXAHRAVPARPCRASPTCRWRGPGTARWSGWAGTGLTPDGPCRAWTGPKRRAVGRAVGPRAFWPTILTSAG

SEQ ID NO: 104745 - protein, 88 aa, Oryza sativa
  Clone ID: PAT_MRT4530_10204C.1.pep
MAESAEVAPAGVEEAHRRDKDDGVGGGAIDTAARVGAWRSRNLAWKRCPTLTDLLVGMVACDGAVLEEVAREAEAAKAAMDRGTAEPS

SEQ ID NO: 104746 - protein, 238 aa, Oryza sativa
  Clone ID: PAT_MRT4530_102050C.1.pep
MATEGECAAATIAMHAAVMATKGEHRFSGGDAQSLCLPPLAASFPPPFSLHRHQPFPLHRCVGEEGSGTGKEVWQRRAMGAASSSSSSSSSSPSPQGQAQAQAQGKPNYSTSLTDEEWRKRLTKDQYYITRQKGTERAFTGEYWNTKTPGIYHCVCCDTPLFESSTKFDSGTGWPSYYQPIGDNVKCKLDMSIIFMPRTEVLCAVCDAHLGHVFDDGPRPTGKRYCINSASLKLKKTQ

SEQ ID NO: 104747 - protein, 61 aa, Oryza sativa
  unsure (1)..(61): unsure at all Xaa locations
  Clone ID: PAT_MRT4530_102051C.1.pep
HVQRXLTMRSXVDXPGSPTXSPQPPPPPSAPXXPCXPQLSSPTMMIKSTTYLKIXLGSITS

SEQ ID NO: 104748 - protein, 55 aa, Oryza sativa
  Clone ID: PAT_MRT4530_102052C.1.pep
RNGRVNISFRSGDNVLYDWAGDGAPRRYCSWRGVLCDNVTFAEAALNLWGLNLGG

SEQ ID NO: 104749 - protein, 48 aa, Oryza sativa
  Clone ID: PAT_MRT4530_102053C.1.pep
HQEKEIPDNTIFDCFIICFINYQNSFLISEYTLHSKPEAKWVLRVKYI

SEQ ID NO: 104750 - protein, 47 aa, Oryza sativa
  Clone ID: PAT_MRT4530_102054C.1.pep
MDEKFYNLIKKKGIPEKMKFRKISKQHSAKVPSERMGDNLETIPSKA

SEQ ID NO: 104751 - protein, 127 aa, Oryza sativa
  Clone ID: PAT_MRT4530_102055C.1.pep
MAGAAGNATAAVIIVLAVAAALVASSLAPAADAFRTYFPEDEQLLRNKGSGATVVVMTAPVLSGSPVVTPAGAPSGAELIAFAGRDDVDAEDGAGDGDDVSPGPAPSSAGVISLDSERAAADDVLLP

SEQ ID NO: 104752 - protein, 62 aa, Oryza sativa
  unsure (1)..(62): unsure at all Xaa locations
  Clone ID: PAT_MRT4530_102056C.1.pep
FIVPYVEKFLSEFPNVSVLLLENVKFNNEQVNNALQYAXRLASLADLYLHNAFQTAHIIHAS

SEQ ID NO: 104753 - protein, 139 aa, Oryza sativa
  Clone ID: PAT_MRT4530_102057C.1.pep
LLALCLRTPLLLCLPEVPGISGSGVAPPLRAWRSALVQFGLGRVGFAAPAVIVPLPPPSLAGPPASLVVRVFATPVAALRPQAGRLAAFLFVRPAPGHVPPPAHAWAAVSLRVTFRYPLLPKKKTRQTGTTSLCLTKNT

SEQ ID NO: 104754 - protein, 319 aa, Oryza sativa
  Clone ID: PAT_MRT4530_102058C.1.pep
CVVGTDRRARVLHPVTGAGADDPLPHDLAEENKPWAGWRLEERFHAFTHAFGRASSTGEYKVLRVASLSPDLRVEQLVEVLALDRAGRAHAGARWRGMPRPPFHLAGASNAGMAVVAGVVHFLAVDIPLPFLPFEHDDDDIHHGAIARFDLDTEQWRPLLRGPLNIHQIQQDNDLSPPLLTLTELKGFLVTVHRDRSHQSSSMDLWFLIDSEEETWVKEYKIQIHLRPREFYAHPLLVLDERMIVFCVRPKGRVMVYDLEIGKCKDLGDGDCVEVGVYKGCLLSSEPKVLNSNLAGYLAYNLSISHMVVFKSSKDEDEG

SEQ ID NO: 104755 - protein, 37 aa, Oryza sativa
  Clone ID: PAT_MRT4530_102059C.1.pep
MSSDEVFPQKNNAPGRVAARMTYNRVRSLGNLSWVAK

SEQ ID NO: 104756 - protein, 161 aa, Oryza sativa
  Clone ID: PAT_MRT4530_10205C.1.pep
MRDWYLDSAKEREKRDVKRLAARHGHAALGAKESRPRLCLSPQKSSERKKRRTRPYAYASASILQRQQNARRIRHAAQCAASSSRHKYWYDTTTILPSPLQGSIQPEAHEKTTCYGYRLSRRQTFRLCIWSSELNKPQIITSDFVTGSEEAQEINHHTSRS

SEQ ID NO: 104757 - protein, 194 aa, Oryza sativa
  Clone ID: PAT_MRT4530_102060C.1.pep
MCTVTGDGDDGDHDGSGNDGDHEGRGGTAPSHRLLSPPPYLSEGRRLPSGRTDAGRKDPPGGAHGEHGSTPAAAQGARPRGLGRWSATVGLDLVTTDAAGPRAVVLGFLWISTHGSAARDEEEQIRSPLPLPLRWLHRRRPDLGRGRSGWWVGGGDVRRRWYGGQAVAKGNGGGSGGGQGTLAAIGSGALTTTE

SEQ ID NO: 104758 - protein, 166 aa, Oryza sativa
  unsure (1)..(166): unsure at all Xaa locations
  Clone ID: PAT_MRT4530_102061C.1.pep
SARRGRCRHAGPTGQRLGRGRKGAGTRAHRSAAWGGKERGGGTRLGSARHKAGRPAMARVAARARVXGDGKRRRGRRQRSAAADGGSDRRRRRARAAATHGESGKEREGEEVLTGGDGGDRRRGATEGGRHAADGDRDDLKTKRNXIREEERGHMRRECRPKAADM

SEQ ID NO: 104759 - protein, 87 aa, Oryza sativa
  Clone ID: PAT_MRT4530_102062C.1.pep
PNLPRPASRLPSAPVRGGASLLAAPPPPPPPPHTTSPPPPLTSRRLRCLPPPPPPDPEIPRGGEHTGAERLVLQWRPPLIRSTPPRP

SEQ ID NO: 104760 - protein, 134 aa, Oryza sativa
  Clone ID: PAT_MRT4530_102063C.1.pep
MGVQAISVASILDEFICLQESSCSRRLDEHLRWMLLAVEVGGFFSSSASGYRNGLALLLLGHKGEEKPVKVTPWNHYRLVGGGEAEPASEENNVPSGKCASFICFGCPPARLKGVSPPKLASSDTAGNSSEQSP

SEQ ID NO: 104761 - protein, 831 aa, Oryza sativa
  unsure (1)..(831): unsure at all Xaa locations
  Clone ID: PAT_MRT4530_102064C.1.pep
MGGDGGGDAAPPGDGAAALAGGGAGIPGGGSEAALPGGGARHSCAAAPGGGAAALGGGAAALSGGAGLPGGGTSAPGDGVTAPGDGAGHRGGSKRRRATLRRRPAAPGDGAAAPSDGAGLPVGGAAALDCDVVLPGGGTAAPGGGASVAGSQATGGEEVASGGTGGGAGAACADGLEHSEGEHEHEGMDSSWIPDGMDTSSTYLLDVRIMGKTCRPEFPGGFSFKWPIDADVTNFKDFLGDICEKYPWGLNETVCLHYIHASSKELIPICKDQDLTAMLECFHHTKRGVDDEKQYSVGIDDSSSESDDSSSESDDSIAETDNVPEVEGGDDLSITDSDDEEWIARDAQADPVIPQVAYDKENPPMTVETIYPSIRFRARCIKEGCGWRLHASTIHGGPAVQIKVHEMYHGCLSTRKSEKVRNAKRAWVCDKVMGWLREDASVGAMELQRRIKDTHKLTIPYKRVHSGRELAMSKLYGDWDSSFDKLYGWKAEIEKRSPGSIVAIDHMTFKDKKRFTRLFVALHPCIQGFLGGCRPYLAIDSTHLTGKYRGQLATACAIDGHNWLYPVAYGIIDSETSIDYAIKEVFGYAEHRECMRHLVSNFKLKFHGKVFEEHLWPAAYAWTPIDFDEHMASIGEVKPEAIAYLKTHHKRLWMRSEFSTHSKVDYITNNLAECFNNWIRKHKGLMPYELVDKIRKKVMDKFRVRKKVVAKLEGNIILPCVMKELLEKSRGLNFDLDRSDDFIAEVTDKDPGGKRHVVDLEEKTCTCREWQVSGKXCAHALCFITSIRGVQMDKLQRSRSRSQRGLCFSGKTKKTEKEIKTKIYFCCHCCH

SEQ ID NO: 104762 - protein, 62 aa, Oryza sativa
  unsure (1)..(62): unsure at all Xaa locations
  Clone ID: PAT_MRT4530_102065C.1.pep
MASPQCCANPPXLNPAGGEGKVVESFGGIKAYVAGAAESKAXLVLXSXXFRVLKAPNXXKDS

SEQ ID NO: 104763 - protein, 292 aa, Oryza sativa
  Clone ID: PAT_MRT4530_102066C.1.pep
MDPSSTYLLDVRIMGKTCRPEFPGGFSFKWPIDADVTNFKDFLGDICEKYPWALNETVCLHYIHASSKELIPICKDQDLTAMFECFHHTKRGKVVITLGNQINLSQVIVPCTPSLSVPSQAFFTQEGSTSQASKSDAYLENPFPHYEHVGVDDEKQYSVGIDDSSSESDDSSSESDDSIAGTDNVPEVEGGDDLSITDSDDEEWIARDAQSDPVIPQVAYDKENPPMTVETIYPSIFRARCIKEGCGWRLHASTIHGGPAVQIKVHEMYHGFLSTRKSEKVRNAKRAWVCDK

SEQ ID NO: 104764 - protein, 1292 aa, Oryza sativa
  Clone ID: PAT_MRT4530_102067C.1.pep
MRRPQATARWRSRAATRRRSRAVRATARWCSRAAAQGSPAAAARRRSRAARATARWRSRAAAQGSPAAAARRRSRAARATARWRSREAAQGSPAAAARRRSRAARATARWRSREAAQGSPAAAARRRSRAARATARWRSREAALPRHSGAAAPGGGASAPGDGARPSGAGPAAPSNGAGLAAPSNGAGLPGGGTSAPGDGAAAPGGAGLPVGGVAALDCDVVLPGDGAAAPGVGASAVVSQATGGEEVASGGTRGGAGAACAGTVVTGAGEEVTGSGIIVPAGGTSLSDGLEHSEGEHEHEGMDSSWIPDGMDPSSTYLLDVRIMGKTCRPEFPGGFSFKWPIDADVTNFKDFLGDICEKYPWALNETVCLHYIHASSKELIPICKDQDLTAMFECFHHTKRGKVVITLGNQINLSQVIVPCTPSLSVPSQAFFTQEGSTSQASKSDAYLENPFPHYEHVGVDDEKQYSVGIDDSSSESDDSSSESDDSIAETDNVPEVEGGDDLSITDSDDEEWIARDAQADPVIPQVAYDKENPPMTVETIYPSMCEFRLAVAQYSIKKEFEFFVKKTDPSRFRARCIKEGCGWRLHASTIHGGPAVQIKVHEMYHGFLSTRKSEKVRNAKRAWVCDKVMGWLREDASVGAMELRRRIKDTHKVTIPYKRVHSGRELAMSKLYGDWDSSFDKLYGWKAEIEKRSPGSIVAIDHMTFKDKKRFTRLFVALHPCIQGFLGGCRPYLAIDSTHLTGKYRGQLATACAIDGHNWLYPVAYGIIDSETSETWLWFMEKLHEAIGEPAGLSICSDAGKGIDYAIEEVFGYAEHRECMRHLVSNFKLKFHGKVFEEHLWPAAYAWTPTEFDEHMALIGEVKSEAIAYLKTHHKRLWMRSEFSTHSKVDYITNNLAECFNNWIRKHKGLMPYELVDKIRKKVMDKFRVRKKVAAKLEGNIILPCVMKELLEKSRGLNFDLDRSDDFIAEVTDKDPGGKRHVVDLEEKTCTCREWQVSGKPCAHALCFITSIRGVQVHDYVDECYSVARFKATYAARIPALTDISQWPKNTRDFFLYPPILKRSAGRPKTLRHKGGVEGNKKGKRKAGTKCQQKCPICKNYGHRWTSCKEADPEAKEAYALVAKQRKLKRKSKPKSTSAATVATENIDPTAMSSQILGSLSSAVVGTISDSGLESNNVPFPSLPSSMTIVPLQQVAAPVAKGKGKGKGKGKEKEKEKEKGKGKGKGKKGEKEDKDKKIKRKPSPTVQPTTPPAKRRKNNEVPQDSPAMRTRSKKSSPAMGTRSKRRIID

SEQ ID NO: 104765 - protein, 480 aa, Oryza sativa
  Clone ID: PAT_MRT4530_102068C.1.pep
MEGFCFARCRFTRLVVAMQLVMGVLVICISMASLHRFYTTDALLPGGLDDPARCARFHGAVAGGYSGFDIRALADRVDEVLVQLAELQDKLEATALKIGKKTKKRKGKGKLQQQENMTMTEFQRFLEDEVIHPLYGAHIVLRLIRIPRPDPDGGAPAVDPLVNFFAAEETRKYVTAKRNREGRPGAYGANRTYGSIGHACVVMRRELDEYMSYDVGALCPDDWDLGQRLMLGGCDPLPRRRCLARASKLFRRPLPINESLWALPDDGNVRWSRYHCRGYRCLSARNPRRGYDRCVGCFDMDREKQRWMQGSNGTTLADFRMEEVLAVKPGEIRVGLDVTVGTGSFAARMRERGVTVVTTAVNLGAPFAETVALRGLVALYAGLGQRLPLFDNSMDMVHTGGVLDGWVDLQMLDFVLFDWDRVLRPGGLLWVDKFACARKDLDDYMYMFLQFRYKKHRWVVSFKSRDEVYLSALLEKPLRS

SEQ ID NO: 104766 - protein, 342 aa, Oryza sativa
  Clone ID: PAT_MRT4530_102069C.1.pep
MGVEKTTANGGSGAAAVSGGGRTVCVTGAGGFIASWLVKLLLEKGYAVRGTVRNPDDAAKNAHLMALAGAAERLTLVRAELLDKESLAAAFAGCEGVFHTASPITDDPEKMIEPAVSGARNVITAAADAGGVRRVVMTSSIGAVYMGGGGGEEVDETCWSDLDHCRDTGNWYCYAKTVAEQAAWELAKERRLDLVVVNPSLVLGPLLQRGVNASTWHVLKYLDGSARTYADAAQAYVHVRDVADAHARAYESPAARGRYLCAGRTLHRGEVCRILAALFPGYPVPTRCKGDAGETAEGCRFSSRKLAELGVAVMPASQCLYDTVVSLQDKGLLPFVPAAAMP

SEQ ID NO: 104767 - protein, 112 aa, Oryza sativa
  Clone ID: PAT_MRT4530_10206C.1.pep
EVIAVAGRYVGLLVDHIDMDDGGFVDEVMEETKRGKGDGAVGLAGVGSKMHHLFSRYCKETYVVCDADKKEWQPVPREKYPKPLIFHDGRLAFKLTPCAAVAMYTYLPWGIF

SEQ ID NO: 104768 - protein, 83 aa, Oryza sativa
  Clone ID: PAT_MRT4530_102070C.1.pep
ARGAKVVLSSCLGHGPSESIIYSFAIGLDKWASVDGICCCSWPPCGPNLLLRVSVGPGPPAHELFLLFVHHKSQDVKGLRVLV

SEQ ID NO: 104769 - protein, 337 aa, Oryza sativa
  Clone ID: PAT_MRT4530_102071C.1.pep
MTKLPSSTKDKSPSLPSHRRPLFLPSTSIASSRWATAARRRSQAVARQFQASTRRAARRWQAVARGSQAAARWSQAAPVAAVPGVDVTGGEEVEGSGASVPGGGASAAGVRAVVPGVDATGGEEVACGGAVVPGGGASAAGTVVPGDGASAAGIRTTVPGIDSLGEVGRRSPKNAITRPGSTMPLAPPLAVAGAVYDDIVGAYRGFMPSRTRAFLVIHHGPLEPHVRCPYCGARVWSMTAAGLARLSSSSSSDGERSADSDSNHSDDESFAAADVSLPLPLASRVSGRRLRGRPAMRPVHNAAKTVWEEDAIQVFILDVKSNFSRATCSVEPGGRRL

SEQ ID NO: 104770 - protein, 624 aa, Oryza sativa
  Clone ID: PAT_MRT4530_102072C.1.pep
MLRRCVRDLYPLRPLRRIPRPISSEVPSPAFLRPRSKSTKASQQSSTQNTVPGPQGEPSQSGSNVPKVLLGTLMVGAAAMAAYQAGYIDDQFKDIIFPSTMKEKNIRKIYDDLKAPSEQKVDEKQVVSDPNVDIVQNSNNEAHPQKDLPTEGMGPPEIPTTDEQTVSSEEKEKETLAQGTPQIPDEHGAAAKPLSQDIPVIDINPSVDDKATGEVLPEQTDKTTTSVSPVQSSLATAGPSHHVHTDTDGPKDPSSAGAVEHKSLAETYLLQEPDNSKDMGAKESKHDGVISTGTSDDGKIVLDIIEAIHAAERKQADADAYMYSEEKRKLKEKYEKELKDTRARELMYAEEAAILDKELKKEKLKSAAVIKELQENAEQKLRDELQQKDEETSQQVEKVRELAKAELAAALAKERASQIEQIAEANLNIDALCMAFYARSEETRQSHSVHKLALGTLALEDALSTGSPIRTEVDQLRKSLEGIDKDSLLELALSSIPEDVLEYGSDTPMDLKQKFNSLKETVRHFSLIPAGGGGMLTHAVAHVASSIKIKEDQSGDGIESLLNRVENLIIHGDLSAAAEALERGLQGSEAAEIASEWVKQARKRAIAEQTLTLLHSYASSITFS

SEQ ID NO: 104771 - protein, 60 aa, Oryza sativa
  Clone ID: PAT_MRT4530_102073C.1.pep
MANGEGRGLGLRGRSFMVGGRVVERHNAISDLAGCGFEEEVYPGVDYELELQTAKSTTVR

SEQ ID NO: 104772 - protein, 45 aa, Oryza sativa
  Clone ID: PAT_MRT4530_102074C.1.pep
LTQTKPDLTLILCARKDITHTLHNVALTITTCKLFKHNCTNMQIN

SEQ ID NO: 104773 - protein, 71 aa, Oryza sativa
  Clone ID: PAT_MRT4530_102075C.1.pep
MIGRRDETNATLIDQDIGTVTTKGSFIGKVLVETGCLITGLIYSLAPDECQNHPMSERIRLMKTLPLTCFA

SEQ ID NO: 104774 - protein, 930 aa, Oryza sativa
  Clone ID: PAT_MRT4530_102076C.1.pep
MAAEAEAEPRRWAATYTKHVKQKRKAYQDGAIVLHRASVNLVLLDDAGGTVECRTLRTGEEVFPGASLAFQRHLVDVGEPEPHPGSGSSSAAASPASRGVHRGGASARARPSAVNSRPPRAFADPNTKGGGGGGGKDEAVGSSFQEWTALYTTQLTQKAKKFHDGVVRLAQVSSHAKQIILLDEEGGVLATRYLKSGESLETGKKCHFPNYLIEICEAKSVNKGCYFCIANTQVYKLIPRRNLWCKQDQGVGRIQVTKQDQVQRVNHSNLPVHRNFMCEMFVSTSIDLEDSKSSNTAGSSKPETSKIGVVDAGSSGSIMGSTDSEFKEWSALYTTQLTQKAKKYHDGVIKLVQVGSHAKQIVLLDEDGGVLGSRYLKSGESVESGMKYQLPNYLIEVCEIRKQKNEWSALYTTQLTQKAKKYHDGVIKLVQVGSHAKQIVLLDEDGGVLGSRYLKSGESVESGMKYQLPNYLIEVCEIRKQKNDVESKHPSEVVLSQTGSANGHNTTDRTDGRNKSPKFVSPLKFNHFQKSRLQGSNGFNRPTVAKSIHTNMIDTLKFHDTQKAKPDFTVGYKTDLGKSTFSNLDDPHQFNDNKQDKTEYAASYNPQEVGKSSYDRVDSPLGFCDLQDGKSGSSTSFLRREAGRTTFGNTDDSLRTARDADHSKTASNISVINSSNRTIGVNMNSRMSHCATQLRASVLACLNLETLQPRNSICTTLQSELSGSAHPTYDHQTVMRPTTFDSLELDMVDTPTSDVSNAKEQSQGSTRNHQTESSKDSAPAMCTTSSDPPSGKGETADQVCILYNLSWKKTAVCEFKLSSDYRVVEEKCGSYPFLSAGDLTVSLRDSLAFLNSICSLLKENGWREGALCVPEGPGCTLKIFTSPTTGTGSRIECDTNLILKFSTGSHLSLAFRFVQLVNWARSQVCIQFKM

SEQ ID NO: 104775 - protein, 109 aa, Oryza sativa
  Clone ID: PAT_MRT4530_102077C.1.pep
PKILGAPFVSKNILKNFWPLEQLAPIAFFCCPFPPARFPSPGFPAPFGPTPSHYFARGEIFFLVGTFLGHFFAPLPGGPPPFFCFLPVTNLGLFLKNFPPGSLAPFSVF

SEQ ID NO: 104776 - protein, 491 aa, Oryza sativa
  Clone ID: PAT_MRT4530_102078C.1.pep
MTTTTTTSAIGSLLVLLLVVVVGGVCSASVGGGGGGGEAWRAEQERDRVARVPGQDFDVGFAQYAGYVAVSEERGASLFYWFFEAADDPAFKPLVLWLNGGRWLESSVQGCSSIACGVPEEVGPSHFNADGQGVHLNPYSWNQVANILFLDSPVGVGYSYSNASDDILNNGDARTANDSLTFLTKWIERFPQYKGREFYVTGESYAGHYVPQLAQAIKRHHEATGDKSINLKGYMVGNALFDDFHDHLGIFQFMWTNGLISDQTYRLLNVFCDYESFVHTSSQCNKILDIASDEAGNIDSYSIFTPTCHASFASSRNKVMKRLHSVGKMGERYDPCTEKHSTVYFNLAEVQKALHVSPIINKSKWETCSDVVNTNWKDCERSVLHIYHELIQYGLRIWVFSGDTDAVLPVTSTRYSINALKLPTVTPWNAWYDDDGEVGGWTQGYKGLNFVTVRGAGHEVPLHRPKQALILIKSFLAGSPMPSVQDFYSDV

SEQ ID NO: 104777 - protein, 103 aa, Oryza sativa
  unsure (1)..(103): unsure at all Xaa locations
  Clone ID: PAT_MRT4530_102079C.1.pep
AAGFHGGGDIRRRDEELDGVXPRGLESATAALLAWRQRRIPAWMRQDGREDERWDPRGYGDGGIGNVPVPAPPDGGLFQPLTPHGSLRATASDIGTAYCRIRW

SEQ ID NO: 104778 - protein, 550 aa, Oryza sativa
  Clone ID: PAT_MRT4530_10207C.1.pep
MAKKPCEFPTAVLSFRRFLQRRFLGGRHHHRPTSTTATGAAIPPADKLHNQTVMIDLESWLLRSPMSTFPYFMIVAIEAGSFLRGLILLLIYPLLWLLLSHDMLLKAMVMVSFFGLPEKEVVRIGKAVLPKFFLEGMAMEGLEVVRNAKKVVVFSPLFPRVMVEGFLKEYIGVNAVIGREVIAVAGRYVGLLVDHIDMDDGGFVDEVMEETKRGKGDGAVGLAGVGSKMHHLFSRYCKCICSTRNSAILMQETYVVCDADKKEWQPVPREKYPKPLIFHDGRLAFKLTPCAAVAMYTYLPWGIFLAVFRSLAFGLLPYRVSVPLAAFTGMRSRLIAGPSPDATRRNSGTAGGRLYVCNHRTLLDPITVAAVLNKPITAVTYSVSPVSELIAPIRTARLTRDRDEDRRRMEALLARGDLVVCPEGTTCREPYLLRFSPLFAELTGEVTPVALETRIDMFYGTSTKPAAKWLDPFYFMLNSRPEYHVEFLQPVSTAPVDGEAGGHGHSINAANRVQRVLGEALAFELTEQTRKDKYEMLAGNKGNVKGEAKM

SEQ ID NO: 104779 - protein, 54 aa, Oryza sativa
  Clone ID: PAT_MRT4530_102080C.1.pep
MATISETLPNSEAVSHAYKFASTWEKVGFLASLRGRVGVWSSGSTGGSGGSDLI

SEQ ID NO: 104780 - protein, 561 aa, Oryza sativa
  unsure (1)..(561): unsure at all Xaa locations
  Clone ID: PAT_MRT4530_102081C.1.pep
MESTMKGIRGDNAPCVLDLDDAATVGGGVGDTYGEDCATEEQLVTPWTVSVASGYNLLRDPRYNKGLAFNERERETHYLRGLLPPAIVSQELQERKIMHNIRQYQLPLQKYMAMMDLQEGNERLFYKLLIDNVEELLPVVYTPTVGEACQKYGSIFSRPQGLYISLKEKGKILEVLKNWPERSIQVIVVTDGERILGLGDLGCQGMGIPVGKLALYTALGGVRPSAEYADFLHEFMTAVKQNYGEKVLIQFEDFANHNAFELLAKYGTTHLVFNDDIQGTASVVLSGLVAALKLVGGSLSEHSYLFLGAGEAGTGIAELIALEISRQTKAPIEECRKKIWLVDSKGLIVSSRKETLQHFKKPWAHEHEPVGNLLDAVKTIKPTVLIGTSGKGQTFTQEVVEAISSFNERPVIFALSNPTSQSECTAEQAYTWSKGRAVFASGSPFDPVEYDGKIYVPGQANNAYIFPGFGLGVVMSGAIRVHDDMLLAASEALAQQVTQENFDXGLTYPPFSNIRKISAHIAANVAAKAYELGLASRRPRPKDLVKYAESCMYSPLYRNYR

SEQ ID NO: 104781 - protein, 422 aa, Oryza sativa
  unsure (1)..(422): unsure at all Xaa locations
  Clone ID: PAT_MRT4530_102082C.1.pep
MRCEKDCPHGSIQIIVVTDGERILGLRRTXGCQGMGIPVGELALYTALGGVRPSACLPITLDVGTNNEALLNDEFYIGLRQKRATAQEYADFLHEFMTAVKQNYGEKVLIQFEDFANHNAFELLAKYGTTHLVFNDDIQGTASVVLSGLVAALKLVGGSLSEHSYLFLGAGEAGTGIAELIALEISRQTKAPIEECRKKIWLVDSKGLIVSSRKETLQHFKKPWAHEHEPVGNLLDAVKTIKPTVLIGTSGKGQTFTQEVVEAISSFNERPVIFALSNPTSQSECTAEQAYTWSKGRAVFASGSPFDPVEYDGKIYVPGQANNAYIFPGFGLGVVMSGAIRVHDDMLLAASEALAQQVTQENFDKGLTYPPFSNIRKISAHIAANVAAKAYELGLASRRPRPKDLVKYAESCMYSPLYRNYR

SEQ ID NO: 104782 - protein, 609 aa, Oryza sativa
  Clone ID: PAT_MRT4530_102083C.1.pep
MDDHDDPADDLDRISALPDDLLHIILSNLNNATTVTRTAVLSRRWRRVWTNAQALYFADMNPKRRRAIKPGQFGSFVDWAFAERGDADIQSLTIHMSYRKSATQDQINDWLRYAMRRAVKAFRFYYFSNARDGQDLQLLPIVELPSHARTASIVLFLGSSRLRLPASPAACYEALTELNLRWASFDEEEGASAGGRTLGDFLSTCCPRLRKLEMSSLKLLSRLVLRTESLEELRISYANDLQSLDVTAPNLRVFTHTFCWYGLTLDDINARSVIKIVAPRLEEIAMDNQVFMNTPDLHIHGLKSVRRLCDLNLTVHGQYCSNRGYGLWLLKNCPNVKHVDLLLKSSVFTTDEELADLTDESAPRLHKVRSMVLKTSKLPHHHFTASVRSFLLMCPGLRSLCINITERGQGAWWGVDGGTRLWVPDPMSIAAVGSEVRCGASIDGRRGLGPALMAAAASCGVQGFKVACSLRDPAPASTAVASIRISLFKDRDTLANHPKLTLELLQEVTITGFTRTDEEIDLVSLLFGSSSSIMSVTIHATEKEDTEKVSLKNIMAEDDDNDDDTTTHQQLLEIPFTDHGCWRFQGDVYSWKRYTTEDALSDSVTSGAC

SEQ ID NO: 104783 - protein, 57 aa, Oryza sativa
  Clone ID: PAT_MRT4530_102084C.1.pep
VPQKRNQTKSIDHNIAGCRCFRRTFPFHHKHGMQIASALGLDICHFSRIYSFSQIHL

SEQ ID NO: 104784 - protein, 384 aa, Oryza sativa
  Clone ID: PAT_MRT4530_102085C.1.pep
MAHVSFSDLPPEALDDIARRAGALNNVVCSAVCRPWRRALKTTRLRLLKRPSRPYSVRLDKWRNGTISLCLAVRLGCSSESTIYVPIAMVDGGDKLPTRIIGSSHGWLVTVDKECGLSLLEAFTGRVFPLPPITSSGSKKVAKELDQSMFYKATLAPGRRLGAFAVMLIHGGGFGLSFLRPDAKSWTAVRVPKRMQHKYTDIVFHRGAFYTASRDGEVAAWAPDASSSGLHAGRVSEPTQECTWAALVESVGGDDLLMVSSFVVEEGFAAHGQWYRLPRRRYAVSRYDGEREGTSSWLPVEDLGEAAILVGSSCSLCVSTRGFHDDLRNRLFFAWPSYESGKYYCFHPDEYRLPTATPGCTYLIVPHYGGSWFAPYVAPEFHWY

SEQ ID NO: 104785 - protein, 363 aa, Oryza sativa
  Clone ID: PAT_MRT4530_102086C.1.pep
MSPAAACRGNPPSRSAIVADTATGYHLLSIHGYSRTKGTPTGSPLKSTRFTVAGHRWRIHYYPNADRADSADYISMYLFLDEKSNATRSVKALFQIRFADQVKAQPSLALHAVRTFGDGSWSWGYAKFVRREVLEKSKDLRDDSFTIRCDIVVVREFVAEEATEILPAGSFVSVPPSEMNRHFGDLLETEKGADVVFEVAGESFAAHRCVLAARSPVFGAELYGLMKEGDTAGVVRIEDMEAQVFKMLLRFVYTDSLPEMEAEEDVMCQHLIVAADRYDLQRLKLICEEKLCKYIGVCTVSNILALADQHHCDGLKKACFSFLGSPANLSAFVADDGLDHLSRSCPSLMKELVVELALPPSHA

SEQ ID NO: 104786 - protein, 275 aa, Oryza sativa
  unsure (1)..(275): unsure at all Xaa locations
  Clone ID: PAT_MRT4530_102087C.1.pep
TGGATAGESGGGGGGRVWPRQAKLARATAGDRGGRWGRDPGRAPAPGGDSRGDGYVAAGGGGIKRGWRSNAERPRSGMSLPGMLMRSKNGRXRAMGRTETGGAAAREAALDGGGRAEGKRDGLWAERTXKRADEHGRRRRGPQRRRWPKEERGGLLRRSRRRWRRERHTKWTERTSTSFLPLVPVAAVALLGGAQRGGVPQRRERTERGEMRPAGXGERGDASPPLTRRAPRVXPPLLRPRPETPLLRLXSGPCTAHARSRRLPAVALGRCLSPP

SEQ ID NO: 104787 - protein, 764 aa, Oryza sativa
  Clone ID: PAT_MRT4530_102088C.1.pep
MTKELMIPQLKEQLREMVELLYEGKLDMRRLNYGVITLIPKVKDANTIKSFRPICLLNVCFKFLTKILTRRLSEIAQKVIGESQTAFIPGRQNLDGVVILHEVLHELKKEKKSGIIFKLDFEKAYDKVQWSFLFDVLHKKGFSDRWIQWVKMATIGGKMAVNINGEVKDFFKTYRGVRQGDPLSPLLFNLVADALSEMLNNAKQAVPHLVPGGLTHLQYADDTILFMTNTEENIVTVKFLLYCYEAMSGLKINYQKSEIMVIGGDEMETQRVADLFNCQAGKMPFTYLGIPISMNKLTNADLDIPPNKIEKRLATWKCGYLSYGGKAILINSCLSSIPLYMMGVYLLPEGVHNKMDSIRARFFWEGLEKKRKYHMIKWEALCRPKEFGGLGFIDTRKMNIALLCKWIYRLESGKEDPCCVLLRNKYMKDGGGFFQSKAEESSQFWKGLHEVKKWMDLGSSYKVGNGKATNFWSDVWIGETPLKTQYPNIYRMCADKEKTVSQMCLEGDWYIELRRSLGERDLNEWNDLHNTPREIHLKEERDCIIWKLTKNGFYKAKTLYQALSFGGVKDKVMQDLWRSSIPLKVKILFWLMLKGRIQAAGQLKKMKWSGSPNCKLCGQTEDVDHLMFRCHISQFMWCCYRDAFGWDNIPSSREDLLEKLNIQKDGQKSVLLACLAAGTWAIWLMRNDWVFNGKLTSDPSHLPPKLFLFFYSGDNWRRRSSGAIWTPQGPYCLPVLEGQQAQTPDEDLNDFQLILQGCLFGCSL

SEQ ID NO: 104788 - protein, 68 aa, Oryza sativa
  Clone ID: PAT_MRT4530_102089C.1.pep
MMTGDTKDIGEDEDNSAGEGEEPLIMGWDGRRRLGGYGDWVAMFGGNRLGHMTVLGPRWHDRDGVMDI

SEQ ID NO: 104789 - protein, 58 aa, Oryza sativa
  Clone ID: PAT_MRT4530_10208C.1.pep
VAKQTKFYHSRILQNDHLNKSAVKYTKIISSNPRVFTFFLLKIFPFFSFPLFFFFFFF

SEQ ID NO: 104790 - protein, 131 aa, Oryza sativa
  Clone ID: PAT_MRT4530_102090C.1.pep
MAFTMRAVKVPPNSASLEEARHRVFDFFRQACRAIPSIMEIYNLDDVVTPSQLRSTIAKEIRKNQGVTNPKVIDMLLFKGMEELGNITEHAKQRHHVIGQYVVGQKGLVQDMEKDQGSSDFLKKFYTSNYS

SEQ ID NO: 104791 - protein, 103 aa, Oryza sativa
  unsure (1)..(103): unsure at all Xaa locations
  Clone ID: PAT_MRT4530_102091C.1.pep
HXHIYFPMCSECLWTIMQIQVTDQPPNNQVGGISHLSVIQRSKEGPSSSSCSSSCLRETQTPPRRRGPQARAPRHVSEKPKLRHDAMTARSDEKTRKDLIAGG

SEQ ID NO: 104792 - protein, 383 aa, Oryza sativa
  Clone ID: PAT_MRT4530_102092C.1.pep
MAIMTRVATAALMVAAAVLLGLAGAGHAQLQNGFYKGKCGANDVEAVVQGIVRSRFARDAPIVAYLLRMQFHECAVNGCDGGLLIDGPGTEKTASPNLSVKGYDLIADIKAELERRCPGVVSCSDIQILATRDAVALAGGRPYAVRTGRRDRRQSRASDVVLPAPDSTAAQSVAFFRKLGLSEFDAVLLLGAHTVGATHCGVIKDSRLYKYGGRAGATDPALDPYYAFVYKTWVCPNAAASDGNVVFLDDQWSALRVDSNYYKQLQRRRGVLPCDQNLYGDGASTKWIVNLLANNSDLFPSLFPQALIKLGEVNVITGAQGEIRKDMYSQCGKDGVAVLRIRHAGERGRSRASNMRERSGSCVIPLIFPTHLLPFSRARFLNY

SEQ ID NO: 104793 - protein, 4322 aa, Oryza sativa
  Clone ID: PAT_MRT4530_102093C.1.pep
MAGLGTGAPIVKVYHEKSMILPDVSRVLTCLYEKDVKFEPCTTSYKSLLRLQASTHAPVPFYDGPTFLEESREICRYIAETYEHHGYPFLLGKDALERASIEQWLHHEEHAFNPPSRALFCHLAFPLDQEDDLEMQKAKLDEVLEVYEQRLSDSEFLAGNKFTLADLVHLPNSHYIKASGKFAYLYDSRKNVQRWWNAISTRHSWDQVLSYMTKVEQDNKLEELEKQKQQEWQREYHTATGRRTRLYSRKHTRTKSQTILVPPPDTVSASPTAPQGEQPPPADSLSEKASVFSSQSTTHKSIASPSKKNTSSTPSLGNFPSTADKPPRIHADMSSIRDVSVPPDTTETEHPTRSMLSSSKEVGTYIEPTPQKPPASLDNFSESDGPISGASHSQISPRTAKEDSDRLHASDLYRSDRKSTGHSYEATYGKSPTRGATDSSPNKLHSTEAHQMLQAEKWHAVQAGLRNLQGDIDNSVPSRQVKPSKEVQQYPSQDSEQVSIRPVAQEPLSMDGQLVQGPEGTAQTPHTDQTMGVSSPHWQHAADARRISEDEASSDRRIKGAHWSKHAADEDAQAIPFQTARDDSQDTTQRARETDSVTRSTRDQDAHDSRQGIMTYDSAPSRLQPMDASHDAPLPSKKSTSQTPYTAAHIPTGYQGAQEFIQQGRERPKPRSVVPYDAQGSTEEEKMAESPPSKAQILGSRGLDVSPPKEVLNEDGYGATGPLQTRYGDDQDDWIQARDSTTPRHMNQDAIEETEMADSEPSKARTLDSQQAFPQKQPPAEDLRFAASTSNRRYFDDQDSTKKSKHTASIPRRMEAQGSLEETKAGESGLPREQPFLQAQAKDARSLTPPSQEGYAGPQAVSKQRGDPGSISRRIRAQDARVTFVESKADDSTFTREQPSDAWQATGPLPEHKVYDAQSSTSPFQDATMKSEDTTPQQRRGQGAKETKLSDSASLQVQPSDYQRSDSHFQNQEEIEDPHGAISPHKRSYTDVEDMTKHPGDKILGEDAQDVSEETKALDSTIVRGRAHPQDTHQAAIPPRRQAATKDALGVTPHFPTRYPTAEDTSRQLRRTASTPTEKAVQDGRDAFREWKSVDSTSSREQPSDVQRAEASFPKQEEADSHSTTVPFQRRYPDIEDTTKEPIDKPKEMVGEDAQAGFEETKALDAATEPRDTPRAAITPSKQVIAKDALSVTPLPPTRYPTAEDTSRQPKRTGSTPTEKAVQDGRDAFRESKSVDSTSSTQQPSGYRRAAASLPKQEAADSRSTPLPFQRRYPDVEHTTKEPRDKPKESVGEDAQDGFDETKALDSAIIRGRAQPQETPRAAITPSKQEAAKDALSGTPLSPTRYQTAEETVGEDSQDGFEETKAFDSAIFRGRAQPQDTRRSAITPPKLEEAKDALGATPHPPTRYPTAEDTSRQPTRTASTPIEKAVPDGRDAFRELKIVDSTSSREQPSDVRRAAASLRKQEAADSHSTTVPFQRRYPDIEDTTKEPRDKPKEKVSEEAQDGFEETKDLDSSILRGRAQSQGTQRAAITPPKLDAAKDAPGATPLPPTRYPTGEDASRQPRRTASTPTEKAVRGGRDDFTESKSVDSTPSREQPSDVRRAAASLPKQEAADSRSTPLPFQRRYPDVEHTTKEPRDKPKESVGEDAQDSFEETKALDSSMFRGRAQPQDTRPSAITPSKLEDVRDALGATPLPPRRYPTAEDTSRQPTRTASTPIEKAVPDGRDAIRELKIVDSTSSREQPSDVRRAPASLPKQEAADSYSTTVPFQRSYPDNEDTKEPRDKPKEKVSGEAQDGFDETKALDSSILRGRAQPQDTQRAAITPPKLDAAKDAPGATPLPPTRYPTGEDASRQPRRTASTPTEKAVRGGRDDSTESRSVDSTPSREQPSDVRRAAASLPKQEAADSRSTPLPFQRRYPDTRDTTKESRDKLKEAVGEDGQDGFEETKALDSAIIGGRAQPQETPRAAVTPSKLEGAKDALGVTPIAPTRYPTAEDTSKQSTRTASTPSEKAVPYGRDAFIESKSVDSTSSREQPSDVRRAAASLPKQEAADSRSTTMPFQRRYRDIEDTTKEPREPRDKPKETVGQDVQDTYEERVTTDSVLFTKQPSDMPRAAITPSKKAANDDAPSVSPPLPTRYPSAEDTSKQSIRPQDSRDVFREQKAVDSTSSPGPSDSLRASASLPNQEVDGTRRTTVPFQKREPELQNSTKPVNDSISTSWEMTAQDTQDTFEETKVPDSAAFSMPEVDSQRTDAEAQAEAQDTRDGGSRSRWWHASKTLPDGTPISGDDVTGLSPGDQMPTRMDQDAIPSTQIANGITERSIKQTAEPPAPVAPQTIFHQQARPSAPITKEVQASDNQGAISKIQQVSPDNHPTDYSAVPRVAAQEQVSHAPQTSPGREGITPAQREMDSPISDALPASAKVQEPAPDKSTMPFVSSVKQGSHVGHDVEPHEGPLPDTYGAVVDKETTKSLSWQDRSLEASPDSTPTHGYVHPTSRDEPAILPGQGAPQEPTHPDALDSASTRDVTADSLVGPKKFKQRSTDQEDISFASNQTSGMGAQPYSSLDKVARAEQKSDLSDQDPSHSAQETVLAAAERTKALPKPIDQQETPDSRKPPTPDTQYASQIIPSQEKVAPDVPSQEKVSQAELSLKPHEGSTPHMHGSIVDEKKTRPLASPTKSSNDVLDLTPAGADVHPTSSTEPPRSALPVQAQTPSATQTPPPFASHKSVRTEDIRADANGKVKSVKPSASPDAPHATAPGEVALSEQKLASAGRDSSRAAQLPSSDEPRNEQIKDSDHTAQPFSSAAPDQAKDLQRTFGQPDISRAPGTSESPYSDVYDGARKVDPDYQLIDKTIPSQEQVSHPDLASKTNEGPTETPGPAPLMDVYDSISTQYIQDGDLDKDQDSANFAQKYSSSEPKEEESTVAAPDQTKEIQTTVGQQDILPAVSKEKDPSSGVQYDSMEVQEVAPKDQHIDGSIPSHEQAPNVEEPMTHITGPTSALDTQHDQDSYQYPELPSSAKSRKETDVAEADKTKAKQMTFGQPVPVPSDATRSVTDQGAQQPQRPAKIESPPFLETIKNYEYTQNVSDETLDKNKSSGKPSADQEVMSPKVVPATFLDPQRVTVPDDEQKIAKPDLTRSAQPPFSAEPTKRKTVVGASDQAKASETIVDREGMMTAPYREKSLCPDTQHALRNVLEMSPSDNLTDNPFAGQEHGSFSEGSTTDSRDAITDESATTSTSGSEKVLDASILTATHDDAHPPTVRNLPEHETQAPASTQSASVEASDKAKSTDQEDMKPMASQASILDTQRGTNGDKPIARFLHDQGAQSPELTHPQQPPESPPHSASQHDAPTDVLDKTKMTKLTSTNQEGMAPTAGSRSTLESQPDGTFAAEVVHDEQKSTLSDQESARATQPLSSVERSKEDTNVSAADQPEVPQTIFHQKARSSVPVTREVQFPDSLGAISKIQEVSPDNQSTDYSAVQPVPTKEQVLHAPQTSPDQEGITPAQGEKDSPIPDAQLVPHALQDKGSPRSTQPPPPIESSEKESQIAEDGQTVLLQSSVVQESTPSLAGPRESSSSDSPYPSAENQVSTPKEVEPLPPTTGMMDRVQPSSEATPGVVAGISATPGDNQPSPDRESVEVAEEGTDQQKADQASVQSPQDNMGQVKETEEQDTGTGETYQATVQSPQDIKEQRDETEQQDTRTGEAYQDAPAPDAPQDKGSPRSTQPPPPVESSQKESKIAEDSQTLLPQASAVQESTPSSAGPREFTPYPSVEDQGSAPKAEEPLPPTTANQLGSGSPWKFKYQVDLVGMMDRVQPSSEATPGVVAGISATPGDNQPSPARESAEVAKEGTGQQKADQASVQSPQDNMGQVKETEEQDTGTGETYQASVQSPQDIKEQRDETEQQDTRTGEAYQDAPAPDAPQDKGSPRSTQPPPPVESSQKESKIAEDSQTLLPQASAVQESTPSSAGPRESTPYPSVEDQGSAPKAEEPLPPTTANQLGSGSPWKFKYQVDLVGMMDRVQPSSEATPGVVAGISATPGDNQPSPARESAEVAKEGTDQQKADQASVQSPQDNMDQVKETEEQDTGTGETYQASVQSPQDIKEQRDETEQQDTRTGEAYQDAPAPDAPQDKGLPRSTQPPPPIESSQKESEIAEDSQTLLPQASAVQESTPSSASPRDSLSLDSSYSLMENRGSVPNVGKPLPPSTDMMDRVQPSLGPSLEVSSDEKTTVPLDGLANNLSNVSPSVTASQVLGRSENGSGTGALSGETVPSNSQENSEGTPSEEISKQQPQTNMSSTKLSKDDNKEADGSANDTKPGDSEDNPSR

SEQ ID NO: 104794 - protein, 66 aa, Oryza sativa
  unsure (1)..(66): unsure at all Xaa locations
  Clone ID: PAT_MRT4530_102094C.1.pep
LYIPPLMEVILFITLRVPFSETLSAFFLLPYGXGFRSIIRMRSLVFPGFFLLGNKIVLLQPPSLLL

SEQ ID NO: 104795 - protein, 350 aa, Oryza sativa
  Clone ID: PAT_MRT4530_102095C.1.pep
MAEASSSSAAAVPPLDPEAIAAVAEAAPPEEMTLVAKWKGNDYTVRVVGDDTLGELKRRICEVTGVLPKRQKLLYPKFKLNECKDSELISSIPFKPNVKINMIGTVEDEIFVDQEDDPEILNDYEIGQNEVTAIKDKDVYKQKLKRRASQYKIKILNPCRKGKKLLVLDIDYTLFDHRSAAENPIELMRPYLHEFLSAAYSEYDIMIWSATSMKWVGMKMDQLGVLGNPNYKITALMDHLAMITVQSENLSEKKTFDCKPLGVIWAQFPEYNETNTIMFDDLRRNFVMNPQNGLVIKPYKRTHSNRGTDQELVKLTQYLLTIAELEDLSKLDHSAWESFTEENAKRRRHR

SEQ ID NO: 104796 - protein, 54 aa, Oryza sativa
  Clone ID: PAT_MRT4530_102096C.1.pep
PGRKQRTPSAYNCFVNGLTYPESSRSEAGIAAELHLQNKANEINGHEYQAAVSY

SEQ ID NO: 104797 - protein, 239 aa, Oryza sativa
  Clone ID: PAT_MRT4530_102097C.1.pep
MATDAAATAHSASAGCSAMKAEFAKHAEYLNTLNDKRERLVKASRDLTMNSKKAIFQVHRISKNNKEEVLSKAENDLTVVVNQYIGKLVQEYVEAATFCRFCKTGTLLSLAEINDSLLELGDKSVEPLQINVLDYVLGVADLSGELMRLAIGRISDGEVEYAKNICAFVRDIYRELTLVVPLMDDNSEMKKKMETMLQSVVKIENACFSVHVRGSEYIPLLGSSADPDYSFFGASDFDQ

SEQ ID NO: 104798 - protein, 654 aa, Oryza sativa
  Clone ID: PAT_MRT4530_102098C.1.pep
MSRKRERPLEVVAPPATPLSPSKRLRRAGLVVMWLRRKPKPVGVEQMAARLIRQMQVQMVKLFMLLMFLVARLGNVERLLLEQPYLIRRLLEEHFGIFQRSLMESIQDTVRKAVHSEASILDLIHMKERQTTLLSGGAYQHPRPNISEGFPQTGGSTRMVKLFFVDVERPEDPLFTGSPVQWQNGANAKVAIFENGSQITQGGLSKLQIEILPVHDDFFTERGPANFTKEEFNKQIYMCKGKESVLKTVNLTNGEANLGSFFFTESSHGKRLRLAARVKYQDLAVRVQEATSYSFVVKDRRSKSILVSYMQWHFSSETKFATCLALLEGNTSSQPYCLLSVNKKSNSPSKEEGIHCLKKISLKGKRCNDLAGKYITKVKHLMRCYHRDPAGLQKLTGMKNEDWNTMISHATTSDPGDEIHSYRVEKNTIIFFNDFFALVGMSVDGSYAPYHANNLNQLQQRKMNKWKESAYQKFEELEKLGCLIPDHVMINGQPVPVSPKNDASHSIQANPTCFNHQIALEESGREGPSMQHNGTSYSLTEENILNGLGSGLVQSTILSQNTAVVPGADPRHSGYASTSTADAAGTSCPVTDGVGPWDYPIFSDLYPNVMFQEPSGLIYGHVVEADQAFLPDSHELANADNQFTGGNDDSAPFD

SEQ ID NO: 104799 - protein, 176 aa, Oryza sativa
  Clone ID: PAT_MRT4530_102099C.1.pep
IWNVLEAERPDLRQLHGKSLVEVNRSFLEKHSASLTHRAAAAEMMYLLEPDKKLEAIKLIEDSVNSTASGNSVLGPVNEWKILDCIDVHKLLETIFGDQDVANSWKARCAEYFPYSTYFEGIKSASAAYCSVANSLEDSSENGIVANAQMKSADGETCTLNGTVHIVDELSNLSIR

SEQ ID NO: 104800 - protein, 231 aa, Oryza sativa
  Clone ID: PAT_MRT4530_10209C.1.pep
MDAGVGLRAKPGAWAGLGNPRRSSTARVPVRFAVEKFAQPLVLGSDRRSCGAKLKVSCSRKPAGIDKTYYSADEALVLKQKAEDVVPYLNDRCIYLVGMMGSGKTTVGKILAEVLGYSFFDRSYMKKGSTIWLDVPLDALARRIAAVGTASRPLLHQESGDPYAKAYAKLTALFEQRMDSYANADARVSLEHIAVKQGHSNVTTLTPSAIAIEGKQPRERGWTVPTEVQRC

SEQ ID NO: 104801 - protein, 64 aa, Oryza sativa
  Clone ID: PAT_MRT4530_1020C.1.pep
MGCGDGKRSATALKMVMSVVRPADAGGVRSEIGRIPRQLKQTYLHPTIGPDLDCFAEKRGEDFW

SEQ ID NO: 104802 - protein, 39 aa, Oryza sativa
  Clone ID: PAT_MRT4530_102100C.1.pep
DNLYLKNDSYYIIDPLTNVSFPVPPSLKIFAISTTSPFL

SEQ ID NO: 104803 - protein, 886 aa, Oryza sativa
  unsure (1)..(886): unsure at all Xaa locations
  Clone ID: PAT_MRT4530_102101C.1.pep
MVSSLLAKVANLFKVIVKSYETKQYMKGLKAADSILKKFPEHGETLSMKGLTLNCMDRKSEAYELVRRGLKNDLKSHVCWHVYGLLYRSDREYREAIKCYRNALRIDPDNIEILRDLSLLQAQMRDLSGFVETRQQLLTLKPNHRMNWIGFAVAHHLSSNSSKAIEVLEAYEGTLEDDYPPENERYEHSEMLLYKISLFEECGMLDRALEEMQKKESKIVDKLSFKEQMACILLKLGRFEEAEKTYRSLLFMNPDNYKYFIAVQKCLGLYSENGQYSTDDVDRLCELYSSLKEEYGWSSAVKRIPLDFLEGEKFQEAADNYVRPLLTKGVPSLFSDLSPLLXHTRAANILEELFLKLERSIRTSGCFPGSSHTEPPSTLLWTLFLISQHYDRRGQYDIALDKIDEAISHTPTVIDLYSIKGKILQHAGNFSAAAALADEARSMDLADRYLNSECVMQMLQADQVGLAEKTAVLFTKDGDQHNNLHDMQCMWYELASGESYYRQGDLGRALKNFLAVEKHYADMTEDQFDFHSYCLRKMTLRAYVSMLKFQDRLHAHEYFHKAAAGAIRCYMKLHDSPSKSSTEENDEMSKLPPAQRKKLRQKQKKAEARAKREAEEKQEDETTSSHTSKSGKKQNARPVDLDPHGEKLVQIENPLAEGTKYLKLLQNNSSDSLETHTLSFELNMRKQKILLAFQAVKQLIKLDENSPDSHRCLIRFFHKINNLPSPGTDSEKLIWNVLEAERPDLRAAAAEMMYLLEPDKKLEAIKLIEDSVNSTASGNSVLGPVNEWKILDCIDVHKLLETIFGDQDVANSWKARCAEYFPYSTYFEGIKSASAAYCSVANSLEDSSENGIVANAQMKSADGETCTLWNCSKCANEISRRSKHAL

SEQ ID NO: 104804 - protein, 85 aa, Oryza sativa
  Clone ID: PAT_MRT4530_102102C.1.pep
DSLFIYLLALASVIFISQTRLALICLTLVAQYVRFVEVCKLRYYKHIEKAVVVNTMNMYYLLCSYASLYCKPVRALMIQISVRQN

SEQ ID NO: 104805 - protein, 57 aa, Oryza sativa
  unsure (1)..(57): unsure at all Xaa locations
  Clone ID: PAT_MRT4530_102103C.1.pep
QPSIIWSSRWFLLLAQVNTSLLVKVLPSVRXRGPKQCRRLNSRRSPPSTAKVSLSSF

SEQ ID NO: 104806 - protein, 296 aa, Oryza sativa
  Clone ID: PAT_MRT4530_102104C.1.pep
MMEAAPDEEAGLALPEGERILEVTLISAQGLKPPSGLRRRLLQAYAVAWVDAARRLQTRPDRAGGVDPEWHERLLFRVHEAALADDSRAAVTVEIYAAPAGGWHIGGDSLVGSARFLLGDHGLLSRPVGSPSMFAVGVRRPSGRVHGLLNVAASLVAAPPSPAAAHALRSSPAVSLSGLSTAPIPAGRVLRVLNRSFPTPPPSPTVLTTKKQQIAAKPNKKCADKLDVAVKLNNGADDRSDEEREELREMGGVVFCGPCILPLPRKIHISPSDENLQAFASIFSGGVGITRQSPRH

SEQ ID NO: 104807 - protein, 86 aa, Oryza sativa
  Clone ID: PAT_MRT4530_102105C.1.pep
PRSGGGKGSSPPASPPLPPHIEPPRPPPTPPTPPSPPLLPPPPPPLSPDLAEGRAWSPLPPPLSSRRQRERREGERRDERRRRGEG

SEQ ID NO: 104808 - protein, 58 aa, Oryza sativa
  Clone ID: PAT_MRT4530_102106C.1.pep
MLPLSPLPRPCPPPTDRSSHRIPPRQEAAPLATMKQGASFYRISEETHRILHRLAGVD

SEQ ID NO: 104809 - protein, 179 aa, Oryza sativa
  unsure (1)..(179): unsure at all Xaa locations
  Clone ID: PAT_MRT4530_102107C.1.pep
MASRIGCRXLRRSNATMGLMRSHLHARNYRLQLSVLIPLGSHSSQLTTRRYYLPHASPYQLWSRSLAXSDNGDHVEAVGPFMGEYDTDGTLANFLNKPDDRDEADEPIEQIETDKDAIDVASPDAGVIEKALASEGDTVYYSTKAAIVSETAEPAETHVXAPSEDSTPKETPSKAAETP

SEQ ID NO: 104810 - protein, 210 aa, Oryza sativa
  Clone ID: PAT_MRT4530_102108C.1.pep
MATTSLSLHGVPSPTATKLSSSFLGAPASFLRPTPPPLAAPSRRALAVRAMAPPKPGGKPKKVVGLIKLALEAGKATPAPPVGPALGAKGVNIMSFCKEYNAKTAEKAGYIIPVEITVFDDKSFTFILKTPPASVLLLKAAGIEKGSKEPQREKVGKVTADQVRTIAQEKLPDLNCKSIDSAMRIIAGTAANMGIEVDPPILEKKEKVLL

SEQ ID NO: 104811 - protein, 134 aa, Oryza sativa
  unsure (1)..(134): unsure at all Xaa locations
  Clone ID: PAT_MRT4530_102109C.1.pep
MKIIFAFALLAMGACSASAQLDVLRQSYRQYQLPATDLLQQPVLTPYTAFLLXQHGLSASPFLQSAAAQLRNTLLXSQFALVSHHSHYQHIXMYRPYRXQLQLQQYDDHSCHRNVTQAHTLLAFNVPSRYDINP

SEQ ID NO: 104812 - protein, 35 aa, Oryza sativa
  Clone ID: PAT_MRT4530_10210C.1.pep
PPDLRRTFTRNAGGSLGYLHSHRSRSLGSTPLPPT

SEQ ID NO: 104813 - protein, 505 aa, Oryza sativa
  Clone ID: PAT_MRT4530_102110C.1.pep
MAATSIVRSKRRLALPYLHRLLHSGPATPSPNRFLRHASPVPRDPDHSPFLRLPDARVSTLPTGLRIVTQAYPAATRMASVGVWVDAGSRFELPGTNGTAHFLEHMAFKGTTRRPTANALEVEIENMGARLNAYTSREQTTYFADVQGRDVPIALDVLSDILQYPCFPANALQRERGVILREMEEVQGMMDEVIFDHLHAAAFQGHPLGDTILGPVENIKSISKKDLEQYITTHYTCPRMVVSAAGAVNHDEVVDQVREFFTGFSTDPTTVDQLVEANPAIFTGSEVRVEQPEMPLTHFAIAFKGSSWANPSSIPLMVIQSILGTWNRSIGVGNCSGSALARGISNGNLAESMIAFNTNYRDTGLFGICTIAQPDSLYDLSQLIMQEFRRLAFEVSETEVARARNQLKSALLLHIDGSTAVSENNGRQMLTYGRVMPFLELFARIDAVDRDTVMETAKDFIIDKDIALAAVGPLTNLPELSWFRSHTYSDDEFSSRTFLQDAQNN

SEQ ID NO: 104814 - protein, 52 aa, Oryza sativa
  Clone ID: PAT_MRT4530_102111C.1.pep
SANAIINSLLTADWISLYSPESRFIWRWCFGGLYIREEFGWPSTLEEIYRFN

SEQ ID NO: 104815 - protein, 527 aa, Oryza sativa
  unsure (1)..(527): unsure at all Xaa locations
  Clone ID: PAT_MRT4530_102112C.1.pep
MAATSVVRSKRRLALPYLHRLLQSGPATPSPNRFLRHASPVPRDPDHSPFPSLPDARVSTLPTGLRVVTQAYPALRAQRCEGCPEAQQCVRMGRATRMASVGVWVDAGQXGFELPGTNGTAHFLEHMAFKGTTRRPTXANALEVEIENMGARLNAYTSREQTTYFADVQGRDVPIALDVLSDILQYPCFPANALQRERGVILREMEEVQGMMDEVIFDHLHAAAFQGHPLGDTILGPVENIKSISKKDLEQYITXHYTCPRMVVSAAGAVNHDEVVDQVREFFTGFSTDPTTVDQLVEANPAIFTGSEVRVEQPEMPLTHFAIAFKGSSWANPSSIPLMVIQSILGTWNRSIGVGNCSGSALARGISNGNLAESMIAFNTNYRDTGLFGICTIAQPDSLYDLSQLIMQEFRRLAFEVSETEVARARNQLKSALLLHIDGSTAVSENNGRQMLTYGRVMPFLELFARIDAVDRDTVMETAKDFIIDKDIALAAVGPLTNLPELSWFRSHTYSDDEFSSRTFLQDAQNN

SEQ ID NO: 104816 - protein, 312 aa, Oryza sativa
  Clone ID: PAT_MRT4530_102113C.1.pep
MDRLLNIPGALLGSIDNIELALIRSATFDRWWAKWKKHLFHQSTSRPQNLHLLTSAKVKKEGQVVGRQIPPKGKASKKHKATAADDLPALDLDVEECLDNEEMEQAIEEAVADVSETREGGQTPPVDPPSLKKVQSPVKIHLSPRSPSPSRQESGEQTPSTGHDLDVGLPEQPNLAAPGLADMLSFDINQFMDEEGEEITSKVLALLNDDVRGKLVEIADRLGSSLDSLVDNCGPIRDRFEEIQRQILDAYANAISPVVYLEQHRLKLERAMQQIADRRQRAELETTIQANRLSIKGDKAKLDEMEAGPSST

SEQ ID NO: 104817 - protein, 40 aa, Oryza sativa
  Clone ID: PAT_MRT4530_102114C.1.pep
CGDVMEKILPGYKKASKQWWATSNKLAQVRQRGRKRTMIG

SEQ ID NO: 104818 - protein, 45 aa, Oryza sativa
  unsure (1)..(45): unsure at all Xaa locations
  Clone ID: PAT_MRT4530_102115C.1.pep
FLIPNSTSSFSGPSLHACRSTLEDPRVPSSNSXPGVTQLNRLAAH

SEQ ID NO: 104819 - protein, 40 aa, Oryza sativa
  Clone ID: PAT_MRT4530_102116C.1.pep
RPFNKKSGPFSFLAPLNLDRPSLNHAFFLKKNHRIYLIPL

SEQ ID NO: 104820 - protein, 240 aa, Oryza sativa
  unsure (1)..(240): unsure at all Xaa locations
  Clone ID: PAT_MRT4530_102117C.1.pep
AITNAVLQPVPLATDIPFFIGVXPLRWNASLCWGMRLSLCLTSFSWEDAARRRVSRRAAPDTAGAAPTTAGTATVGLREREKREATVMTMDRRRPDPATARRGSHRPPASDGRRWLEAPVLAASRALPGLLRRCLARHRRRHGGPRSTHYGAGSGAPDXPRREAEDAGEDADXEREEERGAVVDAGNRRGGPPRRPRHAAPGPTRPPRPRTAPSPSTPRVSGERRRVGQDVARRRRGWPA

SEQ ID NO: 104821 - protein, 201 aa, Oryza sativa
  unsure (1)..(201): unsure at all Xaa locations
  Clone ID: PAT_MRT4530_102118C.1.pep
SCLHGWPIKLPLMGVFVFTADRLRLRRLVFSPSWLAYYVAVDGHLCLHXPATFVAADWCLYLHDWPIMPPLMGVFIFTAXTADWCLCLCGCMXHRCYASSSSPPAXLCRHRLVTSPSRLAYYVVADGLLRINXPAAFASADWSLRFQGWTAPPPLMGNLVFTVGXPLPPSIGLLASMVLRLCRHCLITLSLPPAATTASTV

SEQ ID NO: 104822 - protein, 625 aa, Oryza sativa
  Clone ID: PAT_MRT4530_102119C.1.pep
MARGGRQMEIAVEELRVNFEEFQKKVGEENKMLQEQIQNQAVQAKNHKDEVMQNLEVIQDILGSIIGCQGQDGRAFDFIGVPCPMPNFEMGETYAIHAHKTIPTQSPPPPTIHVCTQNTYPNLEWNTSVYFGTPPIPPPPPPQYRTGQLMTNGQNPTLPPYFYPPYQSPWGYQPSPPPPPPPSFDFHRPLDRGPPFWHRQEETRYDSVDHSYRKRPQYGDPFNRNHKHVDFPLSQYGSVDNYIDKFEEIMPLVKHNKPHLNEEYFLEYFILGLKDHIKRPLKSLKMQAYEHAHNYDSPTFSSIQPAGTAHSYPKVALKDSPMQPVKKEPMQTDANLFLLSKPEEGANASNARSRGSLEDDLPVEYSGDVIYTTPDSPTEPQPSPEVSLHALNGLNAGITTFTLQVKIGSLLATALVDSGSTTIFMSPKVKVPRQRAVVRNPSTMGGSGATRLLHARTWVSTTAERPFRRRPSKARPRQRGRTMSIVAVGGEAEVAHAELPHDAVDPGVVDGEPDLERLELIETSTGHTSTLLMTGAVEEATGTGMGVKSNTSSNLWDGAQRCRWGDVLPAGGGAGGPGQGQDMRIWAVALHKTRWFVASFLLHPTPGLFLLHPPTATTGATCFEL

SEQ ID NO: 104823 - protein, 259 aa, Oryza sativa
  unsure (1)..(259): unsure at all Xaa locations
  Clone ID: PAT_MRT4530_10211C.1.pep
MDAGVGLRAKPGAWAGLGNPRRSSTARVPVRFAVEKFAQPLVLGSDRRSCGAKLKVSCSRKPAGIDKTYYSADEALVLKQKAEDVVPYLNDRCIYLVGMMGSGKTTVGKILAEVLGYSFFDSDKLVEKAVGISSVAEIFQLHSEAFFRDNEXYMKKGSTIWLDVPLDALARRIAAVGTASRPLLHQESGDPYAKAYAKLTALFEQRMDSYANADARVSLEHIAVKQGHSNVTTLTPSAIAIEALLKMESFLTEKAMIRN

SEQ ID NO: 104824 - protein, 142 aa, Oryza sativa
  Clone ID: PAT_MRT4530_102120C.1.pep
MQKKRILAQVSLGTRVRASPSKFLVFSNLQSCNQGRGSPDPAASNLIAVDQRLQFHHVHIVIISDADTAAATEDEIQSMKTVIVVAPTANTMGTPGAWWNREASALPPSPSCMATESDLLRSWLTGSTGMDYKCYNLYRRRF

SEQ ID NO: 104825 - protein, 76 aa, Oryza sativa
  Clone ID: PAT_MRT4530_102121C.1.pep
LVRIQLKKRVLPQDLCFAILQWTMLCNTCSDSRKNTMIHAHHALSVPAPTKEKNPSGSLRRKRENGATFMLMYVLT

SEQ ID NO: 104826 - protein, 267 aa, Oryza sativa
  Clone ID: PAT_MRT4530_102122C.1.pep
MGCANAYLFSAFLSARCCCFCWPITGKGVRKGEKKKRKIRGFCGIIGLVPMWYPPSIVECQVGELGAQGSTEMISSFPDVCISTSFGPGDPTQTSLVWTQVGSIVFPVYAAKPISYALVFVEIENGAAKKTRNDITSAAPPVSTEKRAPTTTTLRKKPQAAKSRSFSAKQALTDYKVSPFDPVLYPEADHWLEEYDLQYPTSTVPLQQQLDQQLRDPLVFRHKEKRCMPMGTSMLPKSFASTRVEIRPEPLERLTKTTKSADPIAPR

SEQ ID NO: 104827 - protein, 66 aa, Oryza sativa
  Clone ID: PAT_MRT4530_102123C.1.pep
TGGSEALQVMSARILDSKPESWQAHSSTSGSGPQPEQMTAGIPAVLTKKKDPDVPHHEHSVSTTLS

SEQ ID NO: 104828 - protein, 325 aa, Oryza sativa
  Clone ID: PAT_MRT4530_102124C.1.pep
MVDYQLGREVDKIFQSIAEFVVGNGKKPRMQSSDLRTGLGGQHCLEMAHSLDLCGQITTDGGSSANEQNNRWVRDLRGSLSNEALAQYFELWSKLQMIHLSQEDDTIRCKLTPDGQFSSSSAYDLFFKSMELCTVGELIWHTKAPAKIRFFMWLAAKGRCLTADNLQKRGWPHSDCCNLCSRKPEDCTHLFTKCDYTVRDWMISASQLGGCRLDDVFGNATEAISTGDANLNLNEIWSPVPSADPAKTVSVTKKEEAVRDVQGSHKTHDEPDGRSDYSDTVVTVACAATIKRHWISSSEPKHNDELLRSSNQKRSPVSKDITDTD

SEQ ID NO: 104829 - protein, 50 aa, Oryza sativa
  unsure (1)..(50): unsure at all Xaa locations
  Clone ID: PAT_MRT4530_102125C.1.pep
GPXKKPQGPPGPTTPKSPGAFIGPGGDPLRGAPPTRPQKGPRAPPPPREG

SEQ ID NO: 104830 - protein, 341 aa, Oryza sativa
  unsure (1)..(341): unsure at all Xaa locations
  Clone ID: PAT_MRT4530_102126C.1.pep
MVGSSADVSAESSVKSSLDYANDPPQQLTVSSKRKPAVVKATEPTRVWLNGNAVKGKAGERFTGPPVAGEADELWAHDIACSRVHAVMLAETAKTIVRHQLLPPPRRAAAPQSWAKRTPSATILMAAATSQSFLSPAPNPLLRPRILPFPAGGSVSLRGRRPAFPSVAAASTSMASSESEERKETKLWGGRFEEGVTDAVEGFTESISYDWQLYKYDIMGSKAHASMLAAQGLITAGDKDIILEGLDQIEKLIQDGKFEWRTDREDVHMNIEAALIEKVGEPAKKLHTARSRNDQIVTDLRLWCRDAIDKILFRIKQFQVSLVLLAXKYVDLIVPGYTHLQ

SEQ ID NO: 104831 - protein, 144 aa, Oryza sativa
  Clone ID: PAT_MRT4530_102127C.1.pep
MARNESRRFNILNICADVRGWLEANWGCTRMDPSSTPQHRRLGLGKCQRELMAGASWHTLGEHEHLFPQIKRNIQSSSAYTEVREKDHFPNYWGYIKEEKLEKAGKICTDQTDKNCASTVSVGGCTSSEFIAVLQHKFGPLPEE

SEQ ID NO: 104832 - protein, 681 aa, Oryza sativa
  Clone ID: PAT_MRT4530_102128C.1.pep
MSSSFLAVCATSFVLVCSAATPRVLASVYGVGGGLLIVPSNDSLAHCPSSCGEVDGISYPFGIGGGCFRDGFELTCNTATKTPKLLVANSTTQITAMEYDMALAPMYFNFTTRQGMDTYNISWVSPAKGIKISDENTFYVVCCNFDATLFEFGTGDFVGSCMSRCDIEKAPIAIGQPCNGNGCCSIKLSRDMRGFQSTLVQAEAAAQISDPLHHGIMAFMSYTDYYVRNASDLFLSWTNVSNVEGAELQFAITDQPSCGSALVNKSSYACTTGSNCQNISSGGYTCECTNRYLQGNPYILGGCNMQDHITVLETSEAQFIVTNVSVEDGTLTISNLLNNTEYGREILITQGHGTVYKGILSDQSVVAIKKSKIVEQTEIDQFINEVAILSQIIHRNVVKLFGCCLESEVPLLVYEFIPNGTLHDRLHTDVSVKSSLSWDDRIRIASEAAGALAYLHSAAAIPIFHRDVKSSNILLDGSFTTKVSDFGASRSVSLDETHVVTIVQGTFGYLDPEYYHTGQLTEKSDVYSFGVILVELLTRKKPIFINDVGTKQSLSHYFVDRLREGSLIEIIDYQVLEEAHREDIDDIASLTEACLKLRGGDRPTMKEVEMRLQFLRTKRLRKFQFLPVPGSGGEIQHLLSPNAGKSQAQNNYTSAGDLSYEGISSCYSLEQELSSSVSLPR

SEQ ID NO: 104833 - protein, 1649 aa, Oryza sativa
  unsure (1)..(1649): unsure at all Xaa locations
  Clone ID: PAT_MRT4530_102129C.1.pep
CATRSNDVMREQFGLKPKDARNLYRHPYPKWFERVPLPNRFKIPDFSKFSGQDSVSTYEHVSRFLAQCSEASAVDALRVRLFPLSLSGSAFTWFSSLPCGSINSWADLEKHFHSYFYSGIHEMKLSDLTAIKQRHDEPVHEYIXRFREMRNKCYSLSLTDAXLADLAFKGMIAPIREKFSSQDFDSLSHLAQKVTLHEQRFAEARKNFRKVNHVCRYIYGSDDDDDDDSEIAAAVCVRSKKVILCQWVKXSGKEERYEFDITKADKIFDLLLREKQIQLPAGHTIPSAEELGKRRYCKWHNSGSYSTNDCKVFRQQIQAAIEGGKIKFDDSKRPMKVDGNPFPVNMVHTAGQTADGGRARGFQVNSDXIINKYQKKCNKQQERHYEEDDGGMRLPSIEDCPGCNNVAGSSSRSYNRSNRLRQARVSVHQRLGSMNQDCDQEDNKDGKTQWCPFGIFTKNKKKEKTKLKQEXRVKNQVPTADEAAADEAKRLAKGKSVVTASVNMVFTLPAEFGIKQADVDEVEEESAKLILSPEQAVFEKPEGTENRHLKPLYINGYVNGKLMSKMMVDGGAAVNLMPYATFRKLGRNAEDLIKTNMVLKDFGGNPSETKGVLNVELTIGSKTIPTTFFVIDGKGSYNLLLGRDWIHANCSIPSTMHXCLIQWLGDKIEIMPADSQLKMESPSYYFEGVVEGSNVYTKDTVDDFDDKXGEGFMSADDLEEIDIGPEFRTKLIELLKEFRDCFAWEYYEMPGLSRSIVEHRLPIKQGVRPHQQPPKRYKADMLEPIKAEIKCLYDAGFIHPCRYAEWVSSIVPVIKKNDLNNATPKDEYPMPVADQLVDAASGHKILSFMDGNAGYNQIFMAEEDIHKTAFRCPGAIGLFEWVVMTFGLKSAGATYQRAMNYIYHDLIGWLVEVYIDDVVVKSKEIEDHIADLRKVFERTRKYGLKMNPTKCAFGVSAGQFLRFLVHERGVEVTQRSINAIKKIQPLENKTELQEMISKINFVRRFISNLSGRLEPFTPLLRLKANQKFTLGAEQQKALDSIKEYLSSPPVLIPPQKGIPFRLYLSAGEKSIGSVLIQELEGKERVVFYLSRRLLDAETRYSPMEKLCLCLYFSSTRLRHYLLSNECTVICKADVVKYMLSAPILKGRVGKWIFSLTEFDLRYESPKAVKGQAITDFIVEHHDDSIGSVEVVPWTLFFDGSVCTHGCGIGLVIISPWGASFEFGYIIKPYATNNQVEYEAVLKGLQLLKEVEADAIEIMGDSLLVICQLAGEYECKNDTLMVYNEKCRELMKEFWLVTLRHVSREQNIEANDLAQGASGYKPMMKDVRVEVAALTADDWRYDVHRYLQNPSQSASQKLRYKALKYTLLDDELYYRTIDGVLLKCLSADQAKVAIGEVHEGICGTHQSAHKMKWLLRRAGYFWPTIVEDCFKYCNGCQDCQKFGATQRAPASAMNPIIKPWPFRGWGIDMIGIINPPSSKGHKFILVATDYFTKWVEAIPLKKVDSGDAIQFVQEHIIFRFDIPQTITTNQGSIFVSDEFVQFVDXMGIKLLNSSPYYAQANGQAEASNKSLIKLIKRKISDYPRQWHTRFAEALWSYRMACHGSIXVPPYKLVYGHEAILPWEVRIGSQRTELLNGKYLKKYYPSVWVNT

SEQ ID NO: 104834 - protein, 100 aa, Oryza sativa
  Clone ID: PAT_MRT4530_10212C.1.pep
GEEAPVAVPERLGGGGRGAEGGVPRGGRPRVDVLLGDAAPRRGRVPAAAAGERGRRRRGRVAAVLGEERPHGPARERRRRERERERERENLKFFECEPRA

SEQ ID NO: 104835 - protein, 117 aa, Oryza sativa
  Clone ID: PAT_MRT4530_102130C.1.pep
MRAASGSGGGRWRHWADPARHGWWRDVERHLHHRAAAGATSVDPIRHGCRRGGDGRQCVGGDEAVHPAADLCPTRVDLTMVGRIRRDDGYRDNHGGDLRGSEFEHRRTWRSSGEHLH

SEQ ID NO: 104836 - protein, 127 aa, Oryza sativa
  unsure (1)..(127): unsure at all Xaa locations
  Clone ID: PAT_MRT4530_102131C.1.pep
YECKNDTLMVYNEKCQELMREFRLVTLRHXISREQNIEANDLAQGASGYKPMIKDVKVVVAVITAYDWRYDVHQYLQNRSQSASRKLRYKALKYTFLVDELYYRTIDGVLLKCLSADQAKVAIGEVH

SEQ ID NO: 104837 - protein, 101 aa, Oryza sativa
  unsure (1)..(101): unsure at all Xaa locations
  Clone ID: PAT_MRT4530_102132C.1.pep
KXPIGSVNGYGGHRGWFRTSPLPSLLRPPSPRXRHSPPSRSCPIWQKPVQSXIRRRIXXKCXFGVTVTLPTLANKDIFGXXIGXSSKNAIVITCGHYFYXE

SEQ ID NO: 104838 - protein, 230 aa, Oryza sativa
  Clone ID: PAT_MRT4530_102133C.1.pep
MQAAARTWTWRWRWRCFHSTAAALSKPTPHIRFAVREKRADAKAVLKNILLNGGPCQEGSNKQKRQQKGSGKSKLTNSSYGKNPHRKGKSAQKWKNFDEDDCSDTPYGNFGGKRSFTWYWPGEDDESGSPSGFQWRDESQSNKSRERVWNESDVDEEEPCYDNLRSHRISLGLPPLGPLELDHIKSAFRASALKWHPDKHQGASQAEAEERFKRWVEAYKALSGAFKPSD

SEQ ID NO: 104839 - protein, 366 aa, Oryza sativa
  Clone ID: PAT_MRT4530_102134C.1.pep
MGRPVATLFVLCFISVTACSLSEQATRGRLLAGVDATPPAAGGAVAVPIYLSSQGLYVANFTIGTPPQPVSAVVDLTGELVWTQCTPCQPCFEQDLPLFDPTKSSTFRGLPCGSHLCESIPESSRNCTSDVCIYEAPTKAGDTGGKAGTDTFAIGAAKETLGFGCVVMTDKRLKTIGGPSGIVGLGRTPWSLVTQMNVTAFSYCLAGKSSGALFLGATAKQLAGGKNSSTPFVIKTSAGSSDNGSNPYYMVKLAGIKTGGAPLQAASSSGSTVLLDTVSRASYLADGAYKALKKALTAAVGVQPVASPPKPYDLCFPKAVAGDAPELVFTFDGGAALTVPPANYLLASGNGTVCLTIGSSASLNLT

SEQ ID NO: 104840 - protein, 555 aa, Oryza sativa
  Clone ID: PAT_MRT4530_102135C.1.pep
MAEGALASTIVRQVLTKFGSSVWDELALLCTFRADLAAMEAQFATIRAVLADAAVRDWLRRLRDVAHDIDDFLDACHTDLRRGEGGGDCSVCGGLTPRSFAMAHRLRSLRRELGAVAASKDRFSLSPDARPPASRQLPSVPLMRETISMVDEAKTVGRSADKERLMRMVLDAAGDDDDDDDDGVSVIPIVGIGGLGKTTLAQLAFNDRRANDEVFDPRIWVSMSAGFSLATLVQAVHPIVAAPSERCDLATTTTTNLEAIARFLSMAFTGNKYLLVLDDVWSESHDEWERLRLLLRGGKRGSKIIVTTRSRRIGMMVGTVPPLMLKSLSDEDCWELFKRKAFEEADEELYPKLVRIGKEIVPKCGGVPLAAKALGSMLRFKRNEESWIAVRDSEIWQLDKEETILPSLKLSYDQMPPVLKQCFAYCSVFPRNHEIDKGCPKLRPKPCLPDAITDLSISDSSEILPKLEELTIEYCEMLRVLAEPIRYLTTLRKLKISNCTELDALPEWIAGREGGDGESKPTVELLLGVGGEAACAGREAVAVAVDGAGRWIRSP

SEQ ID NO: 104841 - protein, 453 aa, Oryza sativa
  Clone ID: PAT_MRT4530_102136C.1.pep
MENDARLLEFMEVTSCYDVTLAARQLASCGWHLDRAVDLFYAGVVEGGGRPSSWSARHDGEESTSSASASTSVRAPISARSDTLYGVPYPSVGRATRRRRQTRWESEEDAALRRQREGEASTSTSGYGGGRDDSDDEQPPPASKKRKPSTLAELYRAPRELTYRGGFHSAKVHAARLSRWLLVNVQAEYGGREFASHLLNRDVWADETVAMYVRDNFVFWQADEGDSGGEGSKVCCHYKLDRAKLPAVLFVDPVTGQLMEKLHHITDPTDFLMAAEKFIDSKSFISTTTRANRITYHRLTVVGKEFGGQCGVDALFAYCRSVIGVEQPFRVMRMPATAGAKEEVREDKDVSFEQLGLNMSTVAAAESHCRLHRVRKVESYLDRRSPIVFCRWNPPPLGCSRAHIPLAAVVAVLSVPVTGVIGHLVPSRAPVPMAVDRRGNPGPRWTERCVTDG

SEQ ID NO: 104842 - protein, 83 aa, Oryza sativa
  Clone ID: PAT_MRT4530_102137C.1.pep
PVVADTPIAGPPVRIHSWQCWQWWIRSSQDNRHPFWLQLLYFLFISLLGFLMLKALPMKTSMVPRPMDLDLIFTSVSATTVSS

SEQ ID NO: 104843 - protein, 59 aa, Oryza sativa
  Clone ID: PAT_MRT4530_102138C.1.pep
NRLMRLRVVPQASRRLWQEWSDLNYTGTCVNAVSVSCLLYILLACITVNLLIRSSSLGT

SEQ ID NO: 104844 - protein, 72 aa, Oryza sativa
  unsure (1)..(72): unsure at all Xaa locations
  Clone ID: PAT_MRT4530_102139C.1.pep
HYXRAMTSHARVRKLGSSRAAASAVGVDGSPSARLAALTCPAIASAGTGTAARWYRQTPATVYVLRRTRPPT

SEQ ID NO: 104845 - protein, 58 aa, Oryza sativa
  Clone ID: PAT_MRT4530_10213C.1.pep
MSVWERGTDMGGQAGELALRLASKAATEGADDGGDRAEGFRSSDGAWWEHTSGLIGAG

SEQ ID NO: 104846 - protein, 139 aa, Oryza sativa
  Clone ID: PAT_MRT4530_102140C.1.pep
SIWHCRHPNIGTIQLKSCAARPHHALEESWVSLATDLPRVIPTRPSPPFIFIAPATEKTKKISQFPNPNADLASTPQIPNPSPLRSSSSSLARPTLARQIYPSPSSRHGGDPRHDARRHHQEQQEGQPLLRPWTPRICR

SEQ ID NO: 104847 - protein, 452 aa, Oryza sativa
  Clone ID: PAT_MRT4530_102141C.1.pep
MLQCVFLLSDSGEVMVEKQMTAHRVDRGICGWFWDYVLAHAAGDASKVVVSPTHYLFQVYRNGVTFLACTQVEMPPLLAIEVLTFALFYGSVNMICDFQFLSRVADVLTDYLGDLNEDIIKDNFVLVYQILDEMMDNGFSLTTEPNILKEMIAPPNIVSKMLNVVTDAAASFVPWRTTVVKDASNEVYVNIVEELDACVNREGALVKCEAYGKIQVNSSLPGVPELTLSFSNPTIINDVRFHPCVRFRPWESNQILSFVPPDGQFELMSYRVKKLKTTPIYVKPQLTSDSGNCRVNVMVGIKNDPGKTIDSITVQFRLPPLIASADLTANYGTVDILADQTCFWTIGQIPKDKAPSLSGNLRLEEGLTHLHTFPTFEVKFKIMGVALSGLQIDKLEVKNTPNAPYKGFRAQTQAGRVLQLTVICIVNHLDLVSVLLEHSRKKEQVLNAWKLL

SEQ ID NO: 104848 - protein, 93 aa, Oryza sativa
  Clone ID: PAT_MRT4530_102142C.1.pep
MTRRGRNGKAAGALANGKAARGGAPLARPLPASDLSGTAMIDARAIQGRGRGGGGGGRSGGDSKLSTRACRRSRLSWSWGTQLQRVAASTYLP

SEQ ID NO: 104849 - protein, 275 aa, Oryza sativa
  Clone ID: PAT_MRT4530_102143C.1.pep
HPSVAVHDALEQGEQIHAQTIKSGFLSDVVVNSALVNMYNKCGCIQDANKAFLEMPTRTFVTWTSMISGYSQHGQPQEAIQLFEEMRLAGVRPNEITFVSLLSACSYAGLVEEAEHYFDMMKKEYCIEPVVDHYGCMIDMFVRLGRVEDAFSFIKRTGFEPNEAIWSSLVAGCRSHGNMELAFYAADKLLELKPKGIETYILLLNMDRSWITIKDKVYFFRANDRTHPQATELYQLLENLLEKAKAIGYEPYQNAELSDSEDDEKPAAGSLKAPQ

SEQ ID NO: 104850 - protein, 644 aa, Oryza sativa
  Clone ID: PAT_MRT4530_102144C.1.pep
MAAEAAAEIVREIAAVGAADLAAAAEPLRADCLRLARKVSLLSHLVAEVAEAGAGGGDADAADSWLGDLVRALQAARRFVELGRAPARPSRASDQVRAETIWDAVCNNVAVQFKFVTWQLQTVLARLPQSCFQISDEVQEEVDLVRAQLRREMEKKGDIDVNIFSKFHDILALHVSTVGSQSEQSHGQPDTPQMENLCNGHLELQNIIMLVSEISGVPKSDAERITSQLIEGLENMRVTDSKKPVSVSQSSDETKASPETHKKSDAVAIPEDFRCPISLELMRDPVIVSTGQTYERAFIQRWIDCGNRTCPKTQLKLQNITLTPNYVLRSLILQWCEEKGIEPPTRSKNDGAYLEVGGERVAIETLVRNLSSSSLDERKSAAAEIRSLAKKSTDNRILLAESGAISALVKLLSSKDLKTQEHAVTALLNLSIYDQNKELIVVAGAIVPIIQVLRKGGMEARENAAAAIFSLSLIDDNKITIGSTPGAIEALVELLQSGSPRGRKDAATALFNLCIYQANKVRAVRAGILAPLIQMLQDSSRNGAIDEALTILSVLVSHHECKIAIAKAHAIPFLIDLLRSSQARNKENAAAILLALCKKDAENLACIGRLGAQIPLTELSKTGTDRAKRKATSLLEHLSKLQVL

SEQ ID NO: 104851 - protein, 691 aa, Oryza sativa
  Clone ID: PAT_MRT4530_102145C.1.pep
MYVPLLHRCVETGSLGAARAVHGHMAKTGASADMFVATSLVNAYMRCSAARDARRLFDGMPERNVVTWTALVTGYTLNSQPALGLEVFVEMLEMGRYPSHYTLGATLNACLASCDVDLGKQVHGYAIKYGAESITSMGNSLCSLYAKLGSLDSALRAFWRIPEKNVITWTTMISACAEDEECVELGMSLFIDMLMDGVMPNEFTLTSVMSLCGTRLDLNLGKQVQAFSFKIGCETNLPVKNSTMYLYLRKGETDEAMRLFEQMEDASIITWNAMISGYAQIMDSAKDDLQARSRGFQALTIFRDLKRSVMKPDLFTFSSILSVCSAMMALEQGEQIHAQTIKSGFLSDVVVNSALVNMYNKCGCIQDANKAFLEMPTRTFVTWTSMISGYSQHGQPQEAIQLFEEMRLAGVRPNEITFVSLLSACSYAGLVEEAEHYFDMMKKEYCIEPVVDHYGCMIDMFVRLGRVEDAFSFIKRTGFEPNEAIWSSLVAGCRSHGNMELAFYAADKLLELKPKGIETYILLLNMYISTERWQDVARVRKLMKQEDVGILRDRSWITIKDKVYFFRANDRTHPQATELYQLLENLLEKAKAIGYEPYQNAELSDSEDDEKPAAGSLKHHSERLAVALGLLQTPPGATVRVTKNITMCRDCHSSIKLFSLLENREIIVRDSKRLHKFKDGRCSCGDFGALL

SEQ ID NO: 104852 - protein, 178 aa, Oryza sativa
  Clone ID: PAT_MRT4530_102146C.1.pep
RRRAPRRRRTTTPRASPPPPRAGRRRRPRRAGAGTPAAAASTAPAPPPSSTSLPEPPRRRTCTAPPTKLITTSPRRRRRTGASCSRCSGGKAAARNAAAAGIRPAPAARAPPAASGRTASRAVGCGGRRRRLSPSLAAAATGSGSPPERGSRRRWRRPVAAGSSDHHVAIVDLIKLKL

SEQ ID NO: 104853 - protein, 70 aa, Oryza sativa
  Clone ID: PAT_MRT4530_102147C.1.pep
KKKNTPSFHIFNSHMPHPTTFIRNKSHFYIKSKKNQVKQKQKPSPACKIKKPLTNLEPTKQGGGLFSIRD

SEQ ID NO: 104854 - protein, 51 aa, Oryza sativa
  Clone ID: PAT_MRT4530_102148C.1.pep
MALTFSGADFGDKESYLVDNVEPLPILLTVLETKPILRKELDGHLSLVCRW

SEQ ID NO: 104855 - protein, 238 aa, Oryza sativa
  Clone ID: PAT_MRT4530_102149C.1.pep
MAIEAGAFQIRSAGNRQWQRRCGRAPLCLDDGRDNDSGSGRGCGGAVGGCEGSRTRRERPWFTGWRQLSSFVATSYDSGVVHGLRLLPREGASCMVSAGDWHLCGSHALKGFWMVAAVGSDGDVAWEGQRFFGRKSRLFRVGSGSAFWRRNLLGDVGVESSSFLGDYSGENCPAPGTGDGDTLGVVTSLEVSFEGPFPLISNLDDLSSYAGAFGMAMLAGLRGGEWMHPSLSPSPSPT

SEQ ID NO: 104856 - protein, 100 aa, Oryza sativa
  Clone ID: PAT_MRT4530_10214C.1.pep
MSQARSPGQRVERRGRPLRTAGSENGAGDGSSRRRRLLRSDVAFTPPATPMARHPADATRLAQHLILLPRGAPVYGCGEEARRNKRGEVGGGGEQKVGEK

SEQ ID NO: 104857 - protein, 64 aa, Oryza sativa
  Clone ID: PAT_MRT4530_102150C.1.pep
GPPMSNARLFCCRWALFCMPPIVNSKPMISQCSSPRPHKFCYRLHLKKPKWSPPLGHLINVLGY

SEQ ID NO: 104858 - protein, 422 aa, Oryza sativa
  Clone ID: PAT_MRT4530_102151C.1.pep
MAPFTEDKVDLSNLPADLALRKPISQYNVNVRDEVRRAYLQRGPFQTPDHKFSQKDMSGCMRRFNPDWFKTFSNWLEYSIVEDASYCLCCYLFKNETLGHGGGDAFSTQGFRTWKFDRFKIHIGGPSSVHNQNVKRCDDLMNQQQSIRSNIVKQEKKECSTEVGAVVLKNAPKNFKLVAPEIQRDIVRACAEETLKAIIEDLGDEYFAILVDESRDVSHAELVEEALQLGELGTGRGLNQELGLKRAGDTRWGSHFNSLLNMIVMFPSVVEVIDDIAHNGSKAVDRLKAKGVLDAIQTFDFSFMLHLMKDQDIVKAISYLGTTKRRLQDLRNDGWEGMFNKVIDFCIQHDIELPDMDDMHVPRGSKSKRKAQVDGISNEDYYQSVIYAVIDLLRVELNDRFSESSTVLLLGVACLDPADSFS

SEQ ID NO: 104859 - protein, 136 aa, Oryza sativa
  Clone ID: PAT_MRT4530_102152C.1.pep
MLFLCAVVVVGSSSRSSSRAAATVASLCARRRHPCPKLCRCPPKLSAAVASSSRAGRGWQGQRRPLDPVGRGSKDAAAPRHATPPPSASPRRLPAVRRLPPPRAVPPPAASPRRLPAVRRLPPPRAAPPPATSPRC

SEQ ID NO: 104860 - protein, 331 aa, Oryza sativa
  unsure (1)..(331): unsure at all Xaa locations
  Clone ID: PAT_MRT4530_102153C.1.pep
GSHFNSLLNMIVMFPSVVEVIDDIAHNGSKAVDRLKAKGVLDAIQTFDFSFMLHLMKVILGITNDLNIALQXKDQDIVKAISYLGTTKRRLQDLRNDGWEGMFNKVIDFCIQHDIELPDMDDMHVPRGSKSKRKAQVDGISNEDYYQSVIYAVIDLLRVELNDRFSESSTVLLLGVACLDPADSFSXNFDKDKILEMARLYPDDFDSEHKIEELGCQLENFVENIRDDSRFCNLKGLADLCKKLVEKKKHTSYHLVFLLLKLVLILPVATASVERVFSAMKYIKSDLRNRIGNTFLYHCMIAYVESDVFQNITTDTIMNRYQGMKTRKKEL

SEQ ID NO: 104861 - protein, 36 aa, Oryza sativa
  Clone ID: PAT_MRT4530_102154C.1.pep
GRVRQDRPHTAAHAAHGVVQGAGCSSAGCRVGMRVR

SEQ ID NO: 104862 - protein, 290 aa, Oryza sativa
  Clone ID: PAT_MRT4530_102155C.1.pep
SYWPCRRRRRRRWRRRGGACRRGRRRGRRRAWPRRGRTPAARRRSGAAPRGGGGGARCPRRAGRTSGGAGHIGPAAAGTSSLASCSETTPLAGVRSVRASPPGPGSPLGTVSCARGSCTRQALPARRFHLRSACSQSSSLLFMSWPPVQLLRQSNLLLGGECAMFVDATLRQGGLVLAQLQLPSGAAAWSVVSRRFLRGAPPPTLLLASPLPSPPPQPLLASSCRSTPGCRVAREPVILRRRRRNHIITPDHFLSAMPEFRQNPAAGHVAAVVKPSPRLRPRSKPCLSMS

SEQ ID NO: 104863 - protein, 115 aa, Oryza sativa
  unsure (1)..(115): unsure at all Xaa locations
  Clone ID: PAT_MRT4530_102157C.1.pep
GGKVGSSLSQCVFFXDSKYNTVTVINYMELMIFVCVLPVIVMKYPQXDGMLVGPRMLTKAXQSFSRELSVLEHDNSFKSLSVQXPSNRVLTDGRYGSNGAQLREPVPVAAWPAKV

SEQ ID NO: 104864 - protein, 170 aa, Oryza sativa
  unsure (1)..(170): unsure at all Xaa locations
  Clone ID: PAT_MRT4530_102158C.1.pep
MTTWSIIKSDVMAALLKFCSANSQNLEMLNIAIITLLPKKEASTLLKDYRPISLIHGFAKLATKVIALRLTPRMGELVSRTQTSFIKGQSIHENFIFVQGLTRXFHRQRKAMVLLKLDISKAFDSVSWSFLLDMLKHRGFGRRWREVNQWSRAPNNSLYADDAVIFFKPV

SEQ ID NO: 104865 - protein, 135 aa, Oryza sativa
  Clone ID: PAT_MRT4530_102159C.1.pep
GRVGELHAVHPAAAAHPAAQAPQGHSTPRAIRQPHRRVLAIANQQQLHLQESSACAIGNRIAKRPPPRRPLPIAITIVAFWWCFSRWMPLPLHKGKEEDEEKEGYKSTSFSIANCSITITRNTLKIQTGYVYIFN

SEQ ID NO: 104866 - protein, 721 aa, Oryza sativa
  Clone ID: PAT_MRT4530_10215C.1.pep
MRLLSQKLSLKSVPEENTTTGKKDLVTNHLSSTARPTDPTACLSDVSGKLNDTSESISVIADSAVTSKKEYQGTRRNLQLLGQGLPVTSEGPSKNSNGSVEDKLPNHLLASASSNTKHPVMGSSDNALEKSSAKRIDKTIEKEYMQTDCSQNNRKPNELPLSAPVLKNQILGTIDPQKDARQSKSSIQQNTTPVERIVVSDSEDSADELQRRPPGVAGALGSPLIGHDGRLIACSEKKSLVAFERNGSIAWMVTLGHTCKEGISPVAERDEIYLVAEDNKVIKITPKKLHTADPPSEVFFSYNATPGRSEEIIGPVADLVSRLGCKTNISGCYFNSPPVVDRCEGTLYVSNTEGQLYSLYIKSGQYRWIQDLGSLDKVMNIVPGNNGLLYIVLPRKSIVMGLDVLTGNISWQQTIGPLSNEKILPPVDSNGELSDFLSSTDLNDFALDETIVLRNWQHYAVLHEKYVSFLRTVKPNFGNDQGDRNIRLVLFFHFIVIVIAIVNCFCCIFWRKKKLQKNGLKKFLEKRHSLHTKRKILGKRISELEQKTVHDASSNEALGQLGETVNAKECIERKLCSSYSLGRDMLGLKHDSILPLNSTKYKSHSFRNSREESITVFNTFSGTSSSENGTSSCSGESESCSDCSYGDEMLGTNFQSAAQEAGPSNYADRADQVFQDECVSDIKSTNPHKEEYLMEAMHDKAPSKRMYLKRRRTFPSSKQNI

SEQ ID NO: 104867 - protein, 588 aa, Oryza sativa
  Clone ID: PAT_MRT4530_102160C.1.pep
MDYFTGTGTIVVSDDSLYAAFGYGDPFGFAPRARPPIRSLPFAAGGYQWCLWFHPTTFAGFFGFGVELLTAGAKARASFEFGPVDAASHNVIVRMPPFLFDHPHHPMVIMVWPKAMLAEEATLFVRDHAVVFRVDVTVVPDEPLPPDAGVGDDDVLPPSDMLAQLGNVYDTKEGADVTFSVDGELFAAHRVILAMRSPVFRAAVYGEMRESGRGGGPIAIDDMRPDVFDALLRYIYTDALPAAADDDDMEATWSDLLVAADRYGVERLKLICERALRGRLDAGNVADMLALADRQHCETLKDACIKFMATSGKMEEVKASQGLIKMVADRETGAKDQIGVYLELITKGTKARASYKLRLLNHVTACPCLWYTCPLKIYDSIDDNKSFTWGTKKFADRSKLEVASEYLQDVRLVIECDVMPLVRIEAIAEIIRSPSSPWSQLSEDIGKLLEMETGRSRRELQGQRSTLNTIDRVASTIRRANEREEKYLGEEERKELIKHLLITVDRYAIEGLKTMLEDGLCKVLSLGNVKEMFALTDQHDCSILKDVCFEFITSSSVHGLGDVALSEGYESLRESCLAAIVDALQRVQ

SEQ ID NO: 104868 - protein, 173 aa, Oryza sativa
  unsure (1)..(173): unsure at all Xaa locations
  Clone ID: PAT_MRT4530_102161C.1.pep
WVLSXCGCEAFTLLPMRVPTACFSGTSPGRCRAFGTXIPLYWTELPXSVGPVARNDPCCSMEVERAVCCDVLHGVMHCATXWDGGGVVCGQPLEDXPLKCVVRXCVACPCLLMCEKDGGMADVTNECXIGWQSCXNEMEVRDGCCVENGNRIACGKMQESCAAWCMSGCEPVP

SEQ ID NO: 104869 - protein, 326 aa, Oryza sativa
  Clone ID: PAT_MRT4530_102162C.1.pep
LFYSVTYLSTVHELPYDHSILLENLMDPAHVPISHDRTDWTAKREDAQPLFFEVTERTPRGFAGYWGKQRTPHLRNLLRFEAPCVLTNTLEFVDKDGKEQCFSAHFLCRPAGQGKSMLLVRFGSTQTSPLVKVLPRWYFHQNACKVFEQDMGFLSSQNEVLLREKVPTKELYLNLRSSDTWVAEYRRWMDRAGHGMPYYFGHSTLSPPPVPAVVEQAPAGAVAGMSASFPAKGGVGATHAPNPTNRYFRHVVHCKGCRDSVKRYASLKNAFAALAAAAVAAAILAATRQLKAVLLASAAALAAASYACNWVLSLITTNFIRTHRRL

SEQ ID NO: 104870 - protein, 90 aa, Oryza sativa
  Clone ID: PAT_MRT4530_102163C.1.pep
SPSDVGASCSVRWSPRPVAGSVSAPVRSEPLLVCATSARVASTSAVKAFVRPTLSNQEYSKHRPLVMVSAGAGSSWRGWKVPPLVFSRLQ

SEQ ID NO: 104871 - protein, 267 aa, Oryza sativa
  Clone ID: PAT_MRT4530_102164C.1.pep
MASTSRKRSARSLQEDEQTSSAAEAPAAVREDEERVAVAGMEAWRFGFSRFSWFPAFKFDPTDADIVASYLLPRALYGRGHAAVIQDDVSRCEPWTLMREHGHATSAHAFFVHDHESVGGGGGGGRRKVQRAVKNGGGVWRIQKGEVAILTIVRGGGGGGGELDVVYKRRNLSFHRRGESSSSGWVMHEYEITSPPLPATVLSRIRATPRAKDKKLCIKEEPSCSTSAAGERSGPNPDHTAAGAGDSATANHNNTTSAATTTMAAAV

SEQ ID NO: 104872 - protein, 91 aa, Oryza sativa
  Clone ID: PAT_MRT4530_102165C.1.pep
MLYRGGRASSDNGGEGGRGKGREVRWPTGEIWPAYPIAAFNPHRCLTCKTARKVEGACGEEGAHDMRPLTVNSDHVGPTRGGKGGDAIGKD

SEQ ID NO: 104873 - protein, 351 aa, Oryza sativa
  Clone ID: PAT_MRT4530_102166C.1.pep
MLVLGGRKPTSWAVKEGRSRGSWRQGVVTGGRGGMVPARQGGMGGCMAQAARADAAATGHNFKEQAIEYVKQAVQEDNGGNYVKAFPLYMNALEYFKTHLKYEKDPKIKDAIAAKFTEYLRRAEEIRAVLDGHIGGGGGGGDSEQAKPRGMLRSAIVAAKPSVKWSDVAGLESAKEALQEAAILPIKFPHFFTGTGKSYLAEAVATEVDSTFFSISSSDLVSKWMGESEKLVANLFQMARENAPSIIFIDEIDSLCGQRGECNENEASRRIKTELLVQMQVKDALFQPVRKTQDAKFFIKADDDTWTPSPTWSEFTVNGLMSWAPSSPHAPSTFLAVLHVRHLCGLNAAMG

SEQ ID NO: 104874 - protein, 87 aa, Oryza sativa
  Clone ID: PAT_MRT4530_102167C.1.pep
VRSPCPRVRHRFHPDSRPPLPTSSSRQKRSHVSPHEPDHAGSDMILAFCNQQKQRNDHNTMDSVGGRKLRCLCYQKERKGNSPASSL

SEQ ID NO: 104875 - protein, 64 aa, Oryza sativa
  Clone ID: PAT_MRT4530_102168C.1.pep
LVKVNQSAFVKDRCIHDNSCYLQLATKALHCRRCSWLLLKVDIMEAFDMVCWPFLIDILEQLNH

SEQ ID NO: 104876 - protein, 53 aa, Oryza sativa
  Clone ID: PAT_MRT4530_102169C.1.pep
KIMLNFSGVKQYLEVFAARAHLLFPDLMGTLCTASCIRRILASHRKLLNITFV

SEQ ID NO: 104877 - protein, 320 aa, Oryza sativa
  Clone ID: PAT_MRT4530_10216C.1.pep
MGGEVVRHWNADVNGISLHVAEQGPADGPPVLLIHGFPELWLSWRHQMAALAARGFRALAPDLRGYGDSTVPDDPAAYTVFHIVGDLVALLDHLALPKVMVVGHDLGAQVAWHLCLFRPDMLLAVVNLGVPFFPRGPSSLSEAFAGRDGLYIMQFQEPGRAERAFARYDVATVLKKFFSIEIDDLTAPPGVEIIDFLEARSTPLPWISEEELGQYAEKFQKSGFTGPINYYRMMDTNWRLTAPWQNAKIMVPTKFICGDKDTGLKSFGTEHFVKSGAFKSVVPNLEVVIIEGHHFIQQEQAERVNSEILSYFDKFTGEKA

SEQ ID NO: 104878 - protein, 176 aa, Oryza sativa
  Clone ID: PAT_MRT4530_102170C.1.pep
MDVNQLWLLWATLAVSLLYYISNRRRRVGGRRRCPPGPMPLPLVGNLLNLRGHLPPALARLARTYGPVMMLKMGLTTTVVISSGDAAREAFTKHDRHLAARTVLDVTRSLDFADRSMIWLPSSDTVWKTLRGVTAASIFSPRGLAALRGVRESKVRDLVGYFRGRAGEVVDVRHAV

SEQ ID NO: 104879 - protein, 386 aa, Oryza sativa
  Clone ID: PAT_MRT4530_102171C.1.pep
MAAAAAAKPFPFLAAAAAAASRSPLPLSPAARPAPASSRFGDRRAPAVVAATARRRGAHGVRALRPLLLPRASASPSAKTAAGGMSDPELRMVLELATDEELMEFEEILYGTSYEPQMAKPKPANLSKIKSYFSPLLKSIAKRPNSDYVDALDDIEERDIFISKLESRFLYLAADARSIIRGSRPSYRNVLLGVRRELGVRCSSKLCTADLEAEIFLHLLDEYSSRQKGSDLFPWNKQKSPKDNSSLGVNKWMVLTDSAWKIGAKGLESAFLKGGSALTLKMIYESLAKRLSGKLLMEAGKYEIKKELLKQGGRLAAVNLESRAGLLAARQGLARAASRYVGLRSVMTFLGPIMWGTLLADIVIQMLGTDYARIVQAIYAFAQVSF

SEQ ID NO: 104880 - protein, 120 aa, Oryza sativa
  unsure (1)..(120): unsure at all Xaa locations
  Clone ID: PAT_MRT4530_102172C.1.pep
MDSPATPVGLSPPLLSLVPRNEPCGDQRSGGRPTDGDGDEVEAAAVFGSTVTAVLRRSSATAKRQTRTAATWRPXRRSSRATAMTGTAAAHGWSDGGNDGARSHGARAPIVQQFTPFPFP

SEQ ID NO: 104881 - protein, 88 aa, Oryza sativa
  Clone ID: PAT_MRT4530_102173C.1.pep
VVAVRFILWNISAVSPITHVQEIMECKYQCTLAVLYSYRNAEPLGASSGASELNQDATQGILCVSDLHRYKILAERIVILIAGHVQVH

SEQ ID NO: 104882 - protein, 309 aa, Oryza sativa
  Clone ID: PAT_MRT4530_102174C.1.pep
MAACVDKWPAAYPCRLPDKFYCALPDCTTTDRPVAPAPAASGSSGDYVWDALRAEAQDDADDEPLLRKFYHDLVLSRPSLESALASLLAAKLCIPGALPQDQLRDLLAGALAAHPEAGRAARADLAAARDRDPACAKMVHCFLYYRGFLALQAHRAAHALWSDNRRAPALLLQSRASEVFGVDIHPGARIGGGILLDHATGVVIGETAVVGYGVSILHAVTLGGTGKESGDRHPKVGDGVLIGAGASVLGNVHIGDGAEIGAGAIVLRDVADGTTAVGNPAKPIIGKKAAPQRRPEELPGVTMEQRWSD

SEQ ID NO: 104883 - protein, 74 aa, Oryza sativa
  Clone ID: PAT_MRT4530_102175C.1.pep
MDDEVKFNYPEVSTTIVGQTDMAWLLVLHVRMYMIEMHNFHMYHFSRYLKRGIEIFEPFPQASVTLINGFYIKL

SEQ ID NO: 104884 - protein, 83 aa, Oryza sativa
  Clone ID: PAT_MRT4530_102176C.1.pep
PRTSLILQIITFTEVLLFLGFRKRFGTFLNGNALLRNVGNTTRNDARRRPATNRKAAAVRVDGDEGAPVIGGENGGAVDLSRT

SEQ ID NO: 104885 - protein, 343 aa, Oryza sativa
  Clone ID: PAT_MRT4530_102177C.1.pep
MAVGSGEGGGGSGGWDGGRERRPPGAWRAPPPPPPPTGRGSRRPAATAAFPPPIRHHRRRPMPPPPPPPPTGRGCRREVARWEGSSPIGPRTGPRRQPTGGEETDGARRERRFGGRRCCGDDDDDDAGAGEQGGGDGDHVTASEIAHTCSARRIRISLRVADPPAAGRLPPLHPPPRRRRPTWPNAYDLRHAEVVAAHHGSILFRTRVPFADPDFVAPGHFPVDYFVYTTDAAAASPPSLTRLPPCFIDGFSDPVEDEYYKPYQLQRRQIMLDENIGFLSYSSNDGDEFVVADIRNYHCDSLELCIFNHHANSPSSSLSPEQWRIQHLEMHHASARKIGRSKK

SEQ ID NO: 104886 - protein, 60 aa, Oryza sativa
  Clone ID: PAT_MRT4530_102178C.1.pep
MGSRREEERNEKIIRGLMKLPPNRKCINCNSVVIISSASCLRLLLRSLIGGSFRSRIVAW

SEQ ID NO: 104887 - protein, 72 aa, Oryza sativa
  Clone ID: PAT_MRT4530_102179C.1.pep
MAAEAETKAMITLRSCEGQVFEVAEAVAMESQTIRHMIEDKCADTGIPLPNVSAKILSKVIEYCSKHVEARG

SEQ ID NO: 104888 - protein, 88 aa, Oryza sativa
  Clone ID: PAT_MRT4530_10217C.1.pep
WRGYAPMGDWDPRGRAGMEPPPSSVDSADYESEICGHFSESSQQLEAGEGASSPICPEEARTKRGTPPPYRRQRGRDCQINTRRRHYV

SEQ ID NO: 104889 - protein, 59 aa, Oryza sativa
  Clone ID: PAT_MRT4530_102180C.1.pep
QFKLLEKNTCIFVNYVATNSRIFGIMYTPDAQNLAHYALPAGWLLGRQANPSNSCTKKL

SEQ ID NO: 104890 - protein, 73 aa, Oryza sativa
  Clone ID: PAT_MRT4530_102181C.1.pep
MKNVFFKNGGYKIWGPKLWPLVLASPNSGLPWSGHLGRWDFPISEHPILPIGLAALWIGLPLQSTSLQKPLAP

SEQ ID NO: 104891 - protein, 986 aa, Oryza sativa
  Clone ID: PAT_MRT4530_102182C.1.pep
MAEDANPTATGRRTHSRCPLRAPGLVHQLTQLQNPTCRGLSELHPPRLFGFSFAGKPTTPKMQRLPLRRALSAAASVAGRRALSTAAASPSRTPPWAMIYHIPAVRSTAPRAFFILADPPGASNLYVPDHLFDRRPGPGPDNGDVMALLGGMVCTTSGDGLLLLCYSDAHAPVVSTHSGTREPKLIGVDMDPDITRFVCNPITGELFRLPDIDGTKKTLSYGPNAGLLTRSASAAGHGPPDRYAVALLNEDRSRNGDERAFVMRRFLSQTGKWEKLVGLPLPSPLPLPRRMELYLEAVAFAGQLLWVDPTWGAISADPFSHRPELRFVELPRGSVWPMPSTHPVQALGMFRRLGVSEGRLRYVELSNQDPFVLSSFALDDHGGSWTMEHQVELAPLCRDHVNGGGLPSKDYTSTPRIGVIDPLNSSCICVLIGKHVLAVDMDMGKVLGCSLTDESEGSPWAITTCLKPCVLPPWLGSSQIPNAEHRALGGTGPRSRGSPLPLSESELTSVNLVHREPAPPPRLLLDATRVPFSLAFAVRRPPPRLHRRRMQLPLRRALSAAASASAPVRRALSAAAAAAAPVRRALSAAAADADASRHPGWVMIHSIHHATEARTPSPRASLLLAEPPCSSYLLLPDHLVDRRPGPKPGTGIDVVGLLSAVIYATSGDGLLLFAYVDSHAPLSVVSKAFAAGATPTREGELDLDGLNPQDQDLTRFVCNPITGELFRLPDIDGTKKTFFWRHTGLLTRSAAGHGPPDSYAVAMLREHSNSGTFHMWRFLSRTGKWDKIDGLPSPLPLVRRLDIDTEAVAFAGRLWWVDLTWGVISADPFSDRPELHFVELPRGSVWPMPSEDLLVEVQSIHRRVGVSEGRLRYVEVSDKDPFVLSSFALDDDGGSWTLEHRVALGRICEVKGGGPEDTPRIAVIDPLNSSVICVIVGKHVLSVDMEMGKVLGSSPIEEGTSASNKGDAKSKTLSDILVRVDRDKKN

SEQ ID NO: 104892 - protein, 79 aa, Oryza sativa
  Clone ID: PAT_MRT4530_102183C.1.pep
SVSMEEGMDLLECLFSVNSGSPDTSYARCILTCTSSGRGLHFGVRGRMVCFRIPPHESLSSVPYESVGGSSQSVPAGAG

SEQ ID NO: 104893 - protein, 253 aa, Oryza sativa
  unsure (1)..(253): unsure at all Xaa locations
  Clone ID: PAT_MRT4530_102184C.1.pep
ECKLHQCKCDKXMRQGDKRFFTEFQKLAGFLLPXEASPTPPLNHEGTARPLRQGMGKAGASPQRGLPKPRSLRVVLPSLRRPCYCATASFLAVAGLTLGPTVLAGQTDMGWPVRPAXARSDRRQLGLTDFGSGGSVSATLEHAXPATRGAVRPALSRRSDRPLPAGQTGACVVVRPALPKPSPQLLAAGLASSLPPPVAARHVARCSSLLPLPGRRCCPSPPAATARRRPPKPSSQPLPRSRSRARCRRLSPA

SEQ ID NO: 104894 - protein, 322 aa, Oryza sativa
  Clone ID: PAT_MRT4530_102185C.1.pep
NFENFQGFMYHIARDQHGCRFLQQRLDDGKREVDFIFAGVARHAVELMVNPFGNYLMQKLLAVCDDEQRMAIVLTLTKDPFVLVRISLNVHGTRAVQKLIESLRTREEIQLVVQALRPGFLELIKDPNGNHVVQRCLQSFDANDNKPIFEAAAVHCLDIGMQCHGCCVLQRCIARSGGEQREKLVAAIASNGFELAQDAYGNYVVQYVIDLKVPTANASLTKQFQGRYIHLSMQKFSSNVVEKCLKVFKEADKATIILELLAVPHFEQLLQHPFANYVIYSAIQNSKGSLHSALTNAIRPHVELLRTSPYCKRIYSRALLKK

SEQ ID NO: 104895 - protein, 81 aa, Oryza sativa
  Clone ID: PAT_MRT4530_102186C.1.pep
RAPWIAILPRPTREERLRMQVLQGWSSSWPSMVLANDSANQQRGSMPSGIQNGALEFLNEQNRGPRASNTKETRHRELFNR

SEQ ID NO: 104896 - protein, 389 aa, Oryza sativa
  Clone ID: PAT_MRT4530_102187C.1.pep
MADEKLAKLREAVAGLSQISDNEKSGFISLVARYLSGEEEHVEWAKIHTPTDEVVVPYDTLAAPPEDLEETKKLLNKLAVLKLNGGLGTTMGCTGPKSVIEVRNGFTFLDLIVIQIESQYPRVVADEFLPWPSKGKTCKDGWYPPGHGDIFPSLMNSGKLDLLLSQVTPKTLADVKGGTLISYEDKVQLLEIAQVPDAHVNEFKSIEKFKIFNTNNLWVNLKAIKRLVEADALKMEIIPNPKEVDGVKVLQLETAAGAAIRFFDHAIGINVPRSRFLPVKATSDLQLVQSDLYTLVDGFVTRNPARTNPSNPSIELGPEFKKVGCFLGRFKSIPSIVELDTLKVSGDVWFGSSITLKGKVTITAQPGVKLEIPDGAVIENKDINGPEDL

SEQ ID NO: 104897 - protein, 122 aa, Oryza sativa
  Clone ID: PAT_MRT4530_102189C.1.pep
FVFSGSLSLVAEGLDSSLALCRSSVISSTQCLIVSLVAPEAPPCCVHPISPPPLAIVLWSSCPLCTTLPLCRSPPGFVSPAILALKASQLIHGLVDPFLLPRLPHRSLLVLDPSRVQSCGEC

SEQ ID NO: 104898 - protein, 227 aa, Oryza sativa
  Clone ID: PAT_MRT4530_10218C.1.pep
MQKDAPSPLPPPVRYCGVLEDYEQQKLSAAYRAELRRQNALINNGPRYRFRRPGEKRRRKKKKKHNKSKHHHTPPPPSPTPRPSPPSPICPYEEYPTFEPDDPVWMRQSTMYAEAVLEHYNAAVDVGGGGVKYELVRAIFSGAIFTCKAAYGHRLFFAEVRKDKKRYIPTCLWSLDDEADRVGGAGADPQVDLPEITSPSRRNYWFSCDDEMKHPKDGTSYHAGHFL

SEQ ID NO: 104899 - protein, 43 aa, Oryza sativa
  Clone ID: PAT_MRT4530_102190C.1.pep
PPPAPQARLVAPTTARSSLIPDLRAARTARATPQRPRLHREPP

SEQ ID NO: 104900 - protein, 111 aa, Oryza sativa
  Clone ID: PAT_MRT4530_102191C.1.pep
MGGGCGVGGRGGDRKAWVDQEKGNDIHHEFSNDIFHVLTFNNPFLPTKTMFVRDQHSVHLDLFAIFANHLRIWRIPSLNNTAVAVIAINSNSRSDATIPPRLTSSCSMRAQ

SEQ ID NO: 104901 - protein, 373 aa, Oryza sativa
  Clone ID: PAT_MRT4530_102192C.1.pep
MGASSLLYTLDIMFTVIAIGIVVIMGAFVPRRCRDYILVFNVLAALSALGLIKAKMVYGAQMFLAAILHLVEIVTILYTFRKELVLLRSNKASLRELVPRRSDEASLQGEARLQEVVLQISDEASLQDEASLQDVLLKVIERARPWAPFFLAGLVSTAYGMVIVFFAGGQPASAFFLGDFGVCFILVGLIVIIARSQHERTQDDKGLWADLSDTRNTLLSSSGITTSACYNLITYRGMLWPPASFVWNKAIPNTCKVFLWLAFGGRLNTNDSRITKMWDSNPHCGVCPAIETSCHIILRCKLADGIWRKLNLLNQARQSANLLQFVEQVMTSSPPHSQPGWPVCFAACTHGLWKARNLRTFQEKLLTEATLLY

SEQ ID NO: 104902 - protein, 96 aa, Oryza sativa
  Clone ID: PAT_MRT4530_102193C.1.pep
MRRRRWLAGGEEEVAVAVELGGGEEWGLNRRRECRLPSAVALAVKILSFTAVCREAAIQNITVENLRRTNYLDYLDDLIRDRNTGIFEGASKIAIE

SEQ ID NO: 104903 - protein, 93 aa, Oryza sativa
  unsure (1)..(93): unsure at all Xaa locations
  Clone ID: PAT_MRT4530_102194C.1.pep
GADGGPTGVGXCGVARHWAAPALTADAAWRRRGQRSVAAWKRASGTKGIDAGGGSAPXLPQLNPSCLWAVRDASNGVVIFDSLNIYIARLIKI

SEQ ID NO: 104904 - protein, 59 aa, Oryza sativa
  unsure (1)..(59): unsure at all Xaa locations
  Clone ID: PAT_MRT4530_102195C.1.pep
XFSSELHXLAIXALISISTSSIHNRPPYRRRXXVRRVEPLGGGEARDPVLRVHDSLLLL

SEQ ID NO: 104905 - protein, 508 aa, Oryza sativa
  unsure (1)..(508): unsure at all Xaa locations
  Clone ID: PAT_MRT4530_102196C.1.pep
MAVGGAGSSRSVAPCCCCAVLLAAALLFSAPATTEAYDALDPNGNITIKWDVMSWTPDGYVAVVTMFNYQQFRHIQAPGWQLGWTWAKKEVIWSMVGAQTTEQGDCSKFKGGTPHCCKKDPTVVDLLPGTPYNMQIANCCKAGVINTFNQDPSNAASSFQISVGLAGTTNKTVKLPKNFTLKAPGPGYTCGRAMIVRPTKFFTGDGRRATQALMTWNVTCTYSQFLAQKTPSCCVSLSSFYNDTIVNCPTCSCGCQNNGTSPGSCVNENSPYLQSAIDGPGKWTGQPLVQCTSHMCPIRIHWHVKLNYKEYWRVKITITNFNYRMNYTQWNLVAQHPNFNNITQLFSFNYKPLTPYGSKINDTAMFWGVKFYNDLLMQAGPLGNAQSELLLRKDSKDFTFDKGWAFPHRVYFNGDNCVMPPPDAYPWLPNASPLTKQPLTLSVXGIFDCVGYFAGLCMMSETKKFGELQVVRFHGVHCNRSFVHSVPRLHRREDVTLRKADMCVCVVC

SEQ ID NO: 104906 - protein, 248 aa, Oryza sativa
  Clone ID: PAT_MRT4530_102197C.1.pep
NLFAVTWNVTCTYSQFLAQKTPSCCVSLSSFYNDTIVNCPTCSCGCQNNGTSPGSCVNENSPYLQSAIDGPGKWTGQPLVQCTSHMCPIRIHWHVKLNYKEYWRVKITITNFNYRMNYTQWNLVAQHPNFNNITQLFSFNYKPLTPYGSKINDTAMFWGVKFYNDLLMQAGPLGNAQSELLLRKDSKDFTFDKGWAFPHRVYFNGDNCVMPPPDAYPWLPNASPLTKQPLTLSVLVFSIVLATLLAYA

SEQ ID NO: 104907 - protein, 95 aa, Oryza sativa
  Clone ID: PAT_MRT4530_102198C.1.pep
LRVSNEKCISLAHHLGTSHIDKVISLRKFPMMARLFLLLRSLPGRVLVSSGGCAQSAILIANPTPPCRRSRTGSIAKEHGEAGMALLIGRCCYST

SEQ ID NO: 104908 - protein, 48 aa, Oryza sativa
  unsure (1)..(48): unsure at all Xaa locations
  Clone ID: PAT_MRT4530_102199C.1.pep
LGNNNTSYVIWELFSRFCVXLGGDILRLGSAVVVSCVPVVFSRFSFSH

SEQ ID NO: 104909 - protein, 197 aa, Oryza sativa
  unsure (1)..(197): unsure at all Xaa locations
  Clone ID: PAT_MRT4530_10219C.1.pep
VIKAIDKKRRTVSNMFEASTYFVXGDSESMLFWSDQWIGVCSVASLAPDLLFVVPDQRLRGSCPVASGLANNSWVSDIRGALTILVISQFLLVWDVVLHIQLSPGVGNRLIWRWMSDQRYSTRSAYQAFFYGQHTFACVVLHWHANDPAKCKFFLXLHFSSTAXMADFLQKRGIDSHSACPFCXRSFELANHILLDC

SEQ ID NO: 104910 - protein, 54 aa, Oryza sativa
  Clone ID: PAT_MRT4530_1021C.1.pep
KKLPSQRRFACLILSLSASFVSFDAPEGHNIHRWSGARQSTVVDLYVIASQCVE

SEQ ID NO: 104911 - protein, 55 aa, Oryza sativa
  Clone ID: PAT_MRT4530_102200C.1.pep
QYLHMSLGILPFQQYLLTSFLPHYSQGKEGSSILMEKTSKSSPCHFAASELIKPA

SEQ ID NO: 104912 - protein, 54 aa, Oryza sativa
  Clone ID: PAT_MRT4530_102201C.1.pep
TRVDSSNSDMKMEDIGRDYFNELVSGSFFQQVSKSWNGIWYIMHDLFHDLAESL

SEQ ID NO: 104913 - protein, 322 aa, Oryza sativa
  Clone ID: PAT_MRT4530_102202C.1.pep
MVQEHIPFQLQDHLAARLHALLSPYATITIDDKSSHYFSRCEAFFAVEAYLGASPCAANARRLRADLAEGADRMALAVDDHEAVADDFRGATMWWRKTKALPSANVITWSPRNAERRSYRLTFHRRHRALVENAYLPHVLAEGRAVTVRNRQRRLFTNNPSADWSAYDDARVWSHVKLEHPSTFATLAMDPVRKQEIIDDLDMFRDGKEYYASVGKAWKRGYLLFGPPGTGKSTMIAAMANFLDYGVYDLELTAVKSNTELRRLFIETTGKSIIVIEDIDCSIDLTGKRKKKKKDKKKKKMTPPWARDDDEELMWRRDVTKS

SEQ ID NO: 104914 - protein, 179 aa, Oryza sativa
  unsure (1)..(179): unsure at all Xaa locations
  Clone ID: PAT_MRT4530_102203C.1.pep
PAGXKKRHRTPSPCHHHPYLCRIHLLPLAPVTWPRLLSLIAAFLLPLPLGPEAAAAQGRVSGSRPSGCIAAPRRSGCPAARRLRTSTTARSGSGLPLTPPSPSWSRGSSGAGAGQRLPAQRLSCGFSTQRRGTAQDLHGGEERRRPPSHPSLSSHILCDVIYFVISTSSLILCVIYFVM

SEQ ID NO: 104915 - protein, 43 aa, Oryza sativa
  unsure (1)..(43): unsure at all Xaa locations
  Clone ID: PAT_MRT4530_102204C.1.pep
FNGVFLKVNKATINMLRRVEPYVAYGYPNLKSVRELIYKRXYG

SEQ ID NO: 104916 - protein, 142 aa, Oryza sativa
  Clone ID: PAT_MRT4530_102205C.1.pep
TFLSNCMQATDGDVPQRVCTAAEMKFYFESFLDSNGRKNYVRPNKNCNLTSWMDGCEAGWACSAGPDQNINLQDAVNFPSRTLDCRGCCAGFFCPHGLTCMIPCPLGAYCPESTLNKTTGICDPYNYQPPPGEAESYCGGAG

SEQ ID NO: 104917 - protein, 124 aa, Oryza sativa
  Clone ID: PAT_MRT4530_102206C.1.pep
MSRARYTGGGTVAEGTKLERIEKHPPGGSLISFGQNRGGIGDDSHGVVTVPAAAVGNGDGAQRQFAEAVVGVGDSGDGGCDSGGGGDVGGGEGVGCEVAGCSAAAAAVVVTVFAVTGGMAASVD

SEQ ID NO: 104918 - protein, 39 aa, Oryza sativa
  Clone ID: PAT_MRT4530_102207C.1.pep
MVLREDCAVGANADAERGASNRSEVEPRSVRLLVHEMCW

SEQ ID NO: 104919 - protein, 214 aa, Oryza sativa
  Clone ID: PAT_MRT4530_102209C.1.pep
SADSSRVAEHGDANEGDVDVEDILKSIHVVTDVMETLVKRVIVAESEAANEKEKVRMGLEEIRRKTIQVESMSAKVEEMEKFAVGTNGMLNEMRQRVEDMVLETTRQRQRAAENEQELSRVKHDFESLRTYVGTLVNVRETLLSSEKQFETMEKLFDRLVARTNQLESEKAQKEAEVQKVVEENVRLRAMIDKKEAQLQAMSEQCKFMALSRPN

SEQ ID NO: 104920 - protein, 423 aa, Oryza sativa
  unsure (1)..(423): unsure at all Xaa locations
  Clone ID: PAT_MRT4530_10220C.1.pep
IYHMPRYLSSYTDEVSKFIDIATTHAYNNNVTEIHCPFTDCKNEKVWIDGSRIRDQLVTCGFMKGYTIWTYHDKDDHIEAADGDSCGDNIIDLEEMLRHTEPDVLMGSVRGLDNFESLEKAEKDLLYDESKDCDRGFSTLRLVLELMRLKARYGWFASIFNGLLQILKNMLPKPNSLPCNTYQAKKLIYHLFLGVKKIHACMNHCILYRKEYAXLDKFPTCSANRYKSTKNTSPCVSFEKEEANSXRKIRKKIPQLVMWYISVKDRILRLYXNPRDAELMRWHQEGSKKDEILRHPTDAHQWKNFDAKXLEFAKDPQNIMFALSTDGVNSSGDISNSHSTWPMLLTMYNLSIWLCQKKKSVLLCVLIXVLTAWIDIDVFLEPLTEHMXNLWKAGINVWDEYEMSQENLKAVSFVDITHMSDIW

SEQ ID NO: 104921 - protein, 102 aa, Oryza sativa
  Clone ID: PAT_MRT4530_102210C.1.pep
MRAVETGWHAGTIHVKKPKQLIKDSYWARVKAEAEARMSALNAVPNRICSRQSIRHCQHCVTNLLQHMYRILVYQYKVVYGRMDVYRSHAVLVAKTERYISA

SEQ ID NO: 104922 - protein, 204 aa, Oryza sativa
  Clone ID: PAT_MRT4530_102211C.1.pep
MASSSFSFLLVAALLGLASWKAIASDPSPLQDFCVADLNSPVRVNGFVCKNPMNASADDFFKAAMLDKPRDTNNKVGSNVTLVNVLQLPGLNTLGISIARLDFAPLGLNPPHTHPRATEIFTVLEGTLYVGFVTSNPDNRLLSKVLNKGDVFVFPEGLIHFQFNPNPHKPAVAIAALSSQNPGVITIANAVFGSNPPISDDILM

SEQ ID NO: 104923 - protein, 158 aa, Oryza sativa
  unsure (1)..(158): unsure at all Xaa locations
  Clone ID: PAT_MRT4530_102212C.1.pep
SKPSLARLRLHRHHLHRHCGLRGLRVGRMCLRAGRMCLRWPPRCRTIPANRCFRRPQHRPPYPWMLPPPPVIVRPDPTVAESDLARRHATGHRXPPPTSSSLDPARRHRSGRFRAAPLPLRGERNEAPPPSSLRPRGFAGGRRTREGEAGDGGLVAFH

SEQ ID NO: 104924 - protein, 79 aa, Oryza sativa
  Clone ID: PAT_MRT4530_102213C.1.pep
NPPVWEQLPLGGPQFPFRGLYLFPAQGQQVQPPEFGGFPLGRNLGQAPTFLAFNGPPKNGFPPRGYGAPRPLSPPGGVF

SEQ ID NO: 104925 - protein, 351 aa, Oryza sativa
  Clone ID: PAT_MRT4530_102214C.1.pep
MVRSSIDREGKNDKITTLKARNQEKTKKYTATHTLIAPNHKSWRRLAPDRPPLSQQQNNRYHLKPDPYKQHKVPSVVANLYKLDTATRGRNLERACAKSLGGFGKGMPRRRLQGEKRWKHNRHRPLRSQESRDWAFAQQPPLRGLRVGRMCLRAGRMCLRWPPRCRTIPANRCFRRPQHRPPYPWMLPPPPVIVRPDPTVAESDLARRHATGHRLPSPAADPIASHFHHRHPRQTPPPHCTTPPPTSSSLDPARRHRSGRFRAAPLPLRGERNEAPPPSSLRPRGFAGGRRTREGEAGDGGLVAFHITLVSPEREGDRRTKIHPIGRGCSINDGAFRVTLLKIYTNSPSSK

SEQ ID NO: 104926 - protein, 193 aa, Oryza sativa
  Clone ID: PAT_MRT4530_102215C.1.pep
MAATKLVALSFVVLMSIGLANAARVVRYASAEGQGQGGGNGGGYVNGGGVGNGNGYGSSESGSGVTATAGGGGWGGGGSQYNGTGFGSGSGAGSSSGQMAEGYYPGYGGHASAGGGGGGNGGGQAGGVDGSGGYGTGGGNGSGSSVANNGTPNTPPPYANANASGNGNGNGGGQSGGSGSGGGGGSGYGDANP

SEQ ID NO: 104927 - protein, 1072 aa, Oryza sativa
  Clone ID: PAT_MRT4530_102216C.1.pep
MEIPKQGQPPRVAGTPPTLPGAITHTTQVGYPAVFYNGNWGAQVPASSYLIVPMSEPPAQVGVPRPNALGLSGSGARPLSRVSLRPPQQVLSVQTALPGMAAMMPSPSMIAGKKMAASPKVQMLKSVPFRSAGSKRPAQELLPKAQPQLFESVRSKFRETLAAALNMDSDQQCAPQSVETVSHVGSASENKQADGAGIDSVTETSALKSGQHNMLSSNSASNMSIKVSDDMQQQSIHVPLENKVLDNNSCTLDELLQGHGLCWSSDVVGASETISQSDPDRVRKSDIDEGVDVSLIEHESKRIKTDDGAAEEKKSVTQKAQILAFEIEGELFTLLGGVNKKYKEKGRSLLFNLKDKSNPVLRGRVLSGDITPKRLCSMTTEELASKELSDWRLAKAEELAKMVVLPSKEVDVRRLVRKTHKGEFQVEVEETDGISVEVGIGGDLLSHVPSRPTEGQTKTDDKSVHTEEKESDNSEQDGVIVTGGNNMPSNLEHTENEKTDLMQELMVDDLKDTENLPPIMSLDEFMETLDSEPPFEDDSTQTVKDDPNSIEKTDISLKSEDSSKNVDSASASDSQLDPQTLSPQDKFESKLQSPKKDAGSILFPVEQIKEDLLVKSSPEKANAENIDTGSQSIPESITDCKSAPDALLTHDSVWEGTIQLSLSSLTNVVAIFKSGEKTSTNEWRHFLDIKGRVRLSAFQEFLEQLPKSRSRAIMVTELRWKEGSLESGRQHLLRTIDSYIADERVGLVKPADGVELYLCPSQGKAAQILAEHLPKEQSSSLTVTGTSAIGVVVWRRPHVSPRIPARNDGSRNQSISRKQHAVIASAVPLSSKPTNERQHHGQDVVTDDVPPGFGPGVVREDDDLPEYDFVTVPNAAANVVPSRQAHRSQQQHSQAASRRPVDHVREMVRKYGSRSAAAAQPWEDDDDDDIPEWDPNQSNLNLQQTRHAIPQPPLPPPGPVHQQMHAYHQQHQQQQQHYQSIQQYHATQESQNTLSQAYYVQSHSQQHSVPVQQLTHLQPGWQTTAQWLAAGAAHSGLPANNVVQQYCTSATPDGSGQGYATGNQGSMPWNLQ

SEQ ID NO: 104928 - protein, 122 aa, Oryza sativa
  Clone ID: PAT_MRT4530_102217C.1.pep
HQTNGCYWYNDRRRFTLYSCDGLAVTGPASPPFVAPTTTDELQSDTPTDGLTAGGVWWVMRAQWAEEAGEVREARRAHANAQVVEEALHVDPTPYHVCLAHGQQARCTPATPPTATPSSTPS

SEQ ID NO: 104929 - protein, 114 aa, Oryza sativa
  Clone ID: PAT_MRT4530_102218C.1.pep
RPRGFSFFFPGTAPGGFHILPQGFTSPGFWSRPPGALVRTRTSFKKKSATPAPPNFFGFPIQIAIFQGFPGPPFVCPKNLASPFFFFPKGKNPPAYFFFFPIQFPFFLPLWVVP

SEQ ID NO: 104930 - protein, 82 aa, Oryza sativa
  Clone ID: PAT_MRT4530_102219C.1.pep
GSWRSPTRSPILSLRLVRGLQPTLKDPPPVGSGEGERQSNGMAGGSVQLRFGIKNGWISSRNKTVFVCLLDRRRPANGVPPS

SEQ ID NO: 104931 - protein, 171 aa, Oryza sativa
  Clone ID: PAT_MRT4530_10221C.1.pep
RHQHHRHFHSLESTRLAEEIGVRDSRGRGKQAELRMQIFVKTLTGKTITLEVENSDAVANVKAKIQDKEGIPPDQQRLIFAGKQLEDGRTLADYNIQKESTLHLVLRLRGGHIWIEPSLRVLAYKHNINKMVCRKCYATLPPRATNCRKKKCGHSNQLRPKKVRWCRYFNF

SEQ ID NO: 104932 - protein, 144 aa, Oryza sativa
  unsure (1)..(144): unsure at all Xaa locations
  Clone ID: PAT_MRT4530_102220C.1.pep
MAEPSKAIHIRNVGHEIADADLLTLLQPFGNVCMIVMLRAKNQAXLFNMQDLHIAWSALQYYRTAEPIVRGRNGSMLFSCQQELTTXQSSHGLKSDHESXPNRILLLTIHQMMYXIAEEALXQVVKVYGYEQKIVTLYEPAVSS

SEQ ID NO: 104933 - protein, 134 aa, Oryza sativa
  unsure (1)..(134): unsure at all Xaa locations
  Clone ID: PAT_MRT4530_102221C.1.pep
WGRWLFFARGGGGSGEVSGLSGTDPAPPSLDLDGASVAVLLDGAAGGGRCGIRRRGHGSARRSSGDRHARRRPSLLHSLVILPSFWPSASRXWPWSLSVVEVFCLSVLEVQFVCSQGSLATPLLQVPCVGANLL

SEQ ID NO: 104934 - protein, 83 aa, Oryza sativa
  Clone ID: PAT_MRT4530_102222C.1.pep
LKQNNPLKKRVQKGLKTWPKKPGGTFPRKETFPGDNQPKISGGGKPKKLVYQNTKQFTGGGEPQQVYGGWKMGGGTTPLGAPP

SEQ ID NO: 104935 - protein, 80 aa, Oryza sativa
  Clone ID: PAT_MRT4530_102223C.1.pep
DRGRGGSAYLASPSTPTHGSSHRLLHSSGTGTAIVLFVDDVPIREVRRTPAMTGDFPSKPMSIYATVWDASTWATSGGRL

SEQ ID NO: 104936 - protein, 126 aa, Oryza sativa
  Clone ID: PAT_MRT4530_102224C.1.pep
PMAAAAAAPLRRLLLRLGKPPPLPIPLLPHITPQTAQAAGDPAAPPCPGAIPSQAPARNLRDVISSFHPGLQIYPSLDPRFGEVEEGVDGEGGGAEVWADSVKKKRKRKMNKHKLRKLRKRLRRQT

SEQ ID NO: 104937 - protein, 611 aa, Oryza sativa
  unsure (1)..(611): unsure at all Xaa locations
  Clone ID: PAT_MRT4530_102225C.1.pep
MFRTFSKLREAAAPLTAAAVRRCCSGGGGGRIRAEANCPRCAAHMSVQFSLQPLSTPPPAAAAGGGGGDGSQSHHHDGASVCPACSAAFLFRAHRIEPLRGAFLEIPPGVGGEDEDAAREGFADRIRRMISERPPDDFPMPPPPPPPLPPMQHVPPRQRRTPRRRLREDGGGGGGGSSGDSSGGEGTSAAPKREWWGGATLGEELPTPREMCRRLDEFVIGQGKAKKVLEGACQNWVLSVAVYNHYKRIYNATVQKGCSTNSGWLDAASDDQNNIEIDKSNVLLMGPTGSGIVDNAGYVGEDVESILQKLLVAAEYNVQAAQQGIVYIDEVDKITKKAESANVSRDVSGEGVQQALLKILEGTVVSIPEKGSRKNSRNESIQIDTKDILFICGGAFVDLEKTISERRQDSSIGFGAPIRINMRSSEVTDPMVTSSLLESVESGDLARNSLRLYFLRCMPVPVSFTALNXDQCSQVPTRPKDSLSRQYGKMVSRNXVRLHCSDGGLRTIGTKAIARKTGACGLRAILARLLSEAVYEVRDERSASQRVCAVVVDEEAIGSIDRPGCGAKILRGDGALEQYITNTNMKNSMEANEGLAGELEDAYMMSRFVSL

SEQ ID NO: 104938 - protein, 714 aa, Oryza sativa
  unsure (1)..(714): unsure at all Xaa locations
  Clone ID: PAT_MRT4530_102226C.1.pep
MACENGQVAADGINGLCMAAPRADPLNWGKAAEEMSGSHLDEVKRMVAEYRQPLVKIEGASLRIAQVAAVAAAGEARVELDESARERVKASSDWVMNSMMNGTDSYGVTTGFGATSHRRTKEGGALQRELIRFLNAGAFGTGTDGHVLSAEATRAAMLVRINTLLQGYSGIRFEILEAITKLLNANVTPCLPLRGTVTASGDLVPLSYIAGLVTGRENSVAVAPDGSKVNAAEAFKIAGIQGGFFELQPKEGLAMVNGTAVGSGLASTVLFEANILAVLAEVLSAVFCEVMNGKPEYTDHLTHKLKHHPGQIEAAAIMEHILEGSSYMKLAKKLGELDPLMKPKQDRYALRTSPQWLGPQIEVIRAATKSIEREINSVNDNPLIDVSRDKALHGGNFQGTPIGVSMDNTRLAIAAIGKLMFAQFSELVNDYYNNGLPSNLSGGRNPSLDYGFKGAEIAMASYCSELQFLGNPVTNHVQSAEQHNQDVNSLGLISSRKTAEAVEILKLMSSTFLVALCQAIDLRQIEENVKSAVKSCVMTVARKTLSTSATGGLHAARFCEKDLLQEIDREAVFAYADDPCSANYPLMKKLRNVLVERALANXRGRVQRRDLGVRQGRPVRGGXLRAALPAAVLAARAAVENGTAATPNRITECRSYPLYRFVREELGTAYLTGEKTRSPGEELNKVLVAINQGKHIDPLLECLKEWNGAPLPIC

SEQ ID NO: 104939 - protein, 1232 aa, Oryza sativa
  Clone ID: PAT_MRT4530_102227C.1.pep
MSRVHLLLLLVFYIPAAIASRRNLRLSPADIAVPDAAAADTPTTYFEVDRPLRPPPGSSGPCSTLLLSSSFGFTYTKPPVTAAYSPPDCLAAAGGGAPAISLAVLEWRATCRGVQFDRIFGVWLGGVELLRSCTAEPRPNGIVWSVSKDVTRYASLLAAGNSTLAVYLGNLIDDQYTGVYHANITLHLYFGPTPARQPAPATAPADIIVPVSRSLPLNDGLWFQIQNATDVESASIVLPSNTYRAVLEVYVSFHGDDEFWYTHTPDGNGPFREVTVLVDGDLVGAVWPFPVIFTGGINPLLWRPITGIGSFNLPTYDIELTPFLAKLLDGKAHELAFAVTNAVDVWYVDGNLHLWLDPMTTATTGSLVSYDAPRLAAVNTSHTTASRFDGLSERYYYHTTASRRISAAGWVESPSHGRITTNATQTFAFENTYAFAGDGSAETVNQTTVADAAVSATDLAGAVLYSRQAHHDFPLYVDIEAKTSPHAADVTYTVAREYRETAIAAGRWLSSGTPPRRYSLRDTQSGAVDVEMRDGNAVSATWGTRQTYRLEATDGCYFRNVTSSGYSVASDESDEVCSDSQEYPAGGAVIGALPPAEAAAAVTASADELVRNLRDIESLIHFSGDRNIGSVFPAAFCKTPHKRCVAFLHTETMTTSSAPLLLLCLCFTLLVLHFRSCAASPRDLRFSAADIAAVEAVLPSLRRARNTFFEVERPLRPPRGSSGPCSTLLLSHSFAFTFTKPPATAAYSPPPCLADAAGGARAVSLAVLEWRADCRGTQYDRIFGVWLGGAELMRGSTAEPRPGGVTWSVHKDVTKYASLLAAGNSTLAVYLGNLIDETYNGVYNADLTLHLYFRRAARSPTAASAPADVVVPVSRSLPLNDGLWFVVDNTTDVESARLTVPPNAYRAVLEVYVSSHNFDEFWYMNTPDQNGPFREVTVHLDGDVVGAVWPFPVIYTGGINPLIWRPITSIGSFNFPSYDVELTPFLGKLLDGKEHELGFAVTNAQKSWYVDANLHLWLDPKSVATSGGLVAYDAPKLTGKIVSNSSDGIDGQYDATASRNITATGWVRSSRGNITTTFTQRLTFVHTNVVTSQGSSQAINQTTEARTEVVTGDGAHALQLHQSFPLYIFLGGDGSGTSSQRLMRRVAIGFDETRAAGAGGSSSAASTLHNEQTAAAEVVLRDDQVVGASWRMHQVYEYGGSDGGCYSRNVSSVGYDVLFDHNEESCAGTRRR

SEQ ID NO: 104940 - protein, 239 aa, Oryza sativa
  Clone ID: PAT_MRT4530_102228C.1.pep
DLGDADISGPLIPQLGGLKNLQYLELYGNRLNGSIPAALGKMEHLVSLDLYSNLLTGTIPTSLGAMSRLRYLRLSQNKLRGAIPPSLGNLMSLEDLELHKNALSGSIPASLGNVKTLNYLYMLIPKFANREITRYFFTKLGTSKILLTYNSSFCLHKLHPPPQKRLNGNMLTGTVPLEILSLLVSNLVELNVANNNLDGTDRESGTRAAARICGPPVQEREKHIHVEENMDIRCKPQLR

SEQ ID NO: 104941 - protein, 85 aa, Oryza sativa
  Clone ID: PAT_MRT4530_102229C.1.pep
NPQNYFFFFFFFFFFFFFFFFFSSNLARSSAESLVGSYIGSSVSSRYIVSCPSDKPNNAVCRSGLYTEWDQLYHSLSSTESARVG

SEQ ID NO: 104942 - protein, 447 aa, Oryza sativa
  Clone ID: PAT_MRT4530_10222C.1.pep
MLEYYSVRGGGQSWISTVCPFIWIVYPIGFLLPSLAEDLDSSTGWPNSSSMSYFRNVSKDCICSVPLKMDCKDSLKNRIRIFTEAVVVMVCPVLLSFALKKVDLTANRSKQIVDSISPIGALTLEAGILPFLGLCLSTVLGERLAWLVLASKLLIHLCVILLMALAFVILLLISKSNIVCLSIWIPFVPFILWLGYNSVKDEEHENADDATKSAHHGKLEISVDFSASITSLLFLGLKGLALEGQASAIKGLDAHLSDSLIVSFVTCVLGVVFMLVGTAPPVYGMGRLVDSLRILDTSLAIAFGVIVVLITIAPLKEAAWLVSIPWILSFFVWLFIRLFDHDEGEDRDVKPVSLELTKAAFTGFLAVSIPSFSNSSTSGGYTHAFIVLTGSAVLAGLAWRLITHVKKPSRAMVWAENVASSCAHICVAAAVVPFASISMTVLRSLES

SEQ ID NO: 104943 - protein, 115 aa, Oryza sativa
  unsure (1)..(115): unsure at all Xaa locations
  Clone ID: PAT_MRT4530_102230C.1.pep
FDVISSXLVYXLLSXLSKXLXXLDXSTXLTILQCCGMKLRGDDPSAMKXFXLSIQNSVNQLKLKAHPAGQDNGQAEMHSKRLEFMLXTICDIKNXKKRPKEDPAXHTRIKXWLQK

SEQ ID NO: 104944 - protein, 148 aa, Oryza sativa
  Clone ID: PAT_MRT4530_102231C.1.pep
LNTAGEEVASRLLNRQQSIHPPPAFGSSTNLEALALEASKSQGQDHDSTSDNVNYRPMHEITFSTIDKPKLLSELTSLLGELGLNIQEAHAFSTNDGYSLDVFVVVGWHDEVFEHFTGTMLATHLMMMSLHRCALVTCSSRKKNHTFL

SEQ ID NO: 104945 - protein, 57 aa, Oryza sativa
  Clone ID: PAT_MRT4530_102232C.1.pep
GNPIVLNEVLITIHDHHTRERKTKIKKSYVLICNFYLVYCDSEATFIALVCARKKLN

SEQ ID NO: 104946 - protein, 118 aa, Oryza sativa
  Clone ID: PAT_MRT4530_102233C.1.pep
RPQEPQHKKPQKKQQQQQQLQQSKPQEKRPRPCATKLPTPSIPASISPMVPHIVQVDSVGHSPYAAMPISHTYAAQLGWPGNQSAAFAQNVGVSQFMGMFNPQQPNYPFYRHPPFYPR

SEQ ID NO: 104947 - protein, 48 aa, Oryza sativa
  Clone ID: PAT_MRT4530_102234C.1.pep
PGVCLPIRELGDGPPEVPRPRFTPQRFGEDRAKVWWEPTIDRMPAPVL

SEQ ID NO: 104948 - protein, 61 aa, Oryza sativa
  Clone ID: PAT_MRT4530_102235C.1.pep
TASCNSKGDFFFLLFTAHKFVLSCFILPAKKEEKNGCLNIMQQCLPKCRIRPPYCNWYSNL

SEQ ID NO: 104949 - protein, 173 aa, Oryza sativa
  unsure (1)..(173): unsure at all Xaa locations
  Clone ID: PAT_MRT4530_102236C.1.pep
SSEGTWTYQREISVITIGXTMVGNSWNMDSNFQSFAFWISQVQXXQTXWKKIRLDLGPSQXXKDFASLYDTCLTTKXPNLRLPFXSSKLPRAXNFPPSFGLALNPKGXTXRGXXPXAXFXLGPXGGKXXXXGAKXPQXXXPPGQXSGGFXKIXXPXFWPXXFGXXFXKNFXRF

SEQ ID NO: 104950 - protein, 178 aa, Oryza sativa
  Clone ID: PAT_MRT4530_102237C.1.pep
YSAGLSSPPPLLIATTTSPPACLHRRRLVSLPPFMGVHVFTDRLAFATADWCFRGWLVTPPFLGVHVFTDQLDLAAADWCPRRLAASSAADWCFRLHGWPIMSPLMGVHIFTDRLAFVAADWCPRRCWASTSSPTGSPSSPPTGVLTCTAGLLCRRCWASTSSPTGSPSSLPTGVLAC

SEQ ID NO: 104951 - protein, 87 aa, Oryza sativa
  Clone ID: PAT_MRT4530_102238C.1.pep
RTQTAHFSLKSLTQHYFFSAYAQYKTRPLLTQNFIKNFVLCHVCRGKPCVHRENKMESHKNWQKKQVYKLIQSVIFAIKPLTTNLIK

SEQ ID NO: 104952 - protein, 131 aa, Oryza sativa
  unsure (1)..(131): unsure at all Xaa locations
  Clone ID: PAT_MRT4530_102239C.1.pep
SSDTIDNVKPRSRXKEGIPPDQQRLIFXGXSLRIAVXLAYYNIQKESTLHLVLRLXXXMQIFVKTLTGKTITLEVESSDTIDNVKAKIQDKEGISSDQQRLIFPGKSLEDGXTVANYNIQRXSTLHLVFAR

SEQ ID NO: 104953 - protein, 148 aa, Oryza sativa
  unsure (1)..(148): unsure at all Xaa locations
  Clone ID: PAT_MRT4530_10223C.1.pep
ARSSRRLRVSIGFEVLRLADETCQVVSCRILAIFACFLTANKGFIGVSADEVTGRCIDLQGLHPIGFYWIVLLLSCXYHQSIAFILLFTSSVRIYIRIIANSSKPYRYRLGQTIWHARISPSFGPALELSKSPRPVCVFRINNLPSQI

SEQ ID NO: 104954 - protein, 274 aa, Oryza sativa
  Clone ID: PAT_MRT4530_102240C.1.pep
RPPTRPGMGAYLARLGMRCIQRLDQPIILTGFSALNKLLGREVYSSHMQLGGPKIMATNGVVHLTVSDDLEGVSAILKWLSYVPPYVGGPLPIMKPLDPPDRPVTYFPENSCDARAAICGVQDSQGKWMGGMFDRESFVETLEGWAKTVVTGRAKLGGIPVGVIAVETQTMMQVIPADPGQLDSAERVVPQAGQVWFPDSATKTAQALLDFNREELPLFILANWRGFSGGQRDLFEGILHAGSNIAENLRTYNQPAFVYIPMGGEPMRGAWGWW

SEQ ID NO: 104955 - protein, 83 aa, Oryza sativa
  Clone ID: PAT_MRT4530_102241C.1.pep
MTRTRDLEGIKQTQKHSMIGNPFVHATARAGRDHAAGGETHPASSGKTRMRTKYNTAESCKNGDKRHTDHGERGLGKTANMFY

SEQ ID NO: 104956 - protein, 153 aa, Oryza sativa
  unsure (1)..(153): unsure at all Xaa locations
  Clone ID: PAT_MRT4530_102242C.1.pep
WTALSTAATNKDTTSSDITMTTLCINQPKHQLQTDLAAHLEGISXWPMSTCWKAYGVHFHMVLVPRQNSYRAVGNLQNKSWISLLGEVNWVSARLINRGDVVLRLWGSRACSFKSRIELCLDSAQIDYLSIPIGRSGPNXPHQPLHPFAGFAR

SEQ ID NO: 104957 - protein, 84 aa, Oryza sativa
  Clone ID: PAT_MRT4530_102243C.1.pep
RGFRGAPLEPPQERPGGVRATPGKEKSVPLTGPENFFKGPKAFLKRASPIATFPRPQENINLFPCYCYFFLEALKNLPLGVPNF

SEQ ID NO: 104958 - protein, 188 aa, Oryza sativa
  Clone ID: PAT_MRT4530_102244C.1.pep
MIDATSGVNCNVGAANGTGDTGDAVCHADQEKSLKRRSGQRSRVRKLQYIADLERTVDSLQNIGADLAVRVASLFQLRNALSMENKQLRRQITSLQQAKLIKDGQTQMLKKETERLKQLSVRHRRSRSVTSCFEANSFGGGDPSAINWQMLDMSKLSLNGALLFLLEAATACENLTATTNIACTDLHL

SEQ ID NO: 104959 - protein, 337 aa, Oryza sativa
  Clone ID: PAT_MRT4530_102245C.1.pep
MSRSPHLPPRCPPLGPQITRRDDSLFTQSCRFPSEDPFVGEPPCWLDDLLADSGKSHTLPPLRRACSDSDAILDVLTSFQSPIYPIDEGDPQPVGEAGESFNAAAEGGGSGAGIEGSCVYGPNSPRQKTRLTSSESSMVNAVLENVPSNPLQYLMIDATSGVNCNVGAANGTGDTGDAVCHADQENEAGWWAVTGRSMGWRRSGQRSRVRKLQYIADLERTVDSLQNIGADLAVRVASLFQLRNALSMENKQLRRQITSLQQAKLIKDGQTQMLKKETERLKQLSVRHRRSRSVTSCFEANSFGGGDPSAINWQMLDMSKLSLNGGAVVPPRGGYGM

SEQ ID NO: 104960 - protein, 58 aa, Oryza sativa
  Clone ID: PAT_MRT4530_102246C.1.pep
VGCLVHVLQRQPVPIDPVLCEHNSDLFQGVKQRPLKSSRVSVSMSCMTCSQHGKMPEH

SEQ ID NO: 104961 - protein, 108 aa, Oryza sativa
  Clone ID: PAT_MRT4530_102247C.1.pep
MPLHLPVSALLRLPIHCAAFADHYAPPQSVVGDETLEWTGAAPTQVYPVQEDKGEGRKKKGKAARGVARTSRYSAPSTSAPAESSNSLIEMWTKPSVQVVIDIDGVPV

SEQ ID NO: 104962 - protein, 1086 aa, Oryza sativa
  Clone ID: PAT_MRT4530_102248C.1.pep
MPFILCSFLLLCILVEAITALKKGAYLLKYGRRGKPKFCPFRLSNDESVLIWFSGKEEKHLRLSQVSRIVPGQRTAIFQRYPRPEKECQSFSLISHDRSLDIICKDKDEAEVWFAGLKTLISHSHQRKWRTESRSDIISSGATSPRTYTRRSSPLSSPFSSNDSVHKDGSDHYRLRSPFGSPPKNALDKAFSDVVLYAVPPKGFFPSDSNAGSVHSMSSGHSDNTNGHPRGIPMDAFRVSYSSAISSSSHGSGHDDGDALGDVFIWGEGTGEGILGGGSSRVGSSSSAKMDYLVPKPLEFAVRLDVQNISCGGRHAALVTKQGEIYSWGEESGGRLGHGVDCDVAQPKLIDSLAHMNIELVACGEYHTCAVTLSGDLYTWGDGTFKFGLLGHGNDVSHWVPKRVDGPLEGIHVSSISCGPWHTALVTSAGQLFTFGDGSFGVLGHGDRASLSVPREVESLKGLRTVRAACGVWHTAAVVEVMVGNSSSSNCSSGKIFTWGDGDKGRLGHGDKDSRFVPTCVAALVEPNFCQVACGHCLTVALTTSGHVYTMGSAVYGQLGNPQADGLLPVRVEGKLHKNFVEEISCGAYHVAVLTSRTEVYTWGKGANGRLGHGGTDDKNTPTLVEALKDKQVRSVVCGINFTAAICIHKWVSGSDQSMCSGCRQPFNLRRKRHNCYNCALVFCHSCSSKKSLKASLAPNPNKPYRVCDSCYSKLTKGLETDTNSSTKRGTVVQGFSETNEEELETRSNTQLSRLSSMESFKNMDSRYSKKNKKFEFNSTRVSPVPNGSSHWSGLNISRSFNPVFGSSKKFFSASVPGSRIVSRATSPVSRRTSPPRSTTPTPTLGGLTSPRVIANDAKPTNDSLSHEVLNLRSQVENLTRKSHLLEVELERTTKQLKEAIVIAGEETAKCKAAKEVIKSLTAQLKGMAERLPGGVTKNSKLPPLSGFPMPSELSSMATESLGSPSSVGEQISNGPNGLLASNGPSSVRIKAGHPEVGKNGSRLPEAESCHEAEWVEQDEPGVYITLTALPGGARDLKRVRFSRKRFSETQAEQWWQENRTRVYQHYNVRMVEKSASSIDNEIASR

SEQ ID NO: 104963 - protein, 67 aa, Oryza sativa
  Clone ID: PAT_MRT4530_102249C.1.pep
LAHLFIEILLFKSSIIKISNFIRCMYSIKILLFKSFIIKISNFIGCIHSIYQGNLNYEKIIIFWSLS

SEQ ID NO: 104964 - protein, 185 aa, Oryza sativa
  Clone ID: PAT_MRT4530_10224C.1.pep
MADPNTLDTRVTAAVMKHWAPPPAGKIKLNVDAAYQANRKTGGWGFVLRDEEGHALLAGAGRLEFVHDVVSAEARACLSALLAISVQGVTEVEIESDSAILVSAVTSSSHSQAVGATIFAEIKMLLQLHFANSKVSFAPRSCNNVAHNLAKIGVSWDPDQSVVWVDPLPYFVRTLVIRDRTESPQ

SEQ ID NO: 104965 - protein, 97 aa, Oryza sativa
  Clone ID: PAT_MRT4530_102250C.1.pep
ESDPETLQLLADIRADARLGLRFHIPDNSRDVFEQGTCDAGVKQLAALLGWDDRIERPIPSAAPVRPRTQIKRVCLCLLFPGHCLCMMVCNQCSLLN

SEQ ID NO: 104966 - protein, 993 aa, Oryza sativa
  Clone ID: PAT_MRT4530_102251C.1.pep
MHDPVQYCLHAESATNLTTHLIGLVNEKSRYFIVAHGFVDRIGILDWSVFGEGEESIQSMAETVLSMARSLVGSAISKATSAAAHEASLLLGVQKDIWYIKDELKTMQAFLRAAEVMKKKDELLKVWAEQIRDLSYDIEDCLDEFKVHIESQNLFYQMVKLRKRHLIATQIRNLKSRVEEVSSRNSRYNLVKPISSSNEDDMDCYAEDIRNQSTSNVDETELVGFSDSKIRIELLKDMIRQFLGSNSLDQVLQELQGKMVVQIPHLSDYLRKKLKEKRYFVVLDDLWSLDAWNWINDIAFPKNNNKGSRIVVTTRDVGLAEKCTTTSLVYHLEHLQMNDAITLLLRKTNRTHEDMGTNKNMQKIVEQIVNKCGRLPLAILTIGAVLATKQVLEWEKFYKQLPSELESNPSLQALRRMVTLGYNHLPSHLKSCFLYLSIFPEDFEIKRSRLVDRWIAEGFVRAKVGMTTKDVGDSYFNELINRSMIQRSRVGIEGKIKSCRVHDIMRDITVSISREENFVFLPVHDGSNLAQENTRHIALHGSMSCKTGLDWSIIRSLAIFGDRPNNLAHTICSNKFRMLRVLDLEDVKFLITQKDFNNIALLRHLKYLSFGRIFSSCIYTLPRSIGKLHGLQTLNMSSTYIATLPTEISKLQCLRTLRCTRVSNNNNFSINHPVKCLTNTMCLPNIFTPSVSSDNRAKQIAELHMATKSCWSESYSVKVPKGIGKLGELQILEHVDIRRTSTSAIQELAQLSKLTKLSVTTKGSTEEKCKILYRAIQRLCSLQSLRVDAEGSSGNGTLKCLDSISYPPLLLKTLKLYGDLEEMPNWIEQLSHLMKFYLLGSKLKEGKTMLILGALPNLMLLCLSLDAYLGENLVFRTGAFQKLRTLWFDKLDQLREIRFENDSSPLLEKIGIRYCRLEIGIIGISNLMRLKEITLGYRVKVGYLGQLEREVGTHPNRPVLRMEEDRSCHDLRRDGKGSAVEMEATEPLPEPES

SEQ ID NO: 104967 - protein, 552 aa, Oryza sativa
  Clone ID: PAT_MRT4530_102252C.1.pep
MANADGESTRTGYCAATKSFRSLRPPVPLPPPDVPLSFPEFAFSLLPRSSSSSSSSLLPANPALVDAATGEAVSFQAFLSRVRALAGALRSRVGLRGGDVAFVLAPAGLDVPVLYFALLSIGAVVSPANPALTPAEVSRLVSLSGASVAFAVSSTATKLPAGLTTVVLLDSPHFRSLLMDCGQAQGQEPLPVVVVRQSETAAIQYSSGTTGRVKAAALPHRSFIAMVAGFHALRAKAREVRTLLGAPMFHSMGFLFVLQGVALGATTVVVTDAVARAGIRGLVEAAERWAVMDMTASPPVVLGMTKQRCRLPALERITCGGAPLPAPAIERFRRRFPHVDLCMGYGSTEAGGISRMISQEECNHIGSAGRVTENVEVKIVDHVTGKPLPAGQQGELWVRGPAVMTGYVGDNEANATTFNSEGWLKTGDLCYIDQDGFLFVVDRLKELIKYKAYQVPPAELELVLHSLPQIVDAAVMPYPHEEAGQIPVALVVKQPGSKLTEAEVMYNVAKQVAPYKKIRKVLFVDSIPKSPSGKILRRELVNHLRLCELSRL

SEQ ID NO: 104968 - protein, 63 aa, Oryza sativa
  unsure (1)..(63): unsure at all Xaa locations
  Clone ID: PAT_MRT4530_102253C.1.pep
PRPVQLPLRRAQLRPQLRRRPRRRGLRPSMSPTRHGRRLAAQYAGGVCVCLRVSAFLLXGPCN

SEQ ID NO: 104969 - protein, 91 aa, Oryza sativa
  Clone ID: PAT_MRT4530_102254C.1.pep
MSKAATRGRDEADAVPKANDGDHGSRPQRDERHGRGPRRMRKPAAPPSFRRRALVHSLFDWWRFPDGKEKLDMSETFTDRCHGKKHGPSDE

SEQ ID NO: 104970 - protein, 489 aa, Oryza sativa
  Clone ID: PAT_MRT4530_102255C.1.pep
MVEDEDYGGGRRRLGQRGQRMSSLLQAVCEHLGVDLCEGDDSPRRLGTFSSSPTPHAAASTSSPPLSFPNADLVLRLDPCPDYEVDFDVSEDHHSSIDLHVSSAPLLHSHYFGALLSDRWSPAPTSIARREERRRQRENSIRSIAKSSKTLQRGNHSIHSIAQPSKTLRRRDYLVVGEDEEATLPCTSWAPPAVRPSGTPQVLQGVAGPPSRAPPAAHLGRCRPSVQGVAGSPSRALAASVQVTIDCQSRDRRQSVPLRPPRLSTTLSTMPVEDDMSNQLDENGMSSEPVTQQFPTIERTTVARPNQKRSKNFSEQEDKILVSAWLHVSLDPVLGTNQTRAAYWTRIYEHLYKTSKSTPDRSQNSLMHRWKTIQENVNKFCGYLSQIEGRRQSGVSIHDKIAQAIAVFKELEDKPFQFLHCWTLLRSQSKWHDKMKQITSQKPCATKKQKASTDGLGKAIPTNDDTTNHVDEDNEPTETEEPKIKYLAA

SEQ ID NO: 104971 - protein, 1010 aa, Oryza sativa
  Clone ID: PAT_MRT4530_102256C.1.pep
MGLHIWCWLVVLFSLAPLCCSLSADGLALLDLAKTLILPSSISSNWSADDATPCTWKGVDCDEMSNVVSLNLSYSGLSGSLGPQIGLMKHLKVIDLSGNGISGPMPSSIGNCTKLEVLHLLRNRLSGILPDTLSNIEALRVFDLSRNSFTGKVNFRFENCKLEEFILSFNYLRGEIPVWIGNCSSLTQLAFVNNSITGQIPSSIGLLRNLSYLVLSQNSLSGTIPPEIGNCQLLIWLHLDANQLEGTIPKELANLRNLQKLYLFENCLTGEFPEDIWGIQSLLSVDIYKNNFTGQLPIVLAEMKQLQQITLFNNSFTGVIPQGLGVNSSLSVIDFINNSFVGTIPPKICSGGRLEVLNLGSNLLNGSIPSGIADCPTLRRVILNQNNLIGSIPQFVNCSSLNYIDLSYNLLSGDIPASLSKCINVTFVNWSWNKLAGLIPSEIGNLGNLSSLNLSGNRLYGELPVEISGCSKLYKLDLSYNSLNGSALTTVSSLKFLSQLRLQENKFSGGIPDSLSQLDMLIELQLGGNILGGSIPSSLGKLVKLGIALNLSRNGLVGDIPPLGNLVELQSLDLSFNNLTGGLASLGNLQFLYFLNVSYNMFSGPVPKNLVRFLNSTPSSFSGNADLCISCHENDSSCTGSNVLRPCGSMSKKSALTPLKVAMIVLGSVFAGAFLILCVLLKYNFKPKINSDLGILFQGSSSKLNEAVEVTENFNNKYIIGSGAHGIVYKAVLRSGEVYAVKKLVHAAHKGSNASMIRELQTLGQIRHRNLIRLNEFLFKHEYGLILYDFMENGSLYDVLHGTEPTPTLDWSIRYSIALGTAHGLAYLHNDCHPAIIHRDIKPKNILLDNDMVPHISDFGIAKLMDQYPAALQTTGIVGTIGYMAPEMAFSTKATTEFDVYSYGVVLLELITRKMAVDSSFPGNMDIVSWVSSKLNETNQIETICDPALITEVYGTHEMEEVRKLLSLALRCTAKEASQRPSMAVVVKELTDARHVAGSYSKQNSGPSNS

SEQ ID NO: 104972 - protein, 252 aa, Oryza sativa
  unsure (1)..(252): unsure at all Xaa locations
  Clone ID: PAT_MRT4530_102257C.1.pep
MAAAARSPPCMTAQVRGCRMDGHPHGVDDLRGAARAGGLQAWLTRGYHGWSTKAYKQALTHLNFQGGTKPPLYNHFWATWAKYTLLGFKRAGVLHRDGVPVPPPELTGIRGSEGELCLYAMKVVDRWAVARKQKLERAAAKKRILRQLDHPFFXTLFADFDATTHFSCVVMEFCAGGDLHSLIHRMPSRRFPXPSAHFYAAEVLLAIKYLHMIGDIDDEQDDTAGGGASCFPDHLLQFKRRRRRLCGSWPSR

SEQ ID NO: 104973 - protein, 490 aa, Oryza sativa
  Clone ID: PAT_MRT4530_102258C.1.pep
MTTTRVGAREGNGDNDRSGVADWWRDPRPPMGRLDLGGIGSVAGERRWRWEADPVAGWEEIGDDGSSRGGTNNGSPTLLSSSTSSRYGQWGGGRLQRQQWRRQWVPTTLPSLSQIWSEVRQSVSSSSSSSTAASAAPPLVRPRLPSRRRCLHPLPPSRRLRQSILNLHRARAVSTLRLHHAASASLPLPQRRHRAASISSQSPVCQNSVLLIMEEEGFYTNLMNEGNDSLDWDSLSSMPVEDDMSNQLDENGMSSEPVTQQFPTAERTTVARPNQKRSKNFSEQEDKILVSAWLHIAQAIAVFKELEGKPFQFLHCWSLLRSQSKWHDKMKQITSQKPCATNRQKPSTDGSAKATPTNDETTNHVGEDNEPTETEEPKRPMGKKRAKEQLRRGETCTDAFDHLWEKKKEADAEKKKERDERHQKSYELDKQRLELDKKKVANETDEIQLKRMLEEERIMKMDISSKPLSQQQFYKSVQDEIIARRMNSSG

SEQ ID NO: 104974 - protein, 1392 aa, Oryza sativa
  Clone ID: PAT_MRT4530_102259C.1.pep
MAGPTPTYSSVVAHTAAFLAELIADPLLRRHLLSAAAAAGGVGRKQRQHPAATLQALSLVSDALDTAASAPPSLSSLRAAERLLLSLPVATPLSCLLLALASASRRRGGAAAAAAAAVLDLFALDPALARHELAPAAFEALFAPRLLPVMRHFAARRASTAAAAAEAASHRGEDGSVETAAMSAMRVLSLMSGAQAQEMRDLEREYEKVLDANCIAYALYLKKILETGDAAKETYSPPPPPPELVFGVGDDDQDGDVDDETTAETDETVSSQNDVRYNPIWADADEAADLYPRQGSGKGWRELMRPPSLYPQRVPPHLIVQQQQSSPSPTGRGSPVARLRAGHSPATPSSDVSMEDSPSSSELLAGREEKHTASPLSRPAGRARPRGEEDDDDDVAAMLSPEHASSVMGGDGGGDVARRPVVATPKDFVCPITSQVFDDPVTLETGQTYERRAIQEWLDRGNATCPITRHRLHGAHLPSTNYVLKRLIAAWRDQNPAASSSAPTPPPPATTTMDSPAAAAPFKISSPSPDATVSQASAPSPTSVIAQASLDSAVGELRAAVSCLCTSEELADSERSVLRIERLWREAAGAEHVVLAALAKPAVVNGFVEILFNSVSAQVLQVAVFLLAELASRDDAVVQTLTRVDSDVDCLVALFKKGLVEAVSLIHLLSPSPEQLVEMDMADALVATIRRGGGDDDGGAVVKMCVKPKAASVILLSQILVEGGRDSSSPAVAKSALVSERFIRSVAASLEAEQVEERVAAVRILLRCVAEDGHCRSSIVENSALAAVLDAFHVVGDADKFDIVRLLSELLKLKRRSAADRLLRTIKEASSFSMMHTLLVYLQSTTPEQSPVVAGLLLQLDLLVEPRKISMYREEAVDSLIQCLKNSDYPRSQLLAAETIMNLSGKFSSSGRPLSRSSLLKLARVKERHRPSHDLSISRGAGEDEMEEEKAAAEWERKAAYALVSHEFGLVFEALSGCLAAAKNGELFTASLVSAAWLVRMLPLLPDTGVLGAARVCLLRQLVLVLRSGKHGSDRALAMVALRSFMNDREGMHEITTYIKDVLRTLRELKKSSGLAFEMLKLLSDGQESSIDMWNHKELNHADCSSNGEVTSIAYFKGYIFSGHSDGTLKVWEGSENILRLVHESQEHTKAITSLAVLHSEEKLFSGSLDRTIRVWQLRDALRCVEVHDAKDPVQSLAVAAAMACFAPQGSGVKVLSWNNGGGAKVLNASKVVRSMALVHGKLFCGCNDGGVQEIDLASGTIGVIQQGSKRIIGKASPIYSLHLHGDLLYTGSTSLDGASVKIWSSSNYSLVGTIPSSVEVRSLVVSSDLVYLGSRNGVVEIWSREKLTRIGALQAGGGGGSGRVQCMAVDADGDVIVVGTSDGRIQAWGLT

SEQ ID NO: 104975 - protein, 76 aa, Oryza sativa
  unsure (1)..(76): unsure at all Xaa locations
  Clone ID: PAT_MRT4530_10225C.1.pep
YSGGSHSDRIRIKNYKGEIQRKHHASVCTTKSLGDXVLATKKRQQQDLTRLPTRTFYRHKPKPPKIKQEQQIPPKI

SEQ ID NO: 104976 - protein, 1423 aa, Oryza sativa
  unsure (1)..(1423): unsure at all Xaa locations
  Clone ID: PAT_MRT4530_102260C.1.pep
MAFMAALEADLRALSAEARRRHPSVKDAAEHAILKELMGSCSSQVQCTCLECFCKKPKLRSLSSPMEIAQNEDILRMFLVACSVKSVKLSVIGLSCLQKLISHDAVASSALKDILTTLKDHAEMTDEIVQLKTLQTILIIFQSHLQPESEVNMSQAFDICLHLLESNRSSDSVRKSLGRNSVEPTVREKLSNVGKLGLRLLEDLTALAAGGSATWLRVYSLHRTFALDILEFVLSTYVSVFRALLPYQQVLRHQICSLLMTSLRTNVELEGEAGEPAFRRLVLRLVAHVIRLYSSSLVTESEVFLNMLVKVTRLDLPLWHQILVLEILRGFCIEAHTLRLLFQTFDMNPTNTNVVENIVRALALVVATIQASDLSEETLAAVAGMFSSKAKGIEWSMDNDASNAAVLVASEAHTITLALEGLLGVVFTIATLTDEALDVGELESPKCELGSTECCGQLALLCAAMVNSSWLTILDSLSLILMRSIFKTTFPIIACGVLRAIEPLNSFLASLCKFTINNPNEGEKRSIVLSPGSKKVEMLVDQRDSIILTPKNVQALRTLFNVAHRLHNVLGPSWVLVLETLAALDRAIHSPHASTQEVSASVSRLSRDTSGQYSDFHILSSLNSQPFTGVEPIWDQIAAHHLEGISSAPHHFQEEKLLKESETVSFEYAVLSPLVILYSSNKNIDVQMGALKILLHVLERHGEKLSYSWPSILHMLRAVTDASEKDLISLGFQSIRVIMNEGLATIPVQCLDECILVTGAYGTQKTDINISLTAVGLLWTATDFVVKGLISKSAEKANGMDEEAESGGTVKEEALSSSEKDIKQSPLKSVVDYNKLFFSVFSVLQKLGADDRPEFAIHHVYLNIINFAKVCNIAHEWIIVCIXQVCVASTSSRDEWQGKELGTRAGKAVHMLIHHXGIARLLRSFFPFLQQLSKFSSGWVLLLDFVKNGILNGSKEVALAAINCLQTFVGSNCSKGNLESSYVKSVLDIYELVLQTSPNYKNDSADKVKQEVLRGLGDLYVQAQSLFNDEMYLRLMAVMHLMIKSSMNPTDYDNELGSIPALQRGILEIIPMLRPTTMLSSMWSPLLLELLCYLNSHDTPLQKQGKEMHEQKSDAANGATHGFLERSHLNNSSTKMDNAVGCGWGIMFIEKLVPIVVNLFLEAPQNERFNSSPEVIRCLGRCMNTRRDNPKGTLWRVSAECFNRVLVDEVTHDSADCKSGMSSYKFSRARFWKEVADVYETFLVGSCGRVLSSDVPSVDSVTADETLEMAVLTVFGDNVLKLQKDAPVEQIFTELLADDVFFMLVLPHCSFSDSFSPQVSETSKVSISVLTKRCEIILGQFLADENDLGEGPLPSVRIDETICVLQELARLIINMETANALSMPLYLKEALEKNESHGRAHLLALLPTFSELVVSRWTCPEAL

SEQ ID NO: 104977 - protein, 83 aa, Oryza sativa
  Clone ID: PAT_MRT4530_102261C.1.pep
ERERRPWRQPEEASKLTVHAGTGSRSRKGKGYLDASSLLLNIQHVQCPPRLSPTRRLMVTLMLLHFSTPDAPRFTSAEHHHHP

SEQ ID NO: 104978 - protein, 315 aa, Oryza sativa
  Clone ID: PAT_MRT4530_102262C.1.pep
MGTLVGHVAPGAGFLLVGLWHLYNHIRLFLLRPTAYVAPVWFPVRRARYLELALVIAGAVASILMELVVGPARHQPFDADGTVPSDHLHNFEHASISLALLVYAAAAAALDVARVPHGRAVSQLVAAVAFAQQLMLFHLHSADHAGVEGQYHLLLQGVVAVTLAATVLGVAAPRSFAVSLVRSASLVLQGVWFLAMGVMMWTPALLPKGCFLSREDGHDVARCRADDGGDALARAKALVNLEFSWYLSGTVVLVVALYLRLCRLYPEEPRYMPLVRGDCRDDDEDGGGDGDDNDVEAGKGGAGHVLREPLEIARP

SEQ ID NO: 104979 - protein, 101 aa, Oryza sativa
  Clone ID: PAT_MRT4530_102263C.1.pep
MRSNYHEAHQPKPTTYVVSYCRIRLNRLTSSDLNSADLSRSRFELQPILTLFPGRFPSRIPSRFLLHLRSLDYQIWSLTAVLLSVSPEHPSRRLSWTHHRA

SEQ ID NO: 104980 - protein, 68 aa, Oryza sativa
  unsure (1)..(68): unsure at all Xaa locations
  Clone ID: PAT_MRT4530_102264C.1.pep
QRYDTLDQVKVALGKDDLESLNIIIESDYTKSKDWTRKHCFNEXRPHDILDDLLHPLEQTIKLICKTL

SEQ ID NO: 104981 - protein, 118 aa, Oryza sativa
  Clone ID: PAT_MRT4530_102265C.1.pep
MSSRDAAATFHVYQPVQIPTATVAPAVAVSAGGPGAGDAVEWGVPENLFFYSPFHLVRLPGDERLAAPLANRSLLVKGIYELWGPGTTYEELGRVVMAYPEERKLPYLTPESPFKIRR

SEQ ID NO: 104982 - protein, 59 aa, Oryza sativa
  Clone ID: PAT_MRT4530_102266C.1.pep
MGYVMASIRAMVACGTWQHVRKTCLVVVVTSGCDGCCGGGDDNRLPHTSAATGACSGGD

SEQ ID NO: 104983 - protein, 822 aa, Oryza sativa
  Clone ID: PAT_MRT4530_102267C.1.pep
MASASAAAETLAAASLPVASPSRSLLRPLPRRASAGGGCSASVRISAVPPRGLGFAVVQRRVLRRPPAARANVEREGDGAEASGPGEASSSSSGDGDRDGAAAGAEAGGDGSFACITSAAATPPQPPSSKRGENKWRRKLIKGGGVGRWLWEPIVQGREMGFLLLQLGFAIFALRMLRPEIALPGSEPRPQTTYVSVPYSDFLASIDKNQVKKVEVDGVHIMFRLRPEVEARAMEQPQVQRGTDSVADNAGVPRRIVFTTTRPVDIKTPYEKMVENSVEFGSPDKRSGGLLNSALVALIYVVLIAVVLQRLPISFSQHSAGQLRNRKNSNSGGAKVSESTDIVTFADVAGVDEAKEELEEIVEFLRNPERYIRLGARPPRGVLLVGLPGTGKTLLAKAVAGEAEVPFISCSASEFVELYVGMGAARVRDLFARAKKESPSIIFIDEIDAVAKSRDGRYRIVSNDEREQTLNQLLTEMDGFDTNSAVIVLGATNRADVLDPALRRPGRFDRVVMVEAPDRFGRESILKVHVSRKELPLGKDVDLSDIAAMTTGFTGADLANLVNEAALLAGRSNKEIVEKIDFICAVERSIAGIEKKHAKLKGNEKAVVARHEVGHAVVGTAVANLLPGQPRVEKLSILPRSGGALGFTYTPPTTEDRYLLFVDELRGRLVTLLGGRAAEEVVLSGRVSTGALDDIRRATDMAYKAVAEYGLNQRIGPISVATLSNGGLDESGGSPWGRDQGHLVDLVQREVKALLQSALDVALSVVRANPTVLEGLGAYLEENEKVEGEELQEWLKSVVAPKELTSFIRGKQEQVLQLEAGS

SEQ ID NO: 104984 - protein, 159 aa, Oryza sativa
  Clone ID: PAT_MRT4530_102268C.1.pep
SSPTGGRLRRRRSPARAASPRLRCGGVDPATSAPRCRPTGSSRPRRRRQRPRNTRSSSRAAAPSPPRRRSSPPRPPPPRPHRCRPSRSRRRRSTSPAPRARRPAAPTSPPAAPPRSAPGTSPPRPPASPPPPSPSSPPPPPPPRRRRAKNPTKNISKKI

SEQ ID NO: 104985 - protein, 71 aa, Oryza sativa
  unsure (1)..(71): unsure at all Xaa locations
  Clone ID: PAT_MRT4530_102269C.1.pep
HVVRRXXGRRGRXRGXTRXRWRPVGXGRPGTRSSPGAGPATPRRGGXGGGKQLLHRRRRDRSTRSEQSNRA

SEQ ID NO: 104986 - protein, 109 aa, Oryza sativa
  Clone ID: PAT_MRT4530_10226C.1.pep
FVFLFFCVYNFLYFFFYFFYFNNTNLLTKAKQTLKKPPPQKTKKKTKPKHTPHRAKKIQAPHKNHHRPQINGPDFIYLARLRLLPKNNFSKNPTLQKKCTKQKLNILNP

SEQ ID NO: 104987 - protein, 80 aa, Oryza sativa
  Clone ID: PAT_MRT4530_102270C.1.pep
SLVTESHGEGVPGGRGSAVVVDEVEQRDSLGGNSAAARESVAATASPLAAGRPLLLYPAGAPIERVGWGETWSSPECPRV

SEQ ID NO: 104988 - protein, 71 aa, Oryza sativa
  unsure (1)..(71): unsure at all Xaa locations
  Clone ID: PAT_MRT4530_102271C.1.pep
QTAWCRVRGRSPHLGGIYRELGSPQMVGTPCPRCSHAARRGDLERXAATLXAFCNVDIPNAXGVCYWLARS

SEQ ID NO: 104989 - protein, 431 aa, Oryza sativa
  Clone ID: PAT_MRT4530_102272C.1.pep
RGRGGGGAVGGRGGATLGRVAVPGAALVLEYATLAVAGLYPDSPGRESQDAHLVATRFAGHPDLHLFAVFDGHGACGAACAGFARDALPRLLAGVGVGAGEEGGGRMVVVEDPAAAFREALPAANAEMHAADEVDDSMSGTTAVAALVAGGALHVANVGDSRAVAGVWREGRVAAEELSWDQTPFRADERARVKACGARVMSVEQVEGVRDPEAESWVADEGDPPRVWARDGLYPGTAFTRSLGDQAAEAVGVIAEPEVKSVEITPAHLFFVVASDGVFEFLSSQDVVDMCVNLSAFGLYEASDVPRTGVAAKLMKCLNENGISPASTSKLDVHSQKPNQSMTLAYVLFRGSMKLLQWDTEVSLMLNAFVKITNTKTKWYMLVPIRILMSIVLHARVRKTSMYRDVYSLWITEHHQRFTDYSEGEVICGVI

SEQ ID NO: 104990 - protein, 462 aa, Oryza sativa
  Clone ID: PAT_MRT4530_102273C.1.pep
DCVCVDGAEAEAGVVLCWLNSVAVVVAEGAGVVMAADVDALVTVVVVAVVAAADDDDGTTVKLKPPAEEAGAGTENNDPDVAGEAVAADGVDALVAEAEANAGAEAEDEPNGKLREVADELAAALVLENNEGAGAAGEVAKEKPVDGADAGVVGAAELLFVKEKAGAEDAEENKAGAVLAVVVVADDGVKPNDGAEAAVAGDDEKPKDAVVVAVVAGDEAVVVLKSGAEVVDPNSAEPVPAPNPRAGEEAEVVVVLDAAAPVFNPKPKDGVEAAAVAAVVVPDAAEPKPKPVAAPEKRLGAEAADAAAPNRPGAAAAAEVAPKGLGAVAAEEAPPNKLGVVAGEEVAPPKMLGVDAADDAAPNTLGVVAVAGVEDAPKMDGADAAAAVDWPNEKPVDPKPNGDGDEEVAGAAAEAAGADPNREEPKVGAAAEEEEEKREEPKAGAEAGAGEEAAAAAAAAAG

SEQ ID NO: 104991 - protein, 596 aa, Oryza sativa
  Clone ID: PAT_MRT4530_102274C.1.pep
ADTPYSQFHHRFRELGLEKGWGDCAKRSQETIHLLLDLLEAPDPSTLEKFLGTFLGTIPMVFNVVIMSPHGYFAQANVLGYPDTGGQVVYILDQVRAMENEMLLRIKQQGLNITPRILIVTRLLPDATGTTCGQRLEKVLGTEHTHILRVPFRTENGIVRKWISRFEVWPYLETFTDDVAHEIAGELQANPDLIIGNYSDGNLVACLLAHKMGVTHCTIAHALEKTKYPNSDLYWKKFEDHYHFSCQFTTDLIAMNHADFIITSTFQEIAGNKDTVGQYESHMAFTMPGLYRVVHGIDVFDPKFNIVSPGADMSIYFPYSESRKRLTSLHPEIEELLYSEVDNNEHKFMLKDRNKPIIFSMARLDRVKNLTGLVELYGRNPRLQELVNLVVVCGDHGNPSKDKEEQAEFKKMFDLIEQYNLNGHIRWISAQMNRVRNGELYRYICDTKGAFVQPAFYEAFGLTVVESMTCGLPTFATAYGGPAEIIVNGVSGFHIDPYQGDKASALLVEFFEKCQEDPSHWTKISQGGLQRIEEKYTWKLYSERLMTLTGVYGFWKYVSNLERRETRRYLEMLYALKYRTMASTVPLAVEGEPSNK

SEQ ID NO: 104992 - protein, 118 aa, Oryza sativa
  Clone ID: PAT_MRT4530_102275C.1.pep
PKSPIHIYKLGKKIPHPQVKDEKHLRNQEEEIYIDSIIRQRHQQQQNQITDQNSSAILDIQQNNRRTKLTHRQHHHQSPSQPWSPSIHTYHAAIKEKGEAAAARRRMRPSPPPLLALG

SEQ ID NO: 104993 - protein, 89 aa, Oryza sativa
  Clone ID: PAT_MRT4530_102276C.1.pep
MEVWMCSVDGSQGEVEASRKQAEVGGAAWREGGRRRHGGASHVARRRQAAARRGGRAGPSGGRDEVPCESRLGSMCRRRRGVAELRITE

SEQ ID NO: 104994 - protein, 76 aa, Oryza sativa
  Clone ID: PAT_MRT4530_102277C.1.pep
LHHQPVRVAWASASLLLRLLDRYSASSLRSSDGISPAAWSSREMSSYPGSSRRCSRLSMVLITHSQCLVSYAWTNA

SEQ ID NO: 104995 - protein, 110 aa, Oryza sativa
  Clone ID: PAT_MRT4530_102278C.1.pep
FVFFFFLGFFFFFFFFFFFFREKLKESLFFLGGKRKQGPPRLGFWFSKKKVPALPQGVGKKISPFWFPRGPGGSKQTGKLGQSNGKRGEGKGDLIFSTPELGFLGPQQGP

SEQ ID NO: 104996 - protein, 35 aa, Oryza sativa
  Clone ID: PAT_MRT4530_102279C.1.pep
PRGGGNLKVAWRQAPRLRPPLKAPRCTNITKRYSH

SEQ ID NO: 104997 - protein, 154 aa, Oryza sativa
  Clone ID: PAT_MRT4530_10227C.1.pep
MEDRIVITLLASHFRVPTNTACLECVDLIRAAPRRTLPFPPLAAGKYSSSSIGPVTPAKSPPPLVGVRKDSSSARRHREGLLLLRPPVLGMRTSTLPPCSHAVGAGIERTLAHFLSQSYPSRIERSDEFWYRPAVHKGAQVTEDGDHLVLLMPV

SEQ ID NO: 104998 - protein, 74 aa, Oryza sativa
  Clone ID: PAT_MRT4530_102280C.1.pep
VEYRCFVGGLAWATDDRSLEAAFSTYGEILDSKIINDRETGRSRGFGFVTFSSEQSMRDAIEGMNGDSGGNWRN

SEQ ID NO: 104999 - protein, 38 aa, Oryza sativa
  Clone ID: PAT_MRT4530_102281C.1.pep
KAYPYAFVRIIGFDNVRQVQLISFIAYKPPGFKKSGGK

SEQ ID NO: 105000 - protein, 63 aa, Oryza sativa
  Clone ID: PAT_MRT4530_102282C.1.pep
DRTALPAPRSPRFPEPSPAPSIRHTSPHQSSAGLSPLPPPPAPTSNPVISASSAAEPIDLASP

SEQ ID NO: 105001 - protein, 143 aa, Oryza sativa
  unsure (1)..(143): unsure at all Xaa locations
  Clone ID: PAT_MRT4530_102283C.1.pep
PWSRLLHLTAGDPRLQDLHATRETGESRGFGFVTFSSEQSMRDAIEGMNGKELDGRNITVNEAQSRRSGGGGGGGGYGGARXGGYGGGRGGGGYGGGGGGGYGRREGGYGGGGGYGGGRGGGGGYGGSRGGGYGGDSGGNWRN

SEQ ID NO: 105002 - protein, 88 aa, Oryza sativa
  unsure (1)..(88): unsure at all Xaa locations
  Clone ID: PAT_MRT4530_102284C.1.pep
MGRNASKSVRLPRLLLHQHTEPLPTTLLLRRRVPYRRPRLLPRRRLRVDVVRLSRPPQQRRPPLLASATAPIGAEPRRXGSRHGHRGA

SEQ ID NO: 105003 - protein, 111 aa, Oryza sativa
  unsure (1)..(111): unsure at all Xaa locations
  Clone ID: PAT_MRT4530_102285C.1.pep
RSLEAAFSTYXEILDSKIINDRETGRSRGXGFVTFSSEQSMRDXIEGMNCKELDGRNITVNEAQSRRSGGGGGGXYGGGGGYGGGRGGGGGGYGGSRGGGYGGDSGGNWRN

SEQ ID NO: 105004 - protein, 93 aa, Oryza sativa
  Clone ID: PAT_MRT4530_102286C.1.pep
MTVNNSPSPVYMRLMMMRIDYKESKETGDTDEIVVEGFDKISRRVGSVYSGFVNFGGGPFYIVEYLNLQADYLTEPPAKILFSQANKLTTRCE

SEQ ID NO: 105005 - protein, 151 aa, Oryza sativa
  Clone ID: PAT_MRT4530_102287C.1.pep
MAAPDVEYRCFVGGLAWATDDRSLEAAFSTYGEILDSKIINDRETGRSRGFGFVTFSSEQSMRDAIEGMNGKELDGRNITVNEAQSRRSGGGGGGYGGGGGGYGGGRGGGGYGGGGGGGYGRREGGYGGGGGYGGSRGGGYGGDSGGNWRN

SEQ ID NO: 105006 - protein, 412 aa, Oryza sativa
  Clone ID: PAT_MRT4530_102288C.1.pep
GGASGRRCSERGGHSGAVAVDLANESGAEMAASHSGPGSPWSSFEDQALVVLVHDMGQNWELVSDALNSIVQLKCIYRRPNECKDRHKLLTEKGSGDGADSADDSGSSQHYQSTLPGIPKGSARHLFQRLQGPFEEETLKAHFEKIIFLGQKLHPNRRKGESQELKQINPLHSSHLHALSQACAPGVILMPLDLCDAMTPNPDALSIGYSGSHASGLMLPNHPSSIGPTLPTGNMNTRLPGSPGMVLGNTLPSPSTPNTPRDSQRYGMPRPTSLQGDEQQRIQYNQMLNSRSLQQPGVPVPGAPAGVDRGVRMMPGAHGMGVMTGLNRGTPVTRPPFPRLGSSGMLNMVSPGNMLPNNGQGMQNTVNVHPGTIPGHGNTMLRPRDPMQMLRPGQNMEEHRQMIGYHGLLVWF

SEQ ID NO: 105007 - protein, 143 aa, Oryza sativa
  Clone ID: PAT_MRT4530_102289C.1.pep
MAAPDVEYRCFVGGLAWATDDRSLEAAFSTYGEILDSKIINDRETGRSRGFGFVTFSSEQSMRDAIEGMNGKELDGRNITVNEAQSRRSGGGGGGYGGGGGGYGGGRGGGGYGGGGGGGYGPREGGYGGGGGYGGDSGGNWRN

SEQ ID NO: 105008 - protein, 137 aa, Oryza sativa
  Clone ID: PAT_MRT4530_10228C.1.pep
MEVRSPSSRSRNARVTEKPGCDKAHVLGALRSARLKAYSTAVLGKDVCEILPDGWRDHYDFGNMDNLDARVTRTKRDLGHIDLVDVEIPHENIPEEGEPEEMPYELIPSRYLWSIVGPSQLRFRYHITSFSFHIVSD

SEQ ID NO: 105009 - protein, 196 aa, Oryza sativa
  Clone ID: PAT_MRT4530_102290C.1.pep
MSASSPCEPVGRQLGRTLLGFGVCICGMCWKVVPAIGSMCNIGWSFYPCVAVEGCGLGRAGDQTSCSGRPMKGHRFSGCLVLAKAQPVLLAGSGDVFGRRKPLEGAVEAARELGSQQGLHASCAGGDGPSPSEDAGCLARAVAVMAIAGDLFAGVVGGITLYGAGASWCLCPSHGCKHYNLLLKKVLVSGRKEETA

SEQ ID NO: 105010 - protein, 162 aa, Oryza sativa
  Clone ID: PAT_MRT4530_102291C.1.pep
MAAPDVEYRCFVGGLAWATDDRSLEAAFSTYGEILDSKIINDRETGRSRGFGFVTFSSEQSMRDAIEGMNGKELDGRNITVNEAQSRRSGGGGGGYGGGGGGYGGGRGGGGYGGGGGGGYGRREGGYGGGGGYGGGRGGGGGGYGGSRGGGYGGDSGGNWRN

SEQ ID NO: 105011 - protein, 316 aa, Oryza sativa
  unsure (1)..(316): unsure at all Xaa locations
  Clone ID: PAT_MRT4530_102292C.1.pep
MTEKFSTKPYFFYGVDFPYWCKKMNLLLSQSYDIWQKVDNPYEIXVVLKVDFENNCKACNILVNGISCSNFDRVSRLDTALEIWMSLFDFHXGTSNTKELRKEVFKKNYIKFEMKSGEALDDYFAPFNKVLSNLRFIDESFDINNSXFEIAQYLLKSVDMXIWEMKVTLIQKSGDMSYLXLNSLYTKLKTHKMNISYLKTDLKSTPLVPSSSFXLMLLLHRFLRVLSAMYDDQFEQLGEETLVLITNKFSXALKNSKNMKRGXLVRCFECGVXHIKYNCRKHKKTIKEEEVDKKHKQERKNIHFALAEDQGKKLLA

SEQ ID NO: 105012 - protein, 331 aa, Oryza sativa
  Clone ID: PAT_MRT4530_102293C.1.pep
MGLRDIELTLPPGFRFYPSDEELVCHYLHNKVVNQHRFAGVGGAAAAGGGTMVEVDLHTHEPWELPDVAKLSTNEWYFFSFRDRKYATGLRTNRATKSGYWKATGKDRVIHNPKLHAAAHRRASIVGMRKTLVFYRGRAPNGVKTNWVMHEFRMENPHTPPKEDWVLCRVFYKKKAETETESSYSMENEQEAVIAMARSAAAIKAGGCYSNSSSSHDPAAAGHHSPPPFPASLAACSSSHHYSSHPPPPPDHHHHHHMPVTGGGGGSLNEFIPTTSMALYSSIFDFSQHLDGGAVAASASAAGSRVDGGEQCGLMELGLEEHYNYNGLMPM

SEQ ID NO: 105013 - protein, 45 aa, Oryza sativa
  Clone ID: PAT_MRT4530_102294C.1.pep
MAFPCSPRYTLTPLGLLGPPRANPGSIWTIAPRSLTKRTAPLAED

SEQ ID NO: 105014 - protein, 76 aa, Oryza sativa
  unsure (1)..(76): unsure at all Xaa locations
  Clone ID: PAT_MRT4530_102295C.1.pep
LRKVVLVFRKSYRSFGYXDGRGWTMXKLAMFGCNEATQVLKKLEXIRRCSXDAFVCIMGLDKVRKVQVIRFIVYKH

SEQ ID NO: 105015 - protein, 1056 aa, Oryza sativa
  Clone ID: PAT_MRT4530_102296C.1.pep
MGCHQVVVTGVLVLVLAASVSDRAAACVEAEREALLSFLAEAAPPAGDGIVGEWQRSPDCCTWDGVGCGDDGEITRLSLPGRGLGGTISPSIGNLTALVYLNLSGNDLSGPFPDVLFFLPNVTIVDVSYNCISDELPDMLPPAAADIVQGGLSLQVLDVSSNLLAGQFPSAIWEHTPRLVSLNASNNSFRGTIPSLCVSCPALAVLDLSVNMLTGAISPGFGNCSQLRVLSAGRNNLTGELPGDIFDVKSLQHLHLPSNQIEGRLDHPECIAKLTNLVTLDLSYNLLAGELPESISQITKLEEVRLIHNNLTGKLPPALSNWTSLRCIDLRSNRFTGDLTGIDFSGLDNLTIFDVDSNNFTGTIPPSIYSCTAMKALRVSHNLIGGQVAPEISNLKELQFLSLTINSFVNISGMFWNLKGCTSLTALLVSYNFYGEALPDAGWVGDHIKSVRVIVMENCALTGTIPSWLSKLQDLNILNLSGNRLTGPIPSWLGGMSKLYYLDLSGNLLSGEIPPSLKEIRLLTSEQAMAEFNPGHLPLMFSVKPDRRAADRQGRGYYQLSGVAATLNLSDNGITGTISPEVGKLKTLQVLDVSYNNLSGGIPPELSNLTKLQILDLRWNHLTGTIPPSLNELNFLAIFNVAYNDLEGPIPTGGQFDAFPPRSFKGNPKLCGLVISVPCSNKFEARYHTSSKVVGKKVLIAIVLGVSFGLVILIVSLGCLVIAVRRVMSNGAVHDGGRGVGASLFDSMSSELYNDNDSSKDTIFFMSEVAGEAAKAVTFVDVLKATNNFSPANIIGSGGYGLVFLAEMEDGARLAVKKLNGDMCLVEREFQAEVEALSATRHENLVPLLGFCIRGRLRLLIYPYMANGSLEDWLHERHAARGVLHIHERCKPHIVHRDIKSSNILLDEAGEARVADFGLARLILPDRTHVTTELVGTPGYIPPEYGQAWVATLRGDIYSFGVVLLELLTGRRPVETLPPPQGQQWELVRWVMQMRSQGRHAEVLDPRLRGNGDEAQMLNMLDLACLCVDSTPFSRPEIQDVVRWLDNVDTIGRADV

SEQ ID NO: 105016 - protein, 144 aa, Oryza sativa
  Clone ID: PAT_MRT4530_102297C.1.pep
MESREAARGRRCSAWCSEGGGWMESSGTDIAMDELELWIWLGRQRIGLTACEIGWRRVGANPGATHGGGEGAHGVERRFLAAEVVLALSSSRLVRQRRSKGVGRATVRQGGWARASGPEADARQLGARRSRTPGQRAQGEKKAN

SEQ ID NO: 105017 - protein, 509 aa, Oryza sativa
  Clone ID: PAT_MRT4530_102298C.1.pep
MHRLVPRAAASFLGAPPLLTTQAGPLLAARSGPPNPSRLRLRLSPWRLLRSRRGLSCSADAAKRCGDDDAEEDGEQSVAGGGGSRPVVDRRQRSRGDAAMGSGELLAIPGVGPRNLRKLVDKGFDGVAQLKQLYRDKFFGKSNEKMVEFLQSSVGIIHKNHAESITLFIKESVDEELKGTDSPNVSKNKRLTFCVEGNISVGKTTFLQRIANETIELRDLVEIVPEPIAKWQDVGPDHFNILDAFYAEPQRYAYTFQNYVFVTRVMQEKESSSGIKPLRLMERSVFSDRMVFVRAVHEANWMNEMEISIYDSWFDPVVSSLPGLIPDGFIYLRASPDTCHKRMMVRKRSEEGGVTLDYLRGLHEKHESWLLPSKGQGPGVLSVSQVPVHMEGSLPPDIRERVFYLEGDHMHSSIQKVPALVLDCEHDIDFNKDIEAKRQYARQVAEFFEFVKKKKEDPSAESSGGDKSTNKQIMLPHRGGLWVPEGNPLPGSALNSLDFRRAMSSFLSA

SEQ ID NO: 105018 - protein, 84 aa, Oryza sativa
  Clone ID: PAT_MRT4530_102299C.1.pep
PRLPKARGRPGWRPRRQGRLRRRACQPVNDDNNVLIRLIQRSPPFFVKNGPVSFKWGALLLPLGWGLGVPKGEKFYFQTPRKKA

SEQ ID NO: 105019 - protein, 51 aa, Oryza sativa
  unsure (1)..(51): unsure at all Xaa locations
  Clone ID: PAT_MRT4530_10229C.1.pep
TANIQLVLKSFLQLGSRMRTAKXNITRKNGQLXLNPSTQXRHLERTQXSSQ

SEQ ID NO: 105020 - protein, 145 aa, Oryza sativa
  unsure (1)..(145): unsure at all Xaa locations
  Clone ID: PAT_MRT4530_1022C.1.pep
AGXRQVRHFTNPRAPFRRPPPPHASHPRRCHGRPDPLVLRHRASLLPLAVPSIWPRFSLETPQRGGVDRKKRXAVVXHTPPYIXDQALLQRQCCMQLQGMRPKCHCGTSLPDDAEQCNKXICXRXRGSIQMKEGWGIAESLYIVA

SEQ ID NO: 105021 - protein, 268 aa, Oryza sativa
  unsure (1)..(268): unsure at all Xaa locations
  Clone ID: PAT_MRT4530_102300C.1.pep
MARPRLLLLPLLAVAAAVLSSPLGRALAKTAKKSNDIVNGPLLTSKINAKRTLIVGPEDEFKTVQSAIDAVPVGNTEWVIVHLRSGIYREKVMIPETKPFIFVRGNGKGRTSINHESASSHNAESAAFTVHADNVIVFGLSIRNSARAGLPNVPEVRTVAAMVGGDKIACYHCAFYSPHHTLFDVAGRHYYESCYIQGNIDFIFGGGQSIFQCPEIFVKPDRRTEIKGSITAQNRKQEDGSGFVFIKGXVYGVGXVYLGRANEGYSRV

SEQ ID NO: 105022 - protein, 196 aa, Oryza sativa
  Clone ID: PAT_MRT4530_102301C.1.pep
FFFFFFFFFFFLFFFFTFGFYSVFYLLIPDRDRQGHKGGRKRAKSKHAERGGRTATRGKWENTEKPKKQTSLSRKGKAGGAQREKKRKEKKGKKRAGKKGEKKKKKGEERNGQSTKKGGKRTGSKKGQTPHQGEGEQLRAPQGLVLTEREKGGKSGFPKQAKKGEKGGKPRDMTRTEKKKIGGGGGRGNKKKKKQA

SEQ ID NO: 105023 - protein, 93 aa, Oryza sativa
  Clone ID: PAT_MRT4530_102302C.1.pep
NLLMVFFFFHRSHGNQKGVAKGKAGLHSTGEQTKRATQGTRGGDLELFSGGLQIKLSPFGTPKPQPKGVVRLPHLKEPGIFYKNWRAPLNQSN

SEQ ID NO: 105024 - protein, 70 aa, Oryza sativa
  Clone ID: PAT_MRT4530_102303C.1.pep
MTYIVKRRKYHFQVAHISRTRGLRFYESTRLVKINSTPARLAQKTGNIVSFARAQQISNGVLLFGPLLLL

SEQ ID NO: 105025 - protein, 149 aa, Oryza sativa
  Clone ID: PAT_MRT4530_102304C.1.pep
SYFSFSSPHLLILFGLPFFFLLFPLFFRGKTPNNSTLSFFPPPPPLKKHTNPPLFFSPPLFRSPTTSKGKPALTPIKPQQGGPPLRGRPPLETPRGGTPRGQKNPPGSPSHRRPPPPHRAVTHPRRGGGAQTPQPRGRRGSRLHKKLLP

SEQ ID NO: 105026 - protein, 61 aa, Oryza sativa
  Clone ID: PAT_MRT4530_102305C.1.pep
MARHRLRWPHGGFDNGASIEEEVLDLAGSHTAVGCRQRRIGQEALNLTGGHTAAATMWQRC

SEQ ID NO: 105027 - protein, 280 aa, Oryza sativa
  Clone ID: PAT_MRT4530_102306C.1.pep
MVLRFRAVQRFNDKMGQNSVLQPRRFHNPPIVLPKKMVHRASLHKSANVPTQVKAAVLAALKRSNGRLSNGVAAIQRSTLRDTVIWSCQGDHIVTANVILVWHIGTSLFEMKYLRIKSSPRTADMITATHLSQYCAYLVAAVPELLPNDATWTKAHCKEVARDIKKALDGEGNDFNHFVDALGASCRHKVLQQGSKLAKQLVGEVGRLEDGEGETKGVGEAALWKLLAEFWSEMVLYLAPSDNVRGHAEALARGGEFITLLWALLLHAGITSRPGSVAEP

SEQ ID NO: 105028 - protein, 455 aa, Oryza sativa
  Clone ID: PAT_MRT4530_102307C.1.pep
MEEAEGRRVTSPAMLRQRRQLRWEMCRAAYALDALRIRNAAAAAASRRRRRRCQPLLLSLGGDGDATVMESLEAALGGAKELVVLLAGCPRLSRQPYSAYLFMERCMFGRQMEKEQIVDFLLRPACSSAGDPNPGVLPVVGGPEVGKRTLVEHVCIDERIRQYFAKIHRLSSDDLMAAGDDDEHRRFGIDPSARSLVVVDVVGDVEEEPWRRLCSSVRRENGDGKVVIICRTAEHAARLGTAPRPVTLDNLRRPELWYMFRVLAFGGADPEDRPELVAIAAELFEGVKHFAMIAAVNAHAAALRADMTARSWRRIARAAIDAHGGRGEHGPVRDEDDSYYLYRPSMDGPHCLFYGRRKLTTWTPAASTTPTVTMQDLLSGRVVPGVDTPRFDVLVWRSPIPPHCSYVATCDMGRAQQFVVASGGRRPFERRKPSGNLDHGECLNKKRRPMYSGDG

SEQ ID NO: 105029 - protein, 93 aa, Oryza sativa
  Clone ID: PAT_MRT4530_102308C.1.pep
MVHTASARPPTIGTSTAPDLPVLAPSSDAGLGGYGCAHSLKSRRQARQLMRHRAVAWRQKARLETQARMMRMVALLEKNAHVDGELRGKKSNQ

SEQ ID NO: 105030 - protein, 176 aa, Oryza sativa
  unsure (1)..(176): unsure at all Xaa locations
  Clone ID: PAT_MRT4530_102309C.1.pep
YIQDVSCAGDGRVRTPLGGGGGGGXEERQRNRKRSNRLSAQRSRIKKQQYVDGLAVEAEQLRRENDAMRAGAGAVLQRCRLVEQENRVLAAHARELCSALQLRASQLRLLGEVAGVPLDVPDVADHLVQLYGGDLGMTPLSPPPLLPPLPPQIEMLYFQPDSVMDPVSMLQGYENI

SEQ ID NO: 105031 - protein, 90 aa, Oryza sativa
  Clone ID: PAT_MRT4530_10230C.1.pep
GGTSRPHGEDEIRLVCVGRSFSAVNLKKVTSVAPEGDAKARHVGKYVPCECNISQGNAYQHLLDAVTTLPLYLLDLISTWRPKNLGTLLI

SEQ ID NO: 105032 - protein, 223 aa, Oryza sativa
  Clone ID: PAT_MRT4530_102310C.1.pep
DSWESLADHRRRHPGIPAEPPHSLYRPCHSGPPPPGPGLLPVVVPVDNGLPKGKGVEACGPAPAAPPLPVAGMAASSVGRVADPYMLMLLFASSSRFLSRTVGFAEFFPGSFACVVRGTMAPFLGFASERPARWKSYLLARCLIRSEAGESPADDRRRHAGLPAEAVQLPPWQLAAAAGARPLLARRGGGQRQATGRMASCPPRRRPQRRRSPTPGRRRRGVG

SEQ ID NO: 105033 - protein, 45 aa, Oryza sativa
  Clone ID: PAT_MRT4530_102311C.1.pep
LSISQNDTILTRYNFIPPSTHSSECELSHELVTPATSQHHNIVSH

SEQ ID NO: 105034 - protein, 150 aa, Oryza sativa
  unsure (1)..(150): unsure at all Xaa locations
  Clone ID: PAT_MRT4530_102312C.1.pep
FSLLSCPRGGGGVAVSPARSVLAVRPHVLVRAYSVHLKRSGVLALPAWVVIFLLRRSRRWGRYXPAWCCSRAALLAWVIYLTRGFGVGGFHAISGGRLRCGSRPPPFCARCGAVSRCILPPVLQLVVLDADPPGXCLRPSQGGRALAPVA

SEQ ID NO: 105035 - protein, 568 aa, Oryza sativa
  Clone ID: PAT_MRT4530_102313C.1.pep
MPLFRAAALRRLLSTAAASSAPPKLWNLPYRLRRAAVPAARAAVSEYLHATRCLPSSHADTIAARSPRSLHAFLAGLPAVPSSLRTSAFPSLLRRHLAFHPLNELPFFLESIGLPPTTRSDLMFLADHPSLLPAVAALAHFGFPWSRLGLLFPTVLLRLPPDLITSRLASLEACLGPLPRAAIIAACLAFPSLLENDLSSSDRLVDDLGKVFGRLGPGLGTSNDIDAFLGVCRRTWMFYDAGSEVGGIGDLVGCNNQRVFLELEEERIGKMLKFFKGLGMAGEEVGRFLLTNPMVFYLEFGDVVISVPEYLRRVGLAVNEVNAAVEKHPYVVGKNLLQNLPGVLRAMELDHWFLEKISDGGESLRYLFPDFVLEDVSYDVEIERAFLGGMIKMKADKRAQHIDGKLEFLKSIGYGENKIATKIIAVLHSNRDTLQERFDCLLERGLEYKMLCQIVSVFPKILNQGKKMLNDKLNYMTKELGYSVEYLELFPAFLCFDLENRIIHAPRMTSELRPCCIWPLTASLGMLHHSSKPVEGHPNVTGCCSGEQKQWPHQKSVPVGPFRDFPLD

SEQ ID NO: 105036 - protein, 100 aa, Oryza sativa
  Clone ID: PAT_MRT4530_102314C.1.pep
HSNNKRRQRTNHTPQAIELTPTKKKEKTPKLNRPYSLKEKEQSLGMQSNQKYRTKKYMGETRERKQSKETPRRSCIRGSAGDEGQATGSTARPRRPTGRS

SEQ ID NO: 105037 - protein, 41 aa, Oryza sativa
  unsure (1)..(41): unsure at all Xaa locations
  Clone ID: PAT_MRT4530_102315C.1.pep
PPPPAHGPRPPXXRPGQRRVSAEAPKLSRASRALVYVSSWA

SEQ ID NO: 105038 - protein, 59 aa, Oryza sativa
  Clone ID: PAT_MRT4530_102316C.1.pep
SRLNHYQQAKTYTCSLKVNPATVLTEVNRTLTQVRMRSLETVDASCRAVRMQHAERPHW

SEQ ID NO: 105039 - protein, 539 aa, Oryza sativa
  Clone ID: PAT_MRT4530_102317C.1.pep
MAIYRAPSLSSFGRHLLLLLPPPETFSPRSPSLSKRRRRSSRISPSPRPSPISAATSIGSATSSSTPAAVVLRQIQSEVARRREPERRRRRRVSSRPAPSLWSPLLLAVASVRFARRSCTPSAPSSPPKSTGAPSSPSTRSSPSRFDLRRSPAAPPVIAKLRRRLHWIRSCEVKPVHPSVVVSHRRKVVTAVYSTSPPFQAGHRLSSVAVRRRVSVGKDRRLALFLLVPSVCIFVPWFTGNRRSHTVHRWGDYDPGTVHCFRLSYARGLVTITHHGDVSARTRCHDAQRYNVKGLFDEMSTAWGLQNLRTARDLGENRFLIDFDHEVDFYRVMNGGPWKHKAPQKVARVLNFCGAQKDKVLSAGSASNLASPRRQSLDPEVTKVGHANEEKMAQETLAPMARGPCSREYVSLSSNYELSEENSIKISTAETNLNVASKKSPDWLQKKKKGLAIKEGGKISRPKVANWGRDIGKSKKGSIKLSPRAMIALKSTVVDFNHQQEHPSLNTSYYEASCRDKVENSCKAKEDLVGAHGEPHQEQ

SEQ ID NO: 105040 - protein, 776 aa, Oryza sativa
  Clone ID: PAT_MRT4530_102318C.1.pep
MVFTVSVEAPISPLPVWGLLVVCHETLRPDLPKPCNQRGFELKVSSSSGRSPHGKDCEERRRRAKDRAGIPQGQRNLGQRLNGEGCMLKEGDFAITSPASRRRPLLALVSQLRCVPIGRFDNTKKLEKTPSGLGPGRTCHKRFDFLSNVTIRPVNELNPSPRPGYTLMFEDFFDDGFMFPCSPFLVDVLKLYGLEFPQLTPNAVVRLGVFEWIIHSCGGVPHAQDFAYFHHTRHYTKQNSKFGCINFSPHSNRGYPGPIVSASRTKWGNKWQSKWFYLQIPAELYAEKDCPFTFSCKTPKVVFEPSVALSSDFTAIRSLVEELVSKFSVRDLVEEFICLGIRPLSTSWALSLGELPDGATSLLHPLIVSSELVIPEDIVRPCRKLIGPFTKDEYLNLAVSVNETAPLDVLASTATVVEKSVRAHAVETTSLSSPTRANKDLETQTAQSPVNISQRHEIGKNTITGDVRVGDSSKTVWTPSPPFILTPSPQLVKEVLGSFSERCAQDGHWLMGLPNFSDMGESSHHRANLCMDDLKHHNPLGPVGDELERILIPLELEKEFIKENDLMSSWATLDVSAAKTASLARLQRDVAKKALEAICAQWKKSVEHIAKLKKDQEFLHRELNRVSNEKNAFTDLVRKISGVIKGLIEEKKVLVEENKKLHAREKALERSVLEHQEVSRQLADAEDKLKEQITVLEKSNEELELIRKEQNESNAEDMHVFLAKAKIARKPPSSSSFKGVTRPNHPEQPYPAVQIYSPNQELSKLLPGITSIIISS

SEQ ID NO: 105041 - protein, 69 aa, Oryza sativa
  Clone ID: PAT_MRT4530_102319C.1.pep
MAMGFEWVVMATAAAGSGGSEVGWSCTDVREEMGCGRCTGGDGTRWTGASTMVTTREEAGNETGNGEGG

SEQ ID NO: 105042 - protein, 81 aa, Oryza sativa
  Clone ID: PAT_MRT4530_10231C.1.pep
MWASWSTDECAKRRTRRGGQRGRGETMSVVAATIIGIWMRHPSARLPRHIFHPYSNRVTAGIVLHSFGPPNYAAPLPRCPL

SEQ ID NO: 105043 - protein, 315 aa, Oryza sativa
  unsure (1)..(315): unsure at all Xaa locations
  Clone ID: PAT_MRT4530_102320C.1.pep
MTGSTLGPNKIRLDGIKTLGIKYTGERQRSGDCRRNNAIGGHREKEEATAILTNTYATTDSDGRWPATSFKGRRGTVHGGDNFPAMXATTEGWPGFTSQLRIQWSRWRQRAMTGGAAGLRRRSKRDGELRVDGDDGAPVDFGGDEGADGVQLLLANLTEATASSSGDHSDGAGRLETRRRRRRSGSRRRATSDWIWRKTTAAGVGLDVAEPREEAALTGDGRGDGEWRLEWRPEIRRGMAAGEAVMGDGEREARMRRIWPLLHTPRARIQPRWGIAGAAVTGDWGGRRGGDGSGLHAASMRTAATSVVASSDSDG

SEQ ID NO: 105044 - protein, 675 aa, Oryza sativa
  Clone ID: PAT_MRT4530_102321C.1.pep
MKCKFLALARFYSAQRYNVKGLFDEMSTAWGLQNLRTARDLGENRFLIDFDHEVDFYRVMNGGPWKHKAPQKVARVLNFCGAQKDKVLSAGSASNLASPRRQSLDPEVTKVGHANEEKMAQETLAPMVSLALEKGAQHMQARGPCSREYVSLSSNYELSEENSIKISTAETNLNVASKKSPDWLQKKKKGLAIKEGGKISRPKVANWGRDIGKSKKGSIKLSPRAMIALKSTVVDFNHQQEHPSLNTSYYEASCRDKKYRPKLVFLSETRQDEPRISKLRWRLGLRNCLAMMSDGSGGGIALLWEEGLLVDLLSMSHAHVDVLIKESGDAVQWRGTFIYGEPKAQDRHLMWELILQIQPSSNAPWLMMGDFNEIMVEKEQTPSSNRCLRYEIMWEREETLPEVIQLAWEQRIKAHDLGEVAKKLNSVLEHLENGAANRLALPLRNWMELGRKWKDFQSVIHWAMQRKSMRSRVSWLKDGDRNTKYFHRQAAWRPRKNKIKKLKDWDDRYVENKGEMEKMATSFCQKLHTKDDSVVSDELIDLINPAVDDAMNEVLCKEFSDDEISDVLFQIGPLKAPGPDGFLARFFQRTWGVLKEEIAAGVRTFFSYGLLPGGVNNTYIVLIPKINQPVELKNFSPISLCSVIYKVVSKCLVNRLRPILNDIISPTESAFIRDV

SEQ ID NO: 105045 - protein, 137 aa, Oryza sativa
  unsure (1)..(137): unsure at all Xaa locations
  Clone ID: PAT_MRT4530_102322C.1.pep
SARLSQKDDLNLKGSKSRGATNPHAKLPEKNKGADKPDYKDKIWKAAQDQNNPKRAFYAFFAYMEEFRXDLMEKSSQNKSAGTXRIARGYRSKYMTKTDKALXVPNVNMLKADYNXTLRAYNTGQSTANKASSTEEY

SEQ ID NO: 105046 - protein, 344 aa, Oryza sativa
  Clone ID: PAT_MRT4530_102323C.1.pep
MAIYRAPSLSSFGRHLLLLLPPPETFSPRSPSLSKRRRRSSRISPSPRPSPISAATSIGSATSSSTPAAVVLRQIQSEVARRREPERRRRRRVSSRPAPSLWSPLLLAVASVRFARRSCTPSAPSSPPKSTGAPSSPSTRSSPSRFDLRRSPAAPPVIAKLRRRLHWIRSCEVKPVHPSVVVSHRRKVVTAVYSTSPPFQAGHRLSSVAVRRRVSVGKDRRLALFLLVPSVCIFVPWFTGNRRSHTVHRRPMRRRCPSCIAAAVQAAALRRRLLPSCRCLLRWLCQAAAIPRAVSLLHAATSAVSLAVAAAAASPLLRHRCCACTPCSVAVALPQPLATTASPP

SEQ ID NO: 105047 - protein, 55 aa, Oryza sativa
  Clone ID: PAT_MRT4530_102324C.1.pep
LKGGASRRQQRNANQVLHHNMHYVELWGISLTETDHAQTFFQSSYVIFKCVVDFF

SEQ ID NO: 105048 - protein, 205 aa, Oryza sativa
  Clone ID: PAT_MRT4530_102325C.1.pep
MQQQMAMPAGAAAAAVPPAAGITTEQIQKYLDENKQLILAILENQNLGKLAECAQYQAQLQKNLLYLAAIADAQPPQNPGSRPQMMQPGATPGAGHYMSQVPMFPPRTPLTPQQMQEQQQQQLQQQQAQALAFPGQMLMRPGTVNGMQSIPVADPARAADLQTAAPGSVDGRGNKQDATSEPSGTESHKSAGADNDAGGDIAEKS

SEQ ID NO: 105049 - protein, 236 aa, Oryza sativa
  Clone ID: PAT_MRT4530_102326C.1.pep
MEWVPKHENNLDSVFPRQTRRRWMLLQDLDKKDSTTFRKEHDEEIDFEWSSDGDDDSDHRGNVPEYRLPATIFQGYHGNVDNNALGFGNFPQPPIPMFYHGYHGNIDVLGFHPYKEIVFLCEAMQTGLAYHLKTSKMEILGKLPLVSSCEEILSNKSFTGRRIPSEIITADSQKCLKYNVICSTSFDRVIIADTPAAAAAADADDFATAADAAAASSSSLRRRQLRLFWVLSRISR

SEQ ID NO: 105050 - protein, 62 aa, Oryza sativa
  Clone ID: PAT_MRT4530_102327C.1.pep
NEVGPNVIGVQRHVCKSRSWEGQIAACNKRGVKGAGPINLHAFWTTGTFWCNKKRKGFCLKP

SEQ ID NO: 105051 - protein, 106 aa, Oryza sativa
  Clone ID: PAT_MRT4530_102328C.1.pep
MGNCFKSQRAAASWADDGEWEDEEEQQQQQHLHEMAAVEKMERVEVKIRVTRRQLQELLEKAAGEGKGRPVEKVLAEMISSGKVCYEQEAAGWRPSLQSIPEADES

SEQ ID NO: 105052 - protein, 165 aa, Oryza sativa
  Clone ID: PAT_MRT4530_102329C.1.pep
MVRSGWRGLATGTGGGEEGGSALRWAAAWGGVGELNASGESASSLAAASLMATMGRQGPTMSSAKEEASSSNLSSCRSRLPHAPAAGRSGALPLPLLLLLPIDDVAATVGLRAPSPALPGQKGEEGGKVEKKREKKGEKIKKFHVIVHVACHVGNTTVKRCFGPG

SEQ ID NO: 105053 - protein, 224 aa, Oryza sativa
  unsure (1)..(224): unsure at all Xaa locations
  Clone ID: PAT_MRT4530_10232C.1.pep
MGLMSSPSSSLFSISPILLFPLPLLLPRMQPAHQRARVEARRRRGDAKSTGKRWALPPLLSMWASWSTDECAKRRTRRGGQRGRGVGGQGGGGEAGKLLLSPNPSSLTPPPTREEGGGGEAGVGAGMEHHLACTAYRTPAMXETMSVVAATIIGIWMRHPSARLPRHIFHPYSNWVTAGIVLHYHAPLPRRPNYAVPTTPLHYQLRRSTTHVPTTPLHYHAVLS

SEQ ID NO: 105054 - protein, 118 aa, Oryza sativa
  unsure (1)..(118): unsure at all Xaa locations
  Clone ID: PAT_MRT4530_102330C.1.pep
FPPFRGVVKTQLVGPGAPRGAVGEKLRQGFFRQLPPVXNKWGRCLGLPPMVGGLFRGVGAPHFWAPLARVFPPXRKGAFRXAGGNPPGFFHVGLPHWAGGVFFWVGFPWAPKIGSLGF

SEQ ID NO: 105055 - protein, 349 aa, Oryza sativa
  Clone ID: PAT_MRT4530_102331C.1.pep
MYSPLGSGCAFAAAASSAFPPATVPGGIFAGRRRRRPARLVLAWASSDGSDGGGAAAGAVAAEASAVGESKEGEVASGGGSSAESSAEKKPAPVDPKIEKELKKKNLARTMYSPLGSGCAFAAAASSAFPPATVPGGIFAGRRRRRPARLVLAWASSDGSDGGGAAAGAVAAEASAVGESKEGEVASGGGSSAESSAEKKPAPVDPKIEKELKKAVQKTAATFAPRASTATKNPAVPGTALYTIFEVQGYASMLLGGALSFNLVFPSNEPDIWRLMGMWSIWMFTIPSLRARDCSSKEKEALNYLFLLVPLINVIIPFFVKSFAVVWSADTVAFFVMYAWKLGWLQRSE

SEQ ID NO: 105056 - protein, 67 aa, Oryza sativa
  unsure (1)..(67): unsure at all Xaa locations
  Clone ID: PAT_MRT4530_102332C.1.pep
MTVVGSFSSSRHRDAKRRAGTGEEATRERGARCNQGTGGHQQPPGXTASGIARRGRPWGAGVSTLAG

SEQ ID NO: 105057 - protein, 397 aa, Oryza sativa
  Clone ID: PAT_MRT4530_102333C.1.pep
MGLSRRAKNLIVDVPFQGAKWLRCVDLAGQLFGNTATPPPPTTIAHGSESAAVQEDYTSQTLVSDSCNPKKKAAGLKMERIRLPRPILKFCSTHGSDQISLDCFPLVDRKVVIADHTRRMFLCDADTRAVVSIPNLHKPKSRPISLFIPSTADANDHPSVGGGSLYVMERVPEPEKGDVKLSDQFEAFVCSNIFEGPWNCHLLRPPPFVSDRTCCFTYPKITSYAVVGSNICISHNSCNATYCLDTARNTWEVGNGNLPLYGKVVYVPELKLWFGFSTEARTMSPLAAADLSTMDSHSQPQLIGDWKEFDPPKGWLESHDPQLVNLGSGRFCIARFFRIVSMDDGEIIDRIEVFTGVEVLPVGHDGDGSGNTKLKLRMKKNKSLCHVSNGTVIADIF

SEQ ID NO: 105058 - protein, 87 aa, Oryza sativa
  Clone ID: PAT_MRT4530_102334C.1.pep
LGSCISKIRVRIHIRDRAQLNELGQTPWPPMTASKVEMTTTSAHWLDSVRSSARLPKGIEKSASQLCRLANYGDHTDYVNVDQRTLL

SEQ ID NO: 105059 - protein, 214 aa, Oryza sativa
  unsure (1)..(214): unsure at all Xaa locations
  Clone ID: PAT_MRT4530_102335C.1.pep
SVIYILAPLKYATVYGCSDATXVLGAVGKVVKVEHCERVHIIAASKRICIANCHECIFYLGVNHQPLVLGDNHNLQVAPFNTCYPQLQDHLMQVGVDPSVNKWDQPFVLGVVDPHDSLSHPAGVSDVKAESATCLDPDLFTNFLVPSWFGDETQEPTNCNPFPLPEIYGTFQSKKHSALEDIQKTIWELQLDENRKRDLATALHAQFKGWLYAS

SEQ ID NO: 105060 - protein, 235 aa, Oryza sativa
  Clone ID: PAT_MRT4530_102336C.1.pep
MAGDPAAAAAAVGAMRPWNYVVTAHKLTVVARSCVGNFTAPDHLDLSLTVQQLSGNLPVLRLEYLLTHQGLQPMLDAPVYGRIATIELFRPCVLASIKFSPDSRAKSSCKFVNAFVYLNQENRYVICRSGRDASDHIGRPTNKGQTDELSRDYNITWMTAVEMLDDYVYIGADNCYNLFTVLKRRVGRLLVIGQYHLGDLVNRFHQGPLVMQDPGSEVDQIPAFIFGESRIDSTQ

SEQ ID NO: 105061 - protein, 183 aa, Oryza sativa
  Clone ID: PAT_MRT4530_102337C.1.pep
LQEFGTRLCCYISSPRRRHPLSPPAAGRGFLFSATRRRQRPPSRVRPTAGGRGRRLDDERRVRRRRRAVLGPRRGPGPLREGARWARASPARPGPSPASTPLNMVYLHKSPFHHRGNTTISPSTTLSRSWVRPPQIRGLPCIILPPPRQSPRSAADAHMAAPSGSGEAAPASSTYYDVYGPDA

SEQ ID NO: 105062 - protein, 34 aa, Oryza sativa
  Clone ID: PAT_MRT4530_102338C.1.pep
MSQRDEAKENMLLGCLEHIHSPKATHVTLLTTKF

SEQ ID NO: 105063 - protein, 399 aa, Oryza sativa
  Clone ID: PAT_MRT4530_102339C.1.pep
MAPSLLTTPSQALALAPGAAASRVGGGGGGSARVSFPSGRVQRRGALGMRVRASVAIEKETPESEPPPTFLREDGSGAGSGSVRERFEAMIRRVQGEVCAALEEADGSGARFVEDVWSRPGGGGGISRVLQDGRVFEKAGVNVSVVYGVMPPDAYRAAKGEAGKNGAAADGPKAGPVPFFAAGISSVLHPKNPFAPTLHFNYRYFETDAPKDAPGAPRQWWFGGGTDLTPSYIIEEDVKHFHSVQKQACDKFDPSFYPRFKKWCDDYFYIKHRNERRGLGGIFFDDLNDYDQEMLLNFATECADSVVPAYIPIIERRKDTPFTEEHKAWQQLRRGRYVEFNLVYDRGTTFGLKTGGRIESILVSLPLTARWQYDHTPEEGTEERKLLDACINPKEWLDL

SEQ ID NO: 105064 - protein, 438 aa, Oryza sativa
  Clone ID: PAT_MRT4530_10233C.1.pep
MAAKRLHDGYGQEDQPDDKRVRRMPSFSTVIREALMVKQMQTLFVALEPLLRRVVQEELQAGLVRSPRYIERMSPETPPAQPPMWKLAFRFKPQLPIFTGSKIEDVNGNPLEIILVDVDTGAPATISQPLRVEVVPVLGDFPPDDREHWTAEEFQQRGIVKERSGKRPLLTGDVSLTMRDGCVVVNELQFTDNSSWVRCRRFRIGVRVVPGSYDGPRIGEAMTEPFVVRDHRGELYRKHYPPVLGDDVWRLEKIGKEGAFHRKLTQHNVRNVQEFLRLLTVKPDELRAIMGDGMTDRMWEVTTSHAKKCVPGDKVYMYSTQHGTVYVNSIFELVKVELAGVEYQLHQLNRGQKAFVHQLLLAAYEQRNNLQEADAMALHCNDVPLLQNAAEITIPALGDTQLWIQNSLNSQEIDFQVDEIPQANFALQWTGQMYNISG

SEQ ID NO: 105065 - protein, 210 aa, Oryza sativa
  Clone ID: PAT_MRT4530_102340C.1.pep
MVFPPVNVMTGASKSGSAMVVHGGVDVPRRMPTPACTTVGFSLVGQLGNIKLLMRRPTTTSTFAGSRCDVESWLSADDMTGVRPVTSVILVHHVMKPGIYLTRTNVPSLGGNTLAPAGDERLEALVLTGRGEACVKSPGSGRFGPRGRDGSGPTPWGDKEKGGRITLGPDPPPPPRELGHVGDRVCLKSLSHDTPGKEEGEHITLGPDAP

SEQ ID NO: 105066 - protein, 138 aa, Oryza sativa
  unsure (1)..(138): unsure at all Xaa locations
  Clone ID: PAT_MRT4530_102341C.1.pep
MTSSMVAGSDGKLAGARAAGCGFGRHAHVEDDETNPTVLTLEPNDERRRPATKXGGGGGSVGGGGGXAPVTGDSGEGAARLLLALAHLTVVAATGGDDGGDGAARMESAGGNGELNGGGAAATRHGKAREMGQTKEED

SEQ ID NO: 105067 - protein, 430 aa, Oryza sativa
  Clone ID: PAT_MRT4530_102342C.1.pep
MAGLTGDLKHASPRPVRTRASRRSSPAGASVLPPRDGTLVLVRYMPGFITWWTRMTDVTGLTPVMSSADSHDSTSHLLPAKVEPKGCDHFQLVNGVIRYKGRIWLGHHKEAQQAVLLALHNSGVGGHSGVTATYQRIKNLFAWTGLQKDVQQYVAQCTTCQQAKVEHCKSPGLLQPLPVPMQAWMTVSMDFIEGLPKSGKYDTIMAQHWYNTSYHNVLNKSPYEVLFARKPTHFGLVDVGASTVPDVQLWLQERAHMNELLHQQLLRAQQRMKSQADKKRSERQFAVGDRVYLKLQPFVQMSVARRSCQKLSFRYFGPYTVLERVGAVAYRLDLPATSQIHPVVHVSLLKAAIKPGTQVSSDLPLNYSDEQSTIQPEAVLRRSLIKRGKSVVPCGLIKWIGMPEELATWENLRQLRTRFPDATAWGQAGS

SEQ ID NO: 105068 - protein, 83 aa, Oryza sativa
  unsure (1)..(83): unsure at all Xaa locations
  Clone ID: PAT_MRT4530_102343C.1.pep
MSAMAMPWLNPNAAPVIQGALSRVEDLSPKWRELVKTTACVCHHWFSQHHMYQDAPXEEDHHRQVFDDDLLPALPADSFDLLP

SEQ ID NO: 105069 - protein, 360 aa, Oryza sativa
  Clone ID: PAT_MRT4530_102344C.1.pep
PLHGLLESCEAALRPDPSPTLTGHGSPESSQDSSKRRKVVLPSPSQAKNGNILRIKIRRDQDSSASLSEKSNVVQTPVHQMGSVSSLPSKKNSMQPHNTEMMVRTASTQQQSIKGDFQAVPKQGMPTPAKVMPRVDVPPSMRASKERIGLRPAEMLANVGPSPSKAKQIVNPAAAKVTQRVDPPPAKASQRIDPLLPSKVHIDATRSFTKVSQTEIKPEVQPPILKVPVAMPTINRQQIDTSQPKEEPCSSGRNAEAASVSVEKQSKSDRKKSRKAEKKEKKFKDLFVTWDPPSMEMDDMDLGDQDWLLDSTRKPDAGIGNCREIVDPLTSQSAEQFSLQPRAIHLPDLHVYQLPYVVPF

SEQ ID NO: 105070 - protein, 985 aa, Oryza sativa
  unsure (1)..(985): unsure at all Xaa locations
  Clone ID: PAT_MRT4530_102345C.1.pep
CLASSASPAATPPPPTXSSAAAAATASTGGLPSPFPDLGVPLSAADLREAAYEVLVASSRTTGGKPLTYIPQAAASAGGGGGPASPASASSLSSANASSSPSLQRSLTSAAASKMKKALGLRSSASSKGGSPGSGGGGKSVPPRRPATVGELMRVQMRVSEPADARIRRGLLRIAASQLGRRAESMVLPLEFLQQFKASDIPDPQEYEAWQSRNLKLLEAGLLVHPLVPLNKSDVSAQRLRQIIRGAYDRPLETGKNSESMQVLRSAVMSLAGRSDDGTSDGCHWADGFPLNLHLYQMLVEACFDNDDGTVVDEIDEVMELLKKTWGILGINQMLHNLCFAWALFNHFVMSGQVDIELLSAAENQLAEVAKDAKTTKDPNYSKVLSSTLSSIMGWTEKRLLAYHETFNTSNIESMQGIVSIGVSAARVLVEDISHEYRRRRKEETDVARSRIETYIRSSLRTAFAQRMEEADSKRSSRNPTPVLSILAKDIGDLAIKEKNLYSPILKTWHPLASGVAVATLHSCFGNELKQFIAGLTELTPDTVQVLKAADKLEKDLVNIAVEDSVDSDDGGKSLIREMPPYEAENAIANLVKVWIKERIDRLKGWVDRTLKQETWNPAANRENIAPSCVEMLRMVGETLDAFFQLPIPMHPVLLPDLMFGLDRSLQLFVSKAKSGCGTRNSFMPQLPPLTRCEVGSNILFKKKEKPQNPQYRGSQNGTTNGADPLALPQLCVRLNTLQFVRGELENLEKKIKTGLRNVESAQADVTDGLDIKFELCQTACQEGIQQLCETTAYKVTFYDLGHVLWDILYIGDIASSRIEILLRELDPILETISGMVHNKVRNRAITALMKATFDGFLLVLLAGGPLRAFTRQDSQIIEDDFKALKDLFLADGDGLPEELVDKASSQVKNVLPLLRTDSESLIDRFKRMMAESNRSGAKNRLPLPPTTGHWSPNEPNTVLRVLCYRYDETATKFLKKTYNLPKKI

SEQ ID NO: 105071 - protein, 163 aa, Oryza sativa
  Clone ID: PAT_MRT4530_102346C.1.pep
AQRAPAHKGGSSSQAPAVVARRRQREAKAGGPWQCSAAARTWSRRRVVVESCTRTARRAAGTTRRRRGGRRACGPTRSTRAPSRSASSSSRAATATPAAAAAPRRREITASSEDGLLRTGHTRLSCLSGHMRPCVHACICTVRCHHVFLSVHVLFVQFSIRHD

SEQ ID NO: 105072 - protein, 93 aa, Oryza sativa
  unsure (1)..(93): unsure at all Xaa locations
  Clone ID: PAT_MRT4530_102347C.1.pep
RADRRRGRGGGADAPPARLGASCRRRRHXTPQPPTSTLQTGPTRYLLASVPPAADAAGSRRRSRCSRRRPDAAAAPRTSSVVCPIWVCCALKS

SEQ ID NO: 105073 - protein, 58 aa, Oryza sativa
  unsure (1)..(58): unsure at all Xaa locations
  Clone ID: PAT_MRT4530_102348C.1.pep
SHSXGXKXSRXLXXSXEXGEXXSIDRSIXIAXCGSXRRRXXAGFVRVRTIVRFNLGCP

SEQ ID NO: 105074 - protein, 111 aa, Oryza sativa
  Clone ID: PAT_MRT4530_102349C.1.pep
RHEGRRTSPRAAPLFSSPAALLRRGEVRRLDRHPSPLQIASRGRGRGRGRRGGGYGFEHPAKHTPHEDFPVRVLSSPLHSPLRHPHTYLHPFFPSPLVVAAECDFRHARGV

SEQ ID NO: 105075 - protein, 46 aa, Oryza sativa
  Clone ID: PAT_MRT4530_10234C.1.pep
MSRRPARLMVALCRHVGNGCPACVLVFTSDLRSLGLLVEVQPGRTS

SEQ ID NO: 105076 - protein, 375 aa, Oryza sativa
  Clone ID: PAT_MRT4530_102350C.1.pep
MGEEVHLGLPGPWAEDYREKADHYTTKIGGVPVHAPVAKFNIENRTIYVLVCPKPKCGTNPQSWKVLRVQKCHTSAQTDGKVDETDQINGNVCSSEPSSSSLLNKSHEVSDDDFDLDALANALEEAATLASNSKKQNKPKRSNAPIKCPVGKQKVDDPSLPVLPCFYIYYGKEQFRDKGSVGSNSSESVLAKEIADVANDEEEKWEGENYEYDRAIGADRTFLKFKKRLDAYPQQCFRYSYGGKPLLAATNLQDSGTCQLCGSPRQYELQLMSPLSYFLHEAGDGSSDYAPDGWTWLTLIIYTCSKFPVSTPNSLDILTAFLNPFVPNILMCMQKQKLARFGRSFHVGVVVEPVVGWWWNGMWMPFGVLAPYGAE

SEQ ID NO: 105077 - protein, 90 aa, Oryza sativa
  unsure (1)..(90): unsure at all Xaa locations
  Clone ID: PAT_MRT4530_102351C.1.pep
PAGSCPATLTKDTMXVVTTSEPETVYDIXVLHGQSVRRDRPPVRRILLRKTDLERYMAVXEFDPAXEFHVPYVNTAMEEDYDALCGVYQK

SEQ ID NO: 105078 - protein, 209 aa, Oryza sativa
  Clone ID: PAT_MRT4530_102352C.1.pep
KTIEPYEVPKLPHEECMKVFARYAFKGQKAKDTELLKIGESIVQKCDGLPLAVRTLGSLLSMEDISKWQEVKETNIPNTDILSVLKLSYDALPSDLRACFASLSTFPKDYEIFRELLIMYWMAMGLLNTASGSKEAIRMGERYFSELAGRSLFQDYVFSHDGTISHCKMHSFVHDLAISVSPNEHATISCENFSASKRVKHLVWDQKEF

SEQ ID NO: 105079 - protein, 393 aa, Oryza sativa
  Clone ID: PAT_MRT4530_102353C.1.pep
MGEEVHLGLPGPWAEDYREKADHYTTKIGGVPDWPTEDMGIKPHLLQCGLCGTKLCLVAQVHAPVAKFNIENRTIYVLVCPKPKCGTNPQSWKVLRVQKCHTSAQTDGKVDETDQINGNVCSSEPSSSSLLNKSHEVSDDDFDLDALANALEEAATLASNSKKQNKPKRSNAPIKCPVGKQKVDDPSLPVLPCFYIYYGKEQFRDKGSVGSNSSKSVLAKEIADVANDKKKKKKGENYEYDRAIGADRTFLKFKKRYSYGGKPLLAATNLQDSGTCQLCGSPRQYELQLMSPLSYFLHEAGDGSSDYAPDGWTWLTLIIYTCSKFPVSTPNSLDILTAFLNPFVPNILMCMQKQKLARFGRSFHVGVVVEPVVGWWWNGMWMPFGVLAPYGAE

SEQ ID NO: 105080 - protein, 74 aa, Oryza sativa
  Clone ID: PAT_MRT4530_102354C.1.pep
RLALEVAHVLQTADEEVRLSHRHISTPSRLCAAVIDTLDTLRDHDHVLQSSGAEADHGSRRQSSCRPSVKRWAV

SEQ ID NO: 105081 - protein, 412 aa, Oryza sativa
  Clone ID: PAT_MRT4530_102355C.1.pep
MEAKLSAASRRVAPSPIQQLSHLAQRAGAVNLAEGFPDFPAPAHVKAAAAAAIAADLNQYRHVQGICDALAETMKRDHGLRVDPLTDFAVCCGQSEAFAAAIFAIIDQGDEVLLFDPAFETYQTCIELARGVPVYVPLDPPSWTLNEDKFLKSFTNRTKAVVLNIPHNPTGKVFSREELLIIAQACQKMDCFAITDEVYEYITYDENKHISLASLPGMQERTIITSSLSKTYSVTGWRIGWACAPANIASAIRNIHVKLTDSAPAPFQEAALVALTSPPDFYSSLKQDYTARRDFILQVLTDFGFRISFKPQGSIFVFVELPRSWQLSDMDFVTNLIKNAGVAAVPGRGFFHSSTDDPSYHHRYVRFAFCKSNDTLNAAAEKMRKLAVSHDARLLRPTDDGEAGQTASATSP

SEQ ID NO: 105082 - protein, 125 aa, Oryza sativa
  unsure (1)..(125): unsure at all Xaa locations
  Clone ID: PAT_MRT4530_102356C.1.pep
MNLLGMSIRSIRYIRRLRSRCTSDNRCKVIRKVKCIYKEELQMIXKGTMGMVHLXNMGNLHVFQRHXSXVXTRXPESLVXXEPVARFSTXYSCIXGPIXXXFDXXXXXXTPYCLXKYERCQSLML

SEQ ID NO: 105083 - protein, 94 aa, Oryza sativa
  unsure (1)..(94): unsure at all Xaa locations
  Clone ID: PAT_MRT4530_102357C.1.pep
AGPAARWRRGRASRRGACRPHRRRRRGRPRCTGRGPGGRRAAAAXPPRPSPRRAARPNPSPLLGGNRPSEPERVRRGETGGGGGGGGAEKRKGA

SEQ ID NO: 105084 - protein, 54 aa, Oryza sativa
  Clone ID: PAT_MRT4530_102358C.1.pep
PSNEWSTVVSFWGCWEKFGFCCAFGLINHRSRRQRIQLAECKGMESEQSSYYTV

SEQ ID NO: 105085 - protein, 105 aa, Oryza sativa
  unsure (1)..(105): unsure at all Xaa locations
  Clone ID: PAT_MRT4530_102359C.1.pep
HASADGGXXXAXVXLPFSNXLLPPLLIPPPRRRQPPDRXPTPANDPTPASPPPPFKSHPSXSEFSAVQHQXLASQTILIYSGFLXLLLLLLRXDFDLGRGGGGGG

SEQ ID NO: 105086 - protein, 134 aa, Oryza sativa
  Clone ID: PAT_MRT4530_10235C.1.pep
CKGFDKHQAPRVADATGTGENPRSGSRPSAARPRQPGRAPPPDNRPGKTHRPRRAAQSVHPRGITPKGAQPACPGPHSRPERQQPRPQAVSPASTREDQRDRHKTTRASQAKKRAQPRTAGARPPRPRPHGRPT

SEQ ID NO: 105087 - protein, 492 aa, Oryza sativa
  Clone ID: PAT_MRT4530_102360C.1.pep
MGSSPAAAAVEELTRLYRELPRRPSAEEVEAAAAAVLASEAEAEGAAARLARAEAAAAEGGVSGELLDLLREARANAVLPAIGLLRRRKEAEIVMEVERRFKVFDGLLARASRVAEAGEERVDSAPAESVEEDVRRTPRGFTGGLDDEMVLCEILVRLPARSVLRCRAVCTAWRRLTSDPAFLRAHHHRQRDLPLIYFRRGGSDRVGAIDLHAAQLRPVVDHTWPPLGYTVIASCDGLLLLSSGRFYICNPATNHWAEIPQLVDADFLGLYPHNPSGEYRVLYGEFHGEEECVYHILTLGSDEPRCITMTMGSETVEQPLAREFLMHARGDRSVLVRGNLHWYLRHRDGGCKIMVFDTASESFQWMRHPAIPGWVSLLEMDSTLVFSAVECTTRIDLWVLQDYERSTWACKHRIELPMAQIRQFPECNLEHLGWSAMVVSVEGDVLVRCSNRILHCDRKGNVLASFQFDGQLPMNCLHRLKENLVVHPFFQM

SEQ ID NO: 105088 - protein, 95 aa, Oryza sativa
  unsure (1)..(95): unsure at all Xaa locations
  Clone ID: PAT_MRT4530_102361C.1.pep
GKQTPPLGSPQVPRVFSPPLTLFFRFLQSKGGLPIWFFEPKGLPFXGRILGFFENLNLVLGEAWGVPLKKGPXKFLGRVFFKGGPLPFFFAPGKF

SEQ ID NO: 105089 - protein, 42 aa, Oryza sativa
  Clone ID: PAT_MRT4530_102362C.1.pep
LFKTRARRTTHLSRSGITTPDSAEVATLTTTQGAAPLTGYPA

SEQ ID NO: 105090 - protein, 98 aa, Oryza sativa
  Clone ID: PAT_MRT4530_102363C.1.pep
VSTSVFGILALRTYDATHGGPVRGSVTEQVGSRCFFSSSSSYVSADASSSVSRVVYPGVGGGCQAAAAGSSCCCFLIGSYMTAPGLREMLGQRNERPA

SEQ ID NO: 105091 - protein, 47 aa, Oryza sativa
  Clone ID: PAT_MRT4530_102364C.1.pep
LKRPCFFASLITYPGFWIINYQYLLVASIMFGCCFLRECDDNSNQKK

SEQ ID NO: 105092 - protein, 74 aa, Oryza sativa
  Clone ID: PAT_MRT4530_102365C.1.pep
MGVQLNPKPLLVLREAKALKLREKARSRSRREASKIETKLSGRKTQMDEKEKCGGLKLDFQVKRIYSFRKDTFF

SEQ ID NO: 105093 - protein, 99 aa, Oryza sativa
  unsure (1)..(99): unsure at all Xaa locations
  Clone ID: PAT_MRT4530_102366C.1.pep
HAISGLWDERVVNFGCTMRLADISFMSKFTFIKGFKCHACVQTKQCRKAHNTFEARNLATLELIHFDMCKMNGXKKYFVILIDNCTRFCELVLTWTVES

SEQ ID NO: 105094 - protein, 110 aa, Oryza sativa
  Clone ID: PAT_MRT4530_102367C.1.pep
MAHRRGPTANDDEAQRPPGARRDGKRRHRAHKHGGGAIGGTASAPDSWHLGCDVGSKIPAAATARAVQQSKAGSSSRLTRKRKNVSVVENSGDGGGKVRHQVWRRRSGAE

SEQ ID NO: 105095 - protein, 68 aa, Oryza sativa
  Clone ID: PAT_MRT4530_102368C.1.pep
GKKFFNHFFSILDSPKKPFVRGKKKEKKTKNDHNTVGVLQNVTFRALPLKPKNLFKKRETGPKFWGAL

SEQ ID NO: 105096 - protein, 66 aa, Oryza sativa
  Clone ID: PAT_MRT4530_10236C.1.pep
LVKAVSLCDYSSRTRCFTPTSVLYCTNHRHILMTAFASSRLFCSFCNPPVIFNRRPLLVVASVLKN

SEQ ID NO: 105097 - protein, 48 aa, Oryza sativa
  Clone ID: PAT_MRT4530_102370C.1.pep
SDRCLMGHPWGLLCVGWFIRVNSLFALVGILGEIFFAYVFMYWLKCVN

SEQ ID NO: 105098 - protein, 844 aa, Oryza sativa
  Clone ID: PAT_MRT4530_102371C.1.pep
MGMSSPVTEAEMATVKTSSNGVWQGDDPLHFAFPLLILQALLILLLSRLLALLLRPLRQPKVIAEIVAGILLGPSALGRNKAYLRALFPPWSAPVLESVASLGLLFFLFLVGLELDLRSVRRSGRRAFAIAAAGISLPFACGVGVAFVLRGELPGAARAGYAPFLVFMGVALSITAFPVLARILAELKLLTTPIGETALAAAAFNDVAAWVLLALAVAISGSGDHRSPIVSLWVLLSGAAFVTIWMVFVKPAMAWVARRSDGQGGGEVWVAATLAGVLASGLATDMIGIHAIFGAFVFGLTVPKEGEFAGRVTERVEDLVSELLLPLYFASSGLKTDVATIRGGGAWGMLALVIGTACAGKIVGTFAVAMACGMSAREALVLGVVMNTKGLVELIVLNIGRERKVLDEETFAILVLMALVTTFITTPTVMAIYKPARNAGRRRLHHRKLHGPSAPSSPSAAATAGAKELRVLACIHGGHDVPALINLIETIRGHTQPRRLVKLYILRMVELTERTSSILMARAARRNGVPFLRPRRGGGDQVDVAFDTYAQLGHVHVRPMTAVSALHTIHDDVAAVAEDKRVSLVVLPFHKRHPGHGHGDDLGPEWRAVNRRILREAPCSVAVLVDRGFGGGEQVSSEQVAHGVCVVFFGGPDDREALELAGRMAEHPGVQVTVVRFVDGKEGSEEHAEVTLRPSNTKNADKSYTFSTAIVDTHKEKELDEAAVAEFRQRMGAMVRYEERVVVGNVIEEVVSIGKSREYGLVVVGKGRLPSAMVAELAVRAAEHPELGPIGDALASAGHGVTSSVLVVQQHDMSNADELPVSIVVDGHAHDDGELGGNKDMAEP

SEQ ID NO: 105099 - protein, 42 aa, Oryza sativa
  Clone ID: PAT_MRT4530_102372C.1.pep
FLSRSCLRQYQLEGPGTGRPSSHCRHQAPTASYPRTPHPQEA

SEQ ID NO: 105100 - protein, 322 aa, Oryza sativa
  unsure (1)..(322): unsure at all Xaa locations
  Clone ID: PAT_MRT4530_102373C.1.pep
MSIEKKIWSNSLIHQASGYYVKKNYILKADACELEIAWRIPLIRYLKDPTLKVDWKIRRQAFKYXYRRKIDGVLLKYLDNDQSKVARRIVHEGICGIHQSARKINWLLRRVGFHWPKIIDDCFKYYRGSEACXRISNVQLAPTAVLNPIIKLWLFRGWALDFIGQIYPSSSKGHRFMLDVMDYFTKXAEAVPLENITYTEVIDFIFEAYCSXIRFMSKKVRSXPKFYDIKLLSSSLYYXRLMDKPSRVIKXVEIAILPVEVNLGFLRYFKKDDLSIEDYKTLMGSNFEDVIDKRLKTLKEMKTLQDGVFKAFGKMLRKSYGR

SEQ ID NO: 105101 - protein, 163 aa, Oryza sativa
  unsure (1)..(163): unsure at all Xaa locations
  Clone ID: PAT_MRT4530_102374C.1.pep
MSIEKKIWSNSLIHQASGYYVKKNYILKADACELEIAWRIPLIRYLKDPTLKVDWKIRRQAFKYXYRRKIDGVLLKYLDNDQSKVARRIVHEGICGIHQSARKINWLLRRVGFHWPKIIDDCFKYYRGSEACXRISNVQLAPTAVLNPIIKLWLFRGWALDFI

SEQ ID NO: 105102 - protein, 81 aa, Oryza sativa
  unsure (1)..(81): unsure at all Xaa locations
  Clone ID: PAT_MRT4530_102375C.1.pep
ECKLHKCKCNKXMRQGDERFFTEVRKLVGFLLPVEASPTPPLNHEATARPLRQGVGKVGAGLRRGLPKPXSLRVVLPSLRR

SEQ ID NO: 105103 - protein, 171 aa, Oryza sativa
  unsure (1)..(171): unsure at all Xaa locations
  Clone ID: PAT_MRT4530_102376C.1.pep
LDVIFFHMSREKEFRSNNLIHQASGYYVKKNYILKADACKXEIDWRITLXEYFNDPSLGIDRKIRRQALKYXYRRKINVVLLXDNDQSKVARRVVHEGICEIHQSARKINWLLRRVGFHWPKVIDDCFKCYRGSEACXRIGNVQLAPIAVLNPIIKSXPFGGWALDFIGQS

SEQ ID NO: 105104 - protein, 603 aa, Oryza sativa
  Clone ID: PAT_MRT4530_102378C.1.pep
MAPEARQLKVHLRENEAVAQCVLEKWRSMEEKPGGLKENLAHTLYKSYRNVCAAKEPIRSLKDLYQIKGVGKWVIRQLKGSFPESSPDLSPPESNAAGEKGKKAGGSKRYVPQKNSAAYAILITLHSPDKSKAKPGAFASSQKDWYTGWSCMKTLTSKGLVAKSGNPAKYMITEEGKSTALECLSRSGLDDHAAPLVINSAPDTSNASHKLNNICMTSFVETSSGPSRAIGRPKTSIANPATKTSPEVTYLTSQESLNYNSDVRTAENCAEEIILSDSDSEELYTENYPLIGKTTTNYRFSDCSASISPRSSEGTFEMQSSSTMGIAEFNMLDNDTVCMDNSILAMPPRRSSKNFLEDYEVVLILDDRENFGGRSRKTVDNIHSQFRVPVEIKHLPVGDGIWIARDRKLHTEYVLDFIVERKNVADLCSSITDNRYKDQKLRLKFCYLYEIQFVSYYNPISSCFTTEILEGFDVQRTPGYAETVRTYGNLTHSITEYYSTHFSTGANTSQVCLTYDEFTKKCDDLKKITVSDVFALQLMQVPQVTEEAALAVIGLYPTLFSLAKAYSMLDGDTHAQEKMLKNKSTLINAGASRNIFKLVWAEG

SEQ ID NO: 105105 - protein, 310 aa, Oryza sativa
  unsure (1)..(310): unsure at all Xaa locations
  Clone ID: PAT_MRT4530_102379C.1.pep
ISIHLDILVGYYDFHMSREKEFWFNNLIYQASGYYVKKNLYTKSRCLELEIAXRISLIRYLKDTTLKVDRKIRRQALKYXYRRKIDGVLLXDNDQSKVARRVVHEGICGIHQSARKINWLLTRVGFHWPKIIDDCFKCYRGSGACXRIDNVQLAPTAVLNPIIKIWPFXSWALDFIGQNYPSSSKGHRFMLDIMDYFTKXAEAVPLENITYAEVIDIRYSSNIKGASFMSKEVRSFAESYDINLLSSSLXTLRLMDEPSRVIKXVEITVLPVEVNLSSLRYFKQDDLSVEDYKTLMRSNFEDVIDKRLKI

SEQ ID NO: 105106 - protein, 58 aa, Oryza sativa
  Clone ID: PAT_MRT4530_10237C.1.pep
MAVWCDVFRDFAGGGWVGSPPPAGASFAGRGGGDDRRAKWTESYGLFGTAPTPKFSWS

SEQ ID NO: 105107 - protein, 144 aa, Oryza sativa
  Clone ID: PAT_MRT4530_102381C.1.pep
ATTADRPAPRRARPSPHQGHAAATRPPLADHRAVHRACAGPRSAVARPRRASWPPRHACARSPPSRRAAPARRRRRPSAPRPREARWTAAAPATARLPCMAREQSKEEERKEKKKTRKQQTAMAAGAAWPPRRRAWPPRRRHRL

SEQ ID NO: 105108 - protein, 43 aa, Oryza sativa
  Clone ID: PAT_MRT4530_102382C.1.pep
MSHLADDGLEKIHGGFDLTKDELYKCSKVGFAIEDGKQTMVIF

SEQ ID NO: 105109 - protein, 64 aa, Oryza sativa
  Clone ID: PAT_MRT4530_102383C.1.pep
MDWIGPAGAQYISTSEEEDEGYTGSSSGDTTSALPKKDSNDSYSNSDDNEEGNDCGGKREERGS

SEQ ID NO: 105110 - protein, 67 aa, Oryza sativa
  Clone ID: PAT_MRT4530_102384C.1.pep
TYTPKKQPRQKFCQNLQRTQFQLLWGNTTNTGRNRHGTQVKQLHFSCTLITNPPHRRHIYKNEQTII

SEQ ID NO: 105111 - protein, 434 aa, Oryza sativa
  Clone ID: PAT_MRT4530_102385C.1.pep
MGAYQPLQHHHGGAAAGYFLPRTAVTWLAAACLSLALLHLLCCSPPGGHQAVFSPLLQYFNGNGTYSSNISSSGVEERSSAAASCDYSVGRWVRAPGHARRYNGTACNVKPEQDCVGNGRPETGYLDWRWQPASCELPAFDAAAFLAAARGRHVAFVGDSMARNQAESLHCLLAAAFPHELVAQDAERYKRQFTRWSFPSHGVTLSTYWAPFLVRSGGKPFNYTMPYNLVYLDELGNRWDADAGTMDVVVLTAGHWFWNPAVYHRRGEVVGVHAHPELNATEIGFTSPYREAFRRALERLGSDGRRRTVVLGTFAPPHFDGKPIFDPTACTRTEPYRDGEKEVGSIEREMRSIVFEEATAAAAAAATMRVEVEDVTRLATMRPDGHPGVYMHRDPFAGGGARPERMQTDCLHSCLPGPVDTFNEILLQILSRQR

SEQ ID NO: 105112 - protein, 42 aa, Oryza sativa
  unsure (1)..(42): unsure at all Xaa locations
  Clone ID: PAT_MRT4530_102386C.1.pep
QAHTHAPAVAPGRDGPISNEQLHNSDLSTNIGIGLRPTSLXN

SEQ ID NO: 105113 - protein, 50 aa, Oryza sativa
  Clone ID: PAT_MRT4530_102387C.1.pep
KSAQRSSDATCETLCDIDRIKAVCHMQRHSVVYVTQGRARVQEVNSGGET

SEQ ID NO: 105114 - protein, 220 aa, Oryza sativa
  unsure (1)..(220): unsure at all Xaa locations
  Clone ID: PAT_MRT4530_102388C.1.pep
TRPGRTAWTRRRLARAVLARPGAAEQRDERVARGGAAAAAVTGHGAGVLEELLLVYEFVPNDTLEHHLHGKGVPVMAWTTRLAIALGSAKGLAYLHEDCHPRIIHRDIKAANILLDENFDAKVADFGLAKLTTDTNTHVSTRVMGTFGYLAPEYASSGKLTDKSDVFSFGVMLLELITGRRPVDPTNYMEDXLVDXGRGPLLARAFVGDGQFDELIDQRL

SEQ ID NO: 105115 - protein, 116 aa, Oryza sativa
  unsure (1)..(116): unsure at all Xaa locations
  Clone ID: PAT_MRT4530_102389C.1.pep
ALLLRLFLWCRRRGRRWRRSPPDLWALFLGSGXTVSPPRSASFPGPRGRSGFACPFVHSPTLPPFKPLGNASRXXAGPRPXSRDARLPALSPPASPAAARRARLTASPPHRRLEAA

SEQ ID NO: 105116 - protein, 108 aa, Oryza sativa
  Clone ID: PAT_MRT4530_10238C.1.pep
MAAAAWRGGGSSGCGARPEVAASGSASGERRGGGRAATWGLGAGARRGAKKAAARTVSAVVAVVGRAAGGRGRPDRVDQGPLDAYIIDFNTIHGPMTQKIVTTHLDKF

SEQ ID NO: 105117 - protein, 995 aa, Oryza sativa
  unsure (1)..(995): unsure at all Xaa locations
  Clone ID: PAT_MRT4530_102390C.1.pep
MAAGYYGLPQFRMRAFLWGALPSMVLPKFPLPTHDAVVRGIVPTTFSHSVAAYNEVDTRCLRKALLLADAISDLPKVGNDQPKDVIEYSVAPKTEFQRYIRNNRKDIQDYSFRGDDPSEEGKLFDHQPLKLNKDDYERVQRIPVKKGANFRDLKGVIVGPDNTVRLDPNISRERLSSGKPLIILHPSQDRVLTIRENARLQGFPDYYRLIGPLKEKYIQVGNAVAIPVARALGYALGLAYRGESDGDRAVLKLPESFIYADQETVVKSSAGTPGSEIADSEQLFEYFINPNFFCMMFAFLKVNVVIPLILDSKMGLSRRGAEEGEARRAVPFQNILSWEGWNRLDHRRGEIRLDVRREMDDSPLDNLFDGNGLDSSAGADSSSSTGSPPSSTSSSPPSSQSPPPGSSPPPASPPPSTPSAPPTNSSGSAPSPPSPSQSAPPANTGGGGSPPPSHGSPPAPKAVQSQPAPKRSGDGGSSSDSGSSKEGGSSSDRGKSESNGNRPGPEAAIIAGMVIGFFTFALLLAIVACVCCSKKKKRPPHMHMPYYTDENGKVYYANSMPRWQNSVDQGGGWHAQYSPGQAPPSSEMSGSHGAGPLPPPSPGMALGFSKSSFSYDELALATGGFSSANLLGQGGFGYVYRGVLAGSGKEVAVKQLKAGSGQGEREFQAEVEIISRVHHRHLVSLVGYCIAGSSQRLLVYEFVPNDTLEHHLHGLHIFPALFPAIVTRHSXKGVPVMAWTTRLAIALGSAKGLAYLHEDFCRDKSCHPRIIHRDIKAANILLDENFDAKVADFGLAKLTTDTNTHVSTRVMGTFGYLAPEYASSGKLTDKSDVFSFGVMLLELITGRRPVDPTNYMEDSLVDWARPLLARALSEDGSFDELIDQRLENKFDRLEMERMAACAAAAVRHSAKRRPKMKQIVRALEGDASLDDLNEGVKPGQSMMFSTGSEYDSGNYASDINRLRKVAFESSIEDSSEYGTHSSADSGEPPRRQQHR

SEQ ID NO: 105118 - protein, 1761 aa, Oryza sativa
  Clone ID: PAT_MRT4530_102391C.1.pep
MEAEAEAVADLDEIDREMSRAESRKRQRRTAKEKPGARKGATEWKPEDVEKAAAAEGVAELDEIDREMPRPELRKRQRRTAKEKPSAHEGATEWKPEDVEKAAAQEPEGTELDSGLSPAESRGKRQRGVEKVKRRTRKKTAKEKTKETTEKSAAQAPEKMKVNDAGGALAEDVCADEPDAEQMAMEEEEEAADVLEAEERMGKCVGEGSAEKAATRKRVARPSTARRVEDSDDHFVGDPVPDDEARQRWPVRYSRKGSDSLLKQEPDEDEEMKARCHYLAANVDDEIYHLDDDVYVKAGPDEENYIGRITEFFEGVDRGSYFSCQWFFRTADTVISSKLLKVHDHRHNHKRVFLSKEKNDNLIECIVSKVKIAHVDPNMTPQARAHAISDCDLYYDMSYSVAYSTFANLPADNDGALGSEATSNISCDDADNSSKGKLSADIVAPYSEQTETASLLDLYSGCGAMSTGLCLGFAFSGINLETRWAVDINKYACACLKHNHPYSQVRNEKTEDFLALIQQWDALCRKYVVHKNDTLEPSIDMPLNDADDVNEPLPEDIFDVEELLEICYGDPSNTGKNGLWFKVRWKGYDPSYDTWEPIDGLSDCPERIKEFVEKGHKENILPLPGAVDVICGGPPCQGISGFNRFRKHNDPLEDEKNKQLVVFMDIVKYLRPKYVLMENVVDILKFADGFLGRYAMSCLVAMNYQARLGMMAAGYYGLPQFRMRAFLWGALPSMVLPKFPLPTHDAVVRGIVPTTFSQSVVAYNEVDTRCLRKALLLADAISDLPKVGNDQPKDVIEYSVAPKTEFQRYIRNNRKDIQDYSFRGDDPSEEGKLFDHQPLKLNKDDYERVQRIPVKKGANFRDLKGVIVGPDNTVRLDPNISRERLSSGKPLVPDYAISFVKGKSTKPFGRLWWDETVPTVVTRAEPHNQIILHPSQDRVLTIRENARLQGFPDYYRLIGPLKEKYIQVGNAVAIPVARALGYALGLAYRGESDGDRAVLKLPESFIYADQETVVKSSAGTPGSEIADSEQLFEYFINPNFFCMMFAFLKVNVVIPLILDSRRGLSRRGAEEGEARRAVPFQNILSWEGWNRLDHRRGEIRLDVRREMDDSPLDNLFDGNGLDSSAGADSSSSTGSPPSSTSSSPPSSQSPPPGSSPPPASPPPSTPSAPPTNSSGSAPSPPSPSQSAPPANTGGGGSPPPSHGSPPAPKAVQSQPAPKRSGDGGSSSDSGSSKEGGSSSDRGKSESNGNRPGPEAAIIAGMVIGFFTFALLLAVRACVCCSKKKKRPPHMHMPYYTDENGKVYYANSMPRWQNSVDQGGGWHAQYSPGQAPPSSEMSGSHGAGPLPPPSPGMALGFSKSSFSYDELALATGGFSSANLLGQGGFGYVYRGVLAGSGKEVAVKQLKAGSGQGEREFQAEVEIISRVHHRHLVSLVGYCIAGSSQRLLVYEFVPNDTLEHHLHGLHIFPALFPAIVTRHSEGRAGDGLDDEARHRARLSQGPRVPSRRFLQGQILSVRPSNDLICCIVVVTYEGHPRIIRRDIKAANILLDENFDAKVADFGLAKLTTDTNTHVSTRVMGTFGYLAPEYASSGKLTDKSDVFSFGVMLLELITGRRPVDPTNYMEDSLVDWARPLLARALSEDGSFDELIDQRLENKFDRLEMERMAACAAAAVRHSAKRRPKMKQIVRALEGDASLDDLNEGVKPGQSMMFSTGSEYDSGNYASDINRLRKVAFESSIEDSSEYGTHSSADSGEPPRRQQHR

SEQ ID NO: 105119 - protein, 117 aa, Oryza sativa
  unsure (1)..(117): unsure at all Xaa locations
  Clone ID: PAT_MRT4530_102392C.1.pep
NARIVSSRPLRLACLLSSSRRRPTAAPPPATPTKHKDARSAACVAVEPKPRSRRWHSSMRMRGPRCRVACVVVVTPESRGATASHSSHPSASGSSNRRWCCSLVLEXWEELLGEDGG

SEQ ID NO: 105120 - protein, 69 aa, Oryza sativa
  Clone ID: PAT_MRT4530_102393C.1.pep
MVVLGLPMAGGVHSAHVHGGVAWHSFKQLLDARRGSHVPGLAELKRARPARRRCRGAATGLLDQPGCFV

SEQ ID NO: 105121 - protein, 46 aa, Oryza sativa
  Clone ID: PAT_MRT4530_102394C.1.pep
TLAYLSVTHYAEASDAVDNVKAKIQDKEGIPPDPQRLIFAGKQLED

SEQ ID NO: 105122 - protein, 218 aa, Oryza sativa
  unsure (1)..(218): unsure at all Xaa locations
  Clone ID: PAT_MRT4530_102395C.1.pep
MDPELNTRPDGAEIEHLSADRLGAEVLTARRTLTTDMATSAPTASALRDDTLDLDHTLFYDEPNYKAFDNGIVKSQSVRSLIVEEVIESQGVEVDVKMQKMEAVEANEARSHEYEGVKKEEATKAHEASSQAVPTIGNHVEDDNQEGDGSMGRGGEETLTYAQLASGVRYLLQEKAYTRAEGEETLLNNGLSVDLLDQYSEGDDDTPEEEXYEDEYVV

SEQ ID NO: 105123 - protein, 132 aa, Oryza sativa
  unsure (1)..(132): unsure at all Xaa locations
  Clone ID: PAT_MRT4530_102396C.1.pep
RSDRPAXRSDRPTLCRFRFRVVSLDIRDCFMVMASRWILYREAIKLSSTLRVLRXCFIGFRRSNRHLSGGQTGGIGAIRPAAXGRSDRWRRQQAAADQAVXTGVPISVRPVAFRRSDRHDYLGRTAIHRFRG

SEQ ID NO: 105124 - protein, 107 aa, Oryza sativa
  Clone ID: PAT_MRT4530_102397C.1.pep
MAAPFSNLGVATVSSGRPDPNATSSRWPPHGDSDGLLLTAHSALQRTLRWHSLIRTDTISGRPPPVGGGGTLSSRGNLLLTAHGGHGTPSHRQCDPPVDTLLQPLFL

SEQ ID NO: 105125 - protein, 77 aa, Oryza sativa
  Clone ID: PAT_MRT4530_102398C.1.pep
TRRAPQARASLSSSMRAWVMWRGLVGFGDEGWRRWVWREVSGSEPHQTWQKLADQIFMHVFFKKKINFCMFDISILI

SEQ ID NO: 105126 - protein, 34 aa, Oryza sativa
  Clone ID: PAT_MRT4530_102399C.1.pep
NSARGRLLLVRFCFLFKPNAPPHRLRSPPRLTQP

SEQ ID NO: 105127 - protein, 127 aa, Oryza sativa
  Clone ID: PAT_MRT4530_10239C.1.pep
MAHLPLHPGVVCHCQCPVPRVVLVVQPNISNARLVWPASTLDTATTRRGEFEKRLALRERRSGHHFISFSFSSTMPKEPNCLAAARIHLDKAGSCPIESSRMEANGYVILSSWQETPIVRSERWHRV

SEQ ID NO: 105128 - protein, 44 aa, Oryza sativa
  Clone ID: PAT_MRT4530_1023C.1.pep
IETSWSAVKKKSGTCVPLEKKCVSLIGSLHVLLPAWSSTCAWKA

SEQ ID NO: 105129 - protein, 73 aa, Oryza sativa
  Clone ID: PAT_MRT4530_102400C.1.pep
KTNRSYTSQIHKQPVCIHRLDIQMYYEFRKMEYIQCQQCSRAELYMGTIDGRGLLFMGTRCGWIGFHLDQMSN

SEQ ID NO: 105130 - protein, 288 aa, Oryza sativa
  Clone ID: PAT_MRT4530_102401C.1.pep
MVSSSNPGRTPPLVAAIVCSVLLLAGGAAGNFYQDVDITWGDGRGKILGNGQLLTLSLDRSSGSGFQSKNQYLYGRFDMQIKLVPGNSAGTVATFYLSSQGSQHDEIDFEFLGNASGEPYTVHTNVYSQGKGGREQQFRMWFDPTKDFHTYSVLWNPSHILFYVDGTPIREYRNTEATTGVAFPRAQAMRVYASLWDAEEWATQGGRVRTDWSRAPFTASYRGLAASGCTSQDATACANPGSPWMYQQQLDSASQDRLRQVQRDYMIYNYCADTYRFPQGLPPECTAK

SEQ ID NO: 105131 - protein, 87 aa, Oryza sativa
  unsure (1)..(87): unsure at all Xaa locations
  Clone ID: PAT_MRT4530_102402C.1.pep
LLVVSSFLWLXLTSMAXGGRNMLIXQRSVXXMETXSDDESXHQGQEDDEMLAMVPERIXRXVKTXDYGTFDPTPTLAYSLTPQEIPN

SEQ ID NO: 105132 - protein, 228 aa, Oryza sativa
  Clone ID: PAT_MRT4530_102403C.1.pep
ARGRQAQLYRIVELYLQKANLAVIRRCADTELAIADAVNVEKDISERSSSKSVYVNLCSQATRQPAKGKSESDASDLIEKSESENGPLPQQKTVGFSNVEEALKMAGLLDSPPNSPERKNTIIEGGCIVDTDSEPSKKLQSTSDSIVRDISSHKDADDSSMLIDLHDENGQNLHTVTSSQQSKHTGDEHQKLILGEESTDVTANKIVSVNLDEAGCSAEHGNSNGSNK

SEQ ID NO: 105133 - protein, 1201 aa, Oryza sativa
  Clone ID: PAT_MRT4530_102404C.1.pep
MAVEEVQALRKEFDAQQASSHHQPVRKKQISFGPEDAEGVLFPHQEPLVISAEVAGFEVRQILVDGGSSANVIFAEAYAKMGLPTLALTQAPTSLRGFGGEAVQVLGQVQLAVAFGTDENRREEQILFDIVDIPYNYNAIFGRATLNKFEAISHHNYLKLKMPGPAGVIMIKGLQPSATSKGDLAAINRAVHNVEAEPHDRAKHMPKPAPHGKVVKMQIDDVDPTKFVLLGGDLGEREAENILKVLKKNIDIFAWGPDEVGGVSTDLIMHHLAVKPDARPRKQKLRKMSADLQEAAKAEVQKLIKAGVVREIDHPEWLANPILVWKSNGKWRLCVDFTDLNKVCLKDDSPLSRIDQLVDSTAGCELMSFLDAYSGYHQIHMNPADIPKTVFITPFGTFCHLRMPFGLRNTGATFAKLKTFDNLRTAGMKLNPEKCVFGVRAGKLLGFLVSERGIEANPEKIDAIQQMKPLSSVREVQKLAGRIAALCRFLSTAAERGLPFFKTLRGAGKFSWTPECQAAFDELKQYLQSPPDLVSPAPGSDLLLYLAASPVAVNAILIQETESGQKPVYFVSEALQGAKIRYIEMEKLAYALVMASRKLKHYFQAHKVTVPLQYPLGEVLRGKEITGRLSKWAAELSPFDLHFVARTAIKSQILADFVAEWTPAFAPKPEPAKQPWVMYSDGSWSHKGASAVAVVAPPGGVPIRYAARLQFDTTNNTAEYEAVLLGLRKAKAVGVRRLLIRTDSKLEASHVDKSFEPKEEGMKRGQNKEADALAKSAACGGPHSPGIIFEVLYTPIVPTESLDIMAIDQAELGEDPEDWQTPFIKYLKNGWLPEDEAEAKRLQLRAARYKLVSGQLYRTGVLQPLLHCISFAEGEEMAKEIHKGLCGAHQAARTVASKVFHQGVYWPTVLKVCVEQAKKYESCQRWGLDIISPFPVARNGYKFTIVAIEYFSRWIEAEPLGAITSAAVQKFVWKNIVCRFGVPKEFITDNGKQFDSDKFREMCKGLNLEIRFTSVAHPQSNGTAERTNDKILEALKKRLEGAAKGKWPDEMLSILWALRTTPTRPTKFRPFMLLYGDEAMTPTEIGANSRRVMFSRGEDGREVSLELLEGVRVEALEHMRKYATSTSTTYNKKVRLAKLLPGHLVLRKKANPVAVGKLESKWEGPYLIKHRSRTGSFRLATLEGEEFDHCWNAASLKRFYV

SEQ ID NO: 105134 - protein, 1078 aa, Oryza sativa
  Clone ID: PAT_MRT4530_102405C.1.pep
MEAMRQKMTQLQDMLRQMQEQQQAYEAARQAKVASAPILQYSAGYIPPQVYPQAPIQALPPQVMQAPAYFAGRSFKLSFSNSANPTTLQPSPGASPWSQGPQFNLSNAIQAPTTRPQVTTLGCGTNQAQNQVAMAWTQPPFDPSMVAHQVPPFGAGQPNTVVQPHALVMTSPFATPYPQPNGPSQQGTVSKAGGEKGLPLSGGIKICPISPQFKFPPVLRYSGETDPKEFLSIYESAIEAAHGDENTKAKDITEVSVINAASAGLLEGKLTRKISNRSRRHSSTCFTSLTAQVQAQVAEPAPLAIHQPQPANQGQPPRPSQAPMTWRKFRTDRAGKAVKAVEEVQALRMEFDGQQAGSHQQPIRKKKKMQLRMVHNITSTGEGAPRYLNQQISFGPDDAEGVLFPHQDPLIILAEIVGFEVRRILVDGGSSADVIIAEAYARMGLPTLALTQAPTSLQGFGGEAVQVLGQVQLAVAFGTSDNRREEQILFDVVDIPYNYNTIFGRATLNKFKAISHHNYLKLKMPGLAGVIMVKGLQPSATSKGDLAAINRAVHNVEAEPHVRAKHIPKPASHGKVIKVQVDDADPTRFVSLRGNMGEKEAESILEIDHPKWLANPVLVRKSNGKWRMCVDFTDLNKACPKDDFLLPRIDQLVDLTAGCELTSFLDAYSGYHQIHMNPADIPKTAFITPFGTFCHLRMPFGLRNAGATFASLVYKVLYKQLGRNVETYVDDIVVESHKAFDHASDIQETFDNIRSAVQPSSKRESGQKPVYFVSKALQGAKLRYIEMENLAYALVMASSKLKHYFQAHKVTVPSQYTLAEVLRGKEITGRLNKWVAELSPFDLHFVARTAIKSQVLAAFVAKWTPAFASETEPIEQPWVMYSDSSWSHKGAGAVAVLTSPGGMLIRYAARLQFDTTNNTAEYKAVLLGLRKAKALGVRRLLIRTDSKRVASLLDKSFEAKEEGMKRYLEAIRSMEKCFAGITVEHLPRGQNEEADALAKSAASGGPHSPGILFEVLYAPSVPTESLDIMAVDQAELGEDPEDWRTPFVKYLKNGWLPEDEAEAKRLQLKAARYKLVSG

SEQ ID NO: 105135 - protein, 449 aa, Oryza sativa
  unsure (1)..(449): unsure at all Xaa locations
  Clone ID: PAT_MRT4530_102406C.1.pep
PPDLVSPAPGSDLLLYLAASPVAVNAILIQETESGQKPVYFVSEALQGAKIRYIEMEKLAYALVMASRKLKHYFQAHKVTVPLQYPLGEVLRGKEITGRLSKWAAELSPFDLHFVARTAIKSQILADFVAEWTPAFAPKPEPAKQPWVMYSDGSWSHKGASAVAVVASPGGLPIRYAARLQFDTTNNTAEYEAVLVGLRKAKAVGVRRLLIGTDSKLEASHVDNLFDXEEGMKRYLEVVRSMEKCFTGITVXHLPRGQTKEADALAKSAACGGPHSPGIIFEVLYTPIVPTESLDIMAIDQAELGEDPEDWQTPFIKYLKNGWLPEDEAEAKRLQLRAARYKLVSGQLYRTGFVLSKLRSTKAVSGIAEAKQHPIMSCNLSHQSSLSPDGAEPLGAITSAAVQKFVWKNIVCRFGVPKEFITDNGKQFDSDKFREMCKGLNLEIRFTSV

SEQ ID NO: 105136 - protein, 755 aa, Oryza sativa
  unsure (1)..(755): unsure at all Xaa locations
  Clone ID: PAT_MRT4530_102407C.1.pep
EHQGKANSIYSWEQLRDVFVLNFRGTYEESKTQQHLLGIRXEAEGSIREYIRRFSXSQWQVQDITEAPVINAASAGLLEGELTRKIANXEPQTLEHLLRIIDGYARGEEDYKRWQAIQAEYDKAFIAAAQAQVQAQVAEPAPLAIRQSQPANQGQPPRPSQSPMTWRKFRTDRAGKAVMAVEEVQALRKEFDAQQAGSHQYPVRRKLKMPGPASVIMVKGLQPSTTSKGDLAAINIAVHNVEAEPHDRAKHMPKPAPHGKVIRVQVDDADPTRFVSLGGDMGEREAENILEVLKKNIDIFAWGPDEVGGVSADLIMHYLAVKPDAKPRKQKLRKMSVDRQEAAKAEVQKLLKTGVIQEIDHPEWLANPVLVRKSNGKWRMCVDFTDLNKACPKDDFPLPRIDQLVDSTAGCELMSFLDAYSGYHQIHMNPAHIPKTAFITPFGTFCHLRMPFGLRNAGATFARLVYKVLYKQLGRNVEAYVDDIVVKSRKAFDHVSDLQETFDNLRVAGMKLNPEKCVFGVRAGKLLGFLVSERGIEANPEKIDAIQQMKPPSSVREVQKLAGQIAALSRFLSKAAERGLPFFKTLRGAGKFSWTPECQAAFDEVKQYPQSPPTLVSPALGSELLLYLAASPVAVSAALVQETESGQKPVYFISEALQGAKLRYIEMEKFTYALVMASRKLKHYFQAHKVTVPSQYTLGEVLRGKEITGWLNKWVAELSPFDLHFVARTAIKSQVLAAFVAEWTPAFAPETEPIE

SEQ ID NO: 105137 - protein, 141 aa, Oryza sativa
  Clone ID: PAT_MRT4530_102408C.1.pep
QTTAYGGRGGVANSSFCKSIFKSELEIKYELVRTITSCGNLDEGFHGHVNFIAKGDCKNSEELFFAEVRWENNGYIPTCMVSLEGKEKIGGYYGARVHYPRGVPGLPIDKQHCYFCGDELKHPEDGTLYESGHVASSDYYE

SEQ ID NO: 105138 - protein, 47 aa, Oryza sativa
  Clone ID: PAT_MRT4530_102409C.1.pep
ECNSKLVPSTDPLFFLSKDRFIMKHQTKPKGFFLLNHESNIELFSLD

SEQ ID NO: 105139 - protein, 177 aa, Oryza sativa
  Clone ID: PAT_MRT4530_10240C.1.pep
MEGFAGFYRKQRRWRERWSTTARLGVDLEVGRRRGKVAAIFEYVTYPLESGSIDLSAIDIHSGAAGVSATTPPSPSLAAGQLDAPPPPSAAARPRRPTATKRPRRYCSPAAQFPSAPSSSLSLCFISISLQLIGALTAGGGAQREWWRTAEWWRRTAAGVVANGGEVVALTAVPSDA

SEQ ID NO: 105140 - protein, 56 aa, Oryza sativa
  Clone ID: PAT_MRT4530_102410C.1.pep
SKAVLNHHCATPIYTKTQLAVPCWILAPLDFRCHYIWVAVYLGCSTSGVVYFHHVL

SEQ ID NO: 105141 - protein, 106 aa, Oryza sativa
  Clone ID: PAT_MRT4530_102411C.1.pep
WHEALYEALLKVKEELDASWVHLRLLLTVFQVLIQRTCIPPRWTVHMLPCQREAVGPAKEHVAAAQIVGRIGRRWLSEGGAGAELCQKKGKVPLLSLEAIHQLHIF

SEQ ID NO: 105142 - protein, 62 aa, Oryza sativa
  unsure (1)..(62): unsure at all Xaa locations
  Clone ID: PAT_MRT4530_102412C.1.pep
SLELSTSTHVMAKNSNRIESALLDDDDAFDQTMQMSDTVNYLXRLAWTPSSEXHDHPKGFLG

SEQ ID NO: 105143 - protein, 181 aa, Oryza sativa
  Clone ID: PAT_MRT4530_102413C.1.pep
MGRQCSSRWHYWRHQITARKQNVVPVQAQLRFNHAQREKHQNRGGTFFDRKANAVHKGISSARPGGDDAAAWPKLRPHRVKLPIWRTAASSPRPASSLGGRHGSGGGAAAEEASSRLPPARPDRTPDVISLGPLLAFPAAASSGSDGNKRSQRMRAWSIAINMWPFDRQHVHACVRGSGKL

SEQ ID NO: 105144 - protein, 68 aa, Oryza sativa
  unsure (1)..(68): unsure at all Xaa locations
  Clone ID: PAT_MRT4530_102414C.1.pep
MAATLFSTSLTPTFLPDVPCPKPAXXGSACFPCALXXXXVSKRRLRRRLSPVARVREXERGAESRESQ

SEQ ID NO: 105145 - protein, 210 aa, Oryza sativa
  Clone ID: PAT_MRT4530_102415C.1.pep
HAFATVFLPLDEACLLDVNHIEEAGIRAGLVEEFMIIDENPGDETLILSLQAIQQDLAWERCRQLQAEDVVVTGKVIGGNKGGVVALVEGLKGFVPFSQVSSKSTAEELLDKELPLKFVEVDEEQGRLVLSNRKAMADSQAQLGIGSVVLGTVESLKPYGAFIDIGGINGLLHVSQISHDRVADISTGLQPGDTLKVMILSHDRERGRVV

SEQ ID NO: 105146 - protein, 379 aa, Oryza sativa
  Clone ID: PAT_MRT4530_102416C.1.pep
MASLAQHVAGLASPPLSGAPRRRPAAPTRPSALIKGTVFMTTSNGAYVDIQSKSTAFLPLDEACLLDVNHIEEAGIRAGLVEEFMIIDENPGDETLILSLQAIQQDLAWERCRQLQAEDVVVTGKVIGGNKGGVVALVEGLKGFVPFSQVSSVYVHVHGMSCLSSAVLNHIVNTSCPLFYKPLLDLDQKSTAEELLDKELPLKFVEVDEEQGRLVLSNRKAMADSQAQLGIGSVVLGTVESLKPYGAFIDIGGINGLLHVSQISHDRVADISTVLQPGDTLKVMILSHDRERGRVSLSTKKLEPTPGDMIRNPKLVFEKADEMAQIFRQRIAQAEAMARADMLRFQPESGLTLSSEGILGPLSSDTPSEGSGEGQTTDE

SEQ ID NO: 105147 - protein, 69 aa, Oryza sativa
  Clone ID: PAT_MRT4530_102417C.1.pep
MEGAKGLLSLREVSTKNPRASRWCQACIDAKKQCGFHPFLARRMMLETPSTSCRDFLVSGIKSDVARKA

SEQ ID NO: 105148 - protein, 438 aa, Oryza sativa
  Clone ID: PAT_MRT4530_102418C.1.pep
MASLAQHVAGLASPPLSGAPRRRPAAPTRPSALVCGTYALTKEERERERMCQLFDEASERCRTAPMEGVSFSPEDLDSAVESTDIDTDIGSLIKGTVFMTTSNGAYVDIQSKSTAFLPLDEACLLDVNHIEEAGIRAGLVEEFMIIDENPGDETLILSLQAIQQDLAWERCRQLQAEDVVVTGKVIGGNKGGVVALVEGLKGFVPFSQVSSVYVHVHGMSCLSSAVLNHIVNTSCPLFYKPLLDLDQKSTAEELLDKELPLKFVEVDEEQGRLVLSNRKAMADSQAQLGIGSVVLGTVESLKPYGAFIDIGGINGLLHVSQISHDRVADISTVLQPGDTLKVMILSHDRERGRVSLSTKKLEPTPGDMIRNPKLVFEKADEMAQIFRQRIAQAEAMARADMLRFQPESGLTLSSEGILGPLSSDTPSEGSGEGQTTDE

SEQ ID NO: 105149 - protein, 381 aa, Oryza sativa
  unsure (1)..(381): unsure at all Xaa locations
  Clone ID: PAT_MRT4530_102419C.1.pep
LGFYQVSQMVGMSVDRFLIGALVERWQPETNTFHLPVGEMTISLQDVSCLWGLPIQCEPIIGKSEGPWVDEIETLLGVTPGKQTSSNYSISLKKLXDQFKEMPENATKEQIEHYTRAFILDILGSMIFPDTLGDGVTAMYLQFLQDLDKPKEYNWGAATLAVLYRQLSFGAEXERLEMAGPLVLLQHWCGSRLRPGRPVDQDRNPISWGEPDPESCPTFGAKWCGQELYPLPHNSGVAFYRNLLDQVQDNEVSWESYNGLLMSMPRRVRAERAFWYSRVPLIHFWIIEFHYPDRVMRQLGRKQTIPPPPPHDESKLRQLHKINHTGKPRDWRKLHAEYVNQYNRVWQSMVDEEQHFDQASFATISSLVSTVWDVSAATFPG

SEQ ID NO: 105150 - protein, 66 aa, Oryza sativa
  Clone ID: PAT_MRT4530_10241C.1.pep
MDSITERCSYVFADKEDWAVQFSDTHGDSYITANAKLSRPSLRKKNWTFKRTCRIAIYFLKEEIFI

SEQ ID NO: 105151 - protein, 142 aa, Oryza sativa
  unsure (1)..(142): unsure at all Xaa locations
  Clone ID: PAT_MRT4530_102420C.1.pep
ESMFNQQGQVSTHXINMYTRCHCNLSHRSIQLLSVHPXSLLRFLLITGRTWHLTQDCIGFRSPAKGXVLRCTGPGNRISYIGVVXAASFSTSWIALVWLVCLSTYLXYILVNLXLVARFTCIGXDSLLGLCQYRLNPFARLY

SEQ ID NO: 105152 - protein, 278 aa, Oryza sativa
  Clone ID: PAT_MRT4530_102421C.1.pep
MRTNQDGLGRSVTISDEEIGLLDGDQTLVQQTELNVSERFSALLWMPHCQHKISKVWENANDGVSVRYHHVGIPYHYLCEPLLKRLGFYQVSQMVGMSVDRFLIGALVERWRPETNTFHLPVGEMTVSLQDVSCLWGLPIQGKPRDWRKLHAEYVNQYNRIWQSMVDEEQHFDQASLPQYRHWFQQYGMYTVFWMLDPLKDINMEAKLSSMLSESGLPLCVDDIRSDDSASPFSTPKPIKPEEINMDVMDNWLYSNRGFTRYLSLGTYSDVLESQDKH

SEQ ID NO: 105153 - protein, 909 aa, Oryza sativa
  Clone ID: PAT_MRT4530_102422C.1.pep
MFSWLLRIASACLGPARRYARTRKDEDGGDNGGGVADGLLWSRDLGRHAAGEFSFAVVQANEALEDHSQVETGSAATFVGVYDGHGGADAARFISDHLFAHLIRLARESETVSEEVVRGAFSATEEGFLTLVRRTQFLKPMIAAVGSCCLVGIIWRGVLYVANLGDSRAVVGYLGRTNKITAEQITRDHNACKEEVRQELISRHPDDSQIVVLKHGVWRIKGIIQVSRTIGDAYLKRREFALDPSITRFRLSEPLRRPVLTAEPSICTRVLSLQDQFVIFASDGLWEHLTNQQAVDIVYKNPRAGIAKRLVNTALKEAARKREMRFVDLKKVEKGVRRFFHDDITVVVVYIDHELLQEKNVSVPELSVRGFVDSANDGVSVRYHHVGILYHYLCEPLLKRLGFYQVSQMVGMSVDRFLIGALVERWRPETNTFHLPVEEMTVSLQDVSCLWGLPIQGEPIIGKLEGPWVDEIETLLGVTPGKQVMKQKKRKADGDLESGGNMTSSNYSISLKKLRDQFKEMPENATKEQIEHYTRAFILDILGSMIFPDTSGDGVPAMYLQFLQDLDKPKEYNWGATTLAVLYRQLSFGAERERLEMAGPLVLLQHWCWSRLRPGRPVDQDRNPISWGEPDPESCPTFGAKWCGQELYPLPHNSGVAFYQNLLDQVQDNEVSWEPYNGLLMSMPRRVRAERAFWYSRVPLIHFWIIEFHYPDRVMRQLGRKQTIPPPPPHDESKLRQLHKINHTGKPRDWRKLHAEYVNQYNRIWQSMVDEEQHFDQASLPQYRHWFQQYGMYTVFLDARSAQGLWDPIPYPLDNFDWTGYMPSGPPLSRLDINMEAKLSSMLSESGLPLCVDDIRSDDSASPFSTPKPIKPEEINMDVMDDWLYSNRGFTRYLSLGTDSDVLESQDKH

SEQ ID NO: 105154 - protein, 152 aa, Oryza sativa
  Clone ID: PAT_MRT4530_102423C.1.pep
MAVEEITEGVRNLAVEGEPAAAAAAAGGGGEGAQRRAAGSSSNRIQVSNTKKPLFFYVNLAKRYMQQHGDVELSALGMAIATVVTVAEILKNNGFAVEKKIRTSTVEINDESRVRPLQKAKIEIVLEKSEKFDELMAAAAEEREAAEAEEQA

SEQ ID NO: 105155 - protein, 106 aa, Oryza sativa
  Clone ID: PAT_MRT4530_102424C.1.pep
ILVFNRTVLVNTKNYTFFFHHYPCCDLGPKAQKSPGLLVAALQGKGPTNPGRPMGENSHGMGPTFFSHPLPGGLKWVDFKGRRGKNCRFGDMLPFRPGGFGPKLTF

SEQ ID NO: 105156 - protein, 63 aa, Oryza sativa
  Clone ID: PAT_MRT4530_102425C.1.pep
IPHKICLMISVLELESCQVWNMVLPGYEVSMKCPRTYNAQLTAWLHNARDQGQYFEYSCKYLL

SEQ ID NO: 105157 - protein, 75 aa, Oryza sativa
  Clone ID: PAT_MRT4530_102426C.1.pep
PRLVPAIAGIKQSEVGRGIHMWQFYCQCLIFVRLVCYLLDLDITNARCIITSIERGVFFFKRPKMCFEGKKKKKK

SEQ ID NO: 105158 - protein, 332 aa, Oryza sativa
  Clone ID: PAT_MRT4530_102427C.1.pep
MPPTKKDKGKEKIKEPKPSDDFYLDLGDLPKSYANLMKDIPRRLEEIIKAEAPSTSKGKKLFKKISGKLYTAQSGTFLVHLTPDKDTADSGRVSLLFRWKDLYFEGFYSKGIWFRLQDFQAELPPQSQLPYAAKGGKGVVILSIESNYAGIGGNTIYMGSDAFDKCLKAMLRAPDLEGHRLYSVLKSNRVLAVPVVGISEPLRFPQFQEWVLSTLSPPPTDADHSSSSDDPSPGTDAAESYSAGMGTGRDKKVPEKFSFYFTKWGTLSEGLLNNSVPEEFSTMSIDEMAALLGILRWMEGMSLPAPRSGTHDSEASSSRPSRATKGKHNTSK

SEQ ID NO: 105159 - protein, 192 aa, Oryza sativa
  Clone ID: PAT_MRT4530_102428C.1.pep
MASDGAAATPAKASPKKANLLDPHSIKHLLDETISDVVKSKGYAEDTRLGNWKLAIGAAVIAIALLAQFYPKKFPQNREFLLGCIALYVVLNVVLLILSYTKEKDAIMFTHPPAGSFNSTGLVISSKLPRFSDMYTITIASADPQSISANKPVHFTKSVTKWFTKEGVLVEGLFWKDVERLIDDYNTERKGK

SEQ ID NO: 105160 - protein, 79 aa, Oryza sativa
  Clone ID: PAT_MRT4530_102429C.1.pep
PACHVAAQGGFRPKRSARAAPWFPLPPFRAPFLTSLTLSRCTDRLTDNLNVRGTCARLNISYHLWTQIKPTSINRAKFG

SEQ ID NO: 105161 - protein, 404 aa, Oryza sativa
  Clone ID: PAT_MRT4530_10242C.1.pep
MHSGYALLSSVLLVLLALSIITLVPRMPSPQSFFRSPPPRLINSRVPHPSDASDCIFSDGKWVRDAAAVTAYREDCPFLDPGFQCISNGRSNSSFRYWRWQPHGCQLPKFNATDMLERSRNGRIVFAGDSIGRNQWESMVCMLAASVPAGKSRIYEQSGKPISRHKGYLAMVFADYNLSVEYYRAPMLVMIDRFPASSGAVRGAVRLDMLPRHANRWAGADVLVFNTGHWWNEHKTIKSGNYFMVGDRLNMSMDMKEAFRCPSGGGVVAGARREVRRSRGCMRRDGLWRRRDEDDGEEEDIAVDERDSLGLPLPVVSNCSSSECEYMAESEAELAKTEEEKCASASSASEYEKTSQSSTRSVAFHGAADAGGDGHKLSVSAASIIGQAATSFQKSRGKITNPKK

SEQ ID NO: 105162 - protein, 56 aa, Oryza sativa
  unsure (1)..(56): unsure at all Xaa locations
  Clone ID: PAT_MRT4530_102430C.1.pep
SPLLYSRLFIYQTNKMIMVACXXQKKKKIKKRKKKKKKKKKKGAIIIYKKRGGRSK

SEQ ID NO: 105163 - protein, 106 aa, Oryza sativa
  Clone ID: PAT_MRT4530_102431C.1.pep
RHETNHLSSPLFLSLLPPRDPTGRRGHRRRRRRARASPSLPPSPGSGSFHPSPAFHGPPPLRRGAHRGQPDALTVRCEATRPTGPASDRHRDPPFSSADEKGDLTG

SEQ ID NO: 105164 - protein, 63 aa, Oryza sativa
  Clone ID: PAT_MRT4530_102432C.1.pep
KGKICYRTLKKHGADAAEVVDGEVGDRAPRAADGAEADAVGEGTRGRRRGARAGGGHYRRRGL

SEQ ID NO: 105165 - protein, 66 aa, Oryza sativa
  Clone ID: PAT_MRT4530_102433C.1.pep
MPAAPSNGRLFRFLPPHRRPQGTDVAAAAGWTVAGVATAVWLVQPFDWIKKTFLEKQEAEEGRTEA

SEQ ID NO: 105166 - protein, 102 aa, Oryza sativa
  unsure (1)..(102): unsure at all Xaa locations
  Clone ID: PAT_MRT4530_102434C.1.pep
MQSTSVLAILALAFGCALAFDATLNQQWDSWKGVNNKAYTNEEELLRRGIWESNLKIVQQHNLEADMGXHTFYLGMNKFADLTNAEFVQAMNGYHVTMRRER

SEQ ID NO: 105167 - protein, 85 aa, Oryza sativa
  Clone ID: PAT_MRT4530_102435C.1.pep
MARRAAGKGLASPRLLRRLAADPVSGMGKRARHGGFARSHSPYFESQLRRLITDAGLSASSAEDVAIALRSRFPEFRRYKLDPFA

SEQ ID NO: 105168 - protein, 81 aa, Oryza sativa
  Clone ID: PAT_MRT4530_102436C.1.pep
MGDPIVRARKLGEPRGGKNPTAYSTTMCSAKEKYATLSELELDLKLYLNAAATSSLSSISTDICLKLEIEELAKISLTHFW

SEQ ID NO: 105169 - protein, 64 aa, Oryza sativa
  Clone ID: PAT_MRT4530_102437C.1.pep
ALAAGYTPPPPPPPPPLVSGCSNSPPPRRRWGKRTSRLHSPSETLAAAVWVEKMENGSAERSPA

SEQ ID NO: 105170 - protein, 90 aa, Oryza sativa
  Clone ID: PAT_MRT4530_102438C.1.pep
SNCNYLEATITDPHFGCAQPLLTNEQKVLQRRMVILASTPSLKMQLGQGQSTDSDSTIRGSPCCKDIVNIVWILAQLYALRVWGVLLHCS

SEQ ID NO: 105171 - protein, 54 aa, Oryza sativa
  Clone ID: PAT_MRT4530_102439C.1.pep
THASGNSPRTKGICIGHVSAHGNEVQTSEVQTDLCLPFPPCTILIAILQLETHH

SEQ ID NO: 105172 - protein, 176 aa, Oryza sativa
  Clone ID: PAT_MRT4530_10243C.1.pep
RPGTTRGRRPEPARSRRGQPAAAARRRGRRGTRRCDADDGGGAARRRAGEDERAAEGTSATMRMERPARATAFRRNKGAAGGEDNAATSIGVPATYRSRPEAGRYWTPTRRPLRQASGEEEVMPGMRAASRSRGRWRRRRLPHRRGTVAGWREYSGTNATGCRRGHRSGEFPARRR

SEQ ID NO: 105173 - protein, 113 aa, Oryza sativa
  unsure (1)..(113): unsure at all Xaa locations
  Clone ID: PAT_MRT4530_102440C.1.pep
FTTTLFIIYLGRIXLTEGRLYPHIIKPGCFNTDPIFXQQQVHXGTRLHSTLVGMWLDPLGWRTGSPEKIKELGTKETKNGRFDMLPALGAXFHAETTAPYSICNLFAHIAYPG

SEQ ID NO: 105174 - protein, 344 aa, Oryza sativa
  Clone ID: PAT_MRT4530_102441C.1.pep
MKPASRKRGPPAPDPVELPPPGFVADRAEAAARVERLLRYQFRDGRLLEEALTHQSFADDAVSYQRLEFVGDSALGLAFSNFLYLTNPTLGPGPLSTLRAANISTEKLARVAVRHDLYPLLRRNCPRLDLLVGQFIETVKQEPEDDLSTVPYGGSVVKAPKVLADIVEAIAAAVYVDCKFDLEKLWKRLTWLHGLQEIRWTVNTNNIKDWINNFIYGKRLVTRWLFEPIITAETIDEQPVTMLHELCQKHGKMAQFKTWQKGGMTVVNVFVAGELVGIGSSEQKVIAKLNAARDATRKLAGAKKQVLTTGVGNGLGDEIGELRECKQKLNEQCSRQNWPKPIFK

SEQ ID NO: 105175 - protein, 180 aa, Oryza sativa
  unsure (1)..(180): unsure at all Xaa locations
  Clone ID: PAT_MRT4530_102442C.1.pep
MQVTVFTNKHTCTSSGRRKTTTPTSAWVASKAXIFLRKDSDMRPKELQIKLQEDNKCTNKYDIVARGRKLTMIELHGGWEESFQLLYRWRAAVRAGSPSSVIEIDTKEVDGKVYFHRFFCIXPYISGFITGCRKYXSIDSTALSGRWNGHLTSATSIDGRNWMYPIAFGFIDVGTTENWG

SEQ ID NO: 105176 - protein, 190 aa, Oryza sativa
  Clone ID: PAT_MRT4530_102443C.1.pep
MCRARILKKLKQSRGRRMPCRARILPPPPELHVRRRHPAPGEVRAAPSSSRPDPRLARFGRRRRAPVEAKEGAAAGEEGGARTRRRRLFARPRGCRSPDARSVVETLPGVEGPGEPSRRRSPPRPRHWPEVEGPVRSRAAATELVAISRPALCPASPSSSPSFAGGEESRRRWREEGSRRWRREEGREPA

SEQ ID NO: 105177 - protein, 94 aa, Oryza sativa
  Clone ID: PAT_MRT4530_102444C.1.pep
RPGNEAQLDGPHQCGFRPNSGLIPGLFRPRMYASDVGRFLFRPRMHASDVGRFLFSPSIRPCSFNPKKGIWGRIHHNRYGKIPSKSHQFSCGRD

SEQ ID NO: 105178 - protein, 272 aa, Oryza sativa
  Clone ID: PAT_MRT4530_102445C.1.pep
SSMSGGATPRRARSGRRHRALGRIHAGQGSGGAVELRWRLSSRTASDPRRRHHLEGALSPPSSHRCFYAKPRGCRSPDAGSVVETLPGVEGPGEPSRRRSPPRPHRRPEVEGPVAKIDLRGGQILRLSLKSCGNQTSAPAPVRKRRPLLPAPPPGLSLRRQGTVRRTQIRRRSHPVATAATTASIAAYVVGSTRSEAGREECQGASARIWSRGIGRWPGEEEDDVSAELPCHSRSAPLSSPSELSMLVTDWEMRGPREGRERECRRGCGRRR

SEQ ID NO: 105179 - protein, 467 aa, Oryza sativa
  Clone ID: PAT_MRT4530_102446C.1.pep
MASLASASASTSLVFSTSSSKPRLGSSVGFSSPARFRRTAAAAASRGTGRRAGLLVVRAARGKFERTKPHVNIGTIGHVDHGKTTLTAALTMVLASVGGSAPKKYDEIDAAPEERARGITINTATVEYETETRHYAHVDCPGHADYVKNMITGAAQMDGAILVVSGADGPMPQTKEHILLAKQVGVPKIVVFLNKKDQVDDEELLQLVELEVRELLSSYEYDGDEVPIVAGSALKALENLMANPAIKRGDDEWVDGIFSLIDSVDNYIPVPQRQTDLPFLLAVEDVFSITGRGTVATGRIERGTVKVGDTVDIVGIRETRNCTVTGVEMFQKTMDDAMAGDNVGLLLRGMQKDDIERGMVLAKPASITPHTKFDAVVYVLKKDEGGRHSPFFPGYRPQFYMRTTDVTGNVTKIMNDKDEEAKMCMPGDRVKMVVELIQPVACEQGMRFAIREGGKTVGAGVINTILK

SEQ ID NO: 105180 - protein, 95 aa, Oryza sativa
  Clone ID: PAT_MRT4530_102447C.1.pep
MAKVATDRELGVELDSILWGASVATEAVDEMATGNSPSEVTPPYPPPRWGIFPITITVKCNGATSFPITASVRQCSNKQCNKSVPKNTISIIFPD

SEQ ID NO: 105181 - protein, 144 aa, Oryza sativa
  unsure (1)..(144): unsure at all Xaa locations
  Clone ID: PAT_MRT4530_102448C.1.pep
SGVCLGDPMAAQRRKTARAXVDIVASCRAGAWLDGCATSPTPTPTRRRPPSGREFHRWLVTGGDILLPFSDNLYATFLDVSNGHRSRWGQILAAQAIDVGATTTGLWRSAPRTRTEKKSRASLAFIPCLPRPRFVATYVCWERA

SEQ ID NO: 105182 - protein, 47 aa, Oryza sativa
  Clone ID: PAT_MRT4530_102449C.1.pep
EKGACYKKRLTCPEKCFKSFSFKDKHGGGGCGGGWCSFNCNKCEATC

SEQ ID NO: 105183 - protein, 61 aa, Oryza sativa
  unsure (1)..(61): unsure at all Xaa locations
  Clone ID: PAT_MRT4530_10244C.1.pep
GHQNPSPDGRTGLSFHLLKDMPGSMXKNIERALGDAHTQQEISDRNNIFWVEHPRGPPILD

SEQ ID NO: 105184 - protein, 1134 aa, Oryza sativa
  Clone ID: PAT_MRT4530_102450C.1.pep
MGEAAVVGWLVCPVIRIVVDKARSCASDRFRWLNGGVPDALKQLEDELNQLRAEAGCVERCLGGGGGGRGNCELVRWLRQLKEVVYEADDVLDEFAYRRLAPNDGKVSLLGSSSIGKIGKQLVGKDESVNRLKAVVEKLSSIRANSGRLMQAAGLTKPGSGEPSSTLLTSDGPVTGSILEDGEVFGRDKEREQLVSWLIGSTPEAEGEDRSAAADDTIPVAAILGLGGIGKTTLARVLCHDHEVKEAFDLIMWVCPAGNYSKLDLAKQILQSAELPDDTNSFDRLQRRLKEAVSSRRFLLILDNVWNKDENENSYRDMWADVLAPLRFGRAGSKIVVTTRKRIVADLLNASKFVWLNGLEFADVWLLFKKFAFDNNDVDRHPELKEIGEQIAVKLKGLPLAAKVVGGMLKRKPSLTEWKRILKMEIYDNVSSTLELCYQNLQEHIQPCFAICSIFPKNWRFNRDKLIKIWMALGFIQFRPDDTKNQLEEDVGKEYFNQLVAQSFFHERKEGRRTYYYIHDLMHDLADNVSRIDCARVESVEFEKKDIRIPDTVRHLSVTSDAVMQLKGRAELKRLRTFIILKHSSSSVVPLPDDVLKELKGLRVLGLDGCDMVELSDKVGQLIHLRYLSLCKTITKLPKSVTKLFLLETLYIPKRCQLEEFPKDMWKLKYLRHLDINRTNTSKIVGIGKMIHLQGSIEFHVKKEKGHTLEDLNDMNDLRRKLHIKNLDVVASKEEASKAGLSKKQSIKVLELEWNSPGKSVPSVDAEVLEGLKPHPDVEEIHIRRYHGNTSPCWLDRKDITFLKYLHLTNCRKWAVLPPLGQLPFLKVLHLKEMCSLKQIGSEFYGTNPTAFPYLEDLEFDDMPKWVEWTKEEEKYDSVFPRLRKLKLLSCPDLIKVPPFPQSVRKVSIENTGFVSHLKLSSSSSSKANKVKLETCSAAVLTNGLFHQQQVQEIVDLTLRHCQDVKFEELHALTSLKRLQISYLEMTDEELGTCLQGLQSLTLLDIVHCSKITTLPQIENPSNLTKFHELNIRQCPQLSSLHSLPSFATLETVLIENCSRVTVESFPANFNSLTSLRKLSIMNCTGLESLPSGFPSSLQVVHLIGCKPTLLSQLQNKDGPEWDKIASIPMKLIH

SEQ ID NO: 105185 - protein, 62 aa, Oryza sativa
  unsure (1)..(62): unsure at all Xaa locations
  Clone ID: PAT_MRT4530_102451C.1.pep
TKTXSVLXXSXXVNTVTPGXSAHMILMXFIXXTDXSXFDGVIXXGLXXLXXXFFQMRSXARN

SEQ ID NO: 105186 - protein, 391 aa, Oryza sativa
  Clone ID: PAT_MRT4530_102452C.1.pep
MAAAAAVLLAVACAAAAMIAGGECGRVVHVGEEHRRSMLANGLATAPPMGWNSWNHFACDGNGEDVIRETADALVSTGLAAAGYKYVNIDDCWAEPQRDSKGNLVANKKTFPHGIKALADYVHSKGLKLGIYSDAGFKTCAKVQPGSLGHEEQDAKTFASWGVDYLKYDNCNNGDLKPLERGDMHPAKWGAAYGNSWRTTNDIADTWESMVSRADENEVWADYARPGGWNDPDMLEVGNGGMTNDEYIVHFSLWAISKAPLIIGCDVRHMSQETYDILANKEVIAVNQDALGIQGKKVRMEGSSEVWAAPLSGYRTAVLLLNRHAAEAAAITAHWDDVGLPAGTAVEARDLWRHATVAGAGGELTEKITLDVAPHSCRMLLLKPLISSRAN

SEQ ID NO: 105187 - protein, 154 aa, Oryza sativa
  Clone ID: PAT_MRT4530_102453C.1.pep
MREGEKVPKLRGMVIGDDGAIGLTTSDGLVMAVGTMRGTWLGGEGEGIGREEPLETGKMTTKALSVASLRRRRPVLCSEISSLINQVIFEQFLSIFVCNLCIHARKQQPQKPLRLSAYAVQRKETTATTKTQYTCYLKRNKLRPSNSLQVHVPI

SEQ ID NO: 105188 - protein, 228 aa, Oryza sativa
  unsure (1)..(228): unsure at all Xaa locations
  Clone ID: PAT_MRT4530_102454C.1.pep
MAAAAAVLLAVACAAAAMIAGGECGRVVHVGEEHRRSMLANGLATAPPMGWNSWNHFACDGDGEDVIRETADAXLVSTGLAAAGYKYVNIDDCWAEPQRDSKGNLVANKKTFPHGIKALADYVHSRGLKLGIYSDAGFKTCAKVQPGSLGHEEQDAKTFASWGVDYLKYDNCNNGDLKPLERYPEMSKALMIAGRPIYFSLCEWGDMHPAKWGAAYGNSWRTTNDIAD

SEQ ID NO: 105189 - protein, 213 aa, Oryza sativa
  Clone ID: PAT_MRT4530_102455C.1.pep
MGTKNRGVMEQYRVYGHFIVEWMNGQVTMYRHIYVLVISMGFMKRRITGLFKKGSSSCSSHHQDKSSTHSSTDVSMEEVDTSPRLLDDSNLDLIGDREMQGYHMLKDRPFADTPAYDLELLQKIGTDVDFRIVWKAIGWEKFAVVDEPGHVTATSSKCCQTAEVRDLFELVFVDGLLLIVPDPSEATGTSSKTDGVGTDPEASYSLFMYDADR

SEQ ID NO: 105190 - protein, 562 aa, Oryza sativa
  Clone ID: PAT_MRT4530_102456C.1.pep
MAAGTAAAAAAAATGRRYKMGFCPNGPNCRYKHVKLPGPPPPVEEVLQKILQIRSFNKFNQHRHNNYNQQGERPQHPQGSGLPNQNSIDNTTTTTAQPAVGQQAQTTNQQPPQQQQQQQQQQQQQQKPNTNDQVQSVPNGSSNQATRIATPLPQGPSRYFIVKSCNRENLEISVQQGIWATQRSNEAKLNEAFESIENVILIFSINRTRNFQGCAKMTSRIGGYIGGGNWKSAHGTAHYGRNFSIQWLKLCELSFQKTHHLRNPYNDNLPVKISRDCQELEPFIGEQLASLLYLEPDSELTAILIAAEAKKEEEKAKGASADEAADNQDIVLFDDNEEEEEEESEEEEEGNGQESQGRGRGRGMMWPPQMPMLRGVGPMMGGRGFPPNMIGDGFGFGGGFGMPDPFGVPRGFPPFGPRFPGDFARGGPMPGMVFPGRPPQPGGMFPMGLEMMMGPGRGPLMGGLGMGGPGRPNRPVGMAPFMPPPPPPNNRGTKREQRRPGGERGDRYETTSDQGSRGHDATGNSGAEGARSQSGDRYGRSALRDDDSESDEEAAPRRSRKR

SEQ ID NO: 105191 - protein, 163 aa, Oryza sativa
  Clone ID: PAT_MRT4530_102457C.1.pep
SARAKVQPGSLGHEEQDAKTFASGGVDYLKYDNCNNGDVRHMSQETYDILANKEVIAVNQDALGIQGKKVRMEGSSEVWAAPLSGYRTAVLLLNRHAAEAAAITAHWDDVGLPAGTAVEARDLWRHATVAGAGGELTEKITLDVAPHSCRMLLLKPLISSRAN

SEQ ID NO: 105192 - protein, 166 aa, Oryza sativa
  unsure (1)..(166): unsure at all Xaa locations
  Clone ID: PAT_MRT4530_102458C.1.pep
LRNCWEGRSVRRRFSEPGAECTDSSGTPPEFLLENYTRRGRSRMSAKLPGTPQKLLLTPYLILMYKRYNRASCNSAQCCVCXSEMETSLYRFQMTVRGMGIVQNTLQPPLGRNPSRPRGSRWRTAAERVRPNWWVLPNPKMCHPGLSFGRGGDSPRDHLSPSCPGT

SEQ ID NO: 105193 - protein, 179 aa, Oryza sativa
  Clone ID: PAT_MRT4530_102459C.1.pep
QDRQDERERRKELNLLRYEAVKDELLLLTTGIGAACSLYCLLVFSLEAAVSYAFGVAFSCLYLQLLYRHTDNLSKKDVPEIFMKKKVKRIGIRSEDLKNTIEKVLGGISVALSSPRLVIPAIFFGLSTLSDHFQNSILNFELVPGMMGFFAYKAAALVQVYRDNEDLRLILPEEDADSS

SEQ ID NO: 105194 - protein, 759 aa, Oryza sativa
  Clone ID: PAT_MRT4530_10245C.1.pep
MDKEVILNIPLGSTRQPDSWAWHYERSGIFSVKSAYRMLVQTKLQRENWLDNKASVSDFSAIAKSWKSLWGINVPSKLKIFAWRLSQNSIPTENLRKQRNMSTADICKICGAAQDTWDHAILQCTMAKWVWALVDNDITDLIAITNIKDPREWLFHMQENLTPELMVKLIVICWAIWHSRCKALLRPLVCTKTTSWIPPPESCMKINDDGAVSRSSNKGALGAICRDTSGKFLAASAMVWEGMSDPTTLEALACNEGLAIAMDCNILKVCIASDCQEVIRGIATIPKCRYLAVLNDINIRSHHFVRVEFHHESRDLNVDAHNLAKFACTLSEGRHVWLLNPPGFIAMHKGLVDIARVFSDDESLDKTLTSPAGRSLSLSTAPVVIVDTGGAGCSAAAGTLASADRVVKAAARVFGSPMRQPVASPLVIPKGKGAAVETSASKYSLAAPHFAPGDFETQAELIPFVEGVSNLVSPAGNPSLFTKLNEFDEGCSAIKSLAVRPKMEALCLEVSKAEASAEKESQRFVREMAKATESAKMACQTLRLALSDMEARAGGAVSDCATAYGDCCARVSAAFTMGFLQPFGYEHVAEFPNYAKGDWEVSAQDISPALHAWRKQLWQKDGRSTAKARLLEQLAKAEAADQGEGEDAAVGGGGGDAQDHPEGVHRKLCVWPPFGNWRSKNKKFVAVKGLPKVRCPFRLVYHEMIINSNSYKVLKVVGWMRAHPGRTLEDYDHVHTEGLENMVRFWRNHQMTNRQEAIS

SEQ ID NO: 105195 - protein, 260 aa, Oryza sativa
  unsure (1)..(260): unsure at all Xaa locations
  Clone ID: PAT_MRT4530_102460C.1.pep
LLLPPTGDSLGEEVLRMFLAERQAHGDFVTKISDMVWRRNGGDLGVLEAAAEQENSADVAPAQPEEADVMGEGMLRIAATRDWVSGESSLPVSKRLSAKDRQDERERRKELNLLRYEALKDELLLLTTGIGAACSLYCLLLLXLQLLYRHTDNLSKKDVPEIFMKKKVKRIGIRSEDLKNTIEKVLGGISVALSSPRLVIPAIFFGLSTLSDHFQNSILNFELVPGMMGFFAYKAAALVQVYRDNEDLRLIPPPEDADSS

SEQ ID NO: 105196 - protein, 69 aa, Oryza sativa
  Clone ID: PAT_MRT4530_102461C.1.pep
TTSLFLPFKPLCFLKNALDPWRGHQCLLDVALCSYYVFLPKKMGFVYPLSIKPALFFPLKNKRAGSCPF

SEQ ID NO: 105197 - protein, 98 aa, Oryza sativa
  Clone ID: PAT_MRT4530_102462C.1.pep
LWYCRLELNAGAPSWRRFVQLVHTRFGPTMIDGPLSELMALWRTGMVEDYINSFLALVYCDAMLSENQHVQLFTAGLVNPLKTDVTLCRFRSVARLRC

SEQ ID NO: 105198 - protein, 76 aa, Oryza sativa
  Clone ID: PAT_MRT4530_102463C.1.pep
MVGASCCRSDNRVHRRTWLLNSVGKSLSGWDGPFGLFKVGLVMAKTPSFGIHPSPNDAFGLAGYQRDSSAFAISTS

SEQ ID NO: 105199 - protein, 61 aa, Oryza sativa
  unsure (1)..(61): unsure at all Xaa locations
  Clone ID: PAT_MRT4530_102464C.1.pep
CPEXXLXTWXXXXXFLEGGPGYPIXXXINSYXNXRGXRFNNXXXXGKTPGFPHFXPLAENP

SEQ ID NO: 105200 - protein, 237 aa, Oryza sativa
  Clone ID: PAT_MRT4530_102465C.1.pep
MRIFVLSGQSNMAGRGGVHHRRWDGVVPPECAPCPSVLRLTAALDWVEAREPLHADIDTAKTCGVGPGMAFARAVLPRLDPPGSGVGLVPCAVGGTAIREWARGERLYDQMVRRARAAAECGEIEAVQWYQGESDAESDAATAAYAGNLETLIANVREDLGMPQLPFIQVALASGNKKNIEKVRKAQLGINLPNVVTVDAFGLSLNEDHLHLTTESQVKLGEMLAQVYMSNFLPATC

SEQ ID NO: 105201 - protein, 86 aa, Oryza sativa
  Clone ID: PAT_MRT4530_102466C.1.pep
MPLPFPNWTVLLFINERRSVRLLSECPSDGTAHTYSHFRRKQPGIYLTGGNVPSLRGNTLAPARDECLEALVLTGWGEACVRPPTG

SEQ ID NO: 105202 - protein, 79 aa, Oryza sativa
  unsure (1)..(79): unsure at all Xaa locations
  Clone ID: PAT_MRT4530_102467C.1.pep
PHPFQYSDVVATTSHNTLRGPRSAIIFYMKALYLTTKGQSAGALYDYYDGINLTAYSLLXGGPHNHLFAVLAVVMLHTI

SEQ ID NO: 105203 - protein, 52 aa, Oryza sativa
  Clone ID: PAT_MRT4530_102468C.1.pep
LFAKINAVSPSPVKRGAPRFFFGPEIAIAAMGPLQGFSGYKWVGGGAYMVRF

SEQ ID NO: 105204 - protein, 152 aa, Oryza sativa
  Clone ID: PAT_MRT4530_102469C.1.pep
MSTLVTCSLPGAVTTHASTRRFGGSQFQTSQASCISFKREVSAKAVLRSVRCNATQTQSAQRKSSTATVKRSDPKGKIQGPKLDDGSGGFPPFRFGKGGGGGGGGGGGSNYFGGFLLFTCVLLLDYLKEFEKNLIARRQRAGYDANNDMFQQ

SEQ ID NO: 105205 - protein, 57 aa, Oryza sativa
  Clone ID: PAT_MRT4530_10246C.1.pep
VNVEPLKRTPPFFFFFFFFFFFFFFFFFFFFFFFFFFSDAWADAWADAWADAWADAW

SEQ ID NO: 105206 - protein, 70 aa, Oryza sativa
  Clone ID: PAT_MRT4530_102470C.1.pep
LYFETEVVPCKLNIVALIRSCYHKWSRARKNIIQESRPIVCRNTHQQVASFSLIVQKDRVKFTKKVKRKR

SEQ ID NO: 105207 - protein, 39 aa, Oryza sativa
  Clone ID: PAT_MRT4530_102472C.1.pep
MAQTVVAGRDSVVGCAQLPGGRGCLLLDFAMKIGFHKWG

SEQ ID NO: 105208 - protein, 85 aa, Oryza sativa
  Clone ID: PAT_MRT4530_102473C.1.pep
VGWAVGFPTVQGRAFRFLYLSASPIFVPEPQNRVRPVPQSHLLPPHSPSPLLFVSLRLSPLSSLFSSLGCDGRRGGRRDRRRRDG

SEQ ID NO: 105209 - protein, 51 aa, Oryza sativa
  Clone ID: PAT_MRT4530_102474C.1.pep
MDGATMALTYPEMARAAPSTSSELWGEERTTMRRTALKHKQAAWFDELTIE

SEQ ID NO: 105210 - protein, 62 aa, Oryza sativa
  Clone ID: PAT_MRT4530_102475C.1.pep
MVRGTWQCAEAPLCGIGTLRCAHILHRWTGWLVSALAEVANIIPCTRQVDIFGSSTCGIDLT

SEQ ID NO: 105211 - protein, 37 aa, Oryza sativa
  Clone ID: PAT_MRT4530_102476C.1.pep
SILGICQDGHNRESVLFSLGLLSVPALPSWSCSQLAC

SEQ ID NO: 105212 - protein, 277 aa, Oryza sativa
  Clone ID: PAT_MRT4530_102477C.1.pep
MAFLNFLIPDEQFARFVIQKIHIKVPLLDAMQVPTYARYLKDILNNKRPLPTTEVVKLTEQCSNLILHKLPEKKKDPGCPMITCSIGAQQFDQTWCDLGASVSVMPKDVFDKFNFTVLEPTPMRLQLADSSVRYPAGIAENVPVKIRDFFIPVDFVVLDMDMGKEMPLILGRPFLSTAGANIDVGTGSIRFHINGKEEKFEFQPRTEQCSMNFLEKETTMPRNRYWKTPVKSPVPAKKSDQPAQKKPPSAPKSKKVWKEKLKMPAPSPPETGEKSVH

SEQ ID NO: 105213 - protein, 321 aa, Oryza sativa
  unsure (1)..(321): unsure at all Xaa locations
  Clone ID: PAT_MRT4530_102478C.1.pep
HPIHSNMMSKEAPSIDSADKEIQPEKTVPXEYCDTRLLLFPQRKDEQFARFVIQKIHIKVPLLDAMQVPTYARYLKDILNNKRPLPTTEVVKLTEQCSNLILHKLPEKKKDPGCPMITCSIGAQQFDQTWCDLGASVSVMPKDVFDKFNFTVLEPTPMRLQLADSSVRYPAGIAENVPVKIRDFFIPVDFVVLDMDMGKEMPLILGRPFLSTAGANIDVGTGSIRFHINGKEEKFEFQPRTEQCSMVRIKYGPNPXNIQVVEVEPPKTDSLVIFMQNFLEKETTMPRNRYWKTPVKSPVPAKKSDQPAQKKPPSAPKSKKV

SEQ ID NO: 105214 - protein, 61 aa, Oryza sativa
  unsure (1)..(61): unsure at all Xaa locations
  Clone ID: PAT_MRT4530_102479C.1.pep
IPPSTCRSCRXPHSARAESGXRRXTTKGXTSHKFYXGXYXGMKXQLXXPTXXPXXXCSXSF

SEQ ID NO: 105215 - protein, 270 aa, Oryza sativa
  Clone ID: PAT_MRT4530_10247C.1.pep
MALNPLFTVTFDVSSGDNYGDFIAGIRSRVANPRHFSRNRPVLPPVEPPPPPRRWFHVVLRASPTAALTLATRADNLYLEGFRSSDGRWWELTPGILGAAPGGAAATYVGFGGSYRDLLGDTDRLTVVTLGPQQMAQAVNALAARRPADLANGAAQRRAMDAVAALLLMVHEATRFQTVSRLVAGLMHPKAASKSGAITTAMRKQVNGWQVLSAAMLGTDARPPARFAPLRDMGVDTVEEAAATVGILLFVEVPGGMTAARALQLFHHGN

SEQ ID NO: 105216 - protein, 222 aa, Oryza sativa
  unsure (1)..(222): unsure at all Xaa locations
  Clone ID: PAT_MRT4530_102480C.1.pep
SKLVLLVVVGQRATLPRASARSQFDAARAERPERREMKKKGGSGGGGCLGAPFRALSRACDSACDLYVRGMSGCAGRVPAAMEXAVAVGRGFGRPATATATMRLRGLSSRDVDDLVRAASRQRLLSLAEPAVGXAAKKVGHYREAXPAGKKGPFEAAAAAVPAPRKKGAAMGTIAEDAPCEFVADTTLKATPPVRRGASADGLAARAGGFGAIKVGTEAFAR

SEQ ID NO: 105217 - protein, 49 aa, Oryza sativa
  Clone ID: PAT_MRT4530_102481C.1.pep
SYSKSTKKKQKGGFKIKRGVKHPICEDHTWAPPLEDIGLSSPLVQMRNF

SEQ ID NO: 105218 - protein, 154 aa, Oryza sativa
  unsure (1)..(154): unsure at all Xaa locations
  Clone ID: PAT_MRT4530_102482C.1.pep
SPSSFSQQATNLRTWRNTSEQFKGDEARRGPQRQAPRGIRFXXASLFFFPRSPDLQLPATVVSHLLSPASDPNFIQQTTGKRKKRGEMGEVTTTRGRGTTEKWAHRRRAKGNNRRASAAANEKFFKATTQPRSPFLFPLSFFRFLFSFVKKKSL

SEQ ID NO: 105219 - protein, 110 aa, Oryza sativa
  Clone ID: PAT_MRT4530_102483C.1.pep
MDLPFPSVVAARAAGGIPGYCGGAGHHHPRHRSSSRRLRRHTSSPPTPRRCGLSVVELVDKGADAAATDARGKRPREAPAQCAGACSTSAKIRAAATRIRASSVHCERPN

SEQ ID NO: 105220 - protein, 48 aa, Oryza sativa
  Clone ID: PAT_MRT4530_102484C.1.pep
QPRLRTNSDGELGGTLTRVGAHSWRQSYLSNHASYTMQCIIHRCVYIS

SEQ ID NO: 105221 - protein, 222 aa, Oryza sativa
  unsure (1)..(222): unsure at all Xaa locations
  Clone ID: PAT_MRT4530_102485C.1.pep
NALLPRLLDTLIGTALAWIGVXYIYPDWKYLNLHRNLTHTLQASSQYLRHIIVQLQFGYNDRLAYRVVRRDVHNHLSELSAVINNMHSEPQKYRSALQFAPQLLNTTNTLLSYISALGNYRSESEELSHNIHFSAVFFSKGKQVIDILDAIIHSDDRQVDQAQLTQRLTTIKHALKQFENEQQHSQDKLALLLIQQLLMIVQLLPHLLTLVKEEQLYSQQLS

SEQ ID NO: 105222 - protein, 49 aa, Oryza sativa
  Clone ID: PAT_MRT4530_102486C.1.pep
KTRSFSAMYLSVCAELIAFDNTYSMLASEPQGFRQNSSEFRPDAKPEAG

SEQ ID NO: 105223 - protein, 835 aa, Oryza sativa
  Clone ID: PAT_MRT4530_102487C.1.pep
MGKSCSRATATVLLLLVVVVFLSSSRPFPCEARRDSLPRGASIAVEDHATDVLLSPDGTFAAGLYGVSPTVFTFSVWFARAAGRTVVWSANRGRAPVHGARSRVALDGRRGALVLTDYDGEVVWNSTVANATAARARLHDSGNLAIEDASGNILWQSFDHPTDTLLPTQRIVAAGEAMVSAGKLLAAGFYSLRFSDYAMLSLVYDNHKMPSSIYWPNPYYSYWQNNRNIYYNFTREAFFDASGHFLSSDNATFDAADLGEGAGVRRRLTLDTDGNLRLYSLDEMAGTWSVSWMAFVNPCVIHGVCGANAVCLYSPAPVCVCVPGYARADASDWTRGCQPTFNHTDGGGGRPRAMKLVALPHTDFWGFDINSSAHLSLHECTARCMSEPSCVVFEYKQGTGECYTKGLMFNGRTHPAHLGTAYLKVPADLDMPELHVHQWQTNGLAIEEDIAGCSGSSSSEFLLDVSDMSSSSSNNQGKSIWFYFYGFLSAIFVIEVFLIAMGCWIFSNKGVFRPSQVSVLEEGYRIVTSHFRAYRYSELERGTKKFNNKIGHGGSGIVYKGSLDDERVVAVKVLQDVSQSEDVFQAELSVIGRIYHMNLVRMWGFCSEGTHRILVYEYIENGSLAKVLFDRRDSSKFLGWKQRFNIALGVAKGLAYLHNECLEWIIHCDMKPENILLDEDMEPKITDFGLSKLLNRDGSGSEMSRIRGTRGYMAPEWVSSLPITEKVDVYSYGVVLLELVKGRRITEWVVDGKDGVETDVRSVVKMVVDKLDSKNESWIMDLIDDQFGGEFNHLQAQLVIKLAISCLEEDRNRRPSMKYIVQMLISAEDEAHAFT

SEQ ID NO: 105224 - protein, 42 aa, Oryza sativa
  Clone ID: PAT_MRT4530_102488C.1.pep
QKAKYFPIILHKNSSFQDKFWHFVFPRFANYPRLNLFIRTWC

SEQ ID NO: 105225 - protein, 69 aa, Oryza sativa
  unsure (1)..(69): unsure at all Xaa locations
  Clone ID: PAT_MRT4530_102489C.1.pep
KGNPRGRPGQRSFSSPLKRGEGSRPFKPXRIASPSQMAITANVKLEGLHTNTNKLYQIIHNENFKFIRL

SEQ ID NO: 105226 - protein, 319 aa, Oryza sativa
  Clone ID: PAT_MRT4530_10248C.1.pep
MDGEWSDGAAVSSPTMSGGGGREQMKGGEDVAAADCPGSPVSPSPAAAQRSAAGAAASPSGRSRRSAQKRVVTVPLADVTGPRPKGVGEGNTPTDSWAWRKYGQKPIKGSPFPRAYYRCSSSKGCPARKQVERSRNDPDTVIVTYSFEHNHSATVPRAQNRQAAPQKPKAQACSPPEPVVEVEPEETHQYGVTAGPATGGGGGAAAIEVRDEFRWLYDVVSVPATSTSPSDIDAADEMQLYDQPMFFGGAVVGTAALLPDEFGDVGGLGGEGLGEEEALFEGLGELPECAMVFRRRAGDGLEMGGGVKIEQPAESTAMT

SEQ ID NO: 105227 - protein, 141 aa, Oryza sativa
  Clone ID: PAT_MRT4530_102490C.1.pep
MGSRPANQRRTRLQSSEPEVEGYEEWRRSQGAVSGGGSWGRRVVRRLLLGLLHGLAVGELGSKVASQRWRVTRNGAGLGWAGQPAVGGAAKRRPGRRAVRRPARRLCALPALNATRLAPQIRFSHVISVTTNVVAHLALPT

SEQ ID NO: 105228 - protein, 66 aa, Oryza sativa
  Clone ID: PAT_MRT4530_102491C.1.pep
LLQKNFFLISLFFLPRDEHFLFKGLALENSLILTQTVYFLKFSLPLKRFYLLCKTHFMPKGPFFYF

SEQ ID NO: 105229 - protein, 152 aa, Oryza sativa
  Clone ID: PAT_MRT4530_102492C.1.pep
MVKAVAVLASSEGVKGTIFFSQEGDGPTSVTGSVSGLKPGLHGFHVHALGDTTNGCMSTGPHFNPTGKEHGAPQDENRHAGDLGNITAGADGVANVNVSDSQIPLTGAHSIIGRAVVVHADPDDLGKGGHELSKTTGNAGGRVACGIIGLQG

SEQ ID NO: 105230 - protein, 539 aa, Oryza sativa
  unsure (1)..(539): unsure at all Xaa locations
  Clone ID: PAT_MRT4530_102493C.1.pep
NKKPHATQQRTTSLRGRWCSASRGWRRRRGCRRSCARDRAGRAGGGGGCGPTRCCARCSWRPCGSSSASPTGSSCSSASPCRTTTCRAPAAAGCWWRGRRRRRRAARSCTTAHGDYASSAPPAAGHYYPHQFAPNPPPHPASSAADAAPPTIPASYASAPPYSXGGYSDQPPSAPSYAPPPQYAGYAPPYNNPNPAPYPPESSPAPAPYYSYPPTAAGVATQHAPAAEPSPAPLPYDAPYYGGYQPPPTAGYGDDDYLNEGAYAYSGDGGSEPYGARGTAPTRSGAAMFDDYGRSIGPSSGGADQWPTGGGGGVGGSFGKIARAVPKAESHEDANGGAQKFRVKLLPEGAGSPTDVLCQIGLDGIRMLDPSTSRTLRIYPLDTLTRWDVPDEAAKKCYSCAVDFSPFNRRHHCRNCGEIFCDKCSQGRTALTAEDNAPLVRVCDRCMAEVSQRLSIAQEAANRSATVQSHEDLARKLKXDELERNRKSSGSASGGSSGTRMREVACPTCTVHLQVQVPTSGSETVECGVCQHAFRVSAN

SEQ ID NO: 105231 - protein, 146 aa, Oryza sativa
  Clone ID: PAT_MRT4530_102494C.1.pep
YLFCGMLLLTRVVAVTFCVTLVARHGATAMAAFLICAQVWLATSLLAGQLINQPQALLASAFAKKDHYKVAVTTARVLQLAIVLGVGLTAFLATGMWFGAGVFTSDAAVISTIHKGVPFVVGSQTISTLAFVFDGKWRGMASIRIG

SEQ ID NO: 105232 - protein, 73 aa, Oryza sativa
  Clone ID: PAT_MRT4530_102495C.1.pep
AQRSRARRRHAAATCDHLLPLAHPPQAPSPPPRRYLHHPIPRWRSRQHRPPRRRCQKRRADLRRRRRRRSSSR

SEQ ID NO: 105233 - protein, 54 aa, Oryza sativa
  Clone ID: PAT_MRT4530_102496C.1.pep
HGHLSPHVTRSNANTNEISSSVPMAVAKYTIVAVQVGALGCYGRRSMLLSGSCH

SEQ ID NO: 105234 - protein, 70 aa, Oryza sativa
  Clone ID: PAT_MRT4530_102497C.1.pep
RGESAGWRTSGGGPDLSGVMKAGRRRPRPPLPQIRPEGKWRDGWPAGGGMGGRPVTLVPDTGTTGGYEPG

SEQ ID NO: 105235 - protein, 50 aa, Oryza sativa
  Clone ID: PAT_MRT4530_102498C.1.pep
ISSAHGPGGCVMFNIHIIEFPLSFTPVPVESTRFLLFMFFITISLYHILT

SEQ ID NO: 105236 - protein, 168 aa, Oryza sativa
  unsure (1)..(168): unsure at all Xaa locations
  Clone ID: PAT_MRT4530_102499C.1.pep
MWGDRTHHKHWNQAHVPSGTSKDKFQAKGQPKFIPDNYSSVDEVTAALRDAGLESSNLILGIDFTKSNEWSGRYSFGRKSLHAISATPNPYEQAISIIGRTLSPFDDDNLIPCFGFGDASTHDQSVFSFYQDSRSCXCGFEXKVLERYRQIVPHLNLSGPTSFAPLIY

SEQ ID NO: 105237 - protein, 493 aa, Oryza sativa
  Clone ID: PAT_MRT4530_10249C.1.pep
MAASLAALAGAGVAGVAVELWWGVVERQGPGVYDWAGYLELAAMARRYGLRVRAILAFHQCGAGPHDPPWSGAFQIETWHFDSIRKKGGKIYVHRTKICVMEVVIHNMFRFKRSTFTVWSKPLIPLPQWVLEEMDKLPDLSYMDRYQRRNKEYISLGCDILPILKGRSPMQAYSDFMRSFRDAFKEYLGAIVTEVQIGMGPGGELRYPSCPTETLSQAGISSELGEFQCYDKFMQASLSARAQLIGMQDWGNGGPAGTDGSRQNPEETSFFRADGGCWNTPYGRFFLEWYSGMLLLHGERLCMVADAVFSGSGVTIAGKVSGIHWHYYTCSHPSELTAGYYNTLLRNGYLPITQMFARYKAALCCSCFDLRDEERNNSKSSPEGTLRQLMVAAKMCNLPLNGENSVTRLDDTSLNQVIRSSRLYSGGTSGTSFSFNYVRMNKSLFEFHNWNRFTKFVRQMSDARTFLARLEFRRGQHYLSSMSVVWVVSRACA

SEQ ID NO: 105238 - protein, 58 aa, Oryza sativa
  Clone ID: PAT_MRT4530_1024C.1.pep
MATTIFPPRPIAQIPPAVMITFCATADAFHRRRSPNATFQLAVSYPTPPSTSSNPGHH

SEQ ID NO: 105239 - protein, 86 aa, Oryza sativa
  unsure (1)..(86): unsure at all Xaa locations
  Clone ID: PAT_MRT4530_102500C.1.pep
RRSTDRQPAGSCSGDRSVGARYSMNGALAATSVHDXTVKDACGKYASLNTYEGKDVLIVNAASXXGLTNSDYTELSHLYEKYKEQG

SEQ ID NO: 105240 - protein, 150 aa, Oryza sativa
  Clone ID: PAT_MRT4530_102502C.1.pep
DDCIPDRAFDNFQFVNFTEIMSTSKDMPKKEAAFALAALMEIPSQYKATQGLRPLEKHAGHVASHLRILPPPNKVLENDNAAASRPPTASSQSTGFGKNTTDEQVCPICLTNPKDMAFQCGHLTCKECGPTLSTCPLCRVPITMRVRLYS

SEQ ID NO: 105241 - protein, 372 aa, Oryza sativa
  Clone ID: PAT_MRT4530_102503C.1.pep
MDCCFMFRKKQPVEGDDGEHRVKIFSYSELRKATHDFSGANKIGEGGFGSVFRGVLRDGTTVAVKVLSATSRQGVREFLTELTAISDIKHENLVTLIGCCAEGSHRILVYNYLENNSLAQTLLGSRGSNIRFDWRTRVKIAVGVARGIAFLHEEIRPPIIHRDIKASNILLDKDLTPKISDFGLARLLPPNATHVSTRVAGTLGYLAPEYAIRGQVTKKSDIYSFGVLLLEIVSGRCNTNTRLPYEDQFLLERTWVRYEQERLAEIIDADLGNDLDVDEACRFLKIGLLCTQDAMARRPNMSTVVRMLTGEKHFSVHRITRPAMITDFADLKVSSSQQKENETTRSSNMRSFSTTDETEPFSSSETPTQTSI

SEQ ID NO: 105242 - protein, 165 aa, Oryza sativa
  unsure (1)..(165): unsure at all Xaa locations
  Clone ID: PAT_MRT4530_102504C.1.pep
LECEFSSFRDTPSPSVSXSVLPAPPLSVHRRSCPCQLRRRRSVAARVSPAVARPSSPASAPPSLVRRRHRRTRWRAGGEGSSGGGQRASSSGGGGWTGAGSGRARQMRAGGGARXCGEDELAGVGEDELAGGQIRAGKRREMDELTTGVFGWTECYGTKKIRTLV

SEQ ID NO: 105243 - protein, 367 aa, Oryza sativa
  Clone ID: PAT_MRT4530_102505C.1.pep
MKSDDKNIEKVMENVVVNSGFGDDDFQIGFLDQVKQQQELRQTEEEEEERVKPSVAKEAILFLADGLGPYCPRAEESNPIHPNQLGSGLLQVGCRGMSAHAPAIDEGLLHRYSHECGDGGGGMDNTVRGVRDPADVVEWKAKYEKTYKDVGEEGCRSIAVTGNLICKTKGKDVLVLHYLKSSQLGLSLKINNAAAKPSPQLPSGCNELRRASTPVVGGLELLYIEKFIHLAPFARTNLAAGELILSHAGELVLPHAGELVLPHRRARTPPTGELVLPHAGELVLPHASELVPELSRRRTGLPPPRPEPAPVQPPPLELDALRPPPLLPSPPALHRVRRWWRRTSDGGADAGDDGGLTRAATDRRRRG

SEQ ID NO: 105244 - protein, 57 aa, Oryza sativa
  Clone ID: PAT_MRT4530_102506C.1.pep
MAVGDNTGKELDQDRWEMDWWGPRNTSNKVERRDCSLIAEVVIWSAAKSCFRCIWTK

SEQ ID NO: 105245 - protein, 99 aa, Oryza sativa
  Clone ID: PAT_MRT4530_102507C.1.pep
MAGRCNRRETEVKWRYTVEHHHATSPSLGFTKPPGPGLPCPGGKHGYRAVTAEVTAVFTLPYPRGKPGNRGNRAVTGGFVNPDLFRGNSILRDSLKILK

SEQ ID NO: 105246 - protein, 118 aa, Oryza sativa
  unsure (1)..(118): unsure at all Xaa locations
  Clone ID: PAT_MRT4530_102508C.1.pep
TLGRLIAGVHRSGNEEDGEERERGAVPGVEGGCRLPLALEXARSASEEAEVTGSGGPGLLVGGCGGGSERMVTAMARVLGGGRHGSRECAGEVITCGKKRMRXRHAVAAIAWAGDRAE

SEQ ID NO: 105247 - protein, 597 aa, Oryza sativa
  unsure (1)..(597): unsure at all Xaa locations
  Clone ID: PAT_MRT4530_102509C.1.pep
MVHRTRAKILEPAVVARVSPAVARPSPPSAHAVEGRRRGEQRWRAEGVELQRRRLDRRRLGARWRQPGAAAAELGDELAGVGKDELAGVGEDELAGGGSTSSPVGEDELAGVGEDELAGVGEDELAGGQICAGKRREMDELTTGVVGRTECYGTKKIRTLVVYSESSANWVINPESNHSLLVMWGDRTHHKHWNQAHVPSGTSKDKFQAKGQPKFIPDNYSSVDEVTAALRDAGLESSNLILGIDFTKSNEWSGRYSFGRKSLHAISATPNPYEQAISIIGRTLSPFDDDNLIPCFGFGDASTHDQSVFSFYQDSRSCCGFEEVLERYRQIVPHLNLSGPTSFAPLIYAAISVVENSNLQYHVLVIIADGQVTTSNTKDGKLSPQEQATIQAIVDASYYPLSIVMVGVGDGPWDAMQHFDDCIPDRAFDNFQFVNFTEIMSTSKDMPKKEAAFALAALMEIPSQYKATQGLRPLEKHAGHVASHLRILPPPNKVLENDNAAASRPPTASSQSTGFGKNTTDEQNCGITLIIFFYGIIKVCPICLTNPKDMAFQCGHLIKFPVTAIDLFXLTCKECGPTLSTCPLCRVPITMRVRLYS

SEQ ID NO: 105248 - protein, 786 aa, Oryza sativa
  Clone ID: PAT_MRT4530_10250C.1.pep
MPPAPWPTPRTVRQAAELHARLTTSGHLLLHPPSARHLLNSLVNCLEPHPLHLRYALHLFDRMPPSTFLFDTALRACSRAGSDPHRPFLLFRRMRRAGVRPDGFTFHFLFKCSSSSSRPHSLLLCTMLHAACLRTMLPSAAPFVSNSLIHMYIRLGLAADARRAFDEIHVKDAVAWTMLISGLAKMGMLCDTQLLLSQAPVRDVISWTSLIAAYSRANRAREAVGCFKTMLSHGIAPDEVTVIAVLSACAKLKDLELGRSLHLLVEEKGMPTSENLVVALIDMYAKCGDFGHAQQVFDALGRGPRPQSWNAIIDGYCKHGHVDVARSLFDEMEVRDIITFNSMMTGYIHSGQLREALLLFMSMRRHDLRVDNFTVVNLLTACASLGALQQGRALHACIEQRLVEADIYLGTALLDMYMKCGRVDEATIVFQRMGKRDVHTWTAMIAGLAFNGMGKAALEHFYQMRCDGFQPNSVSYIAVLTACSHSCLLNEGRLYFDEMRILYNIHPQIEHYGCMIDLLGRSGLLDEAMDLVKTMPIQPNAVIWASILSACRVHKHIDLAQCAAEHLLKLEPDEDGVYVQLYNIYIDSRQWENASKIRMLMEERQVKKTAGYSSITVAGQVHKFVVSDKSHPRILEIIAMLEEISHRLKSLGYSPLTSQITVDVDEEEKEQALLAHSEKLAIAFGLINLAPNLPVHIRKNLREPQEIHVSENDLIQFSELNGPTLDIESSAFGLLSQLPRNFLFSDLPEDFSQSAGKGICLPYACFIADFLLWTESGLDGYHCCLG

SEQ ID NO: 105249 - protein, 105 aa, Oryza sativa
  Clone ID: PAT_MRT4530_102510C.1.pep
TRVLFKVLSAFAFRDITLTKIESRPHRHRPIRLVDDAHVGTAKHFEYMFYVDFQASLAEPRAQNALAEVQEYTSFLRVLGSYPMDMTPMTAGSSSTVTSDDSSST

SEQ ID NO: 105250 - protein, 62 aa, Oryza sativa
  Clone ID: PAT_MRT4530_102511C.1.pep
LGFCKNNLIGWIFWAFHNNGFSRKFVFTHLGFEEKICIKKYIHRVGDILFVKRIFKFVWTGP

SEQ ID NO: 105251 - protein, 164 aa, Oryza sativa
  Clone ID: PAT_MRT4530_102512C.1.pep
EPRELRRRIEEEEEAMVVYEQDPDVLRWSLHLLLPPAAALHYQQRTSSVDCDEMIAHALQEELSYAQSQSLSSSILHLPPSAPPLKEDEQDDAPPPPPPPFSSCSTPADYTNTNNHNAHDCLIEFVDDFSALDGQVGKRLHDMIPIPVTNSLLLIPHLLFNHSS

SEQ ID NO: 105252 - protein, 93 aa, Oryza sativa
  Clone ID: PAT_MRT4530_102513C.1.pep
IIFSDHKKNSDIHLLTFFSYQFTKLTNLFPLHFPQQSGHFSSSCTIGSIIPHFASNHTIYSSCCKLSTTPSRWQHRHHHTSTHFHHINHPHSL

SEQ ID NO: 105253 - protein, 279 aa, Oryza sativa
  Clone ID: PAT_MRT4530_102514C.1.pep
MKTKRMHRTGDHAGFDRVRLVIASAGTGKATATENSAQIQAAGPPHRVCGRAPVAGQPARCTGLRRAARPDGAYAFTRVPRARALALVPWDAAPAMIAGCAATAPAQLHYYSGTTRGCFKSSREQVIISCVGLSVAASADHGLEPWTMAHNAIMAERALHATDAALLRVKKSLAVSRTYREREDLFFTRQRKYRAKSFKFPDTSTVSYSENFCASSIHPATGKANFTCFVLQDPVVFPSARQDEPMHTWIIKSWILKYEDSTYSVFLDNENPRLQKRIL

SEQ ID NO: 105254 - protein, 532 aa, Oryza sativa
  Clone ID: PAT_MRT4530_102515C.1.pep
MRNNYITGATCGSGSEFGTEEVKGGAGHAEGAVEVGLRVVGAAAQIPLCTKAAHGLTMAAVSSIRLDRSISMASAVSSAAGQSEGLPLLFLPIDAVAAAAAALLPMPPLLILGIVIYLFVLVAVVELEEGELVAWSSPDKRLVGIRPFNSPSQTPSNSQVFQPNRRPTELAPLLVAAGVCFGFADPTTNIIANTLSSLPPDHSAKKRKRKTKAAPSAAAARSSSETRAIAERSLEGLVTFLTSYFRYLPTWDALRYLRLANTDLLVAVRLIELNRGCYNTKDERFQISSYAARAALTCAASSARQPNVDGFIAASFSLASHLEFVTQAVPGGLTISLRAVLLDKIHAKYIKAISRLPMQDVRAHYHLAFVNGGYCYGPFSCVTNIIINTLWYDSAFPAVEKLEVDMICTSTFVRVESRKIEAALRKKGYLYDLQVICVANERVGSQMNFLDFKCPYSHTSIITVVLKASGENAIVFRNESQFKQQKRMTVMPTKATSTAARNIVCKLGSRIMLVLLARLKDKAKKGKEHLTS

SEQ ID NO: 105255 - protein, 550 aa, Oryza sativa
  Clone ID: PAT_MRT4530_102516C.1.pep
MGVWREGAGWCFCSGGGGGRSERVKAAIFSAKAAALAAVGGGHGGAGVLIHRNLLLTTHGNLPSAAAAEDAEALLGHARLAARLVPHRFFITSSILDLTIVGLDPAENETTLQAQQPHYLKTCCKPSLDHGSVVYLLGHTGKKELVIGEGKVVIGTDNLLKLSTDGVTWCPGSAGFDAQGNLAFMICDPMKLASSPTTRSSSTSSSSSHSSKKDHPMQFGVPISVVCDWLYQHWQGNLDEVSKPKLPLVRLMSSRSDHSSTSFTRRHVFKPADDENDDTSVSSQVTSKPKHQQASGNSANARISHDANPLVDLRANNEQGVSTPEIYESPRQSSCQGQKDAGSVQLLDINFPPSAPKTIFLPLPLKQMLSDENNADTSKPRNQSRDNGFPSGIIWHRNCEALSRDPPVAPLQDDCSSEGQSSSSPVELLEYRNEDHFSSEEETMYSAETMESRNIPSPREKHVGRSQSCVTYRRWSSPRMSTIQNGTLRKQHTLVPVRKSHSQNTSLPQRSHDYLSPTVSSAMKKRNSMEQQLPTKPRRSIAQTSPKWMF

SEQ ID NO: 105256 - protein, 48 aa, Oryza sativa
  unsure (1)..(48): unsure at all Xaa locations
  Clone ID: PAT_MRT4530_102517C.1.pep
RLITLYHVICICHARFQXTVTILXLGVVREXEVTVYSMTIXPFVXCRX

SEQ ID NO: 105257 - protein, 112 aa, Oryza sativa
  Clone ID: PAT_MRT4530_102518C.1.pep
MVVMRTATEQSNFKLEKVEEWVHLDEVELVARGLANGAPVREIDRRQRGGQTWQRKVVAMEFADEDTVCHELEVELELGSFELRAFLKPVWCGGILEQFIPFKEKADTVMHD

SEQ ID NO: 105258 - protein, 92 aa, Oryza sativa
  Clone ID: PAT_MRT4530_102519C.1.pep
MESTTGGKEEEKEKLCRRCKATYAPSGNTRLSCRFHPSYFVCRRHDDQKRYYQLRDGDPPYAAKFYDCCGAEDPDAAGCTTDFHLSYDDADA

SEQ ID NO: 105259 - protein, 99 aa, Oryza sativa
  Clone ID: PAT_MRT4530_10251C.1.pep
QVQFSLFQVRPLFVGTGCHPINLLSVCTTVVIHCLVCGHVILREMCFPFHVVVCITHLSPLGKSCHVSSPQASIFAGLRFSCEWHLCVSMCSHRRVRLV

SEQ ID NO: 105260 - protein, 230 aa, Oryza sativa
  unsure (1)..(230): unsure at all Xaa locations
  Clone ID: PAT_MRT4530_102520C.1.pep
WRQGREEKVAATIRVCSERGWGKEGRQVGDWESSRESGAERESDWGKENALVLTTKFGNSSIKDRDXLKRNPSPRLFRKQSKNRLSPNRLRPXSAEFKSDKVSRLSXSXQCDMFGQKSAVKTYGILEFVRDKSRVRYGHIFAGSTGTLTNLKASFWTCTRVKQISQASCFYINTWLNSSQDSIQDFIRDGDKIEAESKMEVVLETEQGSAKVRICYDRDRQSPSWTRLAD

SEQ ID NO: 105261 - protein, 40 aa, Oryza sativa
  Clone ID: PAT_MRT4530_102521C.1.pep
MVEYFGYLVLPASFQNLVDVPGKLVKVFLTSARKRGEAGG

SEQ ID NO: 105262 - protein, 97 aa, Oryza sativa
  Clone ID: PAT_MRT4530_102522C.1.pep
SPLLLASRLRGGGGCGCGGAALLHRTRGFLAPSTTTTQTTRTSFAAISWLGKLGLGGLGGSPRASAASAKLAPGPDEDRPGAGNQVPQFGILVSIRF

SEQ ID NO: 105263 - protein, 58 aa, Oryza sativa
  Clone ID: PAT_MRT4530_102523C.1.pep
MARVRAYTASRSPSPRATEGRARRSDVSLRIEYYTSELDKNKSVEIGNGPYIAGTRSI

SEQ ID NO: 105264 - protein, 127 aa, Oryza sativa
  Clone ID: PAT_MRT4530_102524C.1.pep
MCTEGEKGKQKRRNQQRETGRSRGHTERTQQSVCSSVFGINALNVQRLHGMEELGNCFVKAVRDWRVQVMREGSCDGDISGGKNRGRAGCRQLAMELVLDGGVEANEFSCGSGNAFLTGVCSTGSAA

SEQ ID NO: 105265 - protein, 101 aa, Oryza sativa
  Clone ID: PAT_MRT4530_102525C.1.pep
MGNPFSTLWKVDENYVMASAAKVQLGVEACLNGGLHNGGDEGKREGNPSFGDTRNRQEIPTSIKLDIQIYHLNGGDRARPARASAQAPPLCSSLSALSYNV

SEQ ID NO: 105266 - protein, 83 aa, Oryza sativa
  Clone ID: PAT_MRT4530_102526C.1.pep
GRVRKYSPGGLTGQSIYKRFRGRLGFLTNSCCLFDDEDRNIGSISKMGVTSVLLENGVNVDMLKMSVSNYATDVAASSTSKDE

SEQ ID NO: 105267 - protein, 38 aa, Oryza sativa
  Clone ID: PAT_MRT4530_102527C.1.pep
LFFFFFLFFFFFFFFFFFFFFFFFFLGPKKVFFGTGKH

SEQ ID NO: 105268 - protein, 45 aa, Oryza sativa
  Clone ID: PAT_MRT4530_102528C.1.pep
MGSNFAPHLYSGPGGEVRGRGRCRSSPTHPTRPVAIPSAANWTKE

SEQ ID NO: 105269 - protein, 71 aa, Oryza sativa
  unsure (1)..(71): unsure at all Xaa locations
  Clone ID: PAT_MRT4530_102529C.1.pep
LMDGQDITIDXXRFQASVAASSRQPCHQVDYDYILFLVHLITFTFFYPXLFHLSKIIYIECTHLQLYTITL

SEQ ID NO: 105270 - protein, 79 aa, Oryza sativa
  unsure (1)..(79): unsure at all Xaa locations
  Clone ID: PAT_MRT4530_10252C.1.pep
GNAXTPQVPSRNSPGRPTRPRTLVSLMVCTWLAIHVDLFSKWGRXVKLARGYRKVPCYMNRMHPVIPGGHTASVLLASD

SEQ ID NO: 105271 - protein, 978 aa, Oryza sativa
  Clone ID: PAT_MRT4530_102530C.1.pep
MASHYQAATLIASPSYPNAIAWSTENLVAVASGHLITILNPSALEGPRELVVLRPSDPFPIGVVNREDLFEPCIMPTSLARETELCARSISWSQQGFSPNSGCLLAVCTVDGHVKLYRSPFCEFCDEWVEVADISRLLFKFYKGIEFGENDGPSSLPQEKENTEQNQQVMCIGKLQEPLLSMGTERRKRKPARFEGFVYHEDNGGVDAPMDADFLLDPISNLKKKTLKKRSVDAPKDVDFISDPSNLKKKTSEKDDVDDPKDADFSLDPISNLKKNTLKKVTRPGLDDAVRNGQGNTQNIQTPSYCNGEDKSLPLITAKQYSCREALLSSLVVAWSPVLPSPDRSSYFTGHWCILAVGCKSGSVSFWKIHKPEYYTIDIGMVTRDPMLIGVVQAHLSWVTAISWELFSSGSSKPLLLLATGCSDGSSKIWLGDIEGLNQCTCAKEVPLTLVAEPPLFIVVKILKSNMVIIGFIFYLLEVPPTVVIMLFNACKLSLLVTTDSLAPVSSISLSAPAQHQDSVNLAIGRASGSLEAWSWNISGNKIQKIHACDAHDQVDNSAHCWMFNEKHLEEIPLHTDGPELKESVDLTEVSDRCYGLALAPGELMIAVVRSLDSNLLNQMYQARTQKAVVEFIWIGGQFLGIPLDNSVILSLQSAALSETNFLWWGSNIFWSLKKYENCETVLVLWDLIAALQGFKKSAPTFLETLMHKWVSGLFSDDPHCASIDIPSHSIHNMSKVSSRKLHLLNIVCRKVMLSDQPQYSPGAEKGNDVMADLWNNLLVRSERELQERLVAFTFAAVLNRTAYLLKGAPAENSWFPVGVAQMDSWASMNDGEVRDELKFLRTRINDLGDRINSVCEYSVEEYCTYCNAPVPFESADVAMCSGSNPATPPAEAHKLSRCTASMRLCPVLQPTWHCACCGRTVDKLLPEIFFTMPTSFWDVTHGNESLDLSAPAVPFCPFCGILLQRIKPEFLLSVSPV

SEQ ID NO: 105272 - protein, 858 aa, Oryza sativa
  Clone ID: PAT_MRT4530_102531C.1.pep
MNDIMVFNELISNIDLQELPLKGRTYTWSNMQSQPLLQQLDWFFTSPSWTVLYPNTMVTALSKCISDHTPYPSETTVPKTDIFRFENFWVELPGFIEVVKLFWDIPVRADSQGKIINGKFKNLRRGLKIWSKRLSNLNTLIGNSHEAIDFLDNIEEQRPLFIHEWNFRNIVKNHILKLLHYRNIFWKKRCTMRWVKFGDENTKFFHASATQRYRQNKISHLTLNDGTIITSHQEKAHAFLNFYKGRMGTSEGIQMAINLTELITPLAGLENLSNMPSRQELESIMKAMPIDKAPGPDGFNGMFMKKCWNIIAEDFYKLAREFFGLQSSIQNLNNSFICLIPKKSSPETANDYRPISVQNMSIKFLSKILAERLQAVILDLLHENQYGFIKQRTIQDCLAWTFEFLHQCHQSKKQIVILKIDFEKAFDSVEHSSILAVLKAKGFNETWLKWISDLLTTSSSAVLLNGIPGKNFKCQKGVKQGDPISPLLFVLTADLLQSMINKAHDTGILSKPIPRPDTKFPIIQYADDTLIIMKACQKEIFSLKGILQSFASSTGLRINFHKSCMIPINVPEEKTEILAGTVEIMGTPYPHGMVSCATPFYYCRIHVSTGTFGCNIGSLPFTYLGLPVGTTRPKIIDFVPLIDRVERRLPAITMFLNQGQRLTMVNSVLSSLPTYYMCTLKIPKKVIEHIDRARRHCLWRKSNEVDARSLSLEAWDKVCKPKHRGGLGIINLEFQNCALLMKHLDKFYNKRGLPWVRLLWNAYYKNNPHPRHAMQEKGSFWWRDVFRLIPIFRGLSAIQINTGDSTLVWKDPWTDIIPQFAFPTIFSFAANEDVSIQKFMQNDLDQNFFLPLSAQALQ

SEQ ID NO: 105273 - protein, 212 aa, Oryza sativa
  unsure (1)..(212): unsure at all Xaa locations
  Clone ID: PAT_MRT4530_102532C.1.pep
EASAPLPQAAQLGSKPKVFSFWILFIQLRLDDYCKXEYMEYFASHTTNMQVYKDTKGWHSIGSFAKAAFCNHLGERTNAPSKRPKTKPRTQNEEKRPATANDSTAAGTDDTNTKRRARRSLPTLTRQRKAKLRAAARSGRRWRRLYNNLQWRREGGRASPHCCDADGGCGVVRRPRSRRWMAAGEAAATAALGFTSASGCRRDLAQGKWRPR

SEQ ID NO: 105274 - protein, 263 aa, Oryza sativa
  Clone ID: PAT_MRT4530_102533C.1.pep
MDELVLSPSSFSATACFPTLDFEFCEVPDQWLLGLGHDELDKDAAASALAAAAASQSASNDDVPRNPPATTTTTKRRGRKPGPRSGGGGAPPIGHVEAERQRREKLNRRFCELRAAVPTVSRMDKASLLADAVDYIAELRRRVERLEAEARRAPLAPSAAAAAAWAAGLGAGAIGRDDLVVRMIGRDAAILRLTTAAAAARHAPARMMCAVRALNLAVQHASVARVGGATVQDVMVDDVPAALQDEARLRAALLHTLQLADTT

SEQ ID NO: 105275 - protein, 181 aa, Oryza sativa
  Clone ID: PAT_MRT4530_102534C.1.pep
RRCRPYSSPPLLLLVRRGDLSARRRSGDLPASSSPIAAAHGERTCCHRRVSPSNLPPLSPKDIAGGRSVSSLGLVHADDLTVRPHEAALSAVPLLRCAIATETAVAFVDDDNHLVDEISPACCLLLPVPPPLRPSIVDAGYEGGEVAEGGAPPRRRSSPLRVLLLAEPLPPLLLTELPPRH

SEQ ID NO: 105276 - protein, 900 aa, Oryza sativa
  Clone ID: PAT_MRT4530_102535C.1.pep
MELVTGVMGSLLPKLGELLKDEYDLQRGLREKIKSLSRELESVHAVLRKVGAVPSDQLDELVKLWARDVRELSYDMEDIVDMFFVRFNDGHESDDPRPVSIDPRLQALYKRSTELIGVDGPMDKIINMLSPWNDIHLSDKKKIISIVGFGGLGKTTLAKAVYDKLKPDFDCGAFVSVGRNPDMEKVLRDILIDLDKQKYKHSIIMTLNERQLINEIKDLVEKKRCFIVVDDIWDKKSWELIKCALQDSNCGSIVVATTRISEVAMHVGHVYKMEPLSLDDSKKLLYARLAGAQGKCLNIPPAVACEKILNKCHSVPLAITTIASLLVNKPEEDWSEVYNSIGFGHEGNNDVENTRRILSFSYYDLPSHLKACLLYLSIFSEDVEIDKNILIWKWIAEGFVQDEQAAGVELFELGEGCFNELINRNMIMPVEVQYQGYQSKARYNEGYVYGCRVHDMMLDLICSLSKEKNFVTLVDSYEQVELPLSHARRLAMQSMSIKEINRLQLPNMGMEQVRSFLANRCYGISLAFSDFRVLRILALEYCQGKINLSHFRSLYHLRYLGLVNAEITELPKEVGDLMFLQTLDLRETSILELPESVGLLTQLLCLYVDHRTWAPVDLIGKLTSLQELCIRPAYAYDRFYDDKANGMRQFVKALGRLGELRVLQTQIDILDDSMEKDLLESLDNLQKIRSLEILGASRGLNVEWTRTGFISPRHLQRLYLECLEFSGLPAWINSSLLPNLSYLNMTMEVVQEQDMETLGMFPILCYLKLYSRCTKLVSFKHTSNAGYFQKLKSFKIVGSSVRFDLSGCDIESSFMPSLETFETDVHVRFLKDANMLGFDKLGLENLPSSLKRIIVVICCRDASGAEVEEAQAALEHATDSHANSPKLTIMRYGVQIKRPL

SEQ ID NO: 105277 - protein, 379 aa, Oryza sativa
  Clone ID: PAT_MRT4530_102536C.1.pep
MGQVAKLGEIPIVPLHIGQLDSIWYRTSTLRGTLEDGEEIAVKRLSTTSSQGFHELKNDLVLAAKLEHKNLVRLLGVCLKEEKLLVYEYMPNISLLDTFLFDSDKRQQLDWRKRFMIIYGIARGLLYLHEESSQKIIHRDHTWEMNPKISDFGLARAFGGDQSKDITRRRPVGTLGYMSPEYAYCGHVSTKSDMFSFGVIVLEMVTGRRNNGIYASTRTDSSECMDSIYLLSYVWEKWRTRSLADAVDASLGGRYRENEVLSCVQIGLLCVQENPADRPDISAVVLMLSSNSMSLRTPSKPAFFFGSGGLAVDAGAGHVLLGTDGTDDIADVGNKQQLSPNPVSETLVQILPSVTTPNKTGICGPSQGSNLNRAGVSPD

SEQ ID NO: 105278 - protein, 358 aa, Oryza sativa
  unsure (1)..(358): unsure at all Xaa locations
  Clone ID: PAT_MRT4530_102537C.1.pep
TATCASRAPSTTSATAAWTSTPSHGRASAPPASAACSGAPASSPRGRRGPPSPGPTTSPTSPGSXCSPSPSPAPAAAGRRGGSPPTSAPAAAAPSPPPAPRPGTPRTPARRRSPPSRHRRRSFQLHKRRPGGGPPQGTAXPPPLSPAATTTTAPSPSTXAGDRVALPPSPAPPLSLTRASPXSSPHALAAPAAPXSPPAFCRPQPPTXVACPQPPPAAAPSPTPTSFSRRSXAAFPSSSSSSPAPPPTQPQPEQQKPVLPASQPQPQPPPPPPPLRHRARPPTPPRPXPPSHSPVSPPPHRPSSSPPSSSPWRSPSTAASCAETESARTATTPAPSPSAHVAAVSSPRSPSRPSPRPT

SEQ ID NO: 105279 - protein, 96 aa, Oryza sativa
  unsure (1)..(96): unsure at all Xaa locations
  Clone ID: PAT_MRT4530_102538C.1.pep
RREPGLVALIHHTVAAGVTGRDSXSHITASHTNQLPIHKALHGGERDXGDMHTKCGVGLADGKRDARGDPAYERSGGEGSLRRIGVGSICRHYQHR

SEQ ID NO: 105280 - protein, 171 aa, Oryza sativa
  Clone ID: PAT_MRT4530_102539C.1.pep
TPTSFSRRSALPFLLLHRRRLRRRRRSRSQSSRNRWWWWCRRIRQPRRRPLRPRRSWRPRGRCQAACLDPRGGELSSLCLHAHPRRRLRLPASQPQPQPPPPPPPLRHRARPPTPPRPAAALPFSRVSTAASLATSSPPSTGLPSLERSEREKEREERKGEEGRGQRAEVA

SEQ ID NO: 105281 - protein, 91 aa, Oryza sativa
  Clone ID: PAT_MRT4530_10253C.1.pep
VLGVRRLKTFVGNQVWLWLSQFTTPSSPVAKVGIIRVSSFKSFVRVYVELVLVLLFLALLERILFFIVSGLGCRLGYGRIDLIVIILRFVR

SEQ ID NO: 105282 - protein, 149 aa, Oryza sativa
  Clone ID: PAT_MRT4530_102540C.1.pep
MIGSPASHLSRYCAYLLSSAPELLPDDKAWLKRLYKSVKKITKPLFSKSDGPMEFERLLQQLAESSHSNTELKNGVALGVQLVDETQDAEEGWRVLAGFWSDMVLYIAPSDNLGAHGEAIARGGELITILWAMLTHAGIISRPRTDNAV

SEQ ID NO: 105283 - protein, 385 aa, Oryza sativa
  Clone ID: PAT_MRT4530_102541C.1.pep
MEAARFGAVGETRRECETLPPDVVGVGEKGRESGAGKRRRSSSAEALALLVELSSGLALWAARAGGDPHAAARQARRGRRRSSRSRWRLEAAPTRTAAVLTAAAEAGGGWRRSWGTLRRREVAPRRTAALVGAAAVAGGGAEAALVGTWDRGGGGRRRRGGRRLDGWGGDWGWMEAAVLRARDRREERREEEEMGGVEQEQLLSLGVLIDIVDEQWMRDTLPADDVPVPPAMAVKTEEAEDPAPAMQQIGRDGSLDVARNNEITGGIYIMRADTIGYGMVHFVQMTNLTLPRACCVPKARHARAERSLCRQTTALRGGIPTTASQRPPGHLLHRADVNSMTPLSPGKGIRPKNTVTKSDSDDVPWGKKLNRTKNTRMRAKKSDDD

SEQ ID NO: 105284 - protein, 246 aa, Oryza sativa
  Clone ID: PAT_MRT4530_102542C.1.pep
MAKRNYLGNRITIPAQIFVELSKRLEGVFFLVLAFCSARPEACRGGEARLRGQGPGKAAAKSGEVLPASVAPRGGARRPDRRGLAGRGGELAARARENRGGGRAVVAREGGAAAELRIWATPSLALEVRSDLAVAEELRRRELATRSAGTHRPSFASEEGDSGAQQPAKEQAAHGGRRERRRSAPIARREGDAALPFGRREFEVNSRPCHVAQCQLNKNLGANIIGAETLYLSANLDGVVPTASDK

SEQ ID NO: 105285 - protein, 223 aa, Oryza sativa
  unsure (1)..(223): unsure at all Xaa locations
  Clone ID: PAT_MRT4530_102543C.1.pep
MAAMGDATAVGGGATGERAAGRGGAWALRSSARMVGGEGWRAXGGEEQRADGGGRSGARAPPPATAHEAEERQRQYGGGRHGIGLVASSKTSVAAPPSSTAXRMRQPWRAKRAPAAVSKSGVETVRWAAAAAVVWMGTAVGGGRGGERIEDGEGDRNGKGSAVLEKAGEAVAREAGGAERGGAVADDDDDDGDMFEEEEDARSSSLAAGRADPPGATGRNHHH

SEQ ID NO: 105286 - protein, 84 aa, Oryza sativa
  Clone ID: PAT_MRT4530_102544C.1.pep
LPSMPSDASFDPATGISFTCDLNDNIAAPWPSSMQASSSSCNKSVNIPERPAATSAQNGVNQNRLELSLLIYLGTLVVAIWLQV

SEQ ID NO: 105287 - protein, 1630 aa, Oryza sativa
  Clone ID: PAT_MRT4530_102545C.1.pep
MASSSSVPAPSLHGQSVSEKLSKSNHVLWKAQVLATLRGAQMAGFLDGTAVAPATTLVVASKDKDGKEVTEKVANPAYATWVAQEQQVLSYLLSSLSRDILVQVATLTKASEVWEAIDAIFSSQSRARVLNTRMALSTTKKGNKSVAEYVSKMKSLADEIATTGKPLDEEDLVSYILAGLDYDYNPLVSSVATRVEPLMSSANSMLRGGRGGGGGRDGRGRGRGGGNGGRGGFGRGNDNKNNGNRPTCQLCGKIGHTVIKCWKRFDTSFTGEEKVAGAATSYGVDTNWYLDTGATDHITGELEKLSVKEKYNGNDQVHTANGTGMDINCVGHTTIRSSNRNLLLRNILHIPTAQKNLVYVHHFLRDNHAFMETYPHVFFIKDLATRKLLLQGRCRGGLYPLPSSHSTSMNKQAHSVVKPSTARWHHRLGHPSFAVVNRVISQNNLPVIPDSSQASNLVERLLERKIKVVQTDWGGEYQRLNTFFQRIGIEHHVSCPHTHQQNGAAERKHRHIVEVYPFASLHTNAGAKLRAEILLLPSHLQPSSSFGSGGELLVEPLVNNPNPDTNQNDEISAAVINSGDGDANAAQNFSFKGAETRSNGQYFMQDAQPASSAQGSMDPSHQQSPSCQQAADARQPTAGAAGADLHEAASPVGEGQMQELEPELSSSHGSGTPTGEPAPGSSAATNSGDSTQDPETSTEAFAVPEETAVTAPVGPVTRAQRGIRKRKEYTNGTVRYGFLIETGEPVNLQEVVSNRNWKVAMDKEFTALMHNKTWHLVPPVQEKNMIDCKWVYKIKRKSDGSIDRYKARLVAKGFKQRYGIDYEDTFSPATKALLKDLEKDFALKDLGDLHYFLGIEVKKNSQGLVLSQERYATEVLKRVGMAKCKPTNTPLSTSEKLSSTQGAVLGQNDATQYRSIVGALQYLTLTRPDISFSVNKVCQYLQQPTVDHWSAVKRILRYIQGTVSLGLKINRSASTLISAFFDADWAGCVDDRRSTGGFAVFLGSNLVSWSARKQATVSRSSTEAEYKALANATAEVIWIRKLLDEIGIKQPNAARLWCDNLGATYLSANPVFHARTKHIEIDFHFVREQVAQKLLDIRFISTDDQVADGFTKALPVRRLEMFKNNLNLGRPEAKGIALIHFYRIYLIRLLYLCLAFSTLSLSHRLPLYTWNPDDSKFWQVRDTMMSSRDTLPPPDLRHGGGGASDQTNSAVPVSETPMEDGGGAPAAAGSSNTAAPPQPPRLDGPTLERELRRCNIKLGKQKVSGEASTATTEPPRKKLMHDGIRAAAAAAPPPRSPPTRRIISYMVTAAAPPERKKTAADDRFRNLGTCSAQLRRRLSELDATEPEFVCEKTLRMSDVHRNQNRLLFSCKRKEDLDQCPITHLFTDKETQIVHKKDEIAVEKKKKKKIKKDEKKKEIKKEEEKQIREKLGLKVTVFDQGGNEYGMTCRYLESNGGYRFIEGWGKFVETNGMAISDSQRWTRDVVVKLLAFRSRRLARGAEQSDHPDGPIGFIVLHHENGSRGRGDNDNDNEEEEEEEYQGKAPPANPKKEKSNGKEEHVVRASTSSSSSSAEAAVGVVAPMHEVSAAPRNMLEEDACLGMVKLWSDTGSSSSSSKYNGPESSEEKRKKD

SEQ ID NO: 105288 - protein, 58 aa, Oryza sativa
  Clone ID: PAT_MRT4530_102546C.1.pep
EICSSYILYYWFCIELRDGLSHKSNIYLFFLIFTGTTTYFMIILSKHLHALSADGLIG

SEQ ID NO: 105289 - protein, 42 aa, Oryza sativa
  Clone ID: PAT_MRT4530_102547C.1.pep
MPEEDSNNGHLHSKINASMTACYGENIMANLVLFRLFTYYQY

SEQ ID NO: 105290 - protein, 25 aa, Oryza sativa
  Clone ID: PAT_MRT4530_102548C.1.pep
MAHEMMGGFFGHPPPPPATAAVGEE

SEQ ID NO: 105291 - protein, 95 aa, Oryza sativa
  Clone ID: PAT_MRT4530_102549C.1.pep
MATRVAVALASRIGFDSYDGGGGFRARGEAAVDGRQRRVETVRPSGGGDGDGCALPSAVYSGRSGGCPEAPSLSQIWREEGLRSRAASPSSVPPA

SEQ ID NO: 105292 - protein, 577 aa, Oryza sativa
  Clone ID: PAT_MRT4530_10254C.1.pep
MSVSHGEELEISPCDPNSEDDRRRRGMGSSLRRKAIRALRKRGGRRRPPRVDFRYPAAMSIEDVRDAEEELAVAAFRDRLAVHALLPDKHDDYHMMLRFLKARKFDSEKAMQMWAEMLRWRKEFGADTILEEFEFDELDDVLRYYPQGYHGVDREGRPVYIERLGKVYPNKLMQITSVDRYIKYHVQEFERAFRERFPACTLAAKRHIDSTTTILDVHGVGLKNFSKTARELVHRMQKIDSDYYPETLHQMYVVNAGSGFKLIWNSVKGFLDPKTSSKIHVLGTNYQSRLLEVIDKSELPEFLGGSCTCSEGGCLGSNKGPWNDHVILKGMMSDISNAESESDVDEFSLSAVLRSTDYSFLTPVSEEVKGSDSSTFCSCESCDRKGLPDVTPESSQSVQQSSEMVPNQLVSHEHSSTTRWMNNLGNMAISFHGTLTGRTLSNFVRVVGTLMIKILAVFSLFVSRRGNMLENVHPSNVEDEPQPRSATEDNMSACLQRLEKLESLCNHLMSKPPDMPKEKECLLLQSFDRIKTIESDLERTKRVLHMTLVKQMEMMETLEAMQHHYQSSSVRRRLCCS

SEQ ID NO: 105293 - protein, 111 aa, Oryza sativa
  Clone ID: PAT_MRT4530_102550C.1.pep
NGNSSERRARCARDRHHEVSAEPLTRTWHTRRRCSKCLEDNVCVETYEAGNTIMEDDRKKIRGVPWKAASELPNAGCCSDTEHGELIRLITGDATVAMVSVGGPGRLGSPP

SEQ ID NO: 105294 - protein, 101 aa, Oryza sativa
  Clone ID: PAT_MRT4530_102551C.1.pep
MAGRADLEPDNASAPSNRPLWQIWAVGFVDRRWTTHVVQNPAVPTLPFTTKWLQKFLQRQSKAREALACEVGKRKAEGVDITQGSHGPFASYAHWKESFAR

SEQ ID NO: 105295 - protein, 86 aa, Oryza sativa
  unsure (1)..(86): unsure at all Xaa locations
  Clone ID: PAT_MRT4530_102552C.1.pep
LDLEFFSPPXLRRLPAAXGSTDIADPXSRRCPXDAEVXXDCLNRHHXRTVRHSNRHVSSVSFDKLLXRPTPRPPAXPATIRSHDVV

SEQ ID NO: 105296 - protein, 188 aa, Oryza sativa
  Clone ID: PAT_MRT4530_102553C.1.pep
MEGIVGRVETIKPWAVWLASPSPLLLLAPLLFSSLLSEAQRWERVRVIGGKLKRGEERFQRVSPDCLPLPNGGGGGGGSRKPAAGPRSSKDDDAPAAAAAADSARTSPYLAAASASLESKPRTRAPPPPPPAPAPAPPSSSSAAAAPGRSPARERERDHGHHPSDISDPTSPSSTGVGGGGAGGSGSA

SEQ ID NO: 105297 - protein, 93 aa, Oryza sativa
  Clone ID: PAT_MRT4530_102554C.1.pep
MTSASAAAEGTTTAPAVAERVSHSSSGSWGRPQLRWGQRWSVGMAAAREELTPTAAIHARRRSKKPEDRIKNRHGPACRMLQKDEGAKGEAYL

SEQ ID NO: 105298 - protein, 213 aa, Oryza sativa
  Clone ID: PAT_MRT4530_102555C.1.pep
ELRNRPPRDLAAESSMAAALRFAARKVSGRALQQATAFVPPSPAVREEQRRLLPRLIPGAGGRMPLLRSFSSAGAAPNNKKHDHLPQSKHIVDVELELSRIPASIRPQVKTWYDRHFPHAEPTVNGESGISNKEPASLRAQVEEKKIELFHLLSQLEYSGENSNLEDERILRQLPPYRELKHLVNGYGIKLVVKRIAIASVLSAIFITAMVKM

SEQ ID NO: 105299 - protein, 202 aa, Oryza sativa
  unsure (1)..(202): unsure at all Xaa locations
  Clone ID: PAT_MRT4530_102556C.1.pep
VGPLHRRPPSASLRAPKTAPHPPAAPPLTKVASSTAGRASRAEPASSTGRVSRANLASLHRPRLSRQAGLHLRRPRLSRXADLHCHPLRLSVPSRPPTPPPNATAPARCSRLPRPQLAVRGRRASSPSSTVDTACSHHHSCGCLNRRRHLAVAAASAVAATTAASAVATICRSVLPAPRPAPLRAVERERESPAAAVLAAAR

SEQ ID NO: 105300 - protein, 107 aa, Oryza sativa
  unsure (1)..(107): unsure at all Xaa locations
  Clone ID: PAT_MRT4530_102557C.1.pep
RAGTEWLDRRTRALVPCGRLRRPSGGVENTRRLIXVQEAYETLFDPRRRAIYQRALARGVXRLDFYYFRRVVLYYYQDQEDKSGWRRTCGDQMEELKKRSMPNDLEE

SEQ ID NO: 105301 - protein, 55 aa, Oryza sativa
  Clone ID: PAT_MRT4530_102558C.1.pep
CHEEQKHDLLTCTLPKIYKLTSSLNLSHTHYPIDTLTDTTHIHLTPIKTLYAIII

SEQ ID NO: 105302 - protein, 145 aa, Oryza sativa
  Clone ID: PAT_MRT4530_102559C.1.pep
VNHNVHSLNKTNFVEDHGDTDASKADLTTPSREILPANVLDSSNVARGRSQEDYGATCTPDAAAGQSTINDNVTNNNIGLKSGNNASLNINNKSSLKPLEKSVLPEQYSANRIGPLQGADGSMMRSDSSILTARKGDKIIADLAG

SEQ ID NO: 105303 - protein, 84 aa, Oryza sativa
  Clone ID: PAT_MRT4530_10255C.1.pep
MAVAVAAAAALVVMWAGTATAAAAVYEVGDKTGWTIMGSPNYTAWAASKKFHLGDTVVWELNSAYFNAPTVRLDCRSVLRVEQI

SEQ ID NO: 105304 - protein, 87 aa, Oryza sativa
  unsure (1)..(87): unsure at all Xaa locations
  Clone ID: PAT_MRT4530_102560C.1.pep
MAAAAASAAAATAAVDGARLLQLEEQAVHGGSIAWEYLXLDGRLRARLAKAVLRLGLGVLNDSSARSRLASEQRTLYDHVAIASMDW

SEQ ID NO: 105305 - protein, 257 aa, Oryza sativa
  Clone ID: PAT_MRT4530_102561C.1.pep
MTKAIPKIGSRRKVCIGLRRNARFSLRKSARRITKGVIHVQASFNSTIITVTDPQGRVVFWSSAGTCGFKSSRKTSPYTGQRTAVDAIRIVGLQRAEVMVKGAGQADTVGIVLRRALLGETEGTCITHAKFGSVPHGYSTIAGIEESVQEILLNLKEIILRSNLYGVRTTSICVKGPRYITAQDIILPPSVEIVDTAQPIANLTEPTDFRIELRIKRDHGYHIEVRKNTQDGSYPIDAVSMPVRNVNYSIFACGNEM

SEQ ID NO: 105306 - protein, 118 aa, Oryza sativa
  unsure (1)..(118): unsure at all Xaa locations
  Clone ID: PAT_MRT4530_102562C.1.pep
RLLGWKIVNFFSHHPXSLHVGSFLFDDVXIPLNYKHIEGFCVNTYTLIRXDGKPYLVKFHXKPTCAVKCLLDDEAVTVCDTCHNHATNDLTHSIAAWNYPXWKLYIQTIDPYHEDKFD

SEQ ID NO: 105307 - protein, 509 aa, Oryza sativa
  unsure (1)..(509): unsure at all Xaa locations
  Clone ID: PAT_MRT4530_102563C.1.pep
MTEKKNRREKKTPREAKITFEGLVMEALPNGMFRVRLENDTIILGYISGKIRSSSIRILMGDRVKIEVSRYDSSKGRIIYRLPHKDSKRTEDSKDTEDLKDTKDSKDPQGRVVFWSSAGTCGFKSSRKASPYAGQRTAVDAIRTVGLQRAEVMVKGAGSGRDAALRAIATSAEVAGSTQTLQWKCVESRVDSKRLYYGRFILSPLRKGQADTVGIALRRALLGETEGTCITHAKFGSVPHEYSTIAGIEESVQEILLNLKEIVLRSNLYGVRTASICVKGPRYITAQDIILPPSVXEIVDTAQPIANLTEPTDFRIELRIKRDRGYHTEVRKNTQDGSYPIDAVSMPVRNVNYSIFACGNGNAKYEILFLEIWTNGSLTPKEALYEASRNLIDLFLPFLHTEEEGTRFQENKNRFTSPLLSFQKRLTNLKKNKKRIPLNCIFIDQLELPSRTYNCLKRANIHTLLDLLSKTEEDLMRIDKLXSFRMQDGKQIWDTLEKHLPMDLPKNKF

SEQ ID NO: 105308 - protein, 272 aa, Oryza sativa
  unsure (1)..(272): unsure at all Xaa locations
  Clone ID: PAT_MRT4530_102564C.1.pep
DTPGSRDLHPEAEVSTRVPSLHRRDHFGYSPSEKVVDGSGKGSRSTRSEHEKAVLTESFKQNTVKDVSVVNIGDLSDDEYDDPDYMQDRGDVAQPVDHPRAVKTGDSFFTNLIKKSFKINNGMGNGRAKVFINGXPISDRAVRKAEKIAGPIYPGEYWYDYRAGFWGVMGQSCLGMIPPNIPELNXXPMPKKCAAGNTXXVFVNGRELXQKDLDLLVGRGLPDSPGRSYRVEMSGKVSDEVSGEELYCLGKLAPTVEKMKRGFGMRVPRIIP

SEQ ID NO: 105309 - protein, 120 aa, Oryza sativa
  Clone ID: PAT_MRT4530_102565C.1.pep
TPQLFGFTKGAATQTRAPYTAAARSCYRSTFVAPQVHRALTGDNAATWENSILHQHMSASLSHPMIGPISASRQHHRGALTPEFSWRVLPFSRNHSRSHSGETVLWIRASRESARCVRCS

SEQ ID NO: 105310 - protein, 85 aa, Oryza sativa
  Clone ID: PAT_MRT4530_102566C.1.pep
QPSFNHKLPKYNPILSQHITAPPHTFTILKTNLIPRLKTKSLTHKNQLLPLLTFNSILFQYNFLQNHPAIPLFINLQHSNQSPLH

SEQ ID NO: 105311 - protein, 154 aa, Oryza sativa
  Clone ID: PAT_MRT4530_102567C.1.pep
MANPWARLDGRDRFKIRAVNSLHTFHSSSPSPPPLPLCQAGEATNGARRQTGAASGRGGGWSRRQLGAAASGRGGGRVRRRPGEATKKRIHRVNGLDDTAHHHRKPSPPFVAATSRGAAVAWLSGCSPSPLPREARLDDDDLDVWLTSASSRQR

SEQ ID NO: 105312 - protein, 130 aa, Oryza sativa
  Clone ID: PAT_MRT4530_102568C.1.pep
SQVRFCATTSFLIWCFENLMDIHSYVWDILGNLAVHCKNEYLSVRKGPDSALQALIHCICSLAADAMQKSNTMRLSKDVHEPALRAVLMMLLSPSGYILSEGHNSGGSVKRRNEVLPWLMPNLDFACSLP

SEQ ID NO: 105313 - protein, 50 aa, Oryza sativa
  unsure (1)..(50): unsure at all Xaa locations
  Clone ID: PAT_MRT4530_102569C.1.pep
VQTALLSSYLASLSSKTYTNLSLQEGKSRRRRRRRHSXRSLARAVHDTIR

SEQ ID NO: 105314 - protein, 100 aa, Oryza sativa
  unsure (1)..(100): unsure at all Xaa locations
  Clone ID: PAT_MRT4530_10256C.1.pep
HAIKLLHIHPFYNPLGRSKRLFKKVKNFPRFHVDMFYXISIIHRQLREFNHTFHHLNTKLLLCMASFNPIDSFAAYDKENLVKLAQFYPKDFTKLDTNHL

SEQ ID NO: 105315 - protein, 89 aa, Oryza sativa
  Clone ID: PAT_MRT4530_102570C.1.pep
PPVRFFCPGPHFPGYPLLSFWGVCPPWPVIWGSFLVGFFFFLGFSRVCLAGGGFLFFGVGAPILGCGWALPPPFFEGVHLFGCVVFSPL

SEQ ID NO: 105316 - protein, 83 aa, Oryza sativa
  unsure (1)..(83): unsure at all Xaa locations
  Clone ID: PAT_MRT4530_102571C.1.pep
EPAALTVKSEFKGPDMRTYWGRACASATVWNWHAHLKCXTERTPPRCYKPFVETCIDAVQKTEAFKYIPKSTDPRERSEAYAR

SEQ ID NO: 105317 - protein, 126 aa, Oryza sativa
  Clone ID: PAT_MRT4530_102572C.1.pep
TRPRAEFGTRGGRARQRRGRGGGEQRGKASSSLVVLLMVVTCIVKAAMWRPTAIFAFFFFGFFFCSGWYNTTERDISRAVGLPHAKMLIFPDTRLQTGRTTARGNLVCSSVGLTKENCEYHTNIAE

SEQ ID NO: 105318 - protein, 158 aa, Oryza sativa
  Clone ID: PAT_MRT4530_102573C.1.pep
EQHSSRDYSHSKHERSSHTEHRRDRKESSASDKHRHREIKDKTSKYSSNMESERESHKYMREEKHRIDHGNGGKGDHGKVRSRKNRSERQESLEPGSSGRSSDFIDQDTTESPSGSKSTGRHHKKTRRQSLEEHSTRRSSRHRDMEDDGRGQSVAEVK

SEQ ID NO: 105319 - protein, 129 aa, Oryza sativa
  Clone ID: PAT_MRT4530_102574C.1.pep
MNELRKLLGISGLFMSSCCSEITVMNDKGLKEICCLHAVQFETIFSRIACVVHGWRATSAAGHGGLAAALSRRPPLPSSTPVAHRPPSLAAAAAPRVGRRGDRQAALPSHRPSPAADALHLFRFAVPAS

SEQ ID NO: 105320 - protein, 678 aa, Oryza sativa
  Clone ID: PAT_MRT4530_102575C.1.pep
MSTAAADPAAAADAAVTRKERRRERKKERRRRARREAAEAARKAAEALAADPEEERRLRELEEAEADASERARRAFEDAERRWLEAAAARAAEKAAAAREESTAPEDSSREYKDDHGNGTEEDDEWEYVEDGPAEIIWEGNEITVKKKMVKVPKKAKENQPIQQDKAHCPFHLKTGACRFGVRCSRVHFYPDKSCTLLMRNMYSGPGLALEQDEGLECTDEEIEQSYEEFYEDVHTEFLKFGELVNFKVCRNGSLHLRGNVYVHYKSLDSALIAYSSMNGRYFAGKQITCEFVAVTRWKVAICGEYMRSRFKTCSRGIACNFIHCFRNPGGDYEWADWDNPPPRYWIRKMAALFGPSDDSIYGKPSDTPHLERSQSSDRRRPRSSDPRYTPSRTRDEDAHKQHSSRDYSHSKHERSSHTEHRRDRKESSASDKHRHREIKDKTSKYSSNMESERESHKYMREEKHRIDHGNGGKGDHGKVRSRKNRSERQESLEPGSSGRSSDFIDQDTTESPSGSKSTGRHHKKTRRQSLEEHSTRRSSRHRDMEDDGRGQSVAVKRKDHHDTSDDRWVATNSDVDSDLETQYQRSSSEGSKLGMKYHARSDSETGYGRSRSGTTKSRRERKRQSGNGERSDTLEVTSDSDTRDMSSDAWRSRSRSSDENLSTHRSRRKRSRSSHDS

SEQ ID NO: 105321 - protein, 204 aa, Oryza sativa
  unsure (1)..(204): unsure at all Xaa locations
  Clone ID: PAT_MRT4530_102576C.1.pep
QGVTVNICFASVSHPQSNGQVERANGIVLQGIKTHIYDRLMSHDKKWVEELPSVLWAVRTTPTMSNKETPFFLMYGSEAMLPTELRHQSTRVQKYSDEDQEEXRNDDVNQLEEHXRTGAVRAASYQQALHRYHEKRIRARILSIGDYVLRRVQSQAGRNKLSPKWEGPYTITQVLRPGVFKIADGDGCELANSWKIDQLRKFYV

SEQ ID NO: 105322 - protein, 906 aa, Oryza sativa
  unsure (1)..(906): unsure at all Xaa locations
  Clone ID: PAT_MRT4530_102577C.1.pep
MAEAVILLTVKKIGVALGNEAINQATSYFKKSVTQLTELQGSMGRIRRELRLMHEFFSGMDVRNRNNRKYEIWVEEVRMLVYQIEDIVDNYLHLVGHKHHIGWGTYLKKGFRRPNVLLSLNKIASLVKDVEASLVHLFQAKERWVFMDVGAATGGESSSYIVVEKSRHLASISRSLDEEDLVGWXHGMGGLGKTALAANXYRSEKEKFECHAWVSISQTYSIKAVLKCLINELDEKKSIRGNISDMDTGGLQDELKKFLKDQKYLIVLDDVWVPEAVNDLFGALVSNLSRSRVLVTTRIDGVAHLAFPDKRITLKPLSEQESWELFCRTAFPRDKDNECPAELMTLAKQIVSKCQGIPLAIVSVGRVLFVCEKTEEEFKRIHNQLDWELVNNPSLEHVRNILYLSYIYLPTHLKSCFLYCSLFPEDYLFTRKRLVRWWIAEGFVEKRGISTMEEVAEGYIKELVYRNMLQLVQKNSFGRMKSFRMHDILHELAVDLCRRECFGHSYNSKNKHEEFLEKDERRMVIHKLDKDVNQAISSEWSRLRSFVTLERNMSSPNLLTLVAGKCRYMSVLELIGLPKDNIPNVIGDLFNLKHLSLRDSMVKFLPNSIEKLSNLMTLDLCKSEIQELPGGIVKLKKLRHLFAEKLNGKFWRDFQWSTGVRIHRGLEMLSELQTLQALEVQDERSVRSLRELRQMRSIRILGVKGRYFEDLCESLCQMEYLSLLNIAASDEEEVLQLNGLKWLHPNVKKLRLIGRLAQTGLLSCAPEAGSHSLCSLCLFWSQLAEDPLPSLSRWSNLTDFRLTRAYLVEHVVFLPGWFPRLKTLYLVDMPNLKRLKIHQGSITSLEELHLINLRGMTEVPSDIIFLLPTLKYLYFLEITWDFFMALRRSRIGSIRWRYSLASDARL

SEQ ID NO: 105323 - protein, 73 aa, Oryza sativa
  Clone ID: PAT_MRT4530_102578C.1.pep
MSLICTDHKLQSLLVFFLKKKKKKKKKKKKKKKKKKKKKKKKKKKKKKKKKKKKKKKKKKKKKKGGAVKRNQS

SEQ ID NO: 105324 - protein, 64 aa, Oryza sativa
  Clone ID: PAT_MRT4530_102579C.1.pep
RYSTTCKLSSIYLPLYTLKVLFLHFRLKMACHFISSNHTDYFPMWQTNHTYLSRVIGDMTLVRI

SEQ ID NO: 105325 - protein, 248 aa, Oryza sativa
  Clone ID: PAT_MRT4530_10257C.1.pep
MAARKNAGVLALFDVDGTLTAPRKVVTPEMLQFMKQLREHVTVGVVGGSDLVKISEQLGKSVTTDYDYCFSENGLVAHKNGELIGTQSLKSFLGDDQLKEFINFTLHYIADLDIPIKRGTFIEFRSGMLNVSPIGRNCSQEERDEFEKYDKVHNIRPKMVSVLREKFAHLNLTFSIGGQISFDVFPQGWDKTYCLRYLEEFQEIHFFGDKTYKGGNDYEIFESDRTIGHTVTSPDDTAEQCRSLFMSK

SEQ ID NO: 105326 - protein, 103 aa, Oryza sativa
  unsure (1)..(103): unsure at all Xaa locations
  Clone ID: PAT_MRT4530_102580C.1.pep
MLEKLWDDVVAGPLPVTGLEKLRKAAFSRPLVFLFDGDGEACGAAXXRXLSXPSTPTTPVSPSSSSPXXTATTAPRGCFVWXSVFXPGCLLASLSLGALLFVR

SEQ ID NO: 105327 - protein, 270 aa, Oryza sativa
  Clone ID: PAT_MRT4530_102581C.1.pep
MAETLRRIRDGGAMLLLVLLTIAAQVQQEYEVTSSSSSLPSRRGAGEGHQQLPWAQQEYEVTSAATAGPCDAYLVFRSSPPLYASAVSIFNLLNVTATPGDEVVRGGDGGAPKLEEERAASAASGAVPTPLVSISRSVPHNGEVNHARCMPQRPYTVATKTCVDEVHVYHLGDGGEKSDVDVVLRGHEAEGYGLAPVQSTVPFQVSISTSRSTIAVDVPTCRSTASPSRGFAATLTKMTKGGREREMRKGEKRGKRERRLTWTPDMWVLC

SEQ ID NO: 105328 - protein, 725 aa, Oryza sativa
  Clone ID: PAT_MRT4530_102582C.1.pep
MAAAAAIAAALLRRSTSSQHHRRILLLPLLSHLQRAAPRSPSPWDPPPHHRFFFSSDVTAEGDSKPRPPLDGKQLWREVSTSEPATGASRLPKATWDAVVALLRRFGKDPAMSDQALALYIPASAFPTYARRFRHFLPARLSLESAEHLLSLPADDAHALLLPAFAEFCVTHLADELRKHESVMAAADLTAPHAWYPFARAMRRRVVYHCGPTNSGKTHNALTRFAAAKSGVYCSPLRLLAMEVFDKVNALGVYCSLRTGQEIKEVPFSNHVACTIEMLSTEEPYEVAVVDEIQMMADPVRGYAWTRAVLGLKADEIHLCGDPSVLKIVRKICADTGDDLEVHQYERFKPLVVEAKTLLGDLKNVRSGDCIVAFSRREIFEVKLAIEKFTKHKCCVIYGALPPETRRQQAKLFNEQDNEYDVLVASDAVGMGLNLNIRRVVFYSLAKYNGDRMVPVAASQVKQIAGRAGRRGSIYPDGLTTTFLLDDLDYLIQCLQQPFEEAKKVGLFPCFEQVESFAIQFPDLTFNELLDKFRENCRVDSTYFMCHQESIKKVANMLERIQGLSLKDRYNFCFAPVNIRDPKAMYHLLRFATNYSQSRRVSIAMGMPKGSAKNDTELLDLETKHQVLSMYLWLSHHFEEDHFPHVQKAEEMSINIADLLAKSLAKASWKPTSRQQAKPRRENEEDNDVEQASDDNAKNDSEDGYERSISRIKPFMRKVVAEKAG

SEQ ID NO: 105329 - protein, 69 aa, Oryza sativa
  Clone ID: PAT_MRT4530_102583C.1.pep
HEGSAGAAQFAGPILTIVAAAAVTFYAVSFMELRKKSFEELDEKYSELDDAGGRQRRARRRAERKSRKK

SEQ ID NO: 105330 - protein, 800 aa, Oryza sativa
  Clone ID: PAT_MRT4530_102584C.1.pep
MAGRHAPHLRLAVPPRLSPHPSFRFPTTPLPTPSKTRLHHPSSSPYAAALLRLLALHSLFLLAPAARAPASSFPSLPPLLALLSAAVSLLLPPFSAAAAAHHPFPAVTHLLRPAALLAVTLLLRFASLRLLASPGTLVLAESAGALLARALRRPSRRRVVSVAVASFALFFFASPSSSSSSTSHLLVLLPFASGLVSSADQTPSVRHVTRGRHARAAVFALAAAFLSVPAVLGLFFVGGSDAGDGDGDGGAVLPISQLWWLLLNAAVFGMVLGRRPDYDGSSSRPSVDFAMTFLCTLVLELLYYPKLSLPGFLICGLLLWIASRELAASGYVELGSADVSESVYEAIMGPVRHILNERKSRKIAAFLLINTAYMFVEFTSGFMSDSLGLISDACHMLFDCAALAIGLYASYIARLPANGLYNYGRGRFEVLSGYVNAVFLVLVGALIVLESFERILEPREISTSSLLTVSIGGLVVNVIGLVFFHEEHHHAHGGSCSHSHSHSHSHSHSHSHSHSHVHGHEDHHNHDHALQGVNHNGACCEHHGDANKSHHHDHHHDSSNEESHHNSLTENSCKENHSHCHGHDHHHHHHHDHSEHHQQSGDHAHQDISNISSDPAILEIPLNSIHTHCSEAHSCNGGLQSSENHNKSRNRHHIDHNMEGIFLHVLADTMGSVGVVISTLLIKYKGWLIADPICSVFISIMIVSSVLPLLRNSAEILLQRVPRSLEKDIKEALDDVMKIKGVIGVHNFHVWNLTNTDIVGTFHLHITTEADKSSIREKASDIFHEAGIQDLTIQIECVKR

SEQ ID NO: 105331 - protein, 97 aa, Oryza sativa
  Clone ID: PAT_MRT4530_102585C.1.pep
MAIGGKSVTVAWPCPPAGRTWANRRTHLIQDPIPLGQSEHDSISRQKSTPTSVSDMSNTCPCLSNTVSVGPHGNYVAKRRRPHPVEVFPPETFPPCC

SEQ ID NO: 105332 - protein, 63 aa, Oryza sativa
  Clone ID: PAT_MRT4530_102586C.1.pep
VCQPIELLLLNSFRQAPSQQCYGLEYWTGREVNARHAAASAFGKGKLELPLDNGSITDLSSVW

SEQ ID NO: 105333 - protein, 120 aa, Oryza sativa
  Clone ID: PAT_MRT4530_102587C.1.pep
MGDMQEDDSQYAFRAHTDEIFAVACSPTDASLVASGGKDDRGFLWKIGSAEDVLELAGHTDTVCTVAFSSDGNLLASGSFDGRINVWNTATRTLQGTLEGSGSGFEWLKWHPRGHLIIAG

SEQ ID NO: 105334 - protein, 411 aa, Oryza sativa
  Clone ID: PAT_MRT4530_102588C.1.pep
MSISGEVPAGEGSDGEEVFINEEDIIHEIPIDEEDLPDRDDDEDDDGMGDMQEDDSQYAFRAHTGKLVEKNEFMIFLVLIIDEIFAVACSPTDASLVASGGKDDRGFLWKIGSAEDVLELAGHTDTVCTVAFSSDGNLLASGSFDGRINVWNTATRTLQGTLEGSGSGFEWLKWHPRGHLIIAGSEDCNLWMWNADHNAILNTFAGHSSTVTCGDFTPDGKLICTGSDDASLRIWDPRTAQSRHVVRGHGYHTDGLTCLSVTSDSQTIVSGSKDNSVCVVNINSGQVVGSLDGHTGSIECVGISPSYNWVATGSMDQKLIIWDLGRQSIRCTCNHDEGVTSLAWLGPSRFVASGCIDGMVRIWDSLSGECVRAFAGHGDVVQSLAVSADGNSIVSVSTDGSALIFDISMFK

SEQ ID NO: 105335 - protein, 73 aa, Oryza sativa
  Clone ID: PAT_MRT4530_102589C.1.pep
VCPLLFLVLNSVFYEPVNVIVTGVHLRHCGKWDIWITSHAAWSTSRPWHSFKKKNIKAMAVEGGSPSKLSQRQ

SEQ ID NO: 105336 - protein, 138 aa, Oryza sativa
  Clone ID: PAT_MRT4530_10258C.1.pep
VTPEMLQFMKQLREHVTVGVVGGSDLVKISEQLGKSVTTDYDYCFSENGLVAHKNGELIGTQSNLKSFLGDDQLKEFINFTLHYIADLDIPIKRGTFIEFRSGMLNVSPIGRNCSQEERDEFEKYDKVHNISPKMVSV

SEQ ID NO: 105337 - protein, 193 aa, Oryza sativa
  unsure (1)..(193): unsure at all Xaa locations
  Clone ID: PAT_MRT4530_102590C.1.pep
WTQSGARRRSTEXFDQWNRTLQAAVXPFDGYFNREMTRRGARVGGGGSDWRINRWVRHFGQVARTFCSTERLCTIVCIGYKLMACVISGVGRKCRSEGAEAVRYVKAWKSMSRCVFRLVESDLNRGNSKSPGQQRVKIVESINGLSGSTGYIQDLRDQVKFKTVDGGEHGLREIYDVTARRNPISLGKTTVVI

SEQ ID NO: 105338 - protein, 48 aa, Oryza sativa
  Clone ID: PAT_MRT4530_102591C.1.pep
IFCREPIDNHCGCSKGSIAFLKKITLPHETWPRRSITSTSAPPDEGRG

SEQ ID NO: 105339 - protein, 101 aa, Oryza sativa
  Clone ID: PAT_MRT4530_102592C.1.pep
MAQYYSEVDHCAEEMNWPPHAGGEHYAVRRESYEEVDEMARAGRGHHHGGGGGGHLGYSGSRHGDAHLGGHREEHLVHGDEHRHGHGGGRQYDSCTGQYYG

SEQ ID NO: 105340 - protein, 40 aa, Oryza sativa
  Clone ID: PAT_MRT4530_102593C.1.pep
FPATPPLRVIFAFTQFKHYSSISKDLGDPNFEDQCPFALL

SEQ ID NO: 105341 - protein, 84 aa, Oryza sativa
  Clone ID: PAT_MRT4530_102594C.1.pep
LFFRLFRSRVPVFGPGCRLCLWSAPARVWFVRCLIFGSFAPILVVLQAVVCWQLVGAPRRINAAPAPRQQCEARACWCLVGVGL

SEQ ID NO: 105342 - protein, 95 aa, Oryza sativa
  Clone ID: PAT_MRT4530_102595C.1.pep
PHDTHLMNELEEMFNIQDLTRRGHVAFTEDECDTIASSRSSLDRKEPDGYLDCALLNENRGEGLNSAGVTRFYLFIAGEGNGDFLAGILLDRNVF

SEQ ID NO: 105343 - protein, 92 aa, Oryza sativa
  Clone ID: PAT_MRT4530_102596C.1.pep
SKCQCRLQRSIFSINSDQFRDTLDTRNRLNSETEHMCVSFSICSHSTDQFRDTLNTYTPEQPEIFLRLHDRCKCMHNTTHVTPHSHNDRCAI

SEQ ID NO: 105344 - protein, 309 aa, Oryza sativa
  Clone ID: PAT_MRT4530_102597C.1.pep
MASMPQLEEKDSSDLAINKGPSLDLVKSPLMMNDASATVTAMQPNEGMEEFPVKVRKPYTITKQREKWTEEEHDKFLEALKLYGRSWRQIQEHIGTKTAVQIRSHAQKFFSKVVREPGSNNAIEIPPPRPKRKPLHPYPRKCANSGSDANPATAQLKLAPGSSSSGSDQENGSPISVLSAMQSDAFGSSVSNPSTRYRKDVNNMSEEDSSEEEVQETSLKLFGRTVVIPDPRKRSSSDPKHESEEQISQPSNEEMLQASSSVGEIPAAYCSSFELKPSANSAFVRVKPSNSGDEEVIRGFVPYKRCKFQ

SEQ ID NO: 105345 - protein, 75 aa, Oryza sativa
  unsure (1)..(75): unsure at all Xaa locations
  Clone ID: PAT_MRT4530_102598C.1.pep
MDMAVLVYAQGDMINHIKPHVSNATPPIQQGVSAFQNPKKPQKNSRKWMFXAIILLXIKMGIIVVAVIQPWKKGA

SEQ ID NO: 105346 - protein, 90 aa, Oryza sativa
  Clone ID: PAT_MRT4530_102599C.1.pep
MEGFIPFIYKAIVQYRKEGQVSVGDLFFDEPSPSSYFRLPGDSGRYQQQQQAAMSVLFSQATTADSDAVAPRRSPLRCTVHHRRPATATP

SEQ ID NO: 105347 - protein, 159 aa, Oryza sativa
  Clone ID: PAT_MRT4530_10259C.1.pep
MLISKKNRHAIYETLFKEGVMVAKKDFNEPKHPDLQHIPNLQVIKTMQSLKSRDYVKVQFAWRHYYWYLTNEGISFLRNYLHLPSEIIPATLKRPVRSETARPRPAAARPDTSRMDEDRSAYRRPGQSMPDKKADVGAGSSDVVFKGGYGRGRGGAPPQ

SEQ ID NO: 105348 - protein, 366 aa, Oryza sativa
  unsure (1)..(366): unsure at all Xaa locations
  Clone ID: PAT_MRT4530_1025C.1.pep
MPARAAAAAAAVALLLAVCAQAAALPRFAEAPEYRNGEGCPAAATAAAGVCDAGLVHISMTLDAHYLRGSMAAVYSLLKHASCPESLFFHFLAEEEEXGGGGDLRRAVAASFPSLRFEIYAFRAEAVAGLISASVRAALESPLNYARNHLADLLPRCVPRAIYLDSDVLAVDDVRRLWETRLPAAAVVAAPEYCHANFSRYFTPAFWSDPGLGRRVFAGRRRPPCYFNTGVMVIDLRRWRAGNYRHRIERWMEIQKEKRIYELGSLPPFLLVFAGEVEAVDHRWNQHGLGGDNVRGSCRPLHDGPVSLMHWSGKGKPWDRLDAGNPCPLDHTWKSYDLYVAGDDAAAASAPVSGSSLALPSTACSG

SEQ ID NO: 105349 - protein, 57 aa, Oryza sativa
  Clone ID: PAT_MRT4530_102601C.1.pep
IPLGERRIGQKIWNAIQKKRSLFILSVVYPYSYRILHELIPNSFRLLIVITSVLFQD

SEQ ID NO: 105350 - protein, 343 aa, Oryza sativa
  Clone ID: PAT_MRT4530_102602C.1.pep
GPSRERRKPYLPFSRFLTPYTVGGGERAAEAEEYHCHDFEWEDLRAEVEANPAFSYHLSPFPTTVGTPETPPPPPPLEAWTSFHRRHTCGKFFKERRYLLKEFPELLNSKDSAKVLELRVGLELWICQVHASLRIKNTFAYGHLKTVDTQHQQILLLSISSASEVIHNPGISSPSTTVYACDCSKETLEKANEIVCSTKGVEVKDRFHPFLLDASKETFPDWLFCKSCRSPCASDGNMLVEYPAFLRDNPCCVDGVDFITMIFTLSAIPFDNMLATLERCVSVLKPGGLVLFRDYGLYDMTMLRFLPHQRVGFREYMRSDGTLSYFFTLDTVRELFHASGLLE

SEQ ID NO: 105351 - protein, 111 aa, Oryza sativa
  unsure (1)..(111): unsure at all Xaa locations
  Clone ID: PAT_MRT4530_102603C.1.pep
REGEGREGVRAVRRAVPGDAGVPRRREPPQLLTTKFGNICVRKEDWIKAKSEAEIDSRTEQESAGAQIGYDXYRLSPSQTGDKYGQKFAAKTYGILEFVRDNSRVRYGHIL

SEQ ID NO: 105352 - protein, 56 aa, Oryza sativa
  Clone ID: PAT_MRT4530_102604C.1.pep
INSTSPHTIMSTTHNPYLERNQPSRRGCGSSWPACSFTAIISISLPTTTPSLPSTT

SEQ ID NO: 105353 - protein, 123 aa, Oryza sativa
  Clone ID: PAT_MRT4530_102605C.1.pep
SPPSSPSSRSRPPRRPRERPPSRRPRWPRCPLPRRGPRPPPPRRSPPRPPPRRRPPWRLHRPRPLTPPPPMPPPPSPRPRSPPPPSPPRPAPPLPPPRTPPPPASLPSPARSPPPSCSRWMDG

SEQ ID NO: 105354 - protein, 130 aa, Oryza sativa
  Clone ID: PAT_MRT4530_102606C.1.pep
MDIGSAKRYFYPKSKSEIKSEAEEGDVDGCHGRGPRWWTEVTSTEDELQRKNVMTVVAVEEGRSQGERRRRRRRRLGWTTMMMVRWIKETVTTVQDEGTRAAVAKDGDRRTGRRGHAAYAAGLCNGRGIR

SEQ ID NO: 105355 - protein, 338 aa, Oryza sativa
  Clone ID: PAT_MRT4530_102607C.1.pep
MAHEMMGGFFGHPPPPPATAAVGEEEDEVVEETEEGGHGGGVQGKLCARGHWRPAEDAKLKDLVAQYGPQNWNLIAEKLDGRSGKSCRLRWFNQLDPRINRRAFTEEEEERLMAAHRAYGNKWALIARLFPGRTDNAVKNHWHVLMARRHREQSGAFRRRKPSSSSASPAPAPAPPPPPQPVVALHHHHHRYSQQYSGYSGAAESDESASTCTTDLSLSSGSAAAAAAAAAAANIPCCFYQSTPRASSSSTAACRAPRVAAAADTVAFFPGAGYDFAAAPHAMAPAAASTFAPSARSAFSAPAGRGEPPGAVDQRGGAQATTDSHTIPFFDFLGVGAT

SEQ ID NO: 105356 - protein, 723 aa, Oryza sativa
  Clone ID: PAT_MRT4530_102608C.1.pep
MFSHGADSAHDAGAVSTGASGVPTRFVWPYGGKRVYLTGSFTRWTEHLPMSPVEGCPTVFQAICSLSPGIHQYKFCVDGEWRHDERQPTITGDYGVVNTLCLTRDFDQINTILSPSTPGSRMNMDVDNDNFQRTVSLSDGIIQEGPQRISEAAIQISRCRVADFLNGQTGYDLLPDSGKVIALDVNLPVKQSFHILHEQGIPVAPLWDSFRGQFVGLLSPLDFILILRELETHGSNLTEEQLETHTISAWKEAKRQTYARNEGSWRANHHLVHATPYESLREIAMKILQNGVSTVPIMFSSSPDGSYPQLLHLASLSGILKCICRYFKNSQGNLPILSQPVCTIPLGTWVPKIGDPNGRPLAMLRPNTSLSAALNLLVQAGVSSIPIVDDNDSLLDTYSRSDITALAKDKVYTHIRLDEMTIHQALQLGQDANSPFGFFNGQRCQMCLRSDTLLKVMERLANPVNSSFSCLVKVKVKVQVQRAVRPWSLSSNGDGLGVERKDLERLNEKVKEHIEEKAGRAVAKHSQLVKEVDVRLSARGGELSRGPKICRCEITLFTKRHGVIRAEEDAESTYASIDLASSIIKRKLRKIKEKETDVRHLKGTKPPVSDWPPSLLDNNDDDAQAQLKDLEEAVGAEDEDTVLTKVVRTKVFEMPPLSVEEAMEQLVNVDHNFYAFRDEKTGEMNVLYKRKEGGFGLIVPKGDGHLHKETIPNSDHHHPSLAA

SEQ ID NO: 105357 - protein, 91 aa, Oryza sativa
  Clone ID: PAT_MRT4530_102609C.1.pep
MGPGTTAAMALAPPPSHQHHHHHVKHSQLVKEVDVRLSARGGELSRGPKICRCEITLFTKRHGVIRAEEDAESTYASIDLASSIIKRKLRK

SEQ ID NO: 105358 - protein, 198 aa, Oryza sativa
  Clone ID: PAT_MRT4530_10260C.1.pep
MALSSRVSPATATARTSTASSVQHTHRQHRRPRPLRRRPPGGFGGSPLRWRRCLPGGWRRVDGTSATGRASMGRPASHRASRGSRAPGRASWGSQAAGLASSGSKTADRASSGSRPAGVKLDWVKPVVHDSNASPRHMLCASMRLLANTKSSKRSQIQPSILANSMEDDDARWIHCHLVERGANSLPPERATTTTPPL

SEQ ID NO: 105359 - protein, 149 aa, Oryza sativa
  Clone ID: PAT_MRT4530_102610C.1.pep
MSSSCSSLRLSPSPCPSAPVSLAAHCLLRMSWDGPLSSVRLIMQGRNVKLNEKVKEHIEEKAGRAVAKHSQLVKEVDVRLSARGGELSRGPKICRCEITLFTKRHGVIRAEEDAESTYASIDLASSIIKRKLRKIKEKETDVRHLKGTK

SEQ ID NO: 105360 - protein, 172 aa, Oryza sativa
  Clone ID: PAT_MRT4530_102611C.1.pep
MRPALFGPGFDGGGEQRGALQGQRLTATCGEIQSQRRRHGLRGPRQHAACVAHDSARSGLGIAIASSGVRHEVVVERSDTKLCGGGGIRSIAGHDVEVAEAARWSWSCRNRHHDHSTTTSLPRTTTTCECYRGQHRQLVMDGHVHQLEKMKTSRSQWCASSARMTVTTSSTG

SEQ ID NO: 105361 - protein, 266 aa, Oryza sativa
  unsure (1)..(266): unsure at all Xaa locations
  Clone ID: PAT_MRT4530_102612C.1.pep
MAPATTAAMALAPPPSHHHHHHHVKQLQLPPSVSVSVPLRSGFLGRALPAAAHPQPLLAAESRRSSAVSVRMSWDGPLSSVRLIMQGRNVKLNEKVKEHIEEKAGRAVAKHSQLVKEVDVRLSARGGELSRGPKICRCEITLFTKRHGVIRAEEDAESTYASIDLASSIIKRKLRKIKEKETDVRHLKGTKPPVSDWPPSLLDNNDDDAQAQLKDLEEAVGAEDEDTVLTKVVRTKVLRDPSAFVVRKAYDAAXNVDHNFYAFRDE

SEQ ID NO: 105362 - protein, 423 aa, Oryza sativa
  unsure (1)..(423): unsure at all Xaa locations
  Clone ID: PAT_MRT4530_102613C.1.pep
TTLICSLYSVTTATPFAQAPPLLPPRRRSLYLSTCQLLYLSTCQLLLLPQRASILAPSVCVVAFAAPSACRHPCYLRTHCLRAALSAHRHPFSLRAPTAPLPPPDLFIATSPFAHIVVAPTLSTCAAAPFSLHMQVTSLPRSPPVRYTSLPITYQKNXSSSSVSSPPPSLSSPLHHSFPFPFSLSLSPPHLEESPGSLLSHVHAPPPPSSTTTTTATPPTAPSTLDPRAAGSLLSHVRAAGSLQDDICAPPHPSSPXWPPSSTTMTTTATTPTAPSSPTSAPPAPSMTTSARCRIPPRRRRPPSSTTTTTATPPTAPSALDPRAADSSLRSRSARRQLSPLPRPRRRLPPRRRPHAAASLRRWPRRATTTAPDPRAAGFPPRRXPPATSSPPLRPLPSAPVVRPAAAPHGFFYFPEMIFTAGL

SEQ ID NO: 105363 - protein, 56 aa, Oryza sativa
  Clone ID: PAT_MRT4530_102614C.1.pep
VRKLDSQLSIDIIVCAHSQTYCSQLCIEDGPPLADSPVSSGAAINNVGATSSLRCI

SEQ ID NO: 105364 - protein, 106 aa, Oryza sativa
  Clone ID: PAT_MRT4530_102615C.1.pep
MASASSSSSSFFDIEPLDGGEACLSGHAMDACSLCRKPLTRNCDIFMYRGNTPFCSEECRDHQMEMDEAAVRVSATNARERAARNEQRHRLDAGSVAVAANVPVLS

SEQ ID NO: 105365 - protein, 87 aa, Oryza sativa
  unsure (1)..(87): unsure at all Xaa locations
  Clone ID: PAT_MRT4530_102616C.1.pep
GHRHLXRRQSPPSRXXRXXCSRPPPLSTGAGRQPPSMQPAXASISSPRVGPPRRPPXRRPVLGPAVAGLHPAXPSWRGGEGRRRWGE

SEQ ID NO: 105366 - protein, 96 aa, Oryza sativa
  unsure (1)..(96): unsure at all Xaa locations
  Clone ID: PAT_MRT4530_102617C.1.pep
YQWGTRGSVLGRESSYMSGDIRLLTXADCVEHVTLTLVNGRADDKRCLCRALRKGIDTDLXLVSDENEEFWRGTEPLQLGRLPCLPDSVTVVGYSL

SEQ ID NO: 105367 - protein, 129 aa, Oryza sativa
  Clone ID: PAT_MRT4530_102618C.1.pep
MALTNLVLGAAVLAAAALLFATDIRKSGAMFRRNARKIWAWLDEEMKSASAVSRRSCSTWVSYMLSMEIHNGPPKSKSGPTPPTRRPEIQIVPPPPTSKLIGPPPPPPVQNGASKKEKLGMTKPVIIVD

SEQ ID NO: 105368 - protein, 96 aa, Oryza sativa
  unsure (1)..(96): unsure at all Xaa locations
  Clone ID: PAT_MRT4530_102619C.1.pep
DTSVAPFQGLTCTVGLTVRRRSTNSGFGNVXNGGRIKCMQVWTIEGMKKFVTLSYLSPITGEDLLKQIEYLLRSKWVPSFEFNKSVFVYRENHTSA

SEQ ID NO: 105369 - protein, 83 aa, Oryza sativa
  unsure (1)..(83): unsure at all Xaa locations
  Clone ID: PAT_MRT4530_10261C.1.pep
VRAGIIQVRTTMERNTLLLYVGFRVQCYKGSXTPGRTLTLLPLGLRLIESCPPFSVGRNVGAXATHPIGRDRSQTGHNPVMPD

SEQ ID NO: 105370 - protein, 34 aa, Oryza sativa
  Clone ID: PAT_MRT4530_102620C.1.pep
SCWLHVTHSMMHITHITLCTNKQNDTCLMMIYFG

SEQ ID NO: 105371 - protein, 211 aa, Oryza sativa
  Clone ID: PAT_MRT4530_102621C.1.pep
MGTVSSSSRRRAAGSQPSSSSWVKALDVENDEEAAARADADADAHALEAKGDKLMSQARRELHGVWSYVSRPFIVAARARFYFHKAAETFVLANSWRKAAAAHHEHAVCCMKIGRSGRLRAAFALFEAGKCYMKVLEPDDEEMTSRTVSDLEKSLRMFVLENELVMAAEVCVELANLYAMLKQWEKVREYRQKAAEFHAKTSDALFDTSTV

SEQ ID NO: 105372 - protein, 149 aa, Oryza sativa
  Clone ID: PAT_MRT4530_102622C.1.pep
LGHPRADAATVSRRRLALVVVTAASASSSAAASRRRAAPSRHAAHRASRCTAAAQRRRRAARFAAAAQRRHRATRHAATRPPRRPAAVRCRHTAVQLPPHRRSASAGQKRARGQRGATKKLEGRHIITEVDEDGRPSAPAEAAKNYVRH

SEQ ID NO: 105373 - protein, 63 aa, Oryza sativa
  Clone ID: PAT_MRT4530_102623C.1.pep
MKEEMMMFFPSGLRVMLVDDDMKTEMLSFFPDGLHVILVDDGKKAMRTATATLSTLHYLALGV

SEQ ID NO: 105374 - protein, 59 aa, Oryza sativa
  unsure (1)..(59): unsure at all Xaa locations
  Clone ID: PAT_MRT4530_102624C.1.pep
PPQGRPTAPPKTFVLAAPSTKASSGGMEMPVKSGENGXCGCNTCKCGPTCSGCSSCSCK

SEQ ID NO: 105375 - protein, 479 aa, Oryza sativa
  Clone ID: PAT_MRT4530_102625C.1.pep
MPTDKAPRLDGFTGIFFKVCWEIIKEDILLVLDSIYNLICAHLNLLNSANIVLIPKKEGAEGVADYRPISLIHSIAKIFSKMLALRLRPHMHTLISVNQSAFIKGRSIHDNFLFVRNIARRYHRLKRAMLLFKLDITKAFDSVRWDYLLALLQRRGFPTRWRDWLGAIFSTSTSQVLLNGSPGQRIKHGRGLRQGDPLSPLIFILAIDPLQRILSKATELSAISKLRGRTTRLRTSMYADDAIIFINPTRGDVTAFADILHRFGTATGLVTNLQKSQVAAIRCDTIELTEVLEGVPVARTGDITGGKCKVNWKKTCLPTSQGGLGVLDLEKFTRALRLRRLWHEWKDPTKPWVGLETPCDEIDRSLFAASTKITIGDENTTHLWDFAWIEGQRPRDLMPLVYVISKNRGRSLRNGKEEDAWVQDLALESHSPIIVELVEQLVVLWEAVRNVHLGIGEPDQITWKFTSSGRYTTSLAYHA

SEQ ID NO: 105376 - protein, 109 aa, Oryza sativa
  Clone ID: PAT_MRT4530_102626C.1.pep
MALDPKANHAAAAAASADNPTAAAAKAKVKVKVLFFARARDLTGVTEAPVEVPAGSTAGDCLARVLAAFPRLEEIRRSMVLALNEEYAPEDAAVGDGDELAIIPPISGG

SEQ ID NO: 105377 - protein, 986 aa, Oryza sativa
  Clone ID: PAT_MRT4530_102627C.1.pep
MESELGALSHVRQAAGAPAEAAASEATTSSPTIGIIHQILNLNRDNHFHPLRTQQENEPITKSAPPAAAHIAVSPMGLPVMEHLGSSSIVRGRGKNKRIWTYFEDEELIKALFEIALDPSWKSEGGFKNGYCQVLENVLAKKLPSSGLTAVPHIESRVRHFRTKFGAIEVMLTKSGFSWDDNRKMIQCEKQQYDDHCRKNNEAKGLYGVAFPHYDTLAAIYGKDIATGEGAEGLGEAVANMEKEIVQDIQDEEDEEDEERVSRETPRRSIDSAAARRSIDSAAARRSIDSATPRRSIDSTASSSKKRKKDSNKLKNTLSSDPFMDVFANVQGDLRDVTKHVGAMVASMQREAEIQEKAMAEEDPLQKIQNEAILECQKIGLTGTEVVNAAAAFVKVPAQMSMLLALPESLRREYVLKILAEDLSESADDAVLAYINQFLLEDEEDESCPGTITSVEDSALLAVEKPFVDILTASQEACQENSWIDSCCDFTGNGGLLDTFTTTHAACQPAPCEFEKEKGECAVHKGRKNPHDDCLLFEEESRRSKQLAVSEEETVREMFDKVLLCNGECELRAPLPAEARNCGVYVKGSGNKRGRKKGKSGASAEDDAVDLTTLLIHCAQAAAIDDHRNSNELLKQIRQRSSAYGDAGQRLAHCFANALEARLAGTGSNIYRSLAAKRTSVYDILNAFKLYVTACPFKKISNFFSIEAILNASKGMTRLHIVDYGIQYGFQWPIFFQRISKRPGGPPSVRITGVDLPQPGFRPAQLIEATGRRLHDYARMFNVPFEYHAIAAKWDTIRVEDLKIDKDKDELLVVNCLFRMRNMMDEMVTDDSPRMQVLKTIRKMNPNLFIHGVVNGTYNAPFFVTRFKEALFYYSSLFDMLETTASRVDENRLLIERDLFGREALNVVACEGTERVERPETYKQWQVRNIRAGFKQLPLNQETVKKARYKVKKSYHRDFLVDEDNKWMLQGWKGRIIFALSAWEPN

SEQ ID NO: 105378 - protein, 346 aa, Oryza sativa
  Clone ID: PAT_MRT4530_102628C.1.pep
RASSLPRSPLSRRAPVLVRPWATSPPPPPPPPPQPAAAAPGTPGNARHRASHRRWGCAFFSTPVLPPPCLTPSASPHILPRPHAGSGDGYPSDGGLLLSSGKRRRAQERKKAVPWTEEEHRTFLAGLEKLGKGDWRGISKNSVTHASPTQVASHAQKYFLRQTNPNKKKRRSSLFDMMATDMSPAPNCPVLPPSMGKLHDMVAMTKQLQNSSLEGVSSSSTVNLAPQVARDLPPPIPSFKATNVDSSLSKMNHMDGFLRAPMLFRPIPRIAEGASSSTPATASIADLEFQANLTACSNALFASPRRKPKKADPPAEKDLDLTVAPPSQQTRASISSQNAVGVIQVV

SEQ ID NO: 105379 - protein, 881 aa, Oryza sativa
  Clone ID: PAT_MRT4530_102629C.1.pep
MEHLGSSSIVRGRGKNKRIWTYFEDEELIKALFEIALDPSWKSEGGFKNGYCQVLENVLAKKLPSSGLTVVPHIESRVRHFRTKFGAIEVMLTKSGFSWDDNRKMIQCEKQQYDDHCRKNNEAKGLYGVAFPHYDTLAAIYGKDIATGEGAEGLGEAVANMEKKIVQDIQDEEDEKDEERVSRETPRRSIDSAAARRSIDSAAARRSIDSATPRRSIDSTASSSKKRKKDNNKLKNTLSSDPFMDVFANVQGDLRDVTKHVGAMVASMQREAEIQEKAMAEEDPLQKIQNEAILECQKLGLTGTEVVNAAAAFVKVPAQMSMLLALPESLRREYVLKILAGPLALHDSPHPTSHENPRGLGHRPSRTSKPTHLAALAFASVPRRARGLLRASPPPGLVALPPPGLAAFDTVSRPRRARHLLQASPLRFSYRSQAAHASPPSSNYYTMDRGKEARASRSKRGQKEDEMRLRREAAEVLDLQRNGDLDMALDRAMSLFNASPCPMIYNLVGDLNMKAFHSRAAKGSPEILAESQFNRALSIARPLDPAIHNISYGVSLPEKASKSQRITAARERLQRAIDINNNACCEVDVERVLSIAKSSGVAYAVHRAAAVATTFPKSARAQFLPTYVALDLAKSIEPDADKEELRMSVVEPIEKADDPSSHDIPVGPFTAKEVADAAELQREKRKEGNDIIKAVKKKLRNLPSDRSSNEVCEVLVENANPSDLELIDVEDNGVKPSATLETKGTSNYQNSVQDVPKILVPKISDPSLYKPPPDPRIVNQQATRYGYSALHRPAIGQSVVTPVNRLVEIVDAANKFDPYEVEHSHQSYRREQAKIPKDQELCVICFFERYSTIAMASGKEILSSAAVGCYCDLDFHRNDGE

SEQ ID NO: 105380 - protein, 47 aa, Oryza sativa
  Clone ID: PAT_MRT4530_10262C.1.pep
RALPGAARASSLLGRSGRSGRLLVRQAESCSRRSWRAMRATAPDRPI

SEQ ID NO: 105381 - protein, 1143 aa, Oryza sativa
  Clone ID: PAT_MRT4530_102630C.1.pep
MESELGALSHVRQAAGAPAEAAASEATTSSPTIGIIHQILNLNRDNHFHPLRTQQENEPITKSAPPAAAHIAVSPMGLPDRAPPQLLLHIARVAIAAPSPCARRRRLLLTLCASPAQPPRPARVPAPPHRPACRRRRPLTPRASPTPPSCAPPPPPSSDVDLDRKNSGNKGEAVKQGAGAINHIGLPSLLSSINHLAVMEHLGSSSIVRGRGKNKRIWTYFEDEELIKALFEIALDPSWKSEGGFKNGYCQVLENVLAKKLPSSGLTAVPHIESRKNNEAKGLYGVAFPHYDTLAAIYGKDIATGEGAEGLGEAVANMEKEIVQDIQDEEDEEDEERVSRETPRRSIDSAAARRSIDSAAARRSIDSATPRRSIDSTASSSKKRKKDSNKLKNTLSSDPFMDVFANVQGDLRDVTKHVGAMVASMQREAEIQEKAMAEEDPLQKIQNEAILECQKIGLTGTEVVNAAAAFVKVPAQMSMLLALPESLRREYVLKILAGWILFEDSRVMLDSGSYDDVDYGDLFSIPNPPAPHLLNFPLQFFPSNGFISSADDSHRSPAGMFGSTPSPTSTTTELENSEDLSESADDAVLAYINQFLLEDEEDESCPGTITSVEDSALLAVEKPFVDILTASQEACQENSWIDSCCDFTGNGGLLDTFTTTHAACQPAPCEFEKEKGECAVHKGRKNPHDDCLLFEEESRRSKQLAVSEEETVREMFDKVLLCNGECELRAPLPAEARNCGVYVKGSGNKRGRKKGKSGASAEDDAVDLTTLLIHCAQAAAIDDHRNSNELLKQIRQRSSAYGDAGQRLAHCFANALEARLAGTGSNIYRSLAAKRTSVYDILNAFKLYVTACPFKKISNFFSIEAILNASKGMTRLHIVDYGIQYGFQWPIFFQRISKRPGGPPSVRITGVDLPQPGFRPAQLIEATGRRLHDYARMFNVPFEYHAIAAKWDTIRVEDLKIDKDKDELLVVNCLFRMRNMMDEMVTDDSPRMQVLKTIRKMNPNLFIHGVVNGTYNAPFFVTRFKEALFYYSSLFDMLETTASRVDENRLLIERDLFGREALNVVACEGTERVERPETYKQWQVRNIRAGFKQLPLNQETVKKARYKVKKSYHRDFLVDEDNKWMLQGWKGRIIFALSAWEPN

SEQ ID NO: 105382 - protein, 112 aa, Oryza sativa
  Clone ID: PAT_MRT4530_102631C.1.pep
FGGFYFFVCFFFFFYFFFVFFYNRGWPGKPRKTLNEKGNRGGGKKILGNWGGIYQSLTALDPGQKGFSRTGTQGANGFTTQKVKGRFQQRAHLKTPNATARGGGPHKKRARP

SEQ ID NO: 105383 - protein, 555 aa, Oryza sativa
  Clone ID: PAT_MRT4530_102632C.1.pep
MDRGKEARASRSKRGQKEDEMRLRREAAEVLDLQRNGDLDMALDRAMSLFNASPFPDCIETTTAHGESLSASKEYSLAESQFNRALSIARPLDPAIHNISYGVSLPEKASKSQRITAARERLQRAIDINNNACCEVDVERVLSIAKSSGVAYAVHRAAAVATTFPKSARAQFLPTYVALDLAKSIEPDADKEELRMSVVEPIEKADDPSSHDIPVGSTKGDEYDDRICFVKKQIHGLLQTLVLFARRDWSLITSEKQRMILSVRLDVLCEYYSKINRSLSKSLTDAHHFEVADAAELQREKRKEGNDIIKAVKKKLRNLPSDRSSNEFHVACKIIQEMCHKLLKSSCTDYREFVLPLLRFHRWLSYSDNLIAGEDKRSEVLVENANPSDLELIDVEDNGVKPSATLETKGTSNYQNSVQDVPKILVPKISDPSLYKPPPDPRIVNQQATRYGYSALHRPAIGQSVVTPVNRLVEIVDAANKFDPYEVEHSHQSYRREQAKIPKDQELCVICFFERYSTIAMASGKNAGTKCNLCNARFLKDSDLEFHRRYYHQQQ

SEQ ID NO: 105384 - protein, 191 aa, Oryza sativa
  Clone ID: PAT_MRT4530_102633C.1.pep
MAAATNELQFVWVQLQAGSTVAKIGPWGGDYGGRDHDVTVAPRRLRSVSLRHGKIIDSIAFTYDGGDGDGELHSVGPWGGDGAELPEAVARKLAAGERPPGATVAEFTFDAGERVTEVHGTVGPFGDRDSLVTSLKLVTDRRTIGPFGYGAGTPFSVPVRGDGGVVGFFVRAGAYLEAIGVYVNPCIPSEK

SEQ ID NO: 105385 - protein, 412 aa, Oryza sativa
  Clone ID: PAT_MRT4530_102634C.1.pep
MERLSFTYYPVGRVLNMMAVSFMMQFTVMEHLGSSSIVRGRGNNKRIWTYFEDEELIKALFEIALDPSWKSEGGFKNGYCQVLENVLAKKLPNSGLTAVPHIESRVRHFRTKFGAIEVMLTKSGFSWDDNRKMIQCEKQQYDDHCRKNNEAKGLYGVAFPHYDTLAAIYGKDIATGEGAEGFGEAVANMEKEIVRDIQDEEDEEDEERVSRETPRRSVDSSAPRRSIDSAAPRRIIDSAAPRRSIDSTASSSKKRKKDSNKLKHTLSSDPFMDVFANVQGDLRDVTKHVGAMVASMQHEAEIQEKAMVEEDPLQKIQNEAILECQKLGLTGTEVVNDAAAFVKVPAQMSMLLALPESLRREYVLKILAVLAIVLKHHGGLSLPQLLQSPPETYHAIEDGHNPSKTSFIDMKD

SEQ ID NO: 105386 - protein, 91 aa, Oryza sativa
  Clone ID: PAT_MRT4530_102635C.1.pep
LHAQLSRGDYVLAHHRDHPPDLEPEQGQPLPPPNSPHAPRPDRAPPQLLLHIARVAIAAPSPCARRRRLLLTLCASPAQPPRPARVPAPSH

SEQ ID NO: 105387 - protein, 67 aa, Oryza sativa
  Clone ID: PAT_MRT4530_102636C.1.pep
NFQFFFPVPLMQVVFPFKFSFFFAPRGWFSDVLKKGLICSGIVFFFPGFYPFQLNKVFLFFFKICFF

SEQ ID NO: 105388 - protein, 109 aa, Oryza sativa
  Clone ID: PAT_MRT4530_102637C.1.pep
MHSALDASSFEWKYKARWPLSLHVAADTDTVASHNFSLFRPFRAEKNKQPNAFGQGLIRDPVAVFAGRAPRNVRPYAAIQAGADGPAAASEAWTMDHAAGAISVDLSRA

SEQ ID NO: 105389 - protein, 80 aa, Oryza sativa
  Clone ID: PAT_MRT4530_102638C.1.pep
GGVPPKTNLFPHPHLNSFPPPRAPRGAPPPPPLLHRPRQCPQHGCPPGPPCGLNPRSSKIPLKNGFFSKGGFIFLHEYGP

SEQ ID NO: 105390 - protein, 97 aa, Oryza sativa
  unsure (1)..(97): unsure at all Xaa locations
  Clone ID: PAT_MRT4530_102639C.1.pep
RQESFKELQQLFVDMFQADLDSGFCNGPSKCYHTQAQSQTRTSSTSPSMSPSPPPPVATXAESPSCNGINKRGSSAMDSWKALRASEVGSGQSQSGF

SEQ ID NO: 105391 - protein, 222 aa, Oryza sativa
  Clone ID: PAT_MRT4530_10263C.1.pep
IKIPKIETLIPIHPSPIVVVATIVVAIVIVIAPVVRHRRRSLLPPSSKAPPFLRLSPADPTLPEPGAVHPPFLRPDNTRSATTWLTASEAAPPEASGTGFATIEVAVVAALASVIMVALVSITPPATCRFGASNTTPLHPFAVSARSTLMVAPAPIGCPSAACTFCRPLAANRPSHCCSLTAPIASRQGEPMEERRKDGEGEDRRDVEERKKLNGWKKRRWI

SEQ ID NO: 105392 - protein, 130 aa, Oryza sativa
  Clone ID: PAT_MRT4530_102640C.1.pep
KYSQIKPPPRRRELPSAQLRGGEGATVEGTVAAAAATPRRGSSSPVGSTSEGEGAAAATTPGGEEQCRHAGEGSSCRRLGFEETERRRERGLWRERRCRKKGCPRPGEAPWVVGERWRGTVLLDEGRPSC

SEQ ID NO: 105393 - protein, 117 aa, Oryza sativa
  unsure (1)..(117): unsure at all Xaa locations
  Clone ID: PAT_MRT4530_102641C.1.pep
MSGSYGSDDYRGGYGGRGGGGGGRGRGGGGGGGGGYGGGGVGGGYGGGGGGYGGGGGGYGGGGRGGGGGGGYGGGGGGGRGGGGRGGGRDGDWVCPDPSCGNVXFXKRTDSTSVDTS

SEQ ID NO: 105394 - protein, 115 aa, Oryza sativa
  unsure (1)..(115): unsure at all Xaa locations
  Clone ID: PAT_MRT4530_102642C.1.pep
PESPPRPTHHGRERCKKLSAETEDGNIHEHLRPWWRPAQSNDLPSISRRGSCFAIVCSGGKKIKTGRPYVIXGGGMSVDIDAXSGRTSTGKGAIQFGDQYRAIVDWYMPLYSPEE

SEQ ID NO: 105395 - protein, 353 aa, Oryza sativa
  Clone ID: PAT_MRT4530_102643C.1.pep
MNNLQSEMASPRICCSALLVLLLVSSCNAGDHPACPAAWSAAVGAELFHGGVGGGGGGEAQCSAAAPHTPVAVFAHDVDPVRFALNLEFAEAEFFLHAAFGVGLDHLAPNLTLGGPPPVGARKAGLDELTWRVCAEFAYQEIGHLRAIQRTVGGIPRPLIDLSAHNFARVMDEAVGYHLDPPFDPDANSLNFLLAVYVIPYLGINGYTGTNPLIDGYATKRLVAGLLAVESGQDAVVRGLLFEHRRETVSPYGATVAELTDRVSALRNKLGQCGVKDEGLIVPEQLGAEGKICTNILSANVDSLSYSRTPAELLRILYLTGDEHVPGGFYPEGANGRIARMFLKKPPRINHGV

SEQ ID NO: 105396 - protein, 78 aa, Oryza sativa
  Clone ID: PAT_MRT4530_102644C.1.pep
ALILSLIRRPCTRLHCRSCPLTLTCPCCSCSLTALLDQFISSSGSTFGSHCCSRTFCLFHVKLQCDLGLEQGIYLPSS

SEQ ID NO: 105397 - protein, 152 aa, Oryza sativa
  Clone ID: PAT_MRT4530_102645C.1.pep
MPPSLLQRLPLPLWPPPAATAAPAASARCPFCSSDEDVEHLFLRYTGVATIWHAFGLDEQQIASLPQLEGVWDIPPPGQPATPRVWHTILLAVMWNIWKRRNNKVFNSVDDPASLVLQRCASDIDLCSHRCKNAESKQQLRNWASYLYVIIS

SEQ ID NO: 105398 - protein, 100 aa, Oryza sativa
  unsure (1)..(100): unsure at all Xaa locations
  Clone ID: PAT_MRT4530_102646C.1.pep
GKCISPEXVRLSGCSPPXAIXXISNAWIXSTKTAARXAAXAARLARPAAPVDGGXRRRRRRRAALHIXCRERXQELHVNSSLSLSTSVSLLSCCCLSSLG

SEQ ID NO: 105399 - protein, 67 aa, Oryza sativa
  unsure (1)..(67): unsure at all Xaa locations
  Clone ID: PAT_MRT4530_102647C.1.pep
GNHFXXCALXQASFLXLDKVTGRLXLDFXXXSYSQLLLXVGVVXXXGXVXXVALXXXALGFXNTXXV

SEQ ID NO: 105400 - protein, 619 aa, Oryza sativa
  Clone ID: PAT_MRT4530_102648C.1.pep
MGEPGGAEAAVSARLLELAADDNAAGLGELLAAWPSLADEPAPWYTPARGAEPLTPLMVAAVYGSVGCLDALLSPPYLVDPNRASASSLSTPLHLAAAGGSASAPAAVSRLLAAGADPALLDHLQRRASDLVALPPNSLPLKNHLLSLLGARKEWPPDPSLPDIKNGAYASDDFRMYSFKVRACSRAYSHDWTECPFVHPGENARRRDPRKYHYSCVPCPEFKKGAGCRRGDMCEYAHGVFESWLHPAQYRTRLCKDGVGCARRVCFFAHTPDELRPLYVSTGSAVPSPRGALEMAAAAAAMGMGLSSPGSSSFTPPLSPSAGGGGGGGGGSGGGGAWPQQPSVPALCLPGSAGNLHLSRLRTSLSARDMAVDELLAAAAAAADYDGLVASPASIRSARGKALVPSNLDELFSAELAAAAASRSPRYADQGGAAFSPTRKATVLNQFQLQQQHSLLSPRAAAVTPEPVSPMSSRLLAALAQREKMQQQTLRSMSSRDLGNAASLLVGSPVSSSMSKWGFPSGNPDWGADDEELGRLKRCSSFELRSGAANGNHEPDLSWVNTLVKEPTPEKMMTTTSAMDSIGILGQNTSRDHIVGGEDDTAGVISSWLEQLQLDEMVV

SEQ ID NO: 105401 - protein, 66 aa, Oryza sativa
  unsure (1)..(66): unsure at all Xaa locations
  Clone ID: PAT_MRT4530_102649C.1.pep
MIDIWVLLDTKRVIYSSDYLLRADRVLVYESGGFMMGVPMTMPGRRVTXIHMAHNKGAGSTKNGRD

SEQ ID NO: 105402 - protein, 68 aa, Oryza sativa
  Clone ID: PAT_MRT4530_10264C.1.pep
RQRLLSATLTSFVVEGNICSYFQFRFFFSFSPFAICSSVVVADDDGVCRNALAHSSCRCGLFFPLSFS

SEQ ID NO: 105403 - protein, 61 aa, Oryza sativa
  Clone ID: PAT_MRT4530_102650C.1.pep
PQLHMHICMTQQNICYTNIIIHQLNAQSKAPCMPPHLHDTRSELMYICLPYVHYIIFYDAI

SEQ ID NO: 105404 - protein, 198 aa, Oryza sativa
  Clone ID: PAT_MRT4530_102651C.1.pep
IRVRVLVLLADSPRWSASISTHARVGSGAGERGEMSKLRRRRLGVRRGGDVGTRRRKPRLGGDEGGNEVALALGTGMGALVDLVGGAVTGAGVAGVFLKETDGVVVSIVVGASGDGGIDVENDLLLRSNPAISAPPPPPTNRRQWSSSPRTTAESPWLSRGRRSGGRLYLPPICSMSSPAPLCSVRHPCCVSFKKKLK

SEQ ID NO: 105405 - protein, 933 aa, Oryza sativa
  Clone ID: PAT_MRT4530_102652C.1.pep
MEVIGKMPAKVKRIRFADSQTECEVVLPLTMGGGATSSAIAPDKPAQKKGKRKRRSKPVAGAATGDEAAGSKGPNLTRCSAALASDACRALSNTHHEKLEEIGLDAVACMTLASLEKPDLIRWLMDRTDPDTMCISLDDDRKIQITPRIVQLVMGTPLGGKDIVIPPKKVVRIVHDRIVEELGLARNVRLTPKMLIEAIKQRKDDPMAVRFFVMVLMSTLLIPTTDFYIPKDYVWLAADLDRVAAIDWSKVLYLDNILPPREVVMERMFTPRIQMFTKDIVDQLVNEDQNAGGDGTPPFGNLPLRPISTTCYANKQNVKGKGPMSAVIRASSLTFPNMSAIISTHLAGLPEEKRICLMDALGEYDKQAKESATEIERQFSMVVDKQNLLCQRLIDALQSDSSASPRPYAGQSSGCQQISNATVVQECMTPQMHPIVAQQHHKQMPNEQQQQHRLDEQHQRQDHQPKQNHPHDELQHQKQQPEQQQQDQVQQQQQQEQPHDQHLQQVQMHDQQQPLHHEERQEQHDQIAGSPKSAGDGMANVDHVDTTPQARHGVTVQSPTANIENPLLGLTRQLTEESAIPVEHEGADGPSKKADEMDVSADPMDVHRIDEPNLQQHTPTVMKETAPEDTAIIVTTDAGVAHGFYSVPAGDARLHLPRPDQGTHTVPSIANPPQDVGAAGVHHTDTSPATHSSVRSDDSHLDSLNEALSITPTPSLVLPPDDEMTDTQVYDKIEEICLREGAPSLSELMSDTNVDIEGVKSTPWSQPKRFISRPARFVSPVVVGPSHHTSNIDASVQLRDFIINNQDRINSHWSLYAINIPHKRIDIMDSNNYPMIGTQFSDHHRHLSKRIVKRLSDALQTALPKKFCRFGGFRKTPMPCAKMAICSNDCAFYIMRFMEAYDGNREPIETMIIPVTISTPATRRSSDQASSTN

SEQ ID NO: 105406 - protein, 76 aa, Oryza sativa
  Clone ID: PAT_MRT4530_102653C.1.pep
MRQKVSDMEEELLTVNDASGKVQLLQREVEKAKESERTMLEPLIYTTKQLEQTKTLVEEAKLEITTLHQGNTSLEA

SEQ ID NO: 105407 - protein, 37 aa, Oryza sativa
  Clone ID: PAT_MRT4530_102654C.1.pep
QWFNQPLTKHCTKHHFYKRHIPLNPLLYVTHALMNGQ

SEQ ID NO: 105408 - protein, 104 aa, Oryza sativa
  unsure (1)..(104): unsure at all Xaa locations
  Clone ID: PAT_MRT4530_102655C.1.pep
TSRRLWRCRRWPHRRWRRCLLHRARRRRLPPRPPFFSPAASGASASPPXRLRENELGACPPVRRRAVLRGDASFAFPFGTRRRRLGARPPVASRTKTSNFKERP

SEQ ID NO: 105409 - protein, 673 aa, Oryza sativa
  Clone ID: PAT_MRT4530_102656C.1.pep
MDGSSACRVAVELGPFVEFTDNGRPEFHVTKKINWVLDKDTICWIDLMSDLDVEVKHGPAQELSVKFLDINAGRFAQIASDSALLHACDLYWEQRRLPLVVEVSDDPQNRTEPCVEQGTIEAPVDTWGENDEVEYVGVADEKEKYKDLVSDDEEVDPDYEPDSDEDDDDLAVDDEEEFPYCDSRRYRAYCKAKRCKWRIHASRLQDGRTWQIKKLPYQHNCASTAGLENNCMDTKILGFSRMFVALKPCVDGFLNGCRPYLGVDSTVLTGKWRGQLASAIGIDGHYWMFPVVYGVFDSETTDNWAWFMEKLHLAIGSPIGLVISTDAGKGIDTVVSRVFTNGVEHRECMRHLVKNFQKRFSGEVFERNLWLASRAYRHDIFELHYNEMMEACPKPVEWIEDFHKHLWARSEFSTASKCDYVTNNIAETFNSWIRHEKSLPVVDLMDKIRQMIMERLSVRKRLADKLTGQILPSVMKAIYAKSKNLGYKLYSAHSHTGEIGGTCRDLKTWRHTLDLIAQECNCKKWQLTGIPSTHAIFLIISRRGLELEKFVSDYYSVATFKRAYAGFVVPMTDNSQWQKVNVGFKLYPPILKRSAGRPRSRRLKGVEEGCSGKRKHRCKRCGQFGHIMKTCNEPVDDSSAPPPASPKPKRKRVKKVVVNPITNPTTDQFGAAL

SEQ ID NO: 105410 - protein, 409 aa, Oryza sativa
  Clone ID: PAT_MRT4530_102657C.1.pep
MVRLGIPRATTSPSRPISRQNNPPRLTPAIAGAPNPRGMAKKAAPKSAAAAAGNCKYWLLKTEPGEWSWSDQARAPGGGVAPWDGVRNRQAVNGLRAMRVGDRCLFYHSGAGAASRRVVGVVEVAREWYEGEGEAASGGAVDVRAVGEFRRPVALGEIKKAAGGGGGEVEGMREFALLRQPRLSVMPVPAKVWDWICEMGGGGGGDPGGGRSGAAVAGSGPPADGAAPAALLRGDGGHIDDGAVAFFTVLAAATSLLALPSSLRRRAATSRRLWRCRRWPHRRWRRCLLHRARRRRLPPRPPFFSPAASGASASPLTHGPGTKGRGVEEEIEALGCVASRTYPRNGLPHPERLRENELGACPPVRRRAVLRGDASFAFPFGTRRRRLGARPGDTDCRWPYGPVWGSLRF

SEQ ID NO: 105411 - protein, 88 aa, Oryza sativa
  Clone ID: PAT_MRT4530_102658C.1.pep
PPPGGTPPSSWPRLKSIFSPGPPPPFYCPGGCVPRGPPPPRGRRPPSGRPLSPASVLRPKESLFLGTGPPPPPPHQQGVCRVQNISTT

SEQ ID NO: 105412 - protein, 91 aa, Oryza sativa
  Clone ID: PAT_MRT4530_102659C.1.pep
FRVPIHCCAGMWIQEFLGRADLEVVAARSCATGGEGDLLHMVVDHLIWMSNIAKATTTWVLARLVMYPYLYRKKKIPSLEEKGIHFDWISG

SEQ ID NO: 105413 - protein, 191 aa, Oryza sativa
  Clone ID: PAT_MRT4530_10265C.1.pep
MAGTKLAALGFVVLLSIGLASAARVERYSSSQGSGTGGGEGGGYVNGGGAGKGVGAGSGSSNSYGAHASGGGGGGGGGYSQYGGSGSGSGYGTGSGSSQTSQNGYYGYGGSSSASGAGVGGGAGQAGGYWPSNGHGSGSGTGYGSSTANNYYYGPYANANAGGNGGGNGQGQYGGSGGGGGAGVGSGDASP

SEQ ID NO: 105414 - protein, 67 aa, Oryza sativa
  Clone ID: PAT_MRT4530_102660C.1.pep
RQPRTVVMEVEIRIKDVCTPLTLPQLNPTPRQTWMAPDTPPTSHPNRPLSIVHTPHCATQLHTCSHI

SEQ ID NO: 105415 - protein, 58 aa, Oryza sativa
  unsure (1)..(58): unsure at all Xaa locations
  Clone ID: PAT_MRT4530_102661C.1.pep
LPMLGCTDATQVLKEPXEAKRAYPDALVRIFVFGNVRQVQMIGFMPYKPLGCEESAGN

SEQ ID NO: 105416 - protein, 36 aa, Oryza sativa
  Clone ID: PAT_MRT4530_102662C.1.pep
INHHNTLTLETKTQWKDSHPEPHAIQQQRCLLILYL

SEQ ID NO: 105417 - protein, 490 aa, Oryza sativa
  Clone ID: PAT_MRT4530_102663C.1.pep
MAPPLVSWSDGLPPEILLIVLAHIHCLADRVSFAAACRNWRSTSKLADAEADKPAPPPPRRHVPWLLAPSPVERPTITSLVSGQTRRISIPAGLRGARFFGSYTGGWLAAALTMCGEHLVANVHSGETVSLPSRVVSQVTCTRKTTTVAIIRAVALSAAPNSAGCLAAAFVCGTSNLAFCRVGGPSKSNVWTGMEVFPGTIDDMIFFEGRFHALTTCELMTVFSISPSPESDLPDGRVEICHRSFFMPMRIETVMPHLRESADMSRYLVVSRNKLLMVVRYYVTAHTAAAAIAGVGVSHARTMLFKVFQMEKFCSHGGFWEEIEDLDGRVLFLARCCSRAFEVSEIHGFEGGSIYFLDDINFHLSLVIKDKADYPCADVGMYAISPTDGVARPGMQLAAGMRPSIYSTKHHLLRIMDCKGIGRIYRYVSTALEGSGLMPPPSGSDTASTSSSASAAATNKRKNERSILGTIWGIRSAPFSRFSPPLWLEP

SEQ ID NO: 105418 - protein, 838 aa, Oryza sativa
  Clone ID: PAT_MRT4530_102664C.1.pep
MATPMEEDLPGAEAEAAGPAPPPAAATGGDGDGENPAPAPASPFSDSDSDSDDGGEGGDAADELRIQALEQALQEQPLDYESHVQYIQCLRKSGKIEKLRAAREEMNKYFPLTPKMWQEWTKDEASLRPESFEDIEKLYERGVQEYLSVRLWRDYLDFVEENDKSVSQCSPSGLTKMRNLFERAITAGGLHVTDGSKLWEAYREYEMAILTIIDDDDEEKAKQVQRIRVLFHRQLSVPLVDMESILAEYKSWEAEQGNANDPTSNFDGVPSNVVAAYKKATEMYNVRKQYEDQLSNADASDDDKLEEFLKYIKFEESSGDPARVQVLYERAVAELPVSTDLWMGYTSYLDKTLKVPAVLKSVYQRATRNCTWISELWVRYLLSLERIRASEEELRHVFEQALQCSFPSIKEYLEIYLTRVDSLRRRMADGLDFQLIRQTFMDATEFLSPQMGTEDLLLLHAYWAKLERTLGNDLAAARGVWENTLKKSGSVLEVWQHYIAMEIETEHIHEARSLYKRCYTKRFSGSGSEEICHAWIRFERECGTLEDYDLAVKKVNPRLKELMMFKAQQEVKVDTHVVPKETTGSDFSQKRKSSKIPTKQQPPAKKKKDNPPKSAVLSDDHGSKEQISTGHVKTGEVSGEKTQASMEVNLVDGSRRENTASKESKSNFYSDKCTAYMSNIDLTANEEHIRRFFSDIGGVTAIRLLRDKFTKKSRGIAYVDFSDNEHLEAAIRKNKHKLLAKKVSVARSDPSKGKKNREAGSFSKDQATSGDRGETAEFANRPDKEIPKDKPTITGKNTFAAPRSVVKPLGWTQKDEKSDVGAEELKSNEEFRNLLLKK

SEQ ID NO: 105419 - protein, 51 aa, Oryza sativa
  Clone ID: PAT_MRT4530_102665C.1.pep
SPWAGWSKIKPMVLKNCFRRDAPRDIVVQHAVLLERTYICGCSRHASEWEV

SEQ ID NO: 105420 - protein, 335 aa, Oryza sativa
  Clone ID: PAT_MRT4530_102666C.1.pep
MEQQQPESAAPATEASPEIIFRSKLQDIAITNTLPLHRYCFERLPEVAARPCLIDGATGGVLTYADVDRLSRRLAAALRRAPLGLRRGGVVMSLLRNSPEFVLSFFAASRVGAAVTTANPIAGTGCLHFWDDLMSEDEASPLAGDEDDEKVFDPDDVVALPYSSGTTGLPKGVMLTHRSLSTSVAQQVDGENPNIGLHAGDVILCALPMFHIYSLNTIMMCGLRVGAAIVVMRRFDLAAMMDLVERHRVTIAPLVPPIVVAVAKSEAAAARDLSSVRMVLSGAAPMGKDIEDAFMAKLPGAVLGQIQWREILTCEGLKKPFFSRFYLGFDTIYTQ

SEQ ID NO: 105421 - protein, 62 aa, Oryza sativa
  Clone ID: PAT_MRT4530_102667C.1.pep
LTCELCSQWVTRQSSLDNCFLVLRGSIAHIENIACISDISMQDQGVLPGSIYSYHQHNYANT

SEQ ID NO: 105422 - protein, 561 aa, Oryza sativa
  Clone ID: PAT_MRT4530_102668C.1.pep
MEQQQPESAAPATEASPEIIFRSKLQDIAITNTLPLHRYCFERLPEVAARPCLIDGATGGVLTYADVDRLSRRLAAALRRAPLGLRRGGVVMSLLRNSPEFVLSFFAASRVGAAVTTANPMSTPHEIESQLAAAGATVVITESMAADKLPSHSHGALTVVLIDERRDGCLHFWDDLMSEDEASPLAGDEDDEKVFDPDDVVALPYSSGTTGLPKGVMLTHRSLSTSVAQQVDGENPNIGLHAGDVILCALPMFHIYSLNTIMMCGLRVGAAIVVMRRFDLAAMMDLVERHRVTIAPLVPPIVVAVAKSEAAAARDLSSVRMVLSGAAPMGKDIEDAFMAKLPGAVLGQGYGMTEAGPVLSMCLAFAKEPFKVKSGACGTVVRNAELKIIDPDTGKSLGRNLPGEICIRGQQIMKGYLNNPEATKNTIDAEGWLHTGDIGYVDDDDEIFIVDRLKEIIKYRGFQVAPAELEALLITHPSIADAAVVGKQIEPEIGEIPVAFVAKTEGSELSEDDVKQFVAKEVIYYKKIREVFFVDKIPKAPSGKILRKELRKQLQHLQQEA

SEQ ID NO: 105423 - protein, 131 aa, Oryza sativa
  Clone ID: PAT_MRT4530_102669C.1.pep
MAKLDGTANKRREPHKAVSAVHDSMSMTRLYMSSIAYAALEKWSGKWRLSVSKNIRTNLVISFLPNKNCLLPDFPGRSRAEAEAGALGKAIVRRVLGKADSAYAIAQTHITQCNGNATARQPKREEETEEK

SEQ ID NO: 105424 - protein, 785 aa, Oryza sativa
  Clone ID: PAT_MRT4530_10266C.1.pep
MMIPGRNMSPAMIGRPNGGGGGGGVAYASSSSALSLMQSLLDGHHHQLPSLLQQHHNGHHLLDQHQQHQHQLPPQATTTSESDGRAPRDELEMSKSGGSDNLESGGGGGGGGSGGDQDPNQRPRKKRYHRHTQHQIQELEAFFKECPHPDDKQRKELSRELGLEPLQVKFWFQNKRTQMKTQHERHENNALRAENEKLRAENMRYKEALANASCPNCGGPAAIGEMSFDEHHLRLENARLRDEIDRISAIAAKYVGKPAAAVSAAYPPLPPSNRSPLDHMGIPGAGADVFGADFDKPLVIELAVAAMEELVRMAQLGEPLWAPALGGEALGEEEYARTFPRGLGPKSPELRSEASRETAVVIMNHVSLVEMLMDVGQWTALFSSIVSRAATLEVLSTGVAGNHNGALQLMSAEFQMPSPLVPTRETQFLRYCKQHPDGTWAVVDVSLDGLRAGAGGGCQPAAARGHRRRPSGCLIQEMPNGYSKVTWVEHVEADDQMVHNLYKPVVNSGMAFGARRWVATLERQCERLASAMASNVASSGDAGVITTSEGRRSMLKLAERMVASFCGGVTASTTHQWTTLSGSGAEDVRVMTRKSVDDPGRPPGIILNAATSFWLPVPPSRVFDFLRDDSTRSEWDILSNGGVVQEMAHIANGRDHGNAVSLLRVNNANSNQSNMLILQECCTDATGSYVIYAPVDVVAMNVVLNGGDPDYVALLPSGFAILPDGPDGGGGSLLTVAFQILVDSVPTAKLSLGSVATVNSLIACTVERIKAAITGDNGVAPPCPR

SEQ ID NO: 105425 - protein, 118 aa, Oryza sativa
  Clone ID: PAT_MRT4530_102670C.1.pep
MVLEEEYMKFQIMVTLIQFGQLLQQVALAVFGRFICFSCVPSKWLFGACVFYFGFAKIMPTYFWAKYSQFDDLPSNLLHDSCKKMGKWKEEEEEEEEEEEEEEQLKNLAAAYKLKACR

SEQ ID NO: 105426 - protein, 421 aa, Oryza sativa
  Clone ID: PAT_MRT4530_102671C.1.pep
MPYRPTLSLSPLLSLPLIFPLGVAGCRRRSAPLYRPLDSRSSTSRRHSDANRGNSPAAPHSLDIYISSPAAPHTHNANENIQFRSISALSVMNSQKQNWHDQSRARSIMTCNTEWHGGSSTVIGDSFFKGFQSDKPGKLCFDDDRQSRWRRLANFGGFVDWAFAQRGDADIQSVIIFMSRLDSARPEQVNEWLRYAVRRVVKTFWFNACDSTPIGAWWAPPPRDHGHQLPTVELPSYGRTASINLNLSSYPFRLKLPASPAARYEALTDLSLSSAWFGEDEAVAGRRTLGDFISSCCPRLRKLEIIDPMRLPQLVLRAEALEELIVASTRDTQTMDVTAPNLRIFELHYFNSMTSVTSYGESIDLVVRITAPRLEEIAINNSTLEIEDNLDLRIHGLASVRRLKNLTLAMHGHNCCNTDYG

SEQ ID NO: 105427 - protein, 63 aa, Oryza sativa
  Clone ID: PAT_MRT4530_102672C.1.pep
LLGVSSVGYTNEVVVFLLNLPMFQDNNPPYCLPDLRARIATFHGITLDRRTCISSNRSRVNRQ

SEQ ID NO: 105428 - protein, 443 aa, Oryza sativa
  unsure (1)..(443): unsure at all Xaa locations
  Clone ID: PAT_MRT4530_102673C.1.pep
MLAMAASRSSVSSSFVSSSFTANVVLCMFLPITISLVVEDPSPPSSPVCPSEQSSSPLSAVVAACHAPLALCRRLNWGISQTSSPSGSFFFNRLYRSISKPGMYHSKPGANQIISSYSIIYYVFLNTSDALTILRNDGNAKLTRKTRKKTSKNQINSTCRDHPNNQPKPANGTGGSELKDDSTRTNERSTGNISFERXANDSTMAVTKPGTERRPHRGRPKRKRQRRRQRQHTEMTTTLGPNKIRLXIKALXKTYAGERHGSGGCRRTTAQICKRWAPGERARGDGPYQHLRDDGRQRKMAGDELGRAARYWSAXAAPFRRSSAEENRWPGFTLTIHSRXSDGTERRRPRRRRGADGPAAGGGEAWIHVGEVLPEVFGVGEVEAGLLLLLANPTAAAATEGDDHSDCAGLLERRPEVEREGARGESVSGDGSGRDLRGWVEDD

SEQ ID NO: 105429 - protein, 75 aa, Oryza sativa
  Clone ID: PAT_MRT4530_102674C.1.pep
AFTYYASRCIAVDDAGDVRDSEVSGKRWTHDADAWQCMITTSQSRPSIIVRLARGRVLVVFLRGPSRVDLQACKL

SEQ ID NO: 105430 - protein, 38 aa, Oryza sativa
  Clone ID: PAT_MRT4530_102675C.1.pep
TLVVDQHNIAKTNTIKHHYLPVISVISILDIKIKIYNF

SEQ ID NO: 105431 - protein, 236 aa, Oryza sativa
  unsure (1)..(236): unsure at all Xaa locations
  Clone ID: PAT_MRT4530_102676C.1.pep
RHPIHPLPPPPSPSPPPPPPSPSPPXTQETGSASKVGVAPPPSSATGSRAHAPPHITKNGKRDHTSPMAACLSSCYMRPLPSRSAPLPLVPLPSLIPPPPLPPIGHSTATAPPRRRPASPAGXKGVNGAGEPSPPLXPPPSLSSPFPQASCPAPSSSPSPTAGRHHRPSPPNNPSALLAPPTPXPPPRSXPVASAAAPPPRCPPDPPPTAIPLKPANXPPLPPPPPPSHPHPILGP

SEQ ID NO: 105432 - protein, 65 aa, Oryza sativa
  Clone ID: PAT_MRT4530_102677C.1.pep
SAHGASWPSLVRLYEPDRGVGRRGQDSTLVRPPQQQRGLLPMYDFFGQGHGGAGVRGPLANGHHR

SEQ ID NO: 105433 - protein, 206 aa, Oryza sativa
  Clone ID: PAT_MRT4530_102678C.1.pep
MVLMAASASAAASDHHTAQAKSSPSAAPPAGSATRTRLHSFSFPTTFGWGTHRLLRCSKNGDSAPASASPPKQPHTPSPEKGQETSAGGASRPSRPWNLRTRRSATVAPDASRSEAAGKKAAAAAGGGQALLHPPAPLPVVAKKRGFSVALTREEIVADFIAIRGTAPPRRPKKRPRAVRLELDRLYPGLSLADVNLDSYKIVEER

SEQ ID NO: 105434 - protein, 77 aa, Oryza sativa
  Clone ID: PAT_MRT4530_102679C.1.pep
PVQILEGLLPLYPKSQILRALQEFLASELPARMSPIKRAPDNAIELRKNLPMVYNRQGQAKIPGEILEIVAGADALP

SEQ ID NO: 105435 - protein, 61 aa, Oryza sativa
  Clone ID: PAT_MRT4530_10267C.1.pep
SIDCSTSFSSPSFQSNLIDLVEVFDKLRAAPDTCFKNIKEAGSMGASMALAMTKSLYPKID

SEQ ID NO: 105436 - protein, 35 aa, Oryza sativa
  unsure (1)..(35): unsure at all Xaa locations
  Clone ID: PAT_MRT4530_102680C.1.pep
SWTKPYSREYAAFPAAWLRGAKFXRVDNVYGDRNL

SEQ ID NO: 105437 - protein, 65 aa, Oryza sativa
  unsure (1)..(65): unsure at all Xaa locations
  Clone ID: PAT_MRT4530_102681C.1.pep
FFFFFNKKLLLXETLAWIHYKSQRNVAHHIQRYTRVHPSISHHLAHPHIXCLTFHSWFLGFSXTW

SEQ ID NO: 105438 - protein, 189 aa, Oryza sativa
  unsure (1)..(189): unsure at all Xaa locations
  Clone ID: PAT_MRT4530_102682C.1.pep
SAPNFYILCRHFIEHLIGIALTLPPQPVNPRATATGRPTHLRRLTSRRTSAAAQAAAVTXAISCRRPRTRVACRRRRPXPMPTPTATPPTAAAXATCRHRCAAARACCPRMLPTQTPPQPVVAVVGGWGRRWAAATYWPRRRRCRSPPPPASGHACAPPPPPXLFYRSSSANSTQKKVNLXPFGTAPAL

SEQ ID NO: 105439 - protein, 69 aa, Oryza sativa
  Clone ID: PAT_MRT4530_102683C.1.pep
CDGYLQTSLLAWSRPRYLQQRQQLLNPLVVANPLVAAFLQQQQLLPYNQFSLMNPVLSRQQPIVGGAIF

SEQ ID NO: 105440 - protein, 444 aa, Oryza sativa
  Clone ID: PAT_MRT4530_102684C.1.pep
MKKGYSTLGETHPLAFLWAPFLLIHLGGQDTITAFSMEDNNLWLRHLLNLVVQVTLAMYVFWKSTSWHKNVQLLVPGVFLFTAGIIKYGERTVALMYGKLNNGMTSNIKISKERISELTEHDVYQELVCSVLNMQKVTNTLFGRMLLASPRTWWWLKDGGYDRLSRISWYFVGRLKRRPLWSNKMGQYNLLSSYLGMYDELAVTAPQRLMRMMRKMARGVGVGGKVMNKKLFWVSTLLETRYEVVDNDLMECVMCEIKKLGSSQRIINRRWTHLEPFVKEIEGMLLLTFSSTIIVLHTITMAYLMKSNANAVSTLQSGIANSVGLSLSYLNKEILDHNVDISLSTLIERLKNAPVEFPWRTQHEQHEAVLEELRDIWMRLLIYTAGKSRPEGHAAHLAKGGELLTFVWLYMASMGVGDGVAQPIETSTSSRDASGLSIISIFDL

SEQ ID NO: 105441 - protein, 408 aa, Oryza sativa
  Clone ID: PAT_MRT4530_102685C.1.pep
MIERSNSTPSATPARPPLAVDEEYNQAFRSKSFLDLWSHAHHHLTHTFSSFKLSTSTPCAGRGGAREDDFLHAGGDGGAADDSEQSCSYTVLDDFVLEPSPESLARGARLQQRRRRRPRRHRVETLLIEYFDVTEEACEACSALLAAIGAARRHHLTLRRLLLRLDGGDDDDAKDALARHVRLDNPLSPGSLSEFHDVHARCSPLASRLAAAQRRLRRLARALRIARGTAAAALVGACAAAIVAAVVLAAHALVGIGVAAAAFGATPAGAARWWGRRAAEKVSSRHYARAGATLDAAARGAYIVGRDLDTVSRMVRRAHDELEHGRDVARIAMRGHGERPLLQEVAREEEECEEDLRAQLAELEEHVCLCLITINRTRRLVAHEMARGLPPPSPATVTTTSEERLTSS

SEQ ID NO: 105442 - protein, 550 aa, Oryza sativa
  Clone ID: PAT_MRT4530_102686C.1.pep
MPRLMPEDASLLLDHVVGDPSVPAAAANAALAALPFPSRPTPRLLRASLLRRLAADPVSAAALDSLQLLASLPSSPSPAAPAAAAAAAAHLAVAAYLAVSAPDFDAAAGALFGRPGGRARRAVEEGGAAALASDEADAVADQFEAAVGNSFSQTVLRGLWGDRAAAEERVRELLAVEWAAIGQSRLEMAAERIVGDGAIETWRAADEVTRAKYRLLAGEQRAREIEGKLGETIPQGNQISTPEVHKVMDALKSSCANLHSVVEDPLPAAKAAADEVLAARMDKAVDLNAGEVSNQPTACDIAGPSAPADNLDAPRKGTAASLMDWNPTARTFQAAAFFSTTDGDAMPPPPSSLPPRVLPNLVSCSRRAVTSAATAAAAAYSTAAAAGGGGGGGRPLRYAVLGAGFAGLSVAWHLLKYSPKGSRVRVDIYDESGIGGGASGVSGGLLHPYSPKDEAQCLIPGLCVPLNFAVYMPLALNINPKKYLQVALFFACQNMSDEASLSSSEQKECKLYNEHVDDLQQLAETSVKKNVKMQHLYGSLKLLQYGLLLT

SEQ ID NO: 105443 - protein, 347 aa, Oryza sativa
  Clone ID: PAT_MRT4530_102687C.1.pep
MHALFAVARDTAFSLSPAGDELKLQLTSQTRRAMHVFSSREEEHGSNDDSFRESLVSLLDNTRDYVMAPEVFEGVPVACDYLKGMDSDGMAASAVAAYSLDNNGQHASVSSIEHGIASSPLLAYQLGKNSAVVQRSIQQQEVGSPMAAFLQQLIPTSVLDQSGIGFGGVCLDGSALEASFCMRTSPDVSSFSGHRSATAEELMSTDTREQEITRLARSCSSSGSDRNKKKLSEHQSPKVKLGEKITALQQIVSPFGKTDTASVLLETITYIKFLHEQIQLFSQPYMTNSTNKGHIHWGGEGKRKAGLEHDLRGRGLCLVPVSWTSQEYCDSILPECWAPAYRNYFYR

SEQ ID NO: 105444 - protein, 60 aa, Oryza sativa
  Clone ID: PAT_MRT4530_102688C.1.pep
MRCEQRAPLPPLQWQKSFRRRRCSIPCGFTALLAGDLPACAPPLTVLLHFFAALGCLPET

SEQ ID NO: 105445 - protein, 258 aa, Oryza sativa
  unsure (1)..(258): unsure at all Xaa locations
  Clone ID: PAT_MRT4530_102689C.1.pep
SLWSWYYPFYVAPFVSDLKSHCRFEISFTVDKPLRPFDQLMAVLPLRSSCALPECYRKVMGRKEFDHPKLQADTIGKRFLWKCISEEELLQATKELDKELSMHEMRRNTPRQRRSFCRGTQMLRHLPKLLCNCKHRHVRXEQKLPIDSAISGLGGWLSPDGLSNGFFCSPLQNLQDITNDQAISAMFFNPEAGNPIPRLLSNVKVPDKTVTEADISRRLLWHTYPGSRXPPPIVERDTIWKPISKPSVHGREHRTEPV

SEQ ID NO: 105446 - protein, 227 aa, Oryza sativa
  Clone ID: PAT_MRT4530_10268C.1.pep
MAEERESFESQWAPSNVTEENLKEMVVHGVLPAKEIIGWRPAYGEAFPTPNTHEVVETWNSLPMGDETAQALTLLNRIMKLKEQVQAAKIAELKKRIETLEKDKGSLIKERESAIKDVEDRKIKSQAQFDILVNKIKNLEGARDEVAKATMHLIQAMFYNNNGPSTIDLVEVFDKLRAAPDTCFKNIKEAGSMGASMALAMTKSLYPKIDIDAIDGFAEETSEEDAL

SEQ ID NO: 105447 - protein, 64 aa, Oryza sativa
  Clone ID: PAT_MRT4530_102690C.1.pep
PPPPHFFFFFFFFFFFFRRILFFFPAILMLKQPRSSEQGEPMGLSCQRYYNTITTLSYQQQPVV

SEQ ID NO: 105448 - protein, 65 aa, Oryza sativa
  Clone ID: PAT_MRT4530_102691C.1.pep
MLGFITVSPHKAPPGDSPSPSVAVPSPATVLLTGVPPERLEVHLSSSAVSPLGQKRTRRMEEVRV

SEQ ID NO: 105449 - protein, 31 aa, Oryza sativa
  Clone ID: PAT_MRT4530_102692C.1.pep
LLPAHKGQSPHSTSKALSSCVIAATLIKPPE

SEQ ID NO: 105450 - protein, 87 aa, Oryza sativa
  Clone ID: PAT_MRT4530_102693C.1.pep
QNGGKWVLCQMDYIMHLLDHFILITLADSTTTIHLPECIRNILCECNYFATVYLEQTEVRNAWFSHKTKTEYTLERCHVHVHFYVQL

SEQ ID NO: 105451 - protein, 664 aa, Oryza sativa
  Clone ID: PAT_MRT4530_102694C.1.pep
MACALDMQEWGVGRAGVGWLPEKKGGDRTKMEKEKKVGINLEFHTVLWEELEKFSPSRKDGITEIMESEIRQLYCSFIRDVGIRLKLPQMTIATAIMFCHRFYLYQSLAKNGWQTIATVCIFLASKVEDTPCPLDQVIRVAYGTMYRRDPATARRIHQKDVFEKQKALILTGERLVLTTVRFDFNIQHPYRPLLDAMEKLGISQKEVKQVAWNFVNDWLKTTLCLQYKPQYIAAGSLYLAAKFQNVKLPVHGGHVWWHQFDVAPKPLEETKSYTAIAVLQQMREMVHMKAKLFAHPSPAKQKEVLFEGMLLISNSPDSVLTQSSLSVSSSSPEIGDPNDHLQVDSSQDIVHIEDRSKSYPERNLSNLTADMNNPGKTHNKESLDQALKIKHGGLISCNQQIPLDAIAKIDSSTAKCVEQNIGICCSSSNTFNGKILNPFSISQRSGDKTKLCSEGGSSLTDVDSKSTQSVEPPTTICNHTSDSLNVDSLCSDQRLANSTAGTTEKASFVLPVQIKVDHLCVERKKVDVARIKDLLMKRKRRRERQGRCIPSVDLSEEAWIERELESGIVFKKVDHVVASYDLSDEGWIERELESGIVIGQKNDQPVSLDGLTEDDWIERELESGIIVEPGPAGKKLKSKLLSEGHEIMNSRWEINGKSMQNQVT

SEQ ID NO: 105452 - protein, 78 aa, Oryza sativa
  Clone ID: PAT_MRT4530_102695C.1.pep
MMGSPPAPPARRLGALAVFLLALFLAAPWGVDCGYNVASVAGSKNRLRARLELAGGGGGAAPELGPDVRRLSLTARQV

SEQ ID NO: 105453 - protein, 406 aa, Oryza sativa
  Clone ID: PAT_MRT4530_102696C.1.pep
MAAAVVARCGGAKKRKGEGLGEMHDDVLERVLARLPPASYFRLRGVCRRWSDAASSPTFLAACGRVPARDPWFLMLSEGEGQERRLPAVAFDAGEGEWARCGGAPGHVMPVVAASGGRVLYRAPDTGELTVANPLTGASRVLPAPPPGAALHAVAMYGSSPYRVVLITGDLPDLSMTVFDSSKNAWDDAVALSRKPDASSPERDAEGGVGGGGGGGDDETVYFLSKSGDVMATNMQRSASRQYSSAVTCGDGGEAVAYFLSNSGAVVACELSRRAFAELPRILPVYFEYSIDVVACGGRAYVVVLSELLGTASLRLWEFAGGAWRQVAAMPPAMSHAFHGKKADVNCVGHGDRVMVCVSSGEANGCFMCDVPTNRWEELPPCAGAGGEPMDFVAAFSFEPRMEVTV

SEQ ID NO: 105454 - protein, 67 aa, Oryza sativa
  Clone ID: PAT_MRT4530_102697C.1.pep
LTVKGTKRVKWTPLQSNWGQLWKAEANLTGESLTFRVMTGDPRKAPSWGVAPRDWTYDNPFQAKKNF

SEQ ID NO: 105455 - protein, 117 aa, Oryza sativa
  Clone ID: PAT_MRT4530_102698C.1.pep
QPLGEGWRWGPPDGPKMACPGPPFFWLLKGLIHWNFRCPVLSSGWPPVLGGPGVGFSLFFQKSFSKFGVFFFGRGLIFLFSPPPPGFLGWVFYGGKKGPFRFSFCAGVPICFPFVGL

SEQ ID NO: 105456 - protein, 409 aa, Oryza sativa
  Clone ID: PAT_MRT4530_102699C.1.pep
MQTRSPTRRKEESPSPSPAMGTRAAGKPKTTAAVGARAARGNKQAGAATKREEATAPAITSTGSSQSPPPEVEPSTRKVEGGEGDSALAKRVRDDEEEDKEAAQAFNFRHFWNFLFSAQANFEDIKEENPNEWMIDLIAADIPPMRHTDDPGAIYAKCYDAVQVYSVEVKQIKCGLRWPIEVFGHVAVRDSVDRKRNLVFNRGRDDCQTLTAEDSSLVLTGPSRYVLAMDNPDFEVELKVKGIAETEDKVLSSHAFTFNCIYDDGSSVKRRVASNKRSTVQITFALIPETVEATFEVKVVDGSLDPSLRPHFFASTHHHPSTECVLLDPREGAMVISDNNSVKLTRSVVSVEVLGGLKLTAEALDDEKAVVPRTTIIFEPQRDGRVYGFLDLNCCKMVVKVSWSRLSIC

SEQ ID NO: 105457 - protein, 80 aa, Oryza sativa
  unsure (1)..(80): unsure at all Xaa locations
  Clone ID: PAT_MRT4530_10269C.1.pep
MLHSPHCAKYTSPTAEASATATTSLESPDQPIDGHMARXPPAQPKARHFGPAQAWHGPIGVVPVPARPDIRAVLELHPRH

SEQ ID NO: 105458 - protein, 123 aa, Oryza sativa
  unsure (1)..(123): unsure at all Xaa locations
  Clone ID: PAT_MRT4530_1026C.1.pep
FRRTAALGLLMQCWQQMQDESRECLCSGMQRMERSYHASMQVPLQHGXTGLGXEYYLGEGNPAHQRYYGQGLSEDGYYCEHHQQLLMTLVRLTMVRQHAAQLPLMRRLELHQGIILRGRQHIR

SEQ ID NO: 105459 - protein, 130 aa, Oryza sativa
  Clone ID: PAT_MRT4530_102700C.1.pep
YHHNSQDSLHSVVVHVAQSAEMTKHVTITHSLYQGLLFISQCNKKEQRLPRSLYNCSSSSSQQRGDCFRQPGKQARLSSGNQVCDPYCANCNSACNFVLSRISLTLKHVYPMPSDLHSCSEIRTDVNCCI

SEQ ID NO: 105460 - protein, 71 aa, Oryza sativa
  Clone ID: PAT_MRT4530_102701C.1.pep
MVAAVALVAGSAPSPSRGRRRRLRLLPTAVCLPPTPSDEAEGDDPATEVGYRLRGYGLETRIASFRVFDQE

SEQ ID NO: 105461 - protein, 55 aa, Oryza sativa
  Clone ID: PAT_MRT4530_102702C.1.pep
ERIAFFIKSGYKKRTNRTDQPYKLQPHTGQDKLMRIPTSAQTILKIENKKKKKKT

SEQ ID NO: 105462 - protein, 613 aa, Oryza sativa
  Clone ID: PAT_MRT4530_102703C.1.pep
MAAPSQTTATTTHHRVLLPSHHHHRAVPPSLLRLPLRAARRGRLSAAAAAAAPAASTAAPSEPAAGAVPGKPTVLVAEKLGAAGLELLRGFANVDCSYGLSPEELRAKIPLCDALIVRSGTKVGRDVFEASGGRLRVVGRAGVGIDNVDLAAATEHGCLVVNAPTANTVAAAEHGIALLTAMSRNIAQADASLKAGKWQRNKYVGVSLVGKTIAILGFGKVGSEVARRAKGLGMHVIAHDPYASADRAHAIGVELVSMEDALTTADFISLHMPLTPATNKMLNDETFAKMKKGVRIINVARGGVIDEDALVRALDSGIVAQAALDVFTKEPPAPDSKLVLHENVTVTPHLGASTVEAQEGVAIEIAEAVIGALKGELAASAVNAPMVPAEVLSELAPYVVLAEKLGRLAVQLVAGGGGIKSVKVTYASARAPDDLDTRLLRAMITKGLIEPISSVFVNLVNADFTAKQRGVRITEERILLDGSPETPIDYIQVHIAHVESKFPSAISESGEITVEGKVKDGIPHLTKVGSFQVDVSLEGSLILCRQVDQPGMIGAVGSVLGEENVNVSFMSVGRIAPRKHAVMAIGVDEEPKKSTLTKIGEIPAIEEFVFLKL

SEQ ID NO: 105463 - protein, 57 aa, Oryza sativa
  Clone ID: PAT_MRT4530_102704C.1.pep
NLKSTCFLTKSCNRKISRHENNQTIWSTSQFSPPSVYGGPSPTDMIWLHHVSAPRVR

SEQ ID NO: 105464 - protein, 48 aa, Oryza sativa
  Clone ID: PAT_MRT4530_102705C.1.pep
QFLSSFTETRKGTLVQKYKVKVIADVPGTGSSKDGEVKQAPDGSAQPE

SEQ ID NO: 105465 - protein, 147 aa, Oryza sativa
  Clone ID: PAT_MRT4530_102706C.1.pep
HEASCRIRHEHNYQLRTSEGSGIANGSLVITPSTGDIRHRSGRVLYARETLKLWNSRRSALTSFRTEFVPNILPRNQTGEGMAFILTNNPELPTDSSGQWLGICNNRTDGDPKNRIVAVEFDTRMSVNETDGNHVGLDINSIGSLDP

SEQ ID NO: 105466 - protein, 138 aa, Oryza sativa
  Clone ID: PAT_MRT4530_102707C.1.pep
KVEAPSTDTICPEGQEKLKLKSLFPISFTEENTDQKNKKSVEKSYMCPSCKSTLTNTMSLVTISTCGHVFCKKCSDKFLVTDKVCLVCNKPCKERNFVPLEKGGTGFAAHDERLEARDFKHLGSGSGLGLVKPAPKNY

SEQ ID NO: 105467 - protein, 342 aa, Oryza sativa
  Clone ID: PAT_MRT4530_102708C.1.pep
MTMRLAAAVVVMVVVAAAAMSVEAELSVDYYKKSCPGVENVVRYHVAKALKANRKEGAALVRLIFHDCFVRGCDASVLLDPTAENPHTEKTAPINIGLAAFELIDEIKAAVEERCPGVVSCADIVIYAARDASILLSNGHVHFDVLAGRLDGRVSRAADAQRDLPDSTFTISELIRNFRRKNFTIEELVILSGAHAVGVGHCSSLRARLTAPPEQILPGYRSLLAGKCAAGEDPIVPNNVRDEDPAAVAATIPSFLPKLRKFEFLDNSYYHNNLARIVTFNSDWQLLTEKKARGHVHEYADNGTLWDEDFSDALVKLSKLPLPPKAKGEIRRHCRRVNTHHY

SEQ ID NO: 105468 - protein, 51 aa, Oryza sativa
  Clone ID: PAT_MRT4530_102709C.1.pep
MPATTPNHRITNRREDRRRNRETGPCRPSGERQGVRILHLGPLPHSTRLKG

SEQ ID NO: 105469 - protein, 403 aa, Oryza sativa
  Clone ID: PAT_MRT4530_10270C.1.pep
MAISSLHATTSLHSPCTTNTSFRQNQVIFFTTRSNRRGSTRYGGARTFQVSCSVDKPVVIGLAADSGCGKSTFMRRLTSVFGGAAEPPKGGNPDSNTLISDTTTVICLDDYHSLDRTGRKEKGVTALDPRANDFDLMYEQVKAIKEGKAIEKPIYNHVTGLLDPPELIQPPKIFVIEGLHPMFDERVRDLLDFSIYLDISDEVKFAWKIQRDMAERGHSLESIKASIEARKPDFDAFIDPQKQYADAVIEVLPTQLIPDDNEGKVLRVKLIMKEGVKNFNPVYLFDEGSSITWVPCGRKLTCSYPGIKFAYGPDTYFGHEVSVLEMDGQFDRLDELIYVESHLSNLSTKFYGEVTQQMLKHADFPGSNNGTGLFQTIVGLKIRDLYEQIIAERAGAPTEAAKV

SEQ ID NO: 105470 - protein, 237 aa, Oryza sativa
  Clone ID: PAT_MRT4530_102710C.1.pep
MEILPRQLLLGVCGAVVLVAGLAHAAYAGTAPVVVGLAMCSGCTRKNMNAEAAFKGLQVAVKCKNSRGEYDKMAVGKVDKSGAFSVPLAADLVGEDGVLKQDCFARLHSASSAPCPGQEPSMIVAAQQPGHDGAKTFVALAGKVHRPSAECASAFLCDPFHKHHHHIVLHPPVIVPPKHDHDHSLPPVHEPPVTVPDHKPAPVTVPDHKPPSTTTPVYAPPKPTPIYGPPTQQKNKH

SEQ ID NO: 105471 - protein, 92 aa, Oryza sativa
  Clone ID: PAT_MRT4530_102711C.1.pep
QLATSLINDICDSLKSQQYMYVCDVLASCCKTVNTLCSWTIYTHTHACCCIDSPVPPLIDIPPKKKKRKKRWLSFIPGGNANAICIPNCSSI

SEQ ID NO: 105472 - protein, 148 aa, Oryza sativa
  Clone ID: PAT_MRT4530_102712C.1.pep
TEIAHTGAARGGGHSCSRPEAVIARTEEETEQVTGGRGGACPGSERLRRSSPVRQRRRTGWPAVEAEHAREDALPGARRSPNPSATFFLHPDHRLLRPDHHRHRTGDSISCIAAVDAATDTRHSYVTSAVASCPPIPAPPTNSKERGM

SEQ ID NO: 105473 - protein, 412 aa, Oryza sativa
  Clone ID: PAT_MRT4530_102713C.1.pep
LEILVYGGAKRSRTHDACWCCSFSSTQIPLTRGAKRRSVSRLRPCSAAPSSWCSWGAKRARTGTALGPAGLIAERVLANDVADYIRFRSVCQPWRRCCAAPPADDALDRRFHPRQWLILPEKPRIRYHCRLLNLSTGECILAHLPEFRGHRVFSPSTEGLVLLLHESTHVARLLNPLTHQLTDLPPVTTLLDLLLPLCDLSVDGFGLADDRTVVIHNTVFLAVAKPGDKCWTAVNLSDCLRPSMSLAGRFYGVTSDAIMVVEVSRESQTPQLVEAADLTLQHRFSRMLGSAHLVDNNIGELLLVHRTLSGNKRLYQAYRVDLDGRKTVPVRGLGGRAVFIGHDCSLSVSPATFPSIVGDAVYPGFDCGDRTGLEHIEAYHLADGTIEHSCYEDPGKEWEHPVSIADYLSSWV

SEQ ID NO: 105474 - protein, 228 aa, Oryza sativa
  Clone ID: PAT_MRT4530_102714C.1.pep
MGSGQHDVIWMMGSHPNDRDEIMYTSFRFGLADDRTVVIHNTSFLAVAKPGDKCWTAVDLSDHLRPIMSFAGPFYAVTTHQRCHHGGGGQPGEPDAAAGGGRRDLTLQHRFSRMLGSAHLVDNNGELLLVHRTLSGDKRLYQAYRVDLDGRKMVPVRGLGGRAVFIGHDCSLSVSPATFPPSLVTPSTRASAVGIELAGSTSKPMITWQMEPLNTHSMKTAKRIGNTL

SEQ ID NO: 105475 - protein, 100 aa, Oryza sativa
  unsure (1)..(100): unsure at all Xaa locations
  Clone ID: PAT_MRT4530_102715C.1.pep
RCIYGRYLDTLRKSITESTNGKVPTRVGLGRYYIVQGLMSPSXPTWRPPDQRYKRNPPRELRGSNLIAYTTTTAYEAGDYRSQVAGXSSRINSTTISSVP

SEQ ID NO: 105476 - protein, 133 aa, Oryza sativa
  unsure (1)..(133): unsure at all Xaa locations
  Clone ID: PAT_MRT4530_102716C.1.pep
MGGLQEGGLPPKAKGEQKITPEKSPKKKFPGLPPWGTDPSFWGQTEMKSAPRFPRPKPQRKSIPNKPGVRGPNQREPKNLPNLGXTPPPPLKKKKKATRGPPLPPRGKPPREKPEGPGREPTGKGGGGGGAPG

SEQ ID NO: 105477 - protein, 83 aa, Oryza sativa
  Clone ID: PAT_MRT4530_102717C.1.pep
FFFFFFGITTPTFHFLIQSKEGMRFAVYKNSWDEQEQKNRRDVLVLYTLIYVFCFFGFSKFTTNERTRSEFLKVSLGFEGQLS

SEQ ID NO: 105478 - protein, 56 aa, Oryza sativa
  Clone ID: PAT_MRT4530_102718C.1.pep
CHVALPRGESGPRWGGGHSFPATRRRRLPPNATWPSSEGSQARGLRWGGGHSVPAT

SEQ ID NO: 105479 - protein, 137 aa, Oryza sativa
  unsure (1)..(137): unsure at all Xaa locations
  Clone ID: PAT_MRT4530_102719C.1.pep
HQASETTTSEHDAVLSWLDTQRPASVLYISFGSQNSIXAAPDDKELAAALESSGRPFIWAIRPPXGSTCINGQFRDEWLPEGFEQRARGHVVHGWAPRVSILAHAXASTGAFLSHCGWNSVLESLTCGVLVVGWPLS

SEQ ID NO: 105480 - protein, 59 aa, Oryza sativa
  unsure (1)..(59): unsure at all Xaa locations
  Clone ID: PAT_MRT4530_10271C.1.pep
LRSTTLLKKGNNSKAEYNHRTQQATPTMHSCKGIQGRFMAICIKAVVKHFIEXNSKTVE

SEQ ID NO: 105481 - protein, 325 aa, Oryza sativa
  Clone ID: PAT_MRT4530_102720C.1.pep
MGEQPARGAASSASESSPLIPPPSEIDIEAGAGDQFQCRICLETDGRDFIAPCKCKGTSKYVHRDCLDHWRAVKEGFAFSHCTTCKAPYYLRVHVHTDRKWRTLKFRFFVTRDILFIFALVQFVISALAYLVHFIDGLQNYWLRTAWAFDNEVSFYYICGALLFFARLGLSGCFITCYDRRVRNDLAQPCRELCLCCCQPGMCADCHLPGTLCMWTDCTTCFEGCATTAGECGGCLGGAGEAGLPLLFIMGVIVLGLFTVIGIFYSVLVATMVGQRIWQRHYHILAKRMLTKEYVVEDVDGERADWCPPPLPSEHVQQLKSLGLL

SEQ ID NO: 105482 - protein, 87 aa, Oryza sativa
  unsure (1)..(87): unsure at all Xaa locations
  Clone ID: PAT_MRT4530_102721C.1.pep
LQACQHPSYYNNWFNSQQTRTGIARSNFXPIYIFFLGNXKRRFRIHLLIYEEHPSHVIIHRKVYLFTPSFGLFDICPEKFWLKGKFL

SEQ ID NO: 105483 - protein, 72 aa, Oryza sativa
  Clone ID: PAT_MRT4530_102722C.1.pep
SIYNPRSRFGVTVVASLVRRMGWSRRPSALPGASWRAQWSPWRAQWLAPWRAVLWLAPWRPVRWLALRSPIS

SEQ ID NO: 105484 - protein, 106 aa, Oryza sativa
  Clone ID: PAT_MRT4530_102723C.1.pep
VGIDTKPRYQRIEWPMNRKYGHAYEALKIIDNKPNAILDSITYYEKETEAHRQEGTNEAPAHTHDGKDALFKNIKRRMTPEPIKIRADVDMKCIQCDGGLDIKQAM

SEQ ID NO: 105485 - protein, 184 aa, Oryza sativa
  unsure (1)..(184): unsure at all Xaa locations
  Clone ID: PAT_MRT4530_102724C.1.pep
MRIPSPRIIRILNCNRDKSRVQQGQAMYFGYKXRPDIXNQGTTVQXTSAHHHPFLFYESLLSSWVASGLIFDEECVSMDRLCIVDIYSXSSRSNDPTFILXCRSDASHIGMALNDTSSAIQLIGYRDQTLARSEPEDNFFGPALELSKSLSPVRVFRVNTPLGTPSGTDFRKIFFMHEFSERKK

SEQ ID NO: 105486 - protein, 102 aa, Oryza sativa
  unsure (1)..(102): unsure at all Xaa locations
  Clone ID: PAT_MRT4530_102725C.1.pep
LCTIRKMYTEGPSTCHRDXKTSSNYKTXYARFFNYTNQVTRVPSVVLTPVLVYVAVESAWDPTWAPHVSVPRHHLPPLSLSLDLVSAGHRRVGRRLAGSSSC

SEQ ID NO: 105487 - protein, 58 aa, Oryza sativa
  unsure (1)..(58): unsure at all Xaa locations
  Clone ID: PAT_MRT4530_102726C.1.pep
ALSLLRHLITGLHTESDIYXPCCQQPLGCRSEKACGQSPKCLEGAFILERARTLLDRS

SEQ ID NO: 105488 - protein, 231 aa, Oryza sativa
  unsure (1)..(231): unsure at all Xaa locations
  Clone ID: PAT_MRT4530_102727C.1.pep
MSGGAAATVAPGWRRELAGLLVPLVRSAMEARGCGHHHRDRLDASAIKSLPSVMTVRSCGQRGRQRRYARMPSPPSSPPPTLTNCLRRRTRHGEEHRRQRAIDDLLRGGDAVVAEAAGGANQVPGDEAPSVPWGAMAWVRGAVGVQDEFNDRFNPRIIKISSLSATNHDNTPPFSMEEXARTPSPSSSMSPLMTRSAPLTSSHASSSSMLATSVQQLNRLATSSHLSPPSQ

SEQ ID NO: 105489 - protein, 253 aa, Oryza sativa
  Clone ID: PAT_MRT4530_102728C.1.pep
MEKNTAASGQLMTSSAEATPSSPKRPAGRTKFQETRHLVFRGVRWRGCAGRWVCKVRVPGSRGDRFWIGTSDTAEETARTHDAAMLALCGASASLNFADSAWLLHVPRAPVVSGLRPPAARCATRCLQGHRRVPAPGRGSTATATATSGDAASTAPPSAPVLSAKQCEFIFLSSLDCWMLMSKLISSSRAKGSLCLRKNPISFCMVTNSYTALLLEYIILQMNSMIVLIHELSKYQVFLLLTMITHHLFQWRR

SEQ ID NO: 105490 - protein, 261 aa, Oryza sativa
  unsure (1)..(261): unsure at all Xaa locations
  Clone ID: PAT_MRT4530_102729C.1.pep
MATAAQGGDARRGGSGATARRLRRWRRGGTITAARRRGGGGSVERGEGRKGXNGDARRRRDGERGAGRGVRDGARGARRRDGATAATRQARGRAARRGARRGLARGSAWRRRRRDGRAVRQRDGDGDGLAAAARGSERRWDARGDGTGDSGTAAGGDGDGSGHEARMAGEGKGLGNTVEHVAADEHGRRLKPLHHDHSHRAGYLEIEIIVVGDSFELVQGRTAEDGIVVVWDVDNVEQYSLIDSPGLWRMPSRCCYVFGSS

SEQ ID NO: 105491 - protein, 83 aa, Oryza sativa
  Clone ID: PAT_MRT4530_10272C.1.pep
ELSISITSVAKTSCIVLKQVILTFGQTVRRYYHGFQVACMDNVSGSLFELGLVFMDSSLCCKFVMLRSLASVLLQHPMVSLKK

SEQ ID NO: 105492 - protein, 448 aa, Oryza sativa
  Clone ID: PAT_MRT4530_102730C.1.pep
MANLLRRASLRRAVAAVAAAAAPCPETCRYLYALKTNTGSFVTHTSYKQGICGSTFHCRYFSSKAKKKTKSSGTDSGEENLSKKDLALHQAIDQITSAFGKGAIMWLGRSEGRREVPVVSTGSFSLDLALGTGGLPKGRVIEVYGPEASGKTTLALHVIAEAQKHGGYCAFVDAEHALDPALAESIGVNTSNLLLSQPDCGEQALSLVDTLIRSGSVDVVVVDSVAALVPKSELDGEMGDAHVALQARLMSQALRKLSHSLSLSQTILLFINQIRSKVTTFGGFGGPMEVTSGGNALKFYASVRMNIKRIGLVKKGEETIGSQVLVKIVKNKHAPPFKTAQFELEFGKGICRSSELIELGLKHKLVKKLGGAFYSFNEESYRGKDALKSYLNENESIAKELETNLRKLMETQAPKKQEDEGDFLSDLPEESLATETSSEEELAAVIEA

SEQ ID NO: 105493 - protein, 58 aa, Oryza sativa
  Clone ID: PAT_MRT4530_102731C.1.pep
TKMSARVQAGSINKYKQLGANVVSKRVDSLTKGNSHFSATVDCYVDIRAQCHSIFFFK

SEQ ID NO: 105494 - protein, 120 aa, Oryza sativa
  Clone ID: PAT_MRT4530_102732C.1.pep
MALKSAALLAIVITMSLLSVEVANGCGDTSCSNPSPPPPPAVPTPTGGTCPINVLNLAVCANVLSLNVPSSQCCTLLQGLADLDAALCLCAALKANILVDVAIDNNHLIVAIDHTQIQRP

SEQ ID NO: 105495 - protein, 59 aa, Oryza sativa
  Clone ID: PAT_MRT4530_102733C.1.pep
TYRFVPCLPLYTPLQAAKVLLFTLFIIGRPCGIFQLVYCYYLNSTKKPIATKNSSVHQL

SEQ ID NO: 105496 - protein, 76 aa, Oryza sativa
  Clone ID: PAT_MRT4530_102734C.1.pep
MVMAPSTTLRSHARGAQETKATRWHSTELHQPISRADLRLDVADLGLDVAADSDINLGAVIHFVVLVDGCDDGVSG

SEQ ID NO: 105497 - protein, 47 aa, Oryza sativa
  Clone ID: PAT_MRT4530_102735C.1.pep
MGCLDARGGGRVEYIGDGWEGMCTEVRWREAAKEEIQVDFFKMTGLV

SEQ ID NO: 105498 - protein, 206 aa, Oryza sativa
  Clone ID: PAT_MRT4530_102736C.1.pep
SLLARRPGSLATGPFRTVLRHPCRRKHGTRSRHLSHAWWPSGRPSSQQTSRAPCGRMLGRPCRRGRPTGRGARTRPPRRGRPTGRSAAARRRERRGLVAPGTQACRRHKRDALGRRQPARPLPCPPLPTRGRRRRASDGAGSSRRTCYLVDPRTRHPCPPSARARGNRGPRAATEPTAPTASRNTAIRPRRPVGPGRPAARRDTTS

SEQ ID NO: 105499 - protein, 167 aa, Oryza sativa
  Clone ID: PAT_MRT4530_102737C.1.pep
MSSFGPVYARRTPALVRPTAGSRAPSLHGRPRAVPPQASRDACALLPVPRAEVLAHVRRAAGAPPGVPRRLDGASGVASRRPAPKRAGAAKATSRVPLVPDAAHDTGSRRPRPVPTHKRDALGRRQPARPPSCPPLPTRGRRRRALDGAGSSRTCYLVDPASSHMLV

SEQ ID NO: 105500 - protein, 418 aa, Oryza sativa
  Clone ID: PAT_MRT4530_102738C.1.pep
RARRGEGAGAGGGGGRGRGGTGRGAGRGAARGGKGTARRRRGRRTWRGARGRKGAAPAAAATGSTSGRSGAPPPADSDDEGSPRGLSLLPRDPERPPRLLVVQPRLRPGSLLDSKLAEALNLANSLEEPRDGFYKEGLAAKGAPPHLVAQNPSSRGRSHQEGVDAVFVNAILTGIQQRNLEATWGKPVLDRVGLIIEIFNAHAETKEAKLQSELAALMYMKTRLVRVRGPGGRLTFGSSGEAEVVSARGYVCSRGSGGRGFISGAGETELQLQRRRIQECRVRLLAQIEDVRRTRAIQRSNRKRHGNSFGQELVTVAVVGYTNAGKSTLVSALSETDLYSDDRLFATVDPRLRSVILPSGRKALLSDTVGFISDLPVQLVEAFHATLEEVVEADMLVVCIINLSPVLAAADSTVLEGL

SEQ ID NO: 105501 - protein, 145 aa, Oryza sativa
  unsure (1)..(145): unsure at all Xaa locations
  Clone ID: PAT_MRT4530_102739C.1.pep
RQNPCGMWGHYHKXYELPEACAACGHRPSTSAGTQAAARAEQAAEPXSKIRWSIRPAYRTDSAWRDANAAAASELLKTIRFVQILNTGPLCINVYRIRRANHCFEDDTTPQVDDAGDFVEQCEGDNARVVVHCMARKSGSAPFEI

SEQ ID NO: 105502 - protein, 117 aa, Oryza sativa
  Clone ID: PAT_MRT4530_10273C.1.pep
RLVSNRYNQDWFSSSWVDIWTSNGDSSGISGHIKPFLIISVQNNFSQLDNNNFSGTSIPSSYANITTLLKLSLRNCSLEGPVPDVSGIAQLGYLDLSHILPDGSIPGSFSGLPNLQR

SEQ ID NO: 105503 - protein, 83 aa, Oryza sativa
  unsure (1)..(83): unsure at all Xaa locations
  Clone ID: PAT_MRT4530_102740C.1.pep
QDTEQASSXSXRQLHASHTXXLRLHDHFTAVAISNPKPRDXIGLXGEWSCCAAAAAXVFDXEKXRKRRTMXTSXSWLFAAXSK

SEQ ID NO: 105504 - protein, 65 aa, Oryza sativa
  Clone ID: PAT_MRT4530_102741C.1.pep
IQLITLSRINPYKHCISTLINTRPWSPKEDPTPINIRSPHSPFSNKKPYLPHFLKNYPTPLKKAF

SEQ ID NO: 105505 - protein, 631 aa, Oryza sativa
  Clone ID: PAT_MRT4530_102742C.1.pep
MGNGITKNPCFSGDPYAAAVASDPLPDDSHGHSFTYVPSSAAAFDHSPRSAAASSETSYFSLSGAAISANPATSASMPSFRLYNELTWPPSTACTFESSRSFAAAPLIQAAPPRLSMSGPLHATSGRFSEASGSASTASDRFSDHPFMDGMLDRASSASSTARLMPSFSHLMSEPRVAQSGLSNERSLIRSLVRVASKLRFGVPLSGRRSNGPAEPTTKSDGDYRSTPKGNVEWAQGMAGEDRFHVAVSEEHGWVFVGIYDGFNGPDATDYLFANLYVAVHRELKGVLWDDIQGVDVVTDNLPDPALANATHLCFLDAGGVGGGGDDDPDAERKAKRGRIERNADDDGASSVHRDVLKALARALARTEEAFFAAAEERAAQSPELGLVGSCVLVMLMKGKDVYLMNVGDSRAVLARRREPDFKDIFFRPDQDLQLLKAEVMRELEAHDRNGLQCVQLTPEHSAAAEEEVRRIRSQHLTDRQAVVNGRVKGKLSVTRAFGAGYLKQPKWNDRLLEAFKVDYIGAEPYISCTPSLRHHRISSNDRFLVLSSDGLYQYFTNKEVVDQVAMFTAEQPDGDPAKHLVGELVLRAARKAGMDCRRLLEIPHGDRRNYHDDVSIIVMSFEGRIWRSSV

SEQ ID NO: 105506 - protein, 114 aa, Oryza sativa
  Clone ID: PAT_MRT4530_102743C.1.pep
MWTTRGQRHSSAVRSAPPPSSASSARPSSQSRAPTGSGACSSRPPPPRAASPWPRRPPPQLVTMTRLSSPPSSATPVASAAAAPAVLKPRRPTPPRAPLGEKIDREEREDRQES

SEQ ID NO: 105507 - protein, 221 aa, Oryza sativa
  Clone ID: PAT_MRT4530_102744C.1.pep
MAALLHQTPLQPPQTTTRPHPWTHTSTTNLSPPHVALPQRRRAPLRRLQAAGSGGAIGSSAVTDTESTTTAKSPSKKKSRKEKQRMRRQEKEQEQRQMVLEALDVKSGGEVDEDDDELPQPVFDRILRRIMFMVGVPMASGVGLLNLYGALERGRGVAVPSWLPLLTILVAFGTSALGIAFGTLSASWDPEKEGSLLGLEEARANWPVLWEEEIEKAKKKK

SEQ ID NO: 105508 - protein, 175 aa, Oryza sativa
  unsure (1)..(175): unsure at all Xaa locations
  Clone ID: PAT_MRT4530_102745C.1.pep
MSRAVVVVVVVAVLALACGAASQSPAPAPAAGPASDCGSSITALAGCLTYITPGSPEARPAKDCCAGVKSALGSPAAVACLCGALGQDFGIKINYTRAAALPAACGGDSSALSXKKFPGASPTGAPAPSSSGSGSGSTPATGTPSSPKSAAAQSPVSAMLIVATVAAPLLSYYYL

SEQ ID NO: 105509 - protein, 31 aa, Oryza sativa
  Clone ID: PAT_MRT4530_102746C.1.pep
CATVETGSHINLKKITYVNSTKRQTTDNKHE

SEQ ID NO: 105510 - protein, 1506 aa, Oryza sativa
  Clone ID: PAT_MRT4530_102747C.1.pep
MTKLAYLHEPGVLQNLKSRYDMNEIYTYTGNILIAVNPFRRLPHLYDTQMMEQYKGADFGELSPHPFAVADVAYRLMLNEGISQSILVSGESGAGKTESTKMIMRYLAYMGGKAAAEGRTVEKQVLQSNPVLEAFGNAKTVRNNNSSRFGKFVEIQFDQNGRISGAAVRTYLLERSRVCQISDPERNYHCFYMLCAAPPEELKRYKLGDPRTFHYLNQSNCYKLEGLDESKEYLETRKAMDIIGISSEEQEAIFRVVAAILHLGNVEFAEGDDGESSKPKDEKSLFHLKTAAELFMCDEKALEDSLCKRIIVTRDENIVKTLDPEAAKGSRDALAKTVYSRLFDWLVDKINKSIGQDPNSKCLIGVLDIYGFESFKTNRCFTALSLKHFLKKCKMLDPEYCFFMFSVILLFQKHVFKMEQEEYTKEEINWSYIEFIDNQDVLDLIEKKPGGIIALLDEACMLPRSTHETFAQKLYQTFKNNKRFTKPKLSRSDFTICHYAGDVTYQTELFLDKNKDYVVAEHQALLSASQCSFVSGLFPLLSEDSSKSSKFSSIGSRFKQQLQSLLETLSATEPHYIRCVKPNNILKPSIFENQNVLQQLRCGGVMEAIRISCAGYPTRRTFYEFIDRFGILAPDVLSGSSDEIAAVRRLLEKVDLQGYQQCLASQKRWSIVVEIGKTKVFLRAGQMAELDARRNEVLGRSANMIQRKVRSFLAQKNFIKLQRSAVQLQTICRGELARKIYQNLRREAASLRIQTCYRMHAARKAYNELSASAVTIQSALRGMVARKELHFRQQTKAAIVIQSRCRQFLARLYYSRTKKAAITTQCAWRGKVARKELRKLKMLQMFCYTAVYISQYMAARETGALQAAKNKLEKQVEELTWRLQLEKRMRADLEEAKSQENAKLQATLQEVQQQYKETQEMLVKEREAAKKAAEVAPVVKEVPVIDTELMNKLRDENDKLKTLVSSLEKKIDDTEKKYEETNKISEERLQKAMDAETKIVDLNMAMLRLQEKLSNMESEEKVQRQALLSSPVKSMSEHLSIPIVPKNLENGFHEVEDPKEPQSAPPAIKDYGNGDPKLRKSCVDRQLENVDALIDCVSKNLGYCGGKPVAAFTIYKCLLHWKSFEAEKTSVFDRLIQLIGSAIELASFFGPQSAYVVKPLMQNEEDNDNLAYWLSNTSSLLFLLQRSLKAAGAPGSVSRKKPPQPTSLFGRMAQGLRSASFVNMHVEATDVVRQVEAKYPALLFKQQLTAYVEKIYGIIRDNIKKELSSLISLCIQAPRTMKASMLRMSGRLSGQAQSNHWQRIIESLDILLKKLQDNHVPPVLAQKVFTQIFSYINVQLFNSLLLRRECCSFSNGEYVKAGLAELELWCAKATTEYAAASWDELKHIRQAVGFLVIFQKFRISYDEIVNDLCPILSVQQLYRICTQYWDDKYNTQSVSSDVLSNMRVLMTEDSNNAESSSFLLDDNSSIPFSVDDITNSIQEKDFTDVKPAEELLENPAFQFLQD

SEQ ID NO: 105511 - protein, 130 aa, Oryza sativa
  Clone ID: PAT_MRT4530_102748C.1.pep
AFSFPFLSFCCCRIQPQLLVSIFSSFGHWFPHCPEASILVTSIHLCCSGTPLAWAMTLLVKFPIPTFSSSSSFPDSMFPLVNVVGNSSLLLFPLLPFPEGPIRPTGPKFLRGYLLIVIFPFLLLTRFQMV

SEQ ID NO: 105512 - protein, 126 aa, Oryza sativa
  unsure (1)..(126): unsure at all Xaa locations
  Clone ID: PAT_MRT4530_102749C.1.pep
PRGGSRRRHGRRRNSVSDGERRSGRGRRAAAAPWDGSRGVREDGAATXRPERKMREEGLTVAREIRXSSEFPAMGSDDRGAPRRCAASGGGGACSXRLRRRRRAAGGGLRWWQLGFAVGWWFQRRF

SEQ ID NO: 105513 - protein, 91 aa, Oryza sativa
  unsure (1)..(91): unsure at all Xaa locations
  Clone ID: PAT_MRT4530_10274C.1.pep
IDDLLTLFSTICFFCDNSAINIVKNPVQHSRTKHIEIRYHFLRKYVXKCTIVLEFVKSEKRHADIFTKPLXLSMXEFLQSELGVIHPCGLR

SEQ ID NO: 105514 - protein, 84 aa, Oryza sativa
  unsure (1)..(84): unsure at all Xaa locations
  Clone ID: PAT_MRT4530_102750C.1.pep
TRALARLAWQGRRRACTTHASNDYSIPLAGVHRRSGEQVSGTSAFDVLHREKAAIRFLGSAXRDCSLFVRDGSSSSSLACCAPS

SEQ ID NO: 105515 - protein, 160 aa, Oryza sativa
  unsure (1)..(160): unsure at all Xaa locations
  Clone ID: PAT_MRT4530_102752C.1.pep
FFLDEPVNDLPTGVLYNSLGSVIHMLIGSRYAVQRSGNVLMSFNNKEASSAIPLFSPVIGPMAQSFGPIFSQLASYPTIRFGAEAAIKQLENLNPPVGKQLLPLLXQLPPLYMDLIKGREDFIPKPEKTRRLIKTYYGISRNLXKVKDDQIDETSTLAQV

SEQ ID NO: 105516 - protein, 130 aa, Oryza sativa
  Clone ID: PAT_MRT4530_102753C.1.pep
MRQIAATAYNVRRHGSERKCDESEKGPHGPRGRNARHRCGFGAMAQYALATPELQTWAELLGLESPRRTGGGGMQRCGLDPPLALGVKGGSGGAVENKEEGEAGACRCRSEERRVPVSARVDHAAVTNIG

SEQ ID NO: 105517 - protein, 83 aa, Oryza sativa
  Clone ID: PAT_MRT4530_102754C.1.pep
KWVFCCPITAQLNPGVYGLLNTWALWALWGEQSNIFLVLGAPRVFPDEYTPRGSGGFPTKKVLYSFFGLFKKQKDDLHTLNST

SEQ ID NO: 105518 - protein, 469 aa, Oryza sativa
  Clone ID: PAT_MRT4530_102755C.1.pep
MSAEKPPLSSTGMSSDPQIKIPKPIGSDVNEGNIVPVTIDKLSPEQRKDFELMMKSAQEQFMKSFVETRGKVYQKYKVKVVTADEVGSSSSQGDKGIADGSGKKGDGLQDGVVEDLGEDNNEVQPQFNNFQDRIDYAVQHALINQSGVLVNTFTKMVKYVVDGTIAEHQVIGPVYLPGDVFPNYRKLVTGNQQSATNAPSIQPMASASTPAPAAPSLAPRQIISNPCLLSREQPQHAGQNINRRSQEQIASMFLPTQPTGGSIQHTPPRQQIVIPEQLVRNIQPNVQNYQGSNLNYQYQPPSPHVHYQQGGSPQPQYAPRFNQFEPIQQQAQGVPQQRQWAVMIADVMREQFGLKPKDTGNLYRHPYPEWFERVPLPNRYEVPEKMGEEYDAVRDHLRGLRSQGLTGAMVFGDYFRRRIAPLQERSRGAWEYVGHNDPMRTHVGERWDWGEEETLIRDRILLICSARDR

SEQ ID NO: 105519 - protein, 1061 aa, Oryza sativa
  Clone ID: PAT_MRT4530_102756C.1.pep
MGSAGNENSDTLLGNGVVGILAETANMWERRAPLTPSHCARLLLGGGKRGTGVNRIIVQPSTKRIHHDAQYEDVGCEISKDLSECGLIIGIKQPKLEMILPHRAYGFFSHTHKAQKENMPLLDEILEKRVSLFDYELIAGDDGKRLLAFGKFAGRAGLIDFLHGLGQRYLSLGYSTPFLSLGQSHMYPSLAAAKAAVIAIGEEIATFGLPSGICPIVFVFTGTGNVSQGAQEIFKLLPHSFVDAGKLPEIFQARSLSQHPQSSKRVFQLYGCVVSSRDMVTPKDPTRCFNKADYYAHPEHYKPVFHERIAPYASAIVNCMYWERRFPRLLSIDQLQQLMKNGCPLVGISDITCDIGGSIEFVNKSTSIERPFFRYDPCTNSCHDDMEGNGVICLAVDILPTEFSKEASQHFGDILSKFVARLASAKELLELPSHLRKACIAHAGRLTSLYEYIPRMRKTIIELPPAPTNLLPDKKYNSLVSLSGHLFDKFLINEALDIIETAGGSFHLIRCDVGQSIDDMSYSELEVGADDTATLDKIIDSLTSLANAHGDPNARREIELSLKIGKVNECGTDDSMAKEGSKVLILGAGRVCRPAAEFLASYSNIFSSSAYDHDIDQIHVIVASLYQKDAEETIDGIRNATAAQLDVADIKNLSNLVSQVEVVVSLLPASFHAAIARVCIEMKKHLVTASYVDESMSKLEQSAEGAGVTILCEMGLDPGIDHMMSMKMIDEAHSRKGKIKSFTSFCGGLPSPASANNPLAYKFSWSPAGAIRAGRNPAVYKFHGEIIHVDGDKLYESAKRLRLPELPAFALEHLPNRNSLMYGDLYGISKEASTVYRATLRYEGFSEIMATFAKIGFFDAASHPLLQQTTRPTYRDFLVELFNACNISTTARKEYSEVSGGQDGELISRLLSFGHCKDKEIAAKTVKTIKFLGLYEETQIPENCSSAFDVICQRMEQRMAYIHNEQDMVLLHHEVEVEYPDGRPTEKHQATLLEFGKVENGRPTTAMALTVGIPAAIGALLLLQNKIQKKGVIRPLEPEIYIPALEILESSGIKLAERVET

SEQ ID NO: 105520 - protein, 151 aa, Oryza sativa
  Clone ID: PAT_MRT4530_102757C.1.pep
MSGRKKTREPKEENVTLGPTVREGEYVFGVAHIFASFNDTFIHVTDLSGRETLVRITGGMKVKADRDESSPYAAMLASQDVAQRCKELGITALHIKLRATGGNKTKTPGPGAQSALRALARSGMKIGRIEDVTPVPTDSTRRKGGRRGRRL

SEQ ID NO: 105521 - protein, 419 aa, Oryza sativa
  Clone ID: PAT_MRT4530_102758C.1.pep
MHLSPQLGETMPSKKRKVELHADDQPPPTQAIMATPEPCSGRPWPDLPSELLGLVLLRLPSHADRVRLRAVCRPWRSSARVELDLLPPPLPWLLLRGGAFITLPDGAAHRLPAVPGDATHLASTGSGLLIVHGDGMLSLMNPSSLATTPLAALAAVLPKYIRYKYLAADRQRLVPLINKAVVSDNFTALLIGNRTWKVIVTIGFSPPLAHFPSSIVDIASFQGKLYYLTSDVRKRQEELYIFGVDNAKQIGIRCISSTLKDIGEESWFGPCSTERYATERYLVASNDRLLMVRRWINLPPIYPSDSGIVKRTRRFEVFEAADLSSGCGRWIKVDTLMGHALFVSKGCSKSLSAGAEEDCIYFMHEDIKNGKPEDPFLDSGVYNMRDGTVAPLLTETLVAEPLAVHGGPWCPTWLFPSET

SEQ ID NO: 105522 - protein, 256 aa, Oryza sativa
  Clone ID: PAT_MRT4530_102759C.1.pep
MNQSPPHMSRPSVIIKLILGLLWFIVHLAISLCSLWFDLIYSIECYLISFGLIPKYRKFQLDRLKHLAVVVDSREAKNVAKINQLLCWLSNVGVKYVCLYDIDGVLKKTFAPAMNGSRYGNSGKYLDVGANTKALTCCHKEMTIECISGSDGKDGIAKAASLLCSTCVNGNRNTCGNGEIVFTEADMSGALKAIGCGGPEPDLLLVYGPARCHLGFPAWRLRYTEIMHMGPLNSMKYGAIVKAFYKFSKKYQNFGK

SEQ ID NO: 105523 - protein, 370 aa, Oryza sativa
  Clone ID: PAT_MRT4530_10275C.1.pep
MAAMARHLPAILLLSSALLLALASASASAAAPALAAFVDAASRRYLRDQQHHDQAASMSLDQVSAAVSVLLGFAPPPSLPAQSSSKLDKLLLPNPFDRPRAVFLLQIDGFHASVESITSEAGSIFKTTIDGLSDSATGLTDKDDLVIVHSDESPAVDSGSEYFDSDLTDLANWLGGSYEKVDGKLIIPLESGESLTLLITKEADMEFASSLISLRKTIKRGIQVHEDFSGGVMSPAELLVCHFKGIKALEEEYGSTEIVKQGTDVVRTAVTKAFDLLRGAYNGKIVGLVISTKEASPSLVGPASSLHISRWLKETSQTNTTIASSEILVRKSLAWITGIILLVSTLIGVCLLMNMPLTRDTLLYSNVKID

SEQ ID NO: 105524 - protein, 236 aa, Oryza sativa
  Clone ID: PAT_MRT4530_102760C.1.pep
MAIAADGEADAEVDAKTPSTITGEKTPSIVTGAKTEDFLRGDAIDDTTHVASDSSSPDDNPSDIRPPSRDSDGDHSGSATISPASRSGRGRRVTTVYNEGSNRIRARIILISVPFLFLVCSPPLLRRHSGDPLALLWTIALLMCTHLFFLISSLSRTMRPSTVFFRVSYGVLVAVAADTFAGPDAGFAVMHLATGWTAGLLGYAYAEHLQHIGKETTAKNMAPPTFLTEEEESSFK

SEQ ID NO: 105525 - protein, 95 aa, Oryza sativa
  unsure (1)..(95): unsure at all Xaa locations
  Clone ID: PAT_MRT4530_102761C.1.pep
GRVYPLVGQVNGSVKLTVLRNASCTLSNLCRAKPHPTFEQANPALSALKRLIRSHDDDGLSEVCXSLSYLGEATSDKIRPERQSXHFPRVVQLLM

SEQ ID NO: 105526 - protein, 37 aa, Oryza sativa
  Clone ID: PAT_MRT4530_102762C.1.pep
FPMGLACYQIVDRFLWLSLFMEVLSELRCRLCELKTN

SEQ ID NO: 105527 - protein, 106 aa, Oryza sativa
  Clone ID: PAT_MRT4530_102763C.1.pep
MTSRLVPDATRTRPRLDGHSPFPGGVRGGRELMPIEGICRQVEAGCFAHCHIVLCKGEPSRSPFRPVTSGLHAHDQERSVCAVLPHAGCRVVSWELGKLWDGQFAM

SEQ ID NO: 105528 - protein, 398 aa, Oryza sativa
  Clone ID: PAT_MRT4530_102764C.1.pep
MAAEAAAGDGADGGGGRGGRRRLHATTSALWTMAGNEIGGEYAWGVWSRSAMADQFADSANNVVIEEVNKGLNPGMIVLIVVATFLLLFFVGNYALYVYAQKTLPPRKKKPVSKKKMKREKLKQASAAGSRDGGQRGTGSWRGGEVDQPMQMVLRVKHPSSLGGGGGGGEEEAGEASSRSALSVFKAKEEQIERKKMEVREKVFAQLGRVEEESKRLAFIRQELEGMADPTRKEVEVIRKRIDVVNRQLKPLGKTCVKKEKEYKEILEAYNEKNKEKALLVNRLIELVSESERMRMKKLEELNKTVDAPPGMVLAGHCSLGMALAESAVLLSPEVQNDHILVIGQANMISSCWLAIEEGETNRSYSSDLDNGEETTETLQDWLSLSVVRVSWMEEMVG

SEQ ID NO: 105529 - protein, 70 aa, Oryza sativa
  Clone ID: PAT_MRT4530_102765C.1.pep
PDTVAYHTCILAAALGSEERAKKALLYSYRAVASGFAAKLTPPELSALQKHPAVLQVRPDQMYHAVDNLN

SEQ ID NO: 105530 - protein, 119 aa, Oryza sativa
  Clone ID: PAT_MRT4530_102766C.1.pep
PELIYRDVRDFKVAQFGRVEEESKRLAFIRQELEGMADPTRKEVEVIRKRIDVVNRQLKPLGKTCVKKEKEYKEILEAYNEKNKEKALLVNRLIELVSESERMRMKKLEELNKTVDSLY

SEQ ID NO: 105531 - protein, 1176 aa, Oryza sativa
  Clone ID: PAT_MRT4530_102767C.1.pep
MLKLQSMDSLYDISCFAAGLAGNIFALALFLSPVTTFKRILKAKSTERFDGLPYLFSLLNCLICLWYGLPWVADGRLLVATVNGIGAVFQLAYICLFIFYADSRKTRMKIIGLLVLVVCGFALVSHASVFFFDQPLRQQFVGAVSMASLISMFASPLAVMGVVIRSESVEFMPFYLSLSTFLMSASFALYGLLLRDFFIYALITLKKGTKLIKYSRRGKPKIRAFRLSSDETSLIWFSHKKEKFLRLSSVTKIIPGQRTAVFGRFLHPEKDYLSFSLIFKNGQRSLDLVCKDQAEVEVWFSALEGLISSFRKKSLINEHKDRVSFSEFCYTVTILEGKNDSSIVDMHITHKYHNTEVTYYQDRHSYDSTLDIASNISRSFNSAGYCGTNSFSFRKSDVGFDRLNMIRTSAADSSRVSISSALSSYSQGSGTDDIESLGDVYVWGEVWTDVTPSDGHTSSSCSKVDVLIPKPLESDVVLDVNQIACGTRHVALTTRQGEVFTWGEEFGGRLGHGTDADISRPKLVESLSLTVVDLISCGEFHTCAVTTSGDLFNWGDGSYNVGLLGCGTEVSYWLPKKVSGPLEGLQVLSVACGSWHSALTTSSGKLYTFGDGTFGVLGHGDRETLAYPKEVEALSGFKTIKVACGIWHSAAIVEVTNQTGANVMSKKLYTWGDGDKNRLGHGDKEPRLVPKCVQALLEYNFHQLACGHNMTVALATSGRVFTMGSSSNGQLGNPKSDGKQPCLVQDRLASELVEEISCGASHVTVLTSRSEVYTWGMGANGRLGHGDLKDRKKPCLVEALKDRHVKSISCGSNFTTCICIHKWVSGADQSVCTGCRQAFGFTRKRHDCYNCGLVHCHACSSRKVLKAALAPTPGKPHRVCDSCFLKLKAAETGSNNSNRRNAVTRRSIDGREKLERPEIRPSRTTAPAESVKYTEVDSLKQKCEAQHEQLQISDKKTKTVVSMATEEYTRCSAVVEFVKFLDNELNGIVHELPSDAAESLKALQNQVQALLREQRSHPSELLNPMDHDGIQLSSGGNALHDFSNHRSGSTRYLFMSQDASSASGSAISLTSEPPSHRGMEHHAKVPNDFVPKHDTHGEVQLIEQFEPGVYVTLIQLKDGSKVFKRVRFSKKKFAENQAEEWWRENQERVFKKYSHPTVPQTTSTKTGSSNEEEHHS

SEQ ID NO: 105532 - protein, 315 aa, Oryza sativa
  unsure (1)..(315): unsure at all Xaa locations
  Clone ID: PAT_MRT4530_102768C.1.pep
MSALYLARGASKVVRRITSETSVELKILTEKWQLLLAGLVFQYIHGLAARGVHYLHRPGPTLQDLGFMILPELGKERGYISETLFTFIFLSFVLWTFHPFILQTKRFYTVLIWRRVLAFLCASQFLRIVTFYSTQLPGPNYHCREGSALARLPHPQNVAEVXLLINFPRGVIYGCGDLIFSSHMIFTIVFVVTYQKYGNIRFIKMLAWCIAIAQSLLIIAXSRKHYSVDVVVAWYTVNLVVFFVDKKLTELPDRSAGSTSVLPVSIKEKDSKLKEDKTRMLNGNSVDSADWRPWTQMNGKHIENGNHLDTETTKT

SEQ ID NO: 105533 - protein, 224 aa, Oryza sativa
  Clone ID: PAT_MRT4530_102769C.1.pep
MPLSRLYQTELVESFRRRRRDAAVVRCADNGENDAGVERVGDDDKVLKRRGTILPVGRYGSGGDAARVRRATAPAPAPTQDAASSKNGALLSCGDDDTPVSRNGSVVTSIDKPATAAASTPLVTIPKLPAPDSLVILPSVDRPQPEFIIPDAAYLGAPAPPLSSPCRWPRVASTGARQWQGCHAAWLSPVAPLSSSLSAAVALLLLVGGRWARSSCGVFAIGFF

SEQ ID NO: 105534 - protein, 139 aa, Oryza sativa
  Clone ID: PAT_MRT4530_10276C.1.pep
RGVIKMKITSTAMLAPVYGTPHPLAGAEVQLTVFDRAAFDLYVPSVLAYRAPAPSNEAIKEGLLRAVAAYPHLAGRLAVDHHGRRFLHVNDQGVLVVEATVDGADLDDVLANSGRAMATDVADLYPALPEDNVGAALLQ

SEQ ID NO: 105535 - protein, 82 aa, Oryza sativa
  unsure (1)..(82): unsure at all Xaa locations
  Clone ID: PAT_MRT4530_102770C.1.pep
MESVGTTTSSLLKTYLAGARLPXSTRTPPNSSSRAPAEPSATPSLRMTSLPPTTSTAIRFSPINEFIVSRERTRRFMTDMIT

SEQ ID NO: 105536 - protein, 62 aa, Oryza sativa
  Clone ID: PAT_MRT4530_102771C.1.pep
TPRRREHFRDNFFLETRMLQYIIAKTAPRAFLLFIGEGGVTRGDRAPTTHQIPLNSPPTKSN

SEQ ID NO: 105537 - protein, 137 aa, Oryza sativa
  Clone ID: PAT_MRT4530_102772C.1.pep
CARGVAVICLFYNINLEHELKDKRNSGRNQEHIKKPCPPASPCSSGEASTAMARGCDAPVSLTTPAIAMRHHRRSSSARVREILTLEEEGRGEGEELTGGRRWPPKETAARGESVLSPLYPSHTIHQAPPPQPRLLS

SEQ ID NO: 105538 - protein, 61 aa, Oryza sativa
  Clone ID: PAT_MRT4530_102773C.1.pep
MTVPMTLASSPYLRQGILGADQLHITDSFGRGDEREGTMVMDAIMLDYGANYAGAASLCTK

SEQ ID NO: 105539 - protein, 82 aa, Oryza sativa
  Clone ID: PAT_MRT4530_102774C.1.pep
RCRFRRRRRRCRLRRVGMTRFISSVIPMASGGDTRNRINSARSPSLLLSFFSAVLLRSNLSISLAIYWQILRRGGRRRRSCW

SEQ ID NO: 105540 - protein, 45 aa, Oryza sativa
  unsure (1)..(45): unsure at all Xaa locations
  Clone ID: PAT_MRT4530_102775C.1.pep
LVRRAHDRVTHRQVRXXAVPVQGAAKSLLSWSRSKAXGEAVLHHG

SEQ ID NO: 105541 - protein, 149 aa, Oryza sativa
  unsure (1)..(149): unsure at all Xaa locations
  Clone ID: PAT_MRT4530_102776C.1.pep
KERERRGGPPPPXSPWPTRTGGTPPPPTPRATTTTTSCPSPPPPPPGCPPRRLLLLRSPPPGSRSSGPAPPTSPMYLVLLKWLAITLVMKKGQGIVLQETLRLLTLPMNVFCALGKFNPMELELELDLVLNLLGLRQVAMLDTQLRIVQ

SEQ ID NO: 105542 - protein, 304 aa, Oryza sativa
  Clone ID: PAT_MRT4530_102777C.1.pep
MAAGRGISQLLKKAFRPSSSSPLSSSWINHEESSGFTGLRALAILGVGASGLLSFATIASADEAEHGLEAPHYPWPHAGILSSYDHASIRRGHQVYTQVCASCHSMSLISYRDLVGVAYTEEETKAMAAEIEVVDGPNDEGEMFTRPGKLSDRFPQPYANEQAARFSNGGAYPPDLSLITKARHNGQNYVFALLTGYRDPPAGVSIREGLHYNPYFPGGAIAMPKMLIDGAVEYEDGTPATEAQMGKDVVSFLSWAAEPEMEERKLMGVKWIFLLSLALLQAAYYRRMKWSVYKSRKLVLDVVN

SEQ ID NO: 105543 - protein, 229 aa, Oryza sativa
  Clone ID: PAT_MRT4530_102778C.1.pep
MARVYSSFPPPPPSPPPPSTTSEQRKVFTLWMKSLVLNGRGCTVYDSTGGIVYRVDNYGSSCSDNVYLMDLRGKIVLNILKKKLAFGKWEGYKWSSGERQRDAAAGAGAGGAWFTVTRPCSSILFQRRRRPSSTCEFRSGGGGGDDGGRAMRYKMDDCSGGGGGGGKQQAWCRIVDGATGAVVAEVKGKTTAGGVALGDDVLTLTVEPNVDHALIMGMVLVYGLMNHTM

SEQ ID NO: 105544 - protein, 771 aa, Oryza sativa
  Clone ID: PAT_MRT4530_102779C.1.pep
MASSHHQEVQEQGHGDGEEEEQDNSQITSPLLRSSMRLGSPEENSPVEQVALTVPVGDDPATPVLTFRIWVLGTASCVVLSFLNTFFWYRKEPLTVTAISAQIAVVPLGRLMAAALPERVFFRGRPWEFTLNPGPFNVKEHVLITIFANAGAGSVFAINVITAVRVFYGKRISFFVSLLVVLTSQVLGFGWAGIFRRYLVEPAAMWWPSNLVQVSLFRALHEKERRSKGGMTRTQFFLVAFVCSFAYYIFPGYLFQMLTSLSWICWIFPKSVLAQQLGSGLHGLGIGAIGLDWSSISSYLGSPLASPWFATANIAAGFFIYIYVITPIAYWINLYKAQNFPIFSDGLFTVTGQKYNISTIIDSQFHFDTKAYEKNGPLYISTFFSISYGLGFACLTATVVHVLLFHGRYTDKFVTPVSSEIWQLSRSAFQDKKMDIHTKLMKRYKQVPEWWFISILIASVAITMFTCEYYIEQLQLPWWGVLLACALAIFFTLPIGIVTATTNQTPGLNIITEYIMGYLYPGRPVANMCFKVYGYIGPQQALAFLQDFKLGHYMKIPPRTMFMAQVVGTLIAAFVYLGTAWWLMDTIPNICNTELLPPGSPWTCPYDHLFYDASVIWGLIGPRRIFGDLGTYSAVNWFFLGGAIAPLLVWFAHKAFPGQKWILLVNMPVLIAGISQMPPATSVNYTAWIFVAFLSGYVVYKYRRDWWERHNYLLSGALDAGLAFMAVLLYLCLGLEKISLNWWGNDLDGCPLASCPIAEGITVQGCPVASA

SEQ ID NO: 105545 - protein, 111 aa, Oryza sativa
  unsure (1)..(111): unsure at all Xaa locations
  Clone ID: PAT_MRT4530_10277C.1.pep
EQHRDHHSRQADTVDPTQQQPIQQTTPRQQVVQPIQQTPPIQQVVQPAQHMPHRRQVLQPIQXTPQGGNLNYQXQPPSPQVQYQQAGSAQPQFVPQYNQFEPMPQQPQGAP

SEQ ID NO: 105546 - protein, 149 aa, Oryza sativa
  Clone ID: PAT_MRT4530_102780C.1.pep
HHGFHHHPCHASTTFQHHQTPHFILTSSIIIASVHHQPSGCHVSHHCPYKRVARQRGSAPGNSRHRSPARRHPDFPSSAAAPSSQQLLRVHIHGPSAVSLCRNCSSAHHIPTTNLSLQPSAQPSHSVNSLARFASHSKLHAPHFHSYQI

SEQ ID NO: 105547 - protein, 323 aa, Oryza sativa
  unsure (1)..(323): unsure at all Xaa locations
  Clone ID: PAT_MRT4530_102781C.1.pep
FGTSDFSSSYLLGEGGFGAXHKXFVDAGMRPGLLPQPVAVKQLDIAGLQGHREWLAEVIFLGQFRHPHLVKLLGYCCEDEERLLVYEFMPPGRLGNHLFKRISATVPWGTRLKIAIGAAKGLAFLHGASTPVIYRDFKASNILLDSEFTXELSDFGLAKMGPEGSETHVTTRVMGTHGYAAPEYVMTGHLNIKSDVYSYGVVLLELLTGRRAMEHVRGRSLHADQVVKIVDWTRPYLGSSRRLRCIMDPRLAGHYSVKAARAVAHLAVQCTSPQPRDRPRMAAVVDALERLQGFKDMAVTVGLWPTNAPVAGRNAISAKIRCE

SEQ ID NO: 105548 - protein, 168 aa, Oryza sativa
  unsure (1)..(168): unsure at all Xaa locations
  Clone ID: PAT_MRT4530_102782C.1.pep
MGRSSACCDKAAVKPKRGAWTAEDDERLRSYIQQHGTGGNWXGLRRCGKSCRLRWLNYLRPGIRHGAFSDHDDRLILALHAAVGTRPVLLLAAHQLHVASTSSGGMHVGVGEEGRGYDDVFAAGPEHGRRADDDDELAQPPKPATIFARQITNWCAAAATCIWHALLV

SEQ ID NO: 105549 - protein, 284 aa, Oryza sativa
  Clone ID: PAT_MRT4530_102783C.1.pep
MASHDHDHDHHHHHSHDDGDHHHSHHQDGSHGGGGGSWVGEDGRVWHSHDGLAPHSHEPIYSPGDFSKRAPPLISRRFAERAFTVGIGGPVGTGKTALMLALCRSLREKYSLAAVTNDIFTKEDGEFLIKHGALPEERIRAVETGGCPHAAIREDISINLGPLEELSNLCKADLLLCESGGDNLAANFSRELADYIIYIIDVSGGDKIPRKGGPGITQADLLIINKTDLAPAVGADLAVMERDALRMREGGPFVFAQVKHGVGVEEIVNHILQAWEIATGNKRR

SEQ ID NO: 105550 - protein, 51 aa, Oryza sativa
  unsure (1)..(51): unsure at all Xaa locations
  Clone ID: PAT_MRT4530_102784C.1.pep
STDITNQMRHPWDQFNPLVISRPFLDLTNLEAIPSIGXLPQFLGSXQLGSF

SEQ ID NO: 105551 - protein, 185 aa, Oryza sativa
  Clone ID: PAT_MRT4530_102785C.1.pep
LWRESISSPMSQDSVDGPQVSGCSATSLGQPKSKRRTGDKARGEKKALKVKINLASPAKKIKKSSKKKGKKGTVAGRIGRKCTLSRDSKGRFLPRESKGGDIGGNATESEVDYDRFMNFQAPDFATILSILKGWKGMKQCNKIRRLKDPDFVPLMNVMSNTGYVTEDDGHYDVLKVLMHADGWSA

SEQ ID NO: 105552 - protein, 36 aa, Oryza sativa
  Clone ID: PAT_MRT4530_102786C.1.pep
GSLGGLSLEIIIIYLGNMNSPMRIWDRLLEEVQVTC

SEQ ID NO: 105553 - protein, 195 aa, Oryza sativa
  Clone ID: PAT_MRT4530_102787C.1.pep
MEDKPVELPEHTGAGLGRCCEPAEVDEVVSRGDVQCPGAVVFNGDVHVDFRPDYIPTVFDNFSANVSVDGDIVNLGLWDTAGRLRLLSYRGADIFVLAFSLISRASYENALKKGMPELRRFAPNAPIVLVGTKLDLRDHKSYLADHPAASSITTAQNIKALFDTAIKVVLEPPRRRGETTMARKKTRRSTGCSLK

SEQ ID NO: 105554 - protein, 165 aa, Oryza sativa
  Clone ID: PAT_MRT4530_102788C.1.pep
SSPPPPPPPPPPPPPPPPPPPPLSFPPRKTRPFCWWPELRTPESLKQKVFLTPNIGNWFPSKKKFPLGKKRIFPKTKAFWPLFFFLSSPKICWKEGKNMGPPPFKKDGHVGPPKILHPQWDQHKGKNGPNKKKPPLDGLFLGPHFTMGSFFSISRTKTKLFPVFG

SEQ ID NO: 105555 - protein, 214 aa, Oryza sativa
  Clone ID: PAT_MRT4530_102789C.1.pep
MSGATKFIKCVTVGDAAFGKTCMLICYTSNKFPTDYIPTVFDNFSANVSVDGNIVNLGLWDTAGQEDYSRLRPLSYRGADIFVLAFSLISRASYENVLKKWMPELRRFAPNVPIVLVGTKLDLRDHRSYLADHPAASAITTAQGEELRKQIGAAAYIECSSKTQQNIKAVFDTAIKVVLQPPRRRGETTMARKKTRRSTGCSLKNLMCGSACVV

SEQ ID NO: 105556 - protein, 79 aa, Oryza sativa
  Clone ID: PAT_MRT4530_10278C.1.pep
MARGGPAVSRVGFARAYGVAQPMCETAWAARETAWIAVAAPALSHLSCARPRPPALSLSSHARSRIAAVAGPTGSLSHF

SEQ ID NO: 105557 - protein, 63 aa, Oryza sativa
  Clone ID: PAT_MRT4530_102790C.1.pep
MGNYALLSKPRLWPLLPHRNDTLAAALLSGVGQWPGMGGIGEQVATDNDGGSRQRGSNNQLPR

SEQ ID NO: 105558 - protein, 330 aa, Oryza sativa
  Clone ID: PAT_MRT4530_102791C.1.pep
MASRRSLHLLTASRGIFSTPHLASLGWFDKIKSTFTGKKPDEATDPSANFTLLQFADSMEKARKLGTFKNFVMGRCSEATVVNAFEKHSAVLRYLGTIDPTGEKLKNSDKIGATKHCNCTIADVEHILAKYTWAKEAQKKIVKLKEEGKPLPKNFNEVKNLMGSTPLDVGRSNLEKSGQISRNAMCPCGSKKRYKKRCHEIARFAMVSQIEGIRPRDRSTLRGHWDLKEGCYHEYAPEVGARCFTHATNKPVFVQLNFNCNHISGEEIDEVKDVLSVIKPAITGSNHRTLLNWQRRDKGNPDLKGIFSFRDHPIPPVLKPNTLKNGFNPT

SEQ ID NO: 105559 - protein, 71 aa, Oryza sativa
  Clone ID: PAT_MRT4530_102792C.1.pep
DSIHNAKFTCTYTKGKMCNTCALSPSHRTWSVLLKKKSACHRLTASKADSPQRTRQGRLLPFRLDSASYHR

SEQ ID NO: 105560 - protein, 891 aa, Oryza sativa
  Clone ID: PAT_MRT4530_102793C.1.pep
MRQTRSLAAAAAVLVVGVVLHWVGVVDAATAAERGILLEFKAAVTDPNGALASWTAGGDPCVDFAGVTCDPSSRAVQRLRVHGAGIAGKLTPSLARLASLESVSLFGNGLSGGIPSSFSALGPTLHKLNLSRNALSGEIPPFLGAFPWLRLLDLSYNAFSGEIPASLFDPCLRLRYVSLAHNALTGPVPTAITNCSRLAGFDFSYNRLSGELPDQLCAPPEISYISVRSNSLSGAIAGKLNACRSIDLLDVGSNHFAGPAPFGLLGLVNITYFNVSSNAFDGEIPNIATCGTKFSYFDASGNRLTGPVPESVANCRSLRVLDLGTNALAGDIPPSIGKLRSLSVLRLAGNAGIAGSIPAELGGIEMLVTLDLAGLALIGDIPVSLSQCQFLLELNLSGNQLQGVIPDTLNNLTYLKLLDLHRNHLVGGIPVTLAQLTNLDLLDLSENQLTGPIPSELGNLSNLTHFNVSYNGLSGMIPALPVLQSFGSSAFMGNPLLCGPPLNNLCGASRRAKQLAVSVIIVIVAAALILIGVCIVCAMNIKAYMRRSKEEQEGKEEDEVLESESTPMLASPGRQGSNAIIGKLVLFSKSLPSRYEDWEAGTKALLDKDCLVGGGSVGTVYKATFENGLSIAVKKLETLGRVRSQDEFEQEMGQLGNLSHPNLVAFQGYYWSSSTQLILSEFMVNGSLYDHLHGSPHTFSGSSSRVGLSWEQRFKVALGTARALAYLHHDCRPQVLHLNIKSSNIMLDKDFEAKLSDYGFGKLLPILGSYELSRLHAAIGYIAPELASPSLRYSDKSDVFSFGVVLLEIVTGRKPVESPGVATAVVLRDYVRAILEDGTVSDCFDRSMKGFVEAELVQVLKLGLVCTSNTPSARPNMAEVVQYLESVRTNS

SEQ ID NO: 105561 - protein, 108 aa, Oryza sativa
  Clone ID: PAT_MRT4530_102794C.1.pep
MERACASWCTPPAGGSPGAQGLFVLWREGQESMRETDAKPKPARSAVSPRDGADRVLYLGPLCGEPPSYLTGEFPGDYGWDTAGLSADPETFAKNRELEVIHSRWAKL

SEQ ID NO: 105562 - protein, 64 aa, Oryza sativa
  Clone ID: PAT_MRT4530_102795C.1.pep
TPTRARTRGPEVNKEMLADLEAMGFTTARATRALHFSGNSTIEGAINWLSEHQEDPDIDEPLLV

SEQ ID NO: 105563 - protein, 265 aa, Oryza sativa
  Clone ID: PAT_MRT4530_102796C.1.pep
MGRRHGGGGGGGGGRGRGGRGRGGGEEDDLHLHKAARSGDLAAAESLCEANPLALNSRDRLSRTPLHLAAWAGHVELVKCLCKHKADVGAAAMDDTAAIHFASQKGHVEVVRELLASGASVKAKNRKGFTALHFASQNSHLELVKYLVKKGADIAAKTKGGQTALHVAEKDDVRDFLKECEQSLKKGGELPSEKKDDSVSTIAEKPDDDKSSGEATKDEDEAGFGEKRKSDGIAAALRSPELKKAKVSLGHLISANDMEEEEEAD

SEQ ID NO: 105564 - protein, 902 aa, Oryza sativa
  Clone ID: PAT_MRT4530_102797C.1.pep
MAPPRTSGLLLLLAAVVAAAAVVLVPPAEAAVASIDLGSEWLKVAAVHLAPGRVPIAVAINEMSKRKSPALAALADGNRLAGEEASGITARHPSKVFARARDLLAKPFPYVRSVAEALFLPYDLVPDARGAAAVRADDGQVYTVEEIVAMVLHYAAGLADAHVGAPVRDAVVAVPPYFGQAERRALTQAAQLAGVNVLALINEHAGAALQYGIDKDFSNESRHVIFYDMGAGSTYAALVYYSAYKAKEFGKTVSVNQFQVKDVRWDSKLGGLEMEMRLVNYFADQFNKQLGNGVDIRQSPKAMAKLKKQVKRTKEILSANTAAPISVESLYNDLDFRSTITREKFEELCEELWEQALTPVKEVLAHSGMKIDDIYAVELIGGATRVPKLQAKLQEFLGRSDLDKHLDADEAIVLGASLHAANLSDGIKLNRKLGMIDGSTYGFVFEINGPDYVKDESTDQLLVPRMKKLGIKMFRSIRHTKDFDVSISYEKASELPPGVTSHKFVEYSVSGLTDASEKYSSRNLSAPIKANLHFSLSRSGIISLDRAEAVIEITEWVEVPKKNLTLESNSTSQTLSSEGGAANDTSDSKENVSSDGDANKSSAPIDESNAQDIVTEKVLKKRTFRVPLKVVEKMAGAGSILSKELYSEAKTRLEALDKKDAERRRTAELKNNLESYIYSMKEKLEENTEILTVSTEQERESFAEKLNEVQDWLYMDGEDAQANEFKERLDQLKAIGDPILFRLSELKARPTACENARLYLAELQKIVKNWDSNKPWLPKKRVDEVVSEAEKVKTWLEEKEAIQKSTPVYSPPAFTSEEVYEKVLDLQDKVSSVNRIPKPKPKIEKKPPKEEESANKEKTDSSESESKEAESTETSSESAAPEESQSEPQKTDDLEPEAHDEL

SEQ ID NO: 105565 - protein, 65 aa, Oryza sativa
  unsure (1)..(65): unsure at all Xaa locations
  Clone ID: PAT_MRT4530_102798C.1.pep
LGFRTARRYPXLXEKITTPTXXATXVXGVAPXKGXFEGVGKXVXSXEAAHGXSCGSXCRCNPCNX

SEQ ID NO: 105566 - protein, 144 aa, Oryza sativa
  Clone ID: PAT_MRT4530_102799C.1.pep
PPPPRSPHHLRSSLPNCRRPDGRRRAHSEGRQAAREIGGGLRAAAGCTVPTCLPVWWCGVGAVSGDDGGGWRRRERKIRRVGRLRAARGGAAPLRAERHRFVVALLPPLSWATCIISLALCSCCRVRRPAVAVAGEPTRPPTRP

SEQ ID NO: 105567 - protein, 859 aa, Oryza sativa
  Clone ID: PAT_MRT4530_10279C.1.pep
MATRYWIVSLPVQTPGSTANSLWARLQDSISRHSFDTPLYRFNVPDLRVGTLDSLLALSDDLVKSNVFIEGVSHKIRRQIEELERAGGVESGALTVDGVPVDTYLTRFVWDEGKYPTMSPLKEIVGSIQSQVSKIEDDMKVRGAEYNNVRSQLSAINRKQTGSLAVRDLSNLVKPEDMVTSEHLVTLLAVVPKYSQKDWLSSYESLDTFVVPRSSKKLYEDNEYALYTVTLFAKVVDNFKVRAREKGFQVRDFEYSSEAQESRKEELEKLMQDQEAMRASLLQWCYASYSENTIYVRHAKVQNFVLLYVFSSWMHFCAVRVFVESILRYGLPPSFLSAVLAPSQKGEKKVRSILEELCGNVHSIYWKSEDDVGVAGLGEHRVRCCGYYVFVTLSSQKDKLGVMYRTSILGDPVPTDDSGVDKTQEEMMVKEKEIHVMSNRRRKRGESKPQAHDAGDTTPIDNILTSLDDAPPPPPPPRHELPLLQLNDHQEADDADASSSSSPHQQRRLWVKDRSRAWWELCSSADYPEADFRRAFRMSRPTFHFLCDALAAAVAKEDTALRAAIPVRQRVAVCVWRLATGEPLRVVSKRFGLGISTCHKLILEVCAAIRNLLMPRFLHWPDHPTSTAYKTRFEATSGVPGVVGAMYTTHIPIIAPKVSVAAYLNRRHTERNHKTSYSITFQGVVGPDGTFTDVCIGWPGSMSDEQVLRKSALHQRASAAAGSMSWVVGGASYPLTEWMLVPYAQRNLTWTQHAFNEKVGEVRRVATEAFVRLKGRWACLQKRTEVKLQDLPAVLAACCVLHNICETRGEDMDPDLRCDLPPDEEEDDTVLVQSESANKVRDDIAHNLLHRGLAGTAFF

SEQ ID NO: 105568 - protein, 93 aa, Oryza sativa
  unsure (1)..(93): unsure at all Xaa locations
  Clone ID: PAT_MRT4530_1027C.1.pep
VTSMGIKFIVWLWAREDKAVVIVNHSGFLYLTLSMYTRECHPAIIEEVAKRFVTCELRYMVLVDTSMHGSDSPSSNCPESIAXGLDLPSDAAP

SEQ ID NO: 105569 - protein, 21 aa, Oryza sativa
  Clone ID: PAT_MRT4530_102800C.1.pep
PCLRSFNSKGKLVFKAMHQVE

SEQ ID NO: 105570 - protein, 158 aa, Oryza sativa
  Clone ID: PAT_MRT4530_102801C.1.pep
LFGTSQLEENTEILTVSTEQERESFAEKLNEVQDWLYMDGEDAQANEFKERLDQLKAIGDPILFRLSELKARPTACENARLYLAELQKIVKNWDSNKPWLPKKRVDEVNHEAEKVKTWLEEKEAIQKRYAESRANTISRVLHLNVYMCLTPIYHIAAP

SEQ ID NO: 105571 - protein, 148 aa, Oryza sativa
  unsure (1)..(148): unsure at all Xaa locations
  Clone ID: PAT_MRT4530_102802C.1.pep
PLLTTKFGNSSIGDEDKXKRNPRWRSFWKQSKNRLKSESXRLESAEFKSDKVSRLSRFRQYDMFGQKSAVKTYGILEFVRNKSRVRYGHIMIXSTGTLTNLKAXFWTYTGVKQISQASCFSHQQPPHEVKMLKGLKTQEIKTQGHGES

SEQ ID NO: 105572 - protein, 187 aa, Oryza sativa
  Clone ID: PAT_MRT4530_102803C.1.pep
MALTVRLHTAVAAVAVAVVVAMGMAAAQMSPAGAPAPAGGISPACMDAVLNMSDCLTYVMNGSTARKPDEPCCPELAGLLESKPVCLCQLLAGGASSYDISVDYKRAMALPGICGLAAPPVTACALLGVPVPMAPSASPMAGLGPSTEPQMPEKSPSASPSESSNHAPGRFTALAAVVLAVAAAGMV

SEQ ID NO: 105573 - protein, 70 aa, Oryza sativa
  Clone ID: PAT_MRT4530_102804C.1.pep
MECLLWIEMERRVLAEERKGLLRIKAKAIGFEESVVTEEHDGWEASSRLPRSIKRVRERGPTAAVPWRGA

SEQ ID NO: 105574 - protein, 39 aa, Oryza sativa
  Clone ID: PAT_MRT4530_102805C.1.pep
NWLSNCTLSDDVYTMLAKRCGLCFEKRCKLNQIAALEKN

SEQ ID NO: 105575 - protein, 71 aa, Oryza sativa
  Clone ID: PAT_MRT4530_102806C.1.pep
EVGTGTHAHICPYNTCARPDSAHNMSAYTTMASVQSESKLAPRYEHTVSLAPSIMHEPACKGPTYRNSIYT

SEQ ID NO: 105576 - protein, 628 aa, Oryza sativa
  unsure (1)..(628): unsure at all Xaa locations
  Clone ID: PAT_MRT4530_102807C.1.pep
MAELLATQNQLMQSMITMFGTGGPGARVAATRPPGGAAPAGRNPPNYGEFMRTKPLAFAETVEPLDAEDWLRAVEKKMELIRSSEGDKVRFATSLLEGTANDWWETYKESREEGEPEPDWKEFTDAFREAYIPTAIMKMKRDQFRALTQGDLSVQEYLNRFTQLARYATQDLPDEEVDNKIVDANRKRKFAALKNKQQQQGQRHRVNTGPVWRPVYSGPVCPTTAPQHLRPSPTLDSSXPAPTIPAPGKFHSGCFNCGXTGHFARECPQQKVFPYRFGSPITTARGTTTPVAPRAAPQTPVRMRTMTPLAKGRVNHVTAEEVQEDQGVLLGQQQEIKXSILASLSLKETPVVSEYPDVFPEELPGMPPDRDIEFIINLMPGTAPISKRPYRMLVNELEELKKQIRELQEKGFIRPSSSPWGAPVLFVKKKDGSHRMCVDYRSLNELDQFVVVFIDDILIYSKTEEEHADHLRIVLGKLREHRLYAKYSKFNGLRKVILTKAHDSAYSIHPGSTKMYQDIKQAYWWPGLKRDVAEYVAICDVCQRVKAEYQRPAGLLQPLKIPEWKFDEIGMDFIVGLPKTASGYDSIWVIVDRLTKVARFIPVKTTYNSAKLAELFMSRLVNMGFPSG

SEQ ID NO: 105577 - protein, 781 aa, Oryza sativa
  unsure (1)..(781): unsure at all Xaa locations
  Clone ID: PAT_MRT4530_102808C.1.pep
KLGKNADDLIKTNVVLNDFGGNPSENKGVLNVELTIGSKTDPTTFFVIDGKGSYSMLLGRDWIHANCCIPSTMHQSLIQWQGDKIEIVLADSQLKMESPNYCFEGVVEGSNFYKKDTIDDLDGILGQGFMSADDLEEVDIGPGDRPRPTFISKSLSYEFRTKLIELLKEYRDCFAWEYFEMPGYRPYQQPPRRCQADMYDDIKVEITRLYDAGFIRPCRYVEWISNIVPVIKKNVKSKEVDDHIDGLREVFERTRKYGLKMNPTKCAFGVSTGQFFGFLVHKRGIEVSQRSINAINKIQRLEDKKQLLSLIGKVNFVRRFISNLFGMLEPFTPLLRLKADQEFTWEAEQQEALDSIKEYVSSPPVLIPPLKGVPFKLYLSADEKSIGLVFVHELEGKERKIFYLSRRLLDAETRKLRHYLFSNECTIVYKANVVKYMLSAPVLKGRVGRWIYALTEFDLRYEXAKAAEYEAVLKGFQLLKEVEADAVEIMGDSLLEQNVEANDLAQGASGYKQMVKDIEVDIAMITTDDWSANQAKVVLGEVHEGICGTHQSAHKMKWLLLRVGYFWPTMLEGCFRYYKGWQDCQKLEVIQRAPASAMNPIIKPWSFRGWGIDMIGQINTPSSNGHKFILVATDYFTKWVEXAVPLKKVDSGDAIQLVKEYIVYRFGVPQYITTDQVSIFLSDEVVHFVDIMGIKLLNSSPYXAQANGQAEASNKSLIKLIKRKISDFPRQWHTKLAEALSSYRMACHGSIQVPXYKLVYGQEAVLPWESVTGSRIIDLQD

SEQ ID NO: 105578 - protein, 63 aa, Oryza sativa
  Clone ID: PAT_MRT4530_102809C.1.pep
MHRASPPQTLARPACTSLTVSRAADKRVPPGTMQEPEDPQCEDFEDQAQDLEQGKSPLNILHL

SEQ ID NO: 105579 - protein, 243 aa, Oryza sativa
  Clone ID: PAT_MRT4530_10280C.1.pep
MVELIAQGVKTDKGFKEVHLNQVARTVSDRYGFEISGTQVYNHLRKWRTRWVRITRLKDISGALWDDTLSMIVLDEEHYMLYIKDHAKDAEYLNVPLENYTQMQIIFGNGQATGRFAMGSNEALGNPPDMADSALGPLDGIIGDVIAAGPSGVGVEGGGTAARASGVGPTSDEPTGGSNPDKKRKRTPALAEGEVALITNMTDSVNNVASTILATTHTEVQPDLENSVMDLHYHLNHHIAKYT

SEQ ID NO: 105580 - protein, 258 aa, Oryza sativa
  unsure (1)..(258): unsure at all Xaa locations
  Clone ID: PAT_MRT4530_102810C.1.pep
MESDGEEEAAATPGAGGAPAAGRLKGCPELMVDDDMREMAKTAAWSVSSCKPGNGVASLRDDNLDTYWQSDGAQPHLVNIQFQKKVQLQLVVVYVDFKLDESYTPSKISVRAGDGFHNLKEIKTVELSKPVGWVHISLSGADPRETFIHTFMLQISVLSNHLNGRDTHIRQIKIYGPRPNHVPHQPFHFTSREFVTYSTVRXQLTNLIPWNPPHWSFCXRFWIAQHTCEQIVWSIPFSVLQNSVSHDVHPEINTGRSI

SEQ ID NO: 105581 - protein, 223 aa, Oryza sativa
  Clone ID: PAT_MRT4530_102811C.1.pep
MESDGEEEAAATPGAGGAPAAGRLKGCPELMVDDDMREMAKTAAWSVSSCKPGNGVASLRDDNLDTYWQSDGAQPHLVNIQFQKKVQLQLVVVYVDFKLDESYTPSKISVRAGDGFHNLKEYIDIRLGRTGKLWQDFVSVNMEIKTVELSKPVGWVHISLSGADPRETFIHTFMLQISVLSNHLNGRDTHIRQIKIYGPRPNHVPHQPFHFTSREFVTYSTVR

SEQ ID NO: 105582 - protein, 49 aa, Oryza sativa
  unsure (1)..(49): unsure at all Xaa locations
  Clone ID: PAT_MRT4530_102812C.1.pep
FVFFLIFVFSFXIYFLCSFRFYYFLLSCAYLVFFFLPYPVFFNVLYFFF

SEQ ID NO: 105583 - protein, 432 aa, Oryza sativa
  Clone ID: PAT_MRT4530_102813C.1.pep
MRLLGAHRAALLVLACVVVVVIHGLGEAEALGGGGGFVRAQGTRFVLDGNPYYANGFNAYWLMLLAADPSQRGKVSAALGEAAGHGLTVARTWAFSDGGGGNALQLSPGNYNENTFKGLDFVLSEARKYGIKVILSLVDNYDSFGGRKQYVNWARAQGQGIGSDDEFFTNPVVKGFYKNHVKTVLTRKNTITGVAYRDDPTILAWELMNEPRCQSDLSGRTVQSWITEMAAHVKSIDRNHMLEVGLEGFYGASSPSRIAAVNPSGYQLGTDFIANNQVPGIDFATVHSYPDQWLSGKDDQAQLGFMGRWLDAHIADAQAVLRKPLLIAEFGKSWKDPGYSSGQRDALYGTVYAKIYESARRGGATVGGLFWQLLVPGMDSYRDGYEVVFGETPSTTGVITTNSRRLRFLSKAFARARQAQPARGKGRHNGGK

SEQ ID NO: 105584 - protein, 1034 aa, Oryza sativa
  Clone ID: PAT_MRT4530_102814C.1.pep
MDPAADPLSASAPFPTIPAASSPRNPRAARPRRQPAPFRSSDHPGAASASASASSSSSSSSTRRLGVDIPVRHGVRRGAGAAGSRAPSGFVFGGGGGGGDTAAPGLVDVEGCSPTLASSWSSSSFVFGASDTRSSFSFGSSKAAPSSSFSATVGELTIDDPRNRQGDVDVSGGNGSLPEMITDSVLSPNFVRQEIDHRDEGLGAPSQTMGRESTESSCSLVGQMDRPSLCTTENVAKQFAKDEGKISADGADSRESKSVFVFGENSEERGFTTKITETEIKKGDSVEKKIVAFGSDQLDASVAEGNACTESSFQGERHGCGSSMRDHRGVSTRAKASNALPFGLVVQDSGAKVSSTKLSDERRSAGVRTSELGDLGLVDEQSFTVHDNDAASREYGGVKGVSMNKRAVQQEKFSAHQVPLPLFISDQKAAPEVNLHLKEVTNFRLEDSDISKGNSGTKEEDVNCFSPQATESNHDRTVFISVTNLENSSRSDFIFAASTDHSKLHSQRRPSKKKIGGMSNHANSVESHPSSAIGLAHSEISRQQYTDLPAQWTKYNKTDPKTVTVSVGPAIKENIGHQEDCETWRIRGNQAYAEGQLAKAEECYTHGINSVSLNEASWKSLMLCYSNRAATRMSLGRMREALSDCRKATDIDSSFLKAQIRAANCLLALGDVEEAQKGFEICLKSNHEASLDSKITEEASDGIKKAKKVSNFMLLSKEYIVKKEFDKIPSALQMISDALSTSTYSDNLMMMKAEALLLVCIYAIFLYLILVLIMCKYDSHTQEIEQKFQGFPTSGLKLLFASFQAAGNKAFQAGKYSEAVEHYTAALLSNTESPRFSAICFANRAAAYQAMGQILDAIADCSLAIALDSNYSKAISRRAGLYELIRDYDQAGNDLRRLISLLERQLQENIYTPSEKSDGIRSSLNRSNLRLSALERDAKKGISLNVYLILGIEPSCTFLDIKKAYRKAALRHHPDKAGNFLVRSENINDAVWRDIANDIRKDADYLFKLIGKAYAILSDPTTNWYAIIAADPFW

SEQ ID NO: 105585 - protein, 59 aa, Oryza sativa
  Clone ID: PAT_MRT4530_102815C.1.pep
MAGSENVFSLAVTLYQPPEKILTKMAATSSREEDDDGEDATTSALPQPLQCRAAASIMA

SEQ ID NO: 105586 - protein, 67 aa, Oryza sativa
  Clone ID: PAT_MRT4530_102816C.1.pep
RSLRQGRPRLHLAGGEAPQVGEAFCLIAPLRRPLLSPIMVFCFLTAQHCYSYHSCRCLLCPCAVLSL

SEQ ID NO: 105587 - protein, 58 aa, Oryza sativa
  Clone ID: PAT_MRT4530_102817C.1.pep
ASSSLPVRSSPSVRLYSHFLSSFSFLWGSLLTILIFDLAVLFRYPAVSYPPLCSFSLR

SEQ ID NO: 105588 - protein, 39 aa, Oryza sativa
  Clone ID: PAT_MRT4530_102818C.1.pep
MAVITMGIVRIASQPPSGEHLERPYQNLDPMAITKVLAA

SEQ ID NO: 105589 - protein, 150 aa, Oryza sativa
  Clone ID: PAT_MRT4530_102819C.1.pep
MAGGVTVRDVDAQKFITAYSAFLKRQGKLPIPGWVDTVKTGPAKELPPQDIDWFYVRAASIARHVYLRKTVGVGRLRKVHGTAKNRGSRPSKHVDASGSVDRKVMQSLEKIGVLEQDEEKGGRRITQAGQRDLDRIAQTTAEAEEEEDDE

SEQ ID NO: 105590 - protein, 141 aa, Oryza sativa
  unsure (1)..(141): unsure at all Xaa locations
  Clone ID: PAT_MRT4530_10281C.1.pep
VRDFXYSSEAQESRKEELEKLMQDQEAMRASLLQWCYASYSEVFSSWMHFCLVRXFXESILRYGLPPSFLSAVLAPSQKGEKKVRSIXGGTLWAMSIVFTWKSEDDVGCSWSWEARQCFWSNYYFWQTKNQRMGPMYIINW

SEQ ID NO: 105591 - protein, 62 aa, Oryza sativa
  Clone ID: PAT_MRT4530_102820C.1.pep
LASLVIWTCKNNWFALTWSKSSSSKNNWVAKTKEALTWSKFYSSKNNWFAELIQVRITTGRI

SEQ ID NO: 105592 - protein, 100 aa, Oryza sativa
  Clone ID: PAT_MRT4530_102821C.1.pep
MSSGLDDGSSSGGLGLSGSTAGTYEGSRSTQFRNGKWRWPHTKRIYHDATGVADPLSPPGDSMSGDGGGWHQVAGATVVMVALAAATAVAAATITALVVN

SEQ ID NO: 105593 - protein, 185 aa, Oryza sativa
  unsure (1)..(185): unsure at all Xaa locations
  Clone ID: PAT_MRT4530_102822C.1.pep
MRMFPACLASRTLISLTPRGGQKARARELGSGLARARKARLGSKRKRAEPEPPPELVCKLSRARASSQAARPNENPNLPLLQKLFPFPLPSSSPPLLHRTETESLPLGGARSCRPLARRLPPSPXQKRRRPATLDPSAIAAPPLYPAPPSASLSCATRVPDSTVDAVHHLAETPTDRXQFTQRRA

SEQ ID NO: 105594 - protein, 112 aa, Oryza sativa
  Clone ID: PAT_MRT4530_102823C.1.pep
SRCQAPGRTPPPPPPPPGTPPRSCTPAPPRTSATPRPHPPPPPPPPPPPTPIRPASPDCPPYPALRPRFPPPPPTLGGVGVGSWRSASPSSSSRLYVRGWVASEAEARRGRG

SEQ ID NO: 105595 - protein, 49 aa, Oryza sativa
  Clone ID: PAT_MRT4530_102824C.1.pep
MCRNDGMASCIQQWLTAKQSASASALLAWQIIMAMHQNFSHWGYMVGGF

SEQ ID NO: 105596 - protein, 160 aa, Oryza sativa
  unsure (1)..(160): unsure at all Xaa locations
  Clone ID: PAT_MRT4530_102825C.1.pep
ACCITGPSPAVVSHQITSATDGPRVRLRQGGNLLRAPRPSSTDETESLPLGGARSCRPLARRLPPSPXQKRRRAARRGSLSSASQPPPSPAPCAAALAPASLPSRPATLDPSAIAAPPLYPAPPSASLSCATRVPDSTVDAVHHLAETPTDRRQFTQRRA

SEQ ID NO: 105597 - protein, 70 aa, Oryza sativa
  Clone ID: PAT_MRT4530_102826C.1.pep
GDEVKHRRREDGGGGIRRSSRFGLCLFSLSIWLGFWLVWIQERKCGADRSTHHQIYHPTNRPRPAWLCLS

SEQ ID NO: 105598 - protein, 49 aa, Oryza sativa
  unsure (1)..(49): unsure at all Xaa locations
  Clone ID: PAT_MRT4530_102827C.1.pep
MAYYESGPGKCPLEENELDMHLYIHQACRGPNRDQXLVLHPKVRPNDFG

SEQ ID NO: 105599 - protein, 89 aa, Oryza sativa
  Clone ID: PAT_MRT4530_102828C.1.pep
MKIILFFALLAIAACSASAQLDADTQIYRQYQLQPHFMLQQQMLGGCGESKREHSSTGETPLFQSRVHKLKNWQMMHQQCCQQLKMNAP

SEQ ID NO: 105600 - protein, 106 aa, Oryza sativa
  Clone ID: PAT_MRT4530_102829C.1.pep
PIKPARGLRQGDPLSPLFFKPTTTEANTIKRLLTLFGEATGLKTNFCKSAITPIQCSNEQRVLVESILSCRVEDFPIVYLGLPLGTRKPTKAELQPIYPKLLRAAG

SEQ ID NO: 105601 - protein, 53 aa, Oryza sativa
  Clone ID: PAT_MRT4530_10282C.1.pep
SVGLAFPVWKACVWPGWHHGSRRVLLVHILPGQPACRGKTFLVIFSSYFNCIK

SEQ ID NO: 105602 - protein, 80 aa, Oryza sativa
  Clone ID: PAT_MRT4530_102830C.1.pep
SFFFLLNSWLNHFTGTTLQWYALSRSYSVNLPSSFSTAHPSALEYSSRLPVSVYGTGCLSLTLEVFLAGLIRVTIHYAEA

SEQ ID NO: 105603 - protein, 263 aa, Oryza sativa
  Clone ID: PAT_MRT4530_102831C.1.pep
MRAPPLPPLPAATTGFSDLQPELMGEIHGRLSFLDHLAFAAASSAATRDAFKPEPPWLVIPGDTPGTATVFSTRVAPSLDSVEDAIHHEGKFLSVTYTGIVEAWERDGVSGEFTSNVVTTRMADGGDDDHRKYLAAAPDGRLMIVLKNTKRMKQQNHFKVQVFDEMTQRWEAAEDIGELPILVGVNSSLCVSTAKHPEINAGCVYYTDDDMWEASMRRDFWCSNRKPNVGAYSLKDGKAMSIPGLGEHLSWPPPAWFTPSFPR

SEQ ID NO: 105604 - protein, 104 aa, Oryza sativa
  Clone ID: PAT_MRT4530_102832C.1.pep
MAWLARLARVVRLQTRRWSERTSQSQLNLIDQLLPRQAKGGGHDWPPPVKDDSTACRVDVVPYPGHQQGLALRQCGQCDRTGPPKYVYYVTKPDRLLCALRRCC

SEQ ID NO: 105605 - protein, 240 aa, Oryza sativa
  Clone ID: PAT_MRT4530_102833C.1.pep
MAMALQRHFSVLLLLLACLIGSSHSYQFTVGGKDGWVPNPSQSFNEWSQHMRFQVGDTALFKYKQGSDSVLEVSKDDYDKCNTQSPIKKMEDGNSIFMLDHPGPFYFISGNKDNCEKGQKVQIVVISPRGKTPTTPASPTTPAPSGGSGTPPSSSGGSATPPSPSGGSATPSTPSGGSTNLPAAGSAKGHLHLVHHTYGAPPLCSLPPTPTIKLLPHSECSGKDHHAGPIPNGTGVSPRE

SEQ ID NO: 105606 - protein, 644 aa, Oryza sativa
  Clone ID: PAT_MRT4530_102834C.1.pep
MRAPPPSPAVARTGFSDLQPDLVGEIHGRLSFLDRLAFVAVSSAASRDALKPEPPWLVLPGETPETATVFSLADRRSATVRASGPAMRGHVIIGSFGGWIVTADERGRMRLANPVTGDQGDLPAITTIPFVNATSPWGHHFIMDMEPFVHIRYRGDHESWPHPYGTFTHTAGDIRLWFYRKVVLSASPRPGDYAAMLLLDSYFGAPAFATAGDGRWRVAPSRDGVEDAIHHGGKFLSVTYTGIVEAWERDGVSGEFTGKVVTTPISCPPQRRKYLAAAPDGRLMIVLKNTNGGVKKGYFEVQVFDEMTQRWEAAEDIGELAILVGVNSSVCVSTAKHPELKGGCVYYTDDEIGKAWLRREYGYSNSKPNVGVYSLKDGKEMSIPGLGEHLSWPPPAWFTPSFRCQSQNGLVRNSVFAILGLTRFWVALEQWTIVWSCLRAVLFTLWCMFHYSRRRLGQAGRAGRGGVRRGRLEQQDTPGVLSVFRELNPNEMLARNTPKGRRGKVQTRRRRRRAGVTTGKYWMGFFLALSAAALYRLILSLVELAYKNAAAGGRAVTYALAMEMQLVKGFFATAFCTVGMVMCSERRRNGGSAISKIYNRGSSRGPCIIHTGGVLVPDEEKASLGFKAVFEKGMRLFSAGNKFT

SEQ ID NO: 105607 - protein, 213 aa, Oryza sativa
  Clone ID: PAT_MRT4530_102835C.1.pep
LHQEMEREQMRMAILRQEQTFRQQVHELHRLYHVQKQLMKQMQIAKLNQAQAIAANAETKPKFEITFAENSTNHHHHHQFYSFQSSKIMSPPAAAAAAADQEEEEECDLQLTLATGSSGGGDGTARGHKGKKEVRSSNSDSGTAASSTSTESELAQFKNHHHHQLDCAAAAPVASPAARFQGESKKRVVVVVDNEMSLLQPPWLNQCLSLRMA

SEQ ID NO: 105608 - protein, 41 aa, Oryza sativa
  Clone ID: PAT_MRT4530_102836C.1.pep
MMLAFIVFLGSDVVCFHEEVDRRSSVEAEKELDLDLIRLKG

SEQ ID NO: 105609 - protein, 63 aa, Oryza sativa
  Clone ID: PAT_MRT4530_102837C.1.pep
FGFFIFFFFFFFFFFFFEGQPNLDIQIRFQTGEITIQMLNLWSLKSAKKPSKNWHHETANSPK

SEQ ID NO: 105610 - protein, 40 aa, Oryza sativa
  Clone ID: PAT_MRT4530_102838C.1.pep
KKSIRDCKAAACLFDRQESFSNSSLPCRYWIRKPFLPLTY

SEQ ID NO: 105611 - protein, 91 aa, Oryza sativa
  Clone ID: PAT_MRT4530_102839C.1.pep
MRRYDSRGQGELYPNSLFNVAALLGTSMCSGHTCPPLLPNVEFLVGLDNLIKDVDDGEGLSPEIKLKMGGNRPRKEYQPQKNGQQTTTDPG

SEQ ID NO: 105612 - protein, 116 aa, Oryza sativa
  Clone ID: PAT_MRT4530_10283C.1.pep
LGYGLDYRQDLHIEQRDKHLRHEKYHHNRTWLIKDARIAIEYAHRVLEWTCRQDTYNNTIKLILESGIQHTYTPLPVTISHSPSASPPPTYGVYHSTDQSTVNVCGQVSINIAHVS

SEQ ID NO: 105613 - protein, 54 aa, Oryza sativa
  Clone ID: PAT_MRT4530_102840C.1.pep
AYRSASYGVGALGSVRYWYDGTRRPGEGLLAATPASPLRAGAENAAGLQTPRHT

SEQ ID NO: 105614 - protein, 245 aa, Oryza sativa
  Clone ID: PAT_MRT4530_102841C.1.pep
MAARTSANFSSCFTFLKEALVLPTQNPKLFTPVFLLIALPSFLVLSTNVLFVQPLSMDMAELAIKLQTTDPSSAEYRMILEELKHDVTQLILVVVAVELVALVLGFVNQCVGFFAASSTYSGDRYSLPELLRKAMKGNLKGPLITIAMVTVLRVTYMALLGVLIYSVMQVQRHYLIKVLSVQVLLFVLCFLAFLYFNVVGMVSVAVSVGDTERRGIRALRQAWRLMTRVRRKEASCWWWPSASCR

SEQ ID NO: 105615 - protein, 78 aa, Oryza sativa
  Clone ID: PAT_MRT4530_102842C.1.pep
MAAIGALSAGSGASANHGGTSANNSCYSMPQTRARSGPRSLALEMMAMATRRRLRRSQSQPKTTSITPQINHNARPSS

SEQ ID NO: 105616 - protein, 75 aa, Oryza sativa
  Clone ID: PAT_MRT4530_102843C.1.pep
MPGLQTRRVILRCNSRGELYTLPAATPSSAAHGLLATSSTLWHCRLGHPGPAAIHGLRNIASISFGYLAVSVTQI

SEQ ID NO: 105617 - protein, 81 aa, Oryza sativa
  Clone ID: PAT_MRT4530_102844C.1.pep
FFFFFFSNSKFITKSQPNSSTSPQHHKPATHLIMASVHGQITRGTFNTFITPPNVHQTSHQSRPQQFNQQSLRLHQMNPQT

SEQ ID NO: 105618 - protein, 97 aa, Oryza sativa
  Clone ID: PAT_MRT4530_102845C.1.pep
RRPPRPAAAPASVPGAALCTRSPPGRLPLQIRRRPSASPPDPLPPGCRGARPPPPHSARAPPPPLSWPPRREAASASARPLTEVRGGIEWGEEEEEE

SEQ ID NO: 105619 - protein, 642 aa, Oryza sativa
  Clone ID: PAT_MRT4530_102846C.1.pep
LPPSILPAESGPRPGRRRCCRAGGRRHRFAETRGRGGRARDRGGIPAMTRCSRHQPPAPPTVVVIDEDDDDLGDGPSDEEVFIIDGDAAKGRASSGCKTKRGNSSCSNVINLDDDDEEEEEGGGGDRAGPSSAGAAAGSPAVTTPGRVSPRNRYGLDYVSDSYESDSSEGHSDGDDGSDCEILDDASGSARKQWEKAASRKSMPQGFRKSTSTSSAESSTQPDESEENDAECDINEYIRKYFSEDVLKKGGPISTSGANAKPSVPDAHDCSKGNASNANEAEDCNATSRIDPDPACNDEATHSQNGSVPEKTAERSQSPHIDETFEPEQCTDYSFVSANRVFPACSSANWKDQSPTFVSTPEKLDEKLSDGTYARKDETLIDAHNKSTTKNKEMCPEPDNGSLDGRLTEDPPLSSRCDCSKQSEKKSAHLDANCCASAASSNKNPSANVILGGCMPPQKDLVDGPEKSGQPAVAQVAADIQDGLIGAREKHKESDEYKRAQEEEWASRQRQLRIQAEEAQRLRKRKKAEAMRLLDMEKRQKQRLEEVRESQRKNEADIQLKEKYRGVVRLELESMERRYIDMASILRALGIAAEGGEVKAAYKQALLKFHPDRVSRSDMYQQVKAEETFKFISRLKEKMLRV

SEQ ID NO: 105620 - protein, 210 aa, Oryza sativa
  Clone ID: PAT_MRT4530_102847C.1.pep
MGKGFMSYLAMKTDAAGGEAAQAALIDADLQELGVAARKLANHALVLGGGLGFGTTFLKWLAFFAAVYLLILDRTNWKTNMLTALLVPYIFFTLPGGLFSLLRGEIGKWIAIIAVILRLFFPRHFPDWLELPGAVILLIAVAPNLFASTFRGDLVGIFICLIIGCYLLQEHIRASGGFRNAFRKGNGVSNSIGILLLFIYPVWALVLNFL

SEQ ID NO: 105621 - protein, 251 aa, Oryza sativa
  Clone ID: PAT_MRT4530_102848C.1.pep
MGKGFMSYLAMKTDAAGGEAAQAALIDADLQELGVAARKLANHALVLGGGLGFGTTFLKWLAFFAAVGPRVSFGSKRGSPISPFFGGSKAPCVADRDTPTRAWRIDSWYLLILDRTNWKTNMLTALLVPYIFFTLPGGLFSLLRGEIGKWIAIIAVILRLFFPRHFPDWLELPGAVILLIAVAPNLFASTFRGDLVGIFICLIIGCYLLQEHIRASGGFRNAFRKGNGVSNSIGILLLFIYPVWALVLNFL

SEQ ID NO: 105622 - protein, 103 aa, Oryza sativa
  unsure (1)..(103): unsure at all Xaa locations
  Clone ID: PAT_MRT4530_102849C.1.pep
RLIFAGKQLEDGRTLSDYNIPKESTLHLVLRLRGGVIEPSLQVLARKYTAXQMICRSCYARLHPRAVNCRKKKCGHSNNLRPTEEIEKLNGSIQPRCSYKKKK

SEQ ID NO: 105623 - protein, 209 aa, Oryza sativa
  unsure (1)..(209): unsure at all Xaa locations
  Clone ID: PAT_MRT4530_10284C.1.pep
ISFGEGTTXIXXXDRLXXLLAVVPXYSQKDWLSSYESLDTFVVPRSSKKLYEDNEYALYTVTLFAKVVDNFKVRAREKGFQVRDFEYSSEAQESRKEELEKLMQDQEAMRASLLQWCYASYSEVFSSWMHFCAVRVFVESILRYGLPPSFLSAVLAPSQKGEKKVRSILEELCGNVHSIYWKSEDDVGVAGLGGETEAHPYVSFTINFI

SEQ ID NO: 105624 - protein, 327 aa, Oryza sativa
  Clone ID: PAT_MRT4530_102850C.1.pep
MAGRSRRRSFWSVGVAAALLCLLAAHGCSAKHHKPKPTPGGISGNASSSSSNSSTPSIPPPVAPTPTAPTPPIPSPGTGSSNGSSGGGGGGWLNARATWYGAPNGAGPDDNGGACGFKNVNLPPFSAMTSCGNEPLFKDGKGCGSCYQIRCVGHPACSGLPETVIITDMNYYPVSLYHFDLSGTAFGAMAKDNRNDELRHAGIIDIQFRRVPCQYPGLTVTFHVEQGSNPVYMAILVEYENGDGDVVQVDLMESRYSTGGVDGTPTGVWTPMRESWGSIWRLDTNHPLQGPFSLRITNESGKTLIADQVIPADWQPNTVYSSIVQFD

SEQ ID NO: 105625 - protein, 153 aa, Oryza sativa
  unsure (1)..(153): unsure at all Xaa locations
  Clone ID: PAT_MRT4530_102851C.1.pep
SGKAFGAMPCPGKEPRSKKAGIIDMQFRRVLCXKDSVGHKMAFPPEKGXPPGASPGYKSSSPTGGGVMGDHLSAGRYWQLVWPIKMSWGGVFRMISGTPIRATLGIRVTRESIKGFVVNXVIPVFCMSADTVVGTVQFWCGLKGFDRAILITF

SEQ ID NO: 105626 - protein, 99 aa, Oryza sativa
  Clone ID: PAT_MRT4530_102852C.1.pep
SADKWCSVHNTYRHSLADGDRRGEAKDKAPADDGGDGEDLDFQIPQGTVATLDGGVCAHASRRSFKAMRRELLAVVPTHEAVRKARWSGVKLTFDQSDH

SEQ ID NO: 105627 - protein, 409 aa, Oryza sativa
  Clone ID: PAT_MRT4530_102853C.1.pep
MLSSCGGHGHENPRSLQEEHHGRCGEQQGGGGGGGQEQEQDGFLVREARASPPSPSSSSFLGSTSSSCSGGGGGGQMLSFSSPNGTAGLGLSSGGSMQGVLARVRGPFTPTQWMELEHQALIYKHIAANVSVPSSLLLPIRRSLHPWGWGSFPPGCADVEPRRCRRTDGKKWRCSRDAVGDQKYCERHINRGRHRSRKHVEGRKATLTIAEPSTVIAAGVSSRGHTVARQKQVKGSAATVSDPFSRQSNRKFLEKQNVVDQLSPMDSFDFSSTQSSPNYDNVALSPLKLHHDHDESYIGHGAGSSSEKGSMMYESRLTVSKETLDDGPLGEVFKRKNCQSASTEILTEKWTENPNLHCPSGILQMATKFNSISSGNTVNSGGTAVENLITDNGYLTARMMNPHIVPTLL

SEQ ID NO: 105628 - protein, 174 aa, Oryza sativa
  Clone ID: PAT_MRT4530_102854C.1.pep
MARWRPAPALVTTTRRSGGDEFFSSPPRIHHREAADGETRIRHRRHRLLLPSAPAPGPPPSPPPPPPSFRAPTLAPPHPSFRVPQPPPSPLPPSLHEPARPLAPSVRRRRNSPLHLPPPSLPPSAPSERRRRRPISATAASRRPIGAGSPSRRSVEKRREERREERELTGGSHM

SEQ ID NO: 105629 - protein, 135 aa, Oryza sativa
  Clone ID: PAT_MRT4530_102855C.1.pep
MLPSSIYVFSLGLCSGHLASARDGGYLTDAYVDGSPFLRSTSSASATVETTSQHRGRQPPHRHHHRRHYLPPRKLTLPPIRIFGLGLHSGHLADTALVPTTVIAVEVGRCGHLLSERDASSRRWIRPRLYLLLRE

SEQ ID NO: 105630 - protein, 92 aa, Oryza sativa
  unsure (1)..(92): unsure at all Xaa locations
  Clone ID: PAT_MRT4530_102856C.1.pep
RGRGGAYQCARGVELWRNSGEEGRRPRSGDVGDSHGAARSGWERQHSATGGGKTAAASGSWWRGGCGGRLGNXSEGRCAARSGGADGGGGAA

SEQ ID NO: 105631 - protein, 801 aa, Oryza sativa
  Clone ID: PAT_MRT4530_102857C.1.pep
MACKRPTPDGDACSATAAVALSPCNKPRWLFMSIFNYKRMETLGAGTYIVVYRARDRRTGETVAVKWLRDVAANPSNRDMFLVKEFVGARSLRDLIAGHARRRPFSEGETRALMRQLRAGVRTMHAAGIAHRDIKPRNILIGPGGALKICDFGMATTAAPPYEGFMVGTLHYNTPEQLAGKGQYNAQAVDMWALGELLTGAPLFGGDMIEEELLADLSDNLGDPLRELFEDVLLELSPANLSGLLSFDPEKRLTAAEAMEHRWQRNAKKGRAAGFATTVVPQWTCAAGEAPRPLAETGTTARRTGGTRLAVGSTAARVSSRGSAGCGEFAPRRWVRKAATNSTATEATRAPAGFHFLPARIPMDGPSGWFLKVPPPLHTVDPPGSPPPASILLEPYGYFSDRTNHTTARGLTRGGKNIVFTFWTATPPRASFFTLHSPDDTKCSAFADAPDAVCSDHHLLLLRIPICLEATQIYAINNHYFVYHAGGDGEQRLTPVPTPPGLTFAFPNSEVVLLRRRRPREAFFLAALHRPTLCRQYTHEQFDLHLYSSETGEWSTKLMVSVDADDDDDSTSFRFSYASKAIVVGGELGTVGWVDLWHGILVCDILLDNPRLRFIPLPPPLVPRQLKGDPMFHRNIVVLEGYIKFFEMYNHTTGSASAQGWVAATKKMKISSIASGNSSSSSWEDDCAIKFSEIPVESLTFAQMLRLQPNLKQGTGTTRLTLKRLHAGYPALSLHDSDVVYIMHTPDPDEEDKALVIAVDMRNKALKGVADFGFGRPVGYGFTYLQTGISKHLSNCSSSSR

SEQ ID NO: 105632 - protein, 59 aa, Oryza sativa
  Clone ID: PAT_MRT4530_102858C.1.pep
MELLVYNKHFNGEMVIAGIVLDTAVQSDPVLFYVDWLRVTCSELVNNHLIFQQTRGFCF

SEQ ID NO: 105633 - protein, 368 aa, Oryza sativa
  Clone ID: PAT_MRT4530_102859C.1.pep
PHPHPPRHESCVAAWVRKISGVLKVKSNCNPAAWMMDVTSTSMEVQHNMDFAILYDESSQHRDIVELVEKLSIPIPNSEILSFSHRFPRNGWIQLKACLWKQNLTYWRSPEYNLRRIMLTVISALVYGVLFWKRAKILNDEQDLFNVFGAMYLGSTTIGSYNHQSIIPFSTTERIVMYREKFAGMYSSWSYSFAQAAIEIPYVFIQVVLYTLIIYPSIGYYWTTHKFIWFFYTTFCSSLSYIYVGLLLVSLTPNVQVATILASFFNTMQTLFSGFILPAPQIPKWWVWLYYLTPTSWTLDALLTSQYGNIEKEVRAFGETKSVSIFLNDYFGFHKDKLSLVAAVLIAFPFVLIILFSFSIEKFNFQKR

SEQ ID NO: 105634 - protein, 138 aa, Oryza sativa
  Clone ID: PAT_MRT4530_10285C.1.pep
MAPVASHGESDGDDEPRRQAAAQEGRRWALGGGGGWRRCGQRQEAASVAMAAPSPPRQRRVAASAACSGRSGGCSEAPSLRQIRREEGLRSRAALPSSMPPPNAPVTLTPDMPPPAFVVGFMIIHGFLVGVKFMRSKD

SEQ ID NO: 105635 - protein, 80 aa, Oryza sativa
  Clone ID: PAT_MRT4530_102860C.1.pep
CINTCKLPTQTFFKDHMGVDLYMEPNFEDYSCQFNFGVSPPPLDTDKALKEPCLDICTNARRRKELGTGSSTDGLQCPQV

SEQ ID NO: 105636 - protein, 177 aa, Oryza sativa
  unsure (1)..(177): unsure at all Xaa locations
  Clone ID: PAT_MRT4530_102861C.1.pep
MARGCPYWTRRTASPARRRPRPASPCTISASRRPSRDPCVWTASSPRRRTPPPRAARPPPARPERTPASAPRCPTPRRAGPSPSSLPSRTSRRARWRAGRRGRSPPRQCQXSRHSSPRNQLRDLMRTVRSKVGSSVGSRPSXKRGRGRRRRRQRRSTARHCRRLRRRSSQRTARRRG

SEQ ID NO: 105637 - protein, 70 aa, Oryza sativa
  Clone ID: PAT_MRT4530_102862C.1.pep
MTERSIDVRGRSEIWMGSRKFFLDLYRNAGREVNSDILFVVPDHDCDFVYCRACKEKSISGLAEAEGTTA

SEQ ID NO: 105638 - protein, 67 aa, Oryza sativa
  Clone ID: PAT_MRT4530_102863C.1.pep
LSKSRHLQFELLKRPPSLYAIDLYLPPVILAFSFFPYVLFFFSNFSFFFFFFFFFFFEMKVWFICCS

SEQ ID NO: 105639 - protein, 77 aa, Oryza sativa
  unsure (1)..(77): unsure at all Xaa locations
  Clone ID: PAT_MRT4530_102864C.1.pep
LCSQSQRIHFHSDLTVFPLHLRTNSPSSSPPPAAQRASSPPPWPPPLPXGTGTEREEISSVCPSPPLPPPPPPPPIP

SEQ ID NO: 105640 - protein, 52 aa, Oryza sativa
  Clone ID: PAT_MRT4530_102865C.1.pep
RYIFFSVCQRQAYCSRLAMCLMNSSAKQWSGECQVVITSRLIEASRFQVRSL

SEQ ID NO: 105641 - protein, 36 aa, Oryza sativa
  Clone ID: PAT_MRT4530_102866C.1.pep
MEMARDSGGIGLFAVDDRRLIFRFWLQHAEEWTLHR

SEQ ID NO: 105642 - protein, 204 aa, Oryza sativa
  Clone ID: PAT_MRT4530_102867C.1.pep
DPRAAGIRHEASPLDTAVSDVELFYHGTNALPACNVVAELKDNDASSTSQESSDKVDALESSESSSSYSSIDDIEDEMDTACDNMPSSMFSSYRASSGEAKCSSVTTKLLSYETCSVSDGINPASPINENKKKDDLSYGHVPMHSQSIEHDVVCDALELDNQYSEFWPFDSFLKNSFDISSGKMSLAEEFLYTGDKGAEQVSHA

SEQ ID NO: 105643 - protein, 86 aa, Oryza sativa
  Clone ID: PAT_MRT4530_102868C.1.pep
PLSEVVGDCVQRWLQDALKEARRGYSAMQVLVVQMYHSCYRIRKNKHKGRAWAEKASIYRSSVLKVGTKRAVYNVSDSDSDEMNDD

SEQ ID NO: 105644 - protein, 110 aa, Oryza sativa
  Clone ID: PAT_MRT4530_102869C.1.pep
GFTQSNARISREVGGQFSLFDGSISGVNEELQEGKLIVQKWRFGSWPDGVHSTVRLVFDEPESGVTVISLKQTDVPEEDRYGNSTVVENTERGWRELIFQRIRGVFGFGI

SEQ ID NO: 105645 - protein, 44 aa, Oryza sativa
  Clone ID: PAT_MRT4530_10286C.1.pep
MPAVHRGGAAARGEEVQGSGVARRSTGAARPGAARRSQVAMRGP

SEQ ID NO: 105646 - protein, 426 aa, Oryza sativa
  unsure (1)..(426): unsure at all Xaa locations
  Clone ID: PAT_MRT4530_102870C.1.pep
MAKYGEGDARWIVQERADGTNVHNWHWAERDCLEWSRSRLTSLLAGLPVLSGEGGLALRTTALDKLDGEAYVNIRKGKVIPGYELSLTLAWEAEATTESGVVKVSGAAEVPYLADENADEDPELRVTVRDLKQYFXLLSWISAFQEVERYHVTVIPVFAVAVYSMXTETLHITGKSEKTSVIHHAGIGAQCLPSVNAQLMDESPAVKEKKAKAKDKEGFKTIEMTEKFYCRAKDMYEILMDENRWKGFTQSNARISREVGGQFSLFDGSISGVNEELQEGKLIVQKWRFGSWPDGVHSTRLELTSSNSLSDHVIPDLAFGGCCDFAAFQAAACTTSALGTRQWGAVFMVGDSAPGTWHYATVFLGGSIFTCHLSMDGVGAGAAPVGGVCECRLSLRLPLLRAHSGEVSFKLSLHDLSVLPNCLSKE

SEQ ID NO: 105647 - protein, 83 aa, Oryza sativa
  Clone ID: PAT_MRT4530_102871C.1.pep
CHSIHRSLTVSPDISIDNNGLNPPPPSMACTHQLLCPKFPDQIQGDGGDLAKDIIHFMSLVAYRHHHSSFLIFFEGKKTDEDA

SEQ ID NO: 105648 - protein, 74 aa, Oryza sativa
  Clone ID: PAT_MRT4530_102872C.1.pep
GSSWDWYAGTWSDKIKEQEDKKRKMVAASSQVEPSPNIFGDFSFLRPPTEWTRSAWVIVTLWIVLIGTAIYLQR

SEQ ID NO: 105649 - protein, 69 aa, Oryza sativa
  Clone ID: PAT_MRT4530_102873C.1.pep
FDLVLILTSARRRQDAEGNWHPGAITAAADDVCATAIMSVEGIIKVSVPSPISYFSPAKLHVRKPTYSP

SEQ ID NO: 105650 - protein, 749 aa, Oryza sativa
  Clone ID: PAT_MRT4530_102874C.1.pep
MSTSADPSAAPSTSPSATPSAEYAEHLSNLVAVPSLLHDQQYFLGPIGNLDPTEFIIAETNRTPFRSANPNISHWKNTFKSWPSLEKSWPVWYKRMSANKQAHWDEIGIGQALALTIANSAKDEPLIAAATYFWSNTLNAFLFNQGPMALTLLDIIMLTGLDVTSSANPMNLNTKNTFEFKTKSIGGWSGYIAAYMGKGPVTPREHVAFLLMWLEKFLFCGLSYGPTTNCFYDGFQKDARVWFFYADSMDFELPADFRFEDINHEKFQQSREVFTTAISPCILPVGIHQGRNIQVSYEFYHPMTSARQFGMGQLPIGLYFADKIQCRGDISSTLIMDRLLNIPGPQLGSIENIELARSRNRAFDRWWSEWKLHLFHQSASMYMTDLFPDAIPQTTESSPPHQSNSGKVIKYAPGLIPNGGAPSPSVIGYNAPKTSALLRGLIRELADAGKKRKTRSSAEDTLVPALKKKIKPKKTTPADDLPALDPSIEQALDEEIESGDRTPSAADSHHVEEEEQPATPAIPVLADLFSFDIKDYLDETEEDTTSKATAPLSDNVKRTLEDISNRLEATLDNLVTNCGSIRVRFTDIQALLPDNLADALTLAVYLEQHQFKLEKARQRLADRRERKNIEATIQHNRQLVHAEKSKLDQLSEGPIKSNIDRLEARKIDLMAQLQECNAELDMEHKKLADLPQAVEEQKAKLKSAIKNVADMTKSLRVIPVTDAQDSQAIEEVEQIRQRAISAIQRYLSQ

SEQ ID NO: 105651 - protein, 167 aa, Oryza sativa
  Clone ID: PAT_MRT4530_102875C.1.pep
MGGSAAAAPPAPAWMAAGARRWLEEAGVAFDGSDRRAFNALPLAGARVSLAEAGRAVCSLRVTAELTDAEGNWHPGAIAAAADDVCAAAIMVWEGIIKVYVHYDISYFSPAKLHEEVELDGRVVEQKGKMTAVTVEIRKKDSGELVAIGRQWMSTTRPKKDQASSKL

SEQ ID NO: 105652 - protein, 57 aa, Oryza sativa
  unsure (1)..(57): unsure at all Xaa locations
  Clone ID: PAT_MRT4530_102876C.1.pep
SPHASERCTCPGXGRVLKKLDPQAKELAFAASAREVDELLNAQQESAFLAGPEKSGG

SEQ ID NO: 105653 - protein, 195 aa, Oryza sativa
  unsure (1)..(195): unsure at all Xaa locations
  Clone ID: PAT_MRT4530_102877C.1.pep
MPIICYRGQVALAPLILLAQHDTGGGGASGGGAXAAAAAASERAASGSGGAAAAATAAAAAAAERRQQRAASNSGGASGSGGASGSGGAGSVRRGGDXATAAMARAASGSGGAAAAACGAAASNNGSSGASGERQRRRSNGSGERQRXAAAAACGAAASSSASGXAAAASSSNGAAAAAAAAVTAPELKQRGERA

SEQ ID NO: 105654 - protein, 81 aa, Oryza sativa
  Clone ID: PAT_MRT4530_102878C.1.pep
MSVSPTCLWMHHFGITTSCVASVGLNPVLAKLALPSNSIIGLTTLGSLRTCRKPLVSGAPVNENLGAVVVCMRADQWNRLN

SEQ ID NO: 105655 - protein, 131 aa, Oryza sativa
  unsure (1)..(131): unsure at all Xaa locations
  Clone ID: PAT_MRT4530_102879C.1.pep
TWCHARGGRRPLRSSRAAPSRGRATPPARQPQHPPSCRQLPRPRPHRASPTWRRRRARAPAAPARSXARRRRTPSTSAGRRRPPWGSPPRRTCRSPWRPGRRGRGRGAERAARPPPRRGTCARPAARRPWP

SEQ ID NO: 105656 - protein, 101 aa, Oryza sativa
  Clone ID: PAT_MRT4530_10287C.1.pep
MGLLWGRYMCTSALASCHTDPMRARSTGALITEQPAVSLISNLPLHLCIRVDLSSSNDGSTSDREIGKKGRCLVTHPGLLAHVDATCVRYAHLHREEEGER

SEQ ID NO: 105657 - protein, 81 aa, Oryza sativa
  Clone ID: PAT_MRT4530_102880C.1.pep
MATTDATIAHIMDEQEDIKVKASKCWNPIRPPATLLISNGRQISIRAPFSARPRLKWGPSGVRPNQVENDPWHSLVILPPL

SEQ ID NO: 105658 - protein, 95 aa, Oryza sativa
  Clone ID: PAT_MRT4530_102881C.1.pep
MAMQSNKMDQSRHRVVKLTSRNRPLEKHISGMVLFGALERLALPSNMACQMDRLVRVCYGGRVVEPYVGAHVEFEDMSLKTILFSTRPTLDELRS

SEQ ID NO: 105659 - protein, 575 aa, Oryza sativa
  Clone ID: PAT_MRT4530_102882C.1.pep
MAPENTSTVSTSDAAFAAIDEAVKAVADAVRHSCGYMYQRSQATDLVVYSDADWAGCPDTRKSTSGYAVFLGDNLVSWSSKRQNIVSRSSAEAEYRAVANAVAEASWLRQLLHEFHSPPSKATLVYCDNSGHLGIIGGDSDEDQADCDQPMQEATEDLNQPGIVGDELDEGRGRSVYLVACHWDWSRYSKPYSVYNVGVTATATATSSPPQAKRKRLRRITRLPTAAGGKSFTSVRSIHRAWIVGVGGDPGDTIIFDTRTEKVIHGPALNSAKWCPALMAVGDKVYAMSKSPSWIADPDFPPWFELLDLSQSKVVAATAGRGYHLEGCSWIKLPHPPCFPWKLRPVDYTLLPVVIVMSYVVVDAYILVSFNQPWGTYAFDTNSIKWHKVDNKKLPFTGCAAPHGSVFLGLSKDNGPINAYRINVTTSDKNHDPCLSIVVLPVKYMEHEVDAGSCFFSLEDGLFCSLSFSLDSNSVILSKNLDFFPTKAHVDLRTYQTENTSPLEAPEETLLAVKPEKSGKVILSTDAITLNFWIDNEGMDEEILMDMWNTEADVEVEAVLDMGQAAKRLPPRCTA

SEQ ID NO: 105660 - protein, 200 aa, Oryza sativa
  Clone ID: PAT_MRT4530_102883C.1.pep
MDGLWYRWDVIKPTDSYAQTDHMTTCVSRRAAGCGCARAAPGGSGSRWRSLRGIGGGGRAVGSFSSGQVDGALAAGFSEDHQITSSKKFGAKFVMGTCYLNNTTRKNGKGFANPGNTRIILAEVLILQSAPSYNCMVVQNHILSKDILLFENLLKQIAMLQRGGLAEDLMQATVSILVADGVPAMIGVVELAIERHRRRA

SEQ ID NO: 105661 - protein, 192 aa, Oryza sativa
  Clone ID: PAT_MRT4530_102884C.1.pep
MAKAVVLPLVSKLQEVALSEGRALVGVGGEINRLRDKLMWLMAFLQEADPQRRAADAGGELMRVLVHQTRDAAFSAEDALDDYAVRVDLSRYPGWSRAAVGFLAGITTQLRVRHRLSSDIAAIHARFEEIVGNKDKYRLEGSAPSSLLTWTASAASSSESILCLKSVHAINKEDELEFMGKNTARLFLGFND

SEQ ID NO: 105662 - protein, 305 aa, Oryza sativa
  Clone ID: PAT_MRT4530_102885C.1.pep
MAGGGSRMKKSCACCKRYLEHLGGKMSCFLIRMTTDSMHSMIIPDRFVNHFGGKIPGTIKLESPNGILYVVEVTECMNKTVLQCGWEAFVDAHHIKVGDSLLFRHIENSCFEVMILDSDGCERVFSCAGIKTSSCVHDKTVDPVDTSGRSSDDTAQPSRSERFARCQRDTSNDQNVSLKSNRNGVSDESQESEDSEGPAGPPYILSWKSKSRLSSLQKKIIKEKVRSIQSEVPIYVAIMNKSNIGLTSSPCQLELGARYAAAVHLPDRRQAVVLQRGAAMGHRDADQERQMHHQAVPDQWLEQDS

SEQ ID NO: 105663 - protein, 110 aa, Oryza sativa
  Clone ID: PAT_MRT4530_102886C.1.pep
MDASDQGCRLLGAQRSLHGLLGGGASELSSVIFFSSPAVDRLPCGLWLRGFVCILRFVMWWVLWAPQWRMWCCGGGRRWPAGRWRRWRRPGSSSTACLATRCSPSCPACS

SEQ ID NO: 105664 - protein, 33 aa, Oryza sativa
  Clone ID: PAT_MRT4530_102887C.1.pep
CCSQIAYGMSASTTGRKVAHASTAANKKDAQVL

SEQ ID NO: 105665 - protein, 36 aa, Oryza sativa
  Clone ID: PAT_MRT4530_102888C.1.pep
RSCLCVSHTGQPVTWLLVQYIRRALQAIRPSPLRRY

SEQ ID NO: 105666 - protein, 170 aa, Oryza sativa
  Clone ID: PAT_MRT4530_102889C.1.pep
PTRPGSWWEGRVSAVKPKSLDFPESPWEKYVIQYKNDGSDHPHSPWELHDTGNLWVPWKHPHIDLGIKDKLLSELDNLLELSHRNQDRYGVLKLNSVAEKSDFINRFPVQFSIEVIRIRLENNYYRTLEAIRHDATVMLANAQSYFSKSTDMTKKIRRLSDWIEQTFSSL

SEQ ID NO: 105667 - protein, 42 aa, Oryza sativa
  unsure (1)..(42): unsure at all Xaa locations
  Clone ID: PAT_MRT4530_10288C.1.pep
VGVGGXXXXXXDGRTPNSYNCKGTQVISCYIKVQILLFAPTR

SEQ ID NO: 105668 - protein, 469 aa, Oryza sativa
  Clone ID: PAT_MRT4530_102890C.1.pep
MVKICCIGAGYVGGPTMAVIALKCPAIEVVVVDISKPRIDAWNSEQLPIYEPGLDEVVKECRGRNLFFSTDVEKHVAEANIIFVSVNTPTKTRGLGAGKAADLTYWESAARMIADVSKSDKIVVEKSTVPVKTAEAIEKILTHNSKGINYQILSNPEFLAEGTAIEDLFKPDRVLIGGRETPEGKKAVQALKEVYAHWVPEDRIITTNLWSAELSKLAANAFLAQRISSVNAISALCEATGANVAEVAYSVGKDSRIGPKFLNASVGFGGSCFQKDILNLVYICECNGLPEVANYWKQVIKINDYQKSRFVNRVVSSMFNTVSGKKIAVLGFAFKKDTGDTRETPAIDISIYDPQVTEDQIQRDLAMSKFDWDHPMHLQPTSPTAFKQVSVVWDAYEATKGAHGVCILTEWDEFKTLDYQKIFDNMQKPAFVFDGRNVVDPEKLREIGFIVYSIGKPLDAWLKDMPAVA

SEQ ID NO: 105669 - protein, 480 aa, Oryza sativa
  Clone ID: PAT_MRT4530_102891C.1.pep
MVKICCIGAGYVGGPTMAVIALKCPAIEVVVVDISKPRIDAWNSEQLPIYEPGLDEVVKECRGRNLFFSTDVEKHVAEADIIFVSVNTPTKTRGLGAGKAADLTYWESAARMIADVSKSDKIVVEKSTVPVKTAEAIEKILTHNSKGINYQILSNPEFLAEGTAIDDLFKPDRVLIGGRETAEGRKAVQALKSVYAHWVPEDRIITTNLWSAELSKLAANAFLAQRISSVNAISALCEATGANVTEVAYAVGKDSRIGPKFLNASVGFGGSCFQKDILNLVYICECNGLPEVANYWKQVIKINDYQKSRFVNRVVSSMFNTVSGKKIAVLGFAFKKDTGDTRETPAIDVCHGLLGDKAQISIYDPQVTEDQIQRDLAMGKFDWDHPMHLQPTSPTAFKQVSVVWDAYEATKGAHGLCILTEWDEFKTLDYQKIFDNMQKPAFVFDGRNVVDPEKLREIGFIVYSIGKPLDAWLKDMPAVA

SEQ ID NO: 105670 - protein, 248 aa, Oryza sativa
  Clone ID: PAT_MRT4530_102892C.1.pep
MVREEKLDFVLVPLGLAVLAVYHLWLLYAVLRHPTRTVVGLNAIARKRWNTEKNGVLAVQTLRNNIMASTVLATTAITLVSVISVFLGATAGRSPASPSSSSSGAPLLVYGSKTGEVFAVKYLAISLCFMLAFVCNVQAIRLYAHASFLLGLPPVAGEGEGEAAAAAAVAREEFAAYVARTVNRGSHSWSLGLRAFYASLALFMWTFGPIPMLACSVLMCGLLYFLDTTRERAAAVAGIHHGHKDSTV

SEQ ID NO: 105671 - protein, 95 aa, Oryza sativa
  Clone ID: PAT_MRT4530_102893C.1.pep
RRGARLPAPTWGSPFTATRGLLPFTFRFRSRKCTGGTWRFPFRMLLFPRGGAIFALWCLWVKHSPPLDHCPLWFSPKMAGPMERFFFSLFRLSTR

SEQ ID NO: 105672 - protein, 43 aa, Oryza sativa
  Clone ID: PAT_MRT4530_102894C.1.pep
ASASLEEKVAEEVAAISSIPVVAGGSGTKRKPWARASAPVGSR

SEQ ID NO: 105673 - protein, 228 aa, Oryza sativa
  Clone ID: PAT_MRT4530_102895C.1.pep
MSPEIALNTGQTTSILSPLIHKEIKKRTKKARHCISLPLLSSEHKSQTQMEAAVATPSLLFSSPTPRRPSSCLSLPPPCSSSYASNGAKLQQPRLQFVSQLTSRNSNGSGRRSISILSLRCSSSGTDSASSSATSERWVLEPAGDGDWRHIGYRVARPGGFQIASEAAVTVGRVPEQADIVLSVATGDIHLAMFRVSKMVVDVPSDASGAEQEAAETAQVSAAAQQTN

SEQ ID NO: 105674 - protein, 89 aa, Oryza sativa
  Clone ID: PAT_MRT4530_102896C.1.pep
KIFRIFRRLRACTTLLPNLPPRAATAAAAALAAAEQSAQQFRGQARLPGFAAPRRYDLRVVPHLDGCSFTAPADVSVDVTATTRVLGLH

SEQ ID NO: 105675 - protein, 150 aa, Oryza sativa
  Clone ID: PAT_MRT4530_102897C.1.pep
MAGETGEGGGSHSQPEKQPGQAAAAASMAEAEVEELPKAIVRRLVKEKLAQVAAGGAEVIVNKDAMSAFAESARIFIHYLSATANDMCKESKRQTINADDVLKALDEMEFPEFVEPLNTSLQAKEVGDLNSDHPSDALLCSILSFSYRIW

SEQ ID NO: 105676 - protein, 149 aa, Oryza sativa
  Clone ID: PAT_MRT4530_102898C.1.pep
RSPTLKLFTLASTATGYNHGRTKSTRPDRLQGSVFPRGHQMVQDSSQGRSLTAGRRGRRWHKIEKKWFRRAHRQQCTEPGQHTVGSSNTQLPELRWLFTHHRRGHQQPCSLIYLPSSSTASSDELRAAERRFRGSKLTTQCMRRHSSSK

SEQ ID NO: 105677 - protein, 229 aa, Oryza sativa
  Clone ID: PAT_MRT4530_102899C.1.pep
MSTTSPRAEEDAKETVKPIFITLKVMDQEDRRIRHTIRMADKLQVVMDMYYAKAPDVTYGTGTFLFDGIRLKGDMTPMGLEMVDGDTVDFFPIAKTPEAMYGWSGIPAAVKVEKENEWKTPATWEWKAPATRVAGEYVTLKVQGTDGRAVYRTMLRTEELQGLMDFYYDRSHGRVQRGTGRFLFDGRRLRGWQTPAELQMEDGDEVNFFEELIGGAAGSGWDPPSSILA

SEQ ID NO: 105678 - protein, 104 aa, Oryza sativa
  Clone ID: PAT_MRT4530_10289C.1.pep
PPPLSPPSSSLPCPRLAAVIPAVASDESGLPAVTGDESGLPAVAGDRSSLPAVAGDESGLPAVAGDGSGLPAVAGEGSGLPAVTDDGSGLPMVAGDGSAPPPPP

SEQ ID NO: 105679 - protein, 140 aa, Oryza sativa
  Clone ID: PAT_MRT4530_1028C.1.pep
MGSTLGADNFAFPPGQVYYSGSLDFVIDNLGKFSLLDSDPNQSRTRSESNPGKSKMGSREVGVMLQPLESYSSTESNPGKSKIGSREVWIMVQPLESYSSTDIVNSYSLSEGYNNFDTESINSSEYTNDYTPLCPFTHPL

SEQ ID NO: 105680 - protein, 100 aa, Oryza sativa
  Clone ID: PAT_MRT4530_102900C.1.pep
FCTYDSMLLVLARLGGLSLWLELVVELIGVRDGGQDGEEMSPEVVSEAAMKAEMEAARWGCWRWMLHSRSRRPRRPSSRPPVRPPLLLSRCSQVLGFPLF

SEQ ID NO: 105681 - protein, 54 aa, Oryza sativa
  Clone ID: PAT_MRT4530_102901C.1.pep
RSYTIIDFYQNKMAGAWYFIGGAPPSTSTNFLGKKLKKQLTINGELPCEELQHQ

SEQ ID NO: 105682 - protein, 71 aa, Oryza sativa
  Clone ID: PAT_MRT4530_102902C.1.pep
MPVYFSPDAALASSQSPNGGSKPLPPCFNLLLPGVTGTRPSDEEAFLSGVCIPADLYLDLGEAAAAAATSL

SEQ ID NO: 105683 - protein, 97 aa, Oryza sativa
  Clone ID: PAT_MRT4530_102903C.1.pep
SFFSKPPSACSVLECGVTRLHQKRCKEKGSGPSSCWSAGEFGRIRNHRNFEKEGWSFSELSTILFYEIKHVDQLQRKKAGIVLSKRELFFLLVCNFV

SEQ ID NO: 105684 - protein, 132 aa, Oryza sativa
  Clone ID: PAT_MRT4530_102904C.1.pep
RSTGSTRAPPSSAARTRSPTPRRTWTAWSARSTRRRCHLQRHRPAAPATRKCRKAPTTPSWTRTSWWTTCFRASRTATSTRTRTSPQRQRTATTPTRTRTSPRQQRTATTPTRTRTSPRRQRTATTPTRMSP

SEQ ID NO: 105685 - protein, 756 aa, Oryza sativa
  Clone ID: PAT_MRT4530_102905C.1.pep
MADADELGRRLAAVAVSDSDSANNNLFQVMRAVEDAEATIRQQLEENSRLKDELMLKTRELDRFRSEATKPTSLADTFSTSPHGTSTCFGTTSSSLNSRTALADQHNGLFHHTDQMLHDAIKLKYLDTDQSNGMPRKLSGEQSAPESRVPSHLSNPTSRSLSPTRHRKGEYDPKFNLPGQCLLPASEANSTIMWKQDLLAKVKEHEEEIAQLRRHLADYSVKEAQILNEKHVLEKRIAYMRMAFDQQQQDLVDAASKALSYRQDIIEENIRLTYALQAAHQERSTFVSSLLPLLTEYNLQPSVLDAQSIVSNLKVLFKHLQEKLAITEEKLKESQYQLTPWRAESSNSTNIPVQAPSHPPGNAIVTTSKANLDIVPQQAYSHVQSPMSSPVRARRDWDLLGNENHQAIPSEVTAVNTEHENVGTTSPSSSNQIKKDVVAQGTEHDSRAVRFNFESKNQNPSFKDLVRNDVPENLEGAETHISQEPPAQWGPEGSPNLASGVDDANPPYPYLPTVLEEPSSSFSEAADDDPLPAIEGLRITGEAFPGRELQASGYSINGTTSCNFEWVRHLEDGSVNYIEGAKQPSYLVTADDVDSLLAIEVQPLDDRKRKGEIVKVYANEQKKITCDPETKELIKKILSIGHVSYEVLLPVRFLDMWEPAVLAIKREGYSIKCNGQRGVVITEKFQQATAVCFDIEINIPYGRPTEFSILAADGAEYNLKPAENAPSRDTIVLILRLFRMKAVEKSKGRRKGIFFK

SEQ ID NO: 105686 - protein, 272 aa, Oryza sativa
  Clone ID: PAT_MRT4530_102906C.1.pep
MLLRSAPRRLHHLRPHHLSTAAALAAAPPTPTEWTTAPVASVGAATADASLFHVSLDLSSRADLLASHVAAGQFLPFRLPAAPYPIFLAISSSPPAPGLATSFDFLVKRLPGTPSACLCDLRPGDLVHVGGSVVGRGFEVGRIADARDVLVFATGSGISPIRSLIESGFGENENIDVKLFYGVRNLQRMAYQERFTNWESSGIKIIPVLSRPDDQWTGERGYVQQNAFSRMKKVVNPSSMGAILCGHKQMSEEITRALVADGVPKDRILTNF

SEQ ID NO: 105687 - protein, 126 aa, Oryza sativa
  Clone ID: PAT_MRT4530_102907C.1.pep
MELKFHHPWTNIKKGTKVHKNKESENQRTDIPICQVSCFPGPERRGKKPVKNSRGKSGPLSVDLEGYRVLTLVRANRGKAKHETAIAHRTVTDPNCEKATKPSPRNTCHKREAINSLVPSSNLYMR

SEQ ID NO: 105688 - protein, 117 aa, Oryza sativa
  unsure (1)..(117): unsure at all Xaa locations
  Clone ID: PAT_MRT4530_102908C.1.pep
AATLLHSRPLLLTLPPTPSAPHTTSSPPPPLPLPHPPAATGLRHVVTPPRPRRGLPPPSPSLSRGSSGGSAAPRPSGCPVARRLGXSTAAASLSXLPLLSSPMRCNLFCEFPPLLSS

SEQ ID NO: 105689 - protein, 120 aa, Oryza sativa
  unsure (1)..(120): unsure at all Xaa locations
  Clone ID: PAT_MRT4530_102909C.1.pep
TLAPTLPXALXLGXRLLGGGGGGNSFYTYCPPAPRARPSTGSCPGGALNLGVCANVLGLIKGXVGAVAPYEPCWSLLNGLFNLNAGVWLCTGVKGNVLGIKLDLPVDLSLILNNCGKIWP

SEQ ID NO: 105690 - protein, 300 aa, Oryza sativa
  Clone ID: PAT_MRT4530_10290C.1.pep
TSCRGKSRAAPMFSSGLADRLFSSSASSSRKLDGKVAVITGAASGIGEATAKEFVRNGAKVILADIQDDLGRAVAAELGADAASYTHCDVTVEADVAAAVDLAVARHGRLDVVYSNAGIAGAAAPATLAALDLDDYDRVMAVNARSMVACLKHAARVMAPRRAGCILCTASSTAVLGDMGPPAYSMSKAAVVGMVQRTVARQLARDGVRVNTISPHAIPTAMALGIIAETFPAATAEEVRRMVTREMQELEGASLEVEDVARAAVFLASDEAKFVTGHNLVVDGGFTVGKELLRNPPSSA

SEQ ID NO: 105691 - protein, 70 aa, Oryza sativa
  Clone ID: PAT_MRT4530_102910C.1.pep
FDSELVFWRHPKHHPFQQRTSSGFKFQVYLVGMRGVVHHLTKGLTRVLREIFCGSWLRTFKGACRHQRGW

SEQ ID NO: 105692 - protein, 115 aa, Oryza sativa
  unsure (1)..(115): unsure at all Xaa locations
  Clone ID: PAT_MRT4530_102911C.1.pep
GGGDGGSGGGYEPAYGGMGSYGQSFFNISYARSQPPPPSVSYEHRLQATDARVHYYAGEGNPEAPPLGSVRWVWLSAAGLELLQPVCVRWLLWWCFSSASGRXTLYLPRGGCAWG

SEQ ID NO: 105693 - protein, 1015 aa, Oryza sativa
  Clone ID: PAT_MRT4530_102912C.1.pep
MEPGQLPMVARRCIRHQQSTSRLMSVAWSAMRPALRPMSLVRPTPFTAPSVSTCPVAMACCAASTAVWNPNEPPLLDLTVDCRRAAHHVVPTAVGVGRRRSRGGAGGRGCRRWASEGGAWKLVLSPQPMFCEEGSSESGYVLCVIDSLKKKITSDRFVYIQKRVEENSIKLSPITLHSHNLSKNRQTSTSNSTDLVSNLLTKRKEDALCAVNSRESSPDESEGANCQDECSSTVIVGGNLSARNSVRPIRLPEVATLPPYTTWIFLDRNQRMQEDQSVLGRRRIYYDTNCGEALICSDSEDEAVEDEEEKKEFKDSEDCIIRMTIQECGMSDAVLETLARDIERAPDDIKARYEILQGEKPEGSSKKVSELNVKMEDVYGDKDLDAALDSFDNLFCRRCLVFDCKLHGCSQDLVFPTEKQAPLCSSDEGTPCGIHCYKLVSKPDAIMEIDSHLLVDVEEPTSDNLKDQIGSNKKKLGSSGQKTKSQQSESSSTARVSSESSESEVQLLSNKSPQHSPGLSKNKLGAKGGIKKSTNRRIAERILMSVKKGQQEMSPDSNSIVNGCHWPRDMKLRSDTRSGIKDSVVSSQCNSPSTRSFRKKGTLQMENNSSFVDAQSDSMEDTNNEHSATDGCDSSRKEECVDESICRQEAHGRSWKVIEQGLLLKGLEIFGKNSCLIARNLLGGMKTCTDVFQYMNYIENSSASGALSGVDSLVKGYMKGNELRTRSRFVRRRGRVRRLKYTWKTAGYHFIRKRITERKDQPCRQYTPCGCQSACGKQCPCLTNGTCCEKYCGCPKMCKNRFRGCHCAKSQCRSRQCPCFAADRECDPDVCRNCWVGCGDGTLGVPNQRGDNYECRNMKLLLKQQQRVLLGRSDVSGWGAFLKNSVGKHEYLGEYTGELISHKEADKRGKIYDRENSSFLFNLNNEYVLDAYRMGDKLKFANHSPDPNCYAKVIMVAGDHRVGIFAKERISAGEELFYDYRYEPDRAPAWARKPEGPGAKDDAQPSTGRAKKLAH

SEQ ID NO: 105694 - protein, 57 aa, Oryza sativa
  Clone ID: PAT_MRT4530_102913C.1.pep
MACALDMQEWGVGRAGVGWLPGAIVIKQNPRAVYHILEIVYCLLLTGKAIHAKTFNG

SEQ ID NO: 105695 - protein, 370 aa, Oryza sativa
  Clone ID: PAT_MRT4530_102914C.1.pep
KIMELYRLHLCKILKQSLLQGLAIGFGFGFSQFLLFACNALLLWYTAISVDKQRLTIATGLKEYILFSFASFALVEPFGLAPYILKRRKSLISVFQIIDREPKIDPDDNTGLKPPNVYGSIEFKNVDFSYPARPEILVLSNFNLKVSGGQTVAVVGVSGSGKSTIISLIERFYDPVTGQVLLDGRDIKSFNLRWLRSHMGLIQQEPVIFSTTIRENIIYARHNATEPTRPEAARIANAHHFISSLPHGYDTHVGMRGVDLTAGQKQRIAIARVVLKNAPILLLDEASSAIESESSRVVQEALDTLVMGNKTTILIAHRAAMMKHVDNIVVLNGGRIVEQGTHDSLMDLNGLYVRLMQPHFGKGLRQHRLM

SEQ ID NO: 105696 - protein, 476 aa, Oryza sativa
  Clone ID: PAT_MRT4530_102915C.1.pep
MTAATSKNVVVLFPFPGHGHLAAFLSFAGVLHRALPDVAITLVSTPRNVASLRRATSAGHDSFLLHELPFVPADHGLPAGWESSDGVPHNRFPDFLEALEVLQPAFDDFVAGATAAGDVAVCVVSDPFLAWTVTVARRRGCAHAFFVSCGAFGSAVVHSLWSHLPIRPDEAGRILLPEYPDVVIHRSQVSSNVLHPPTAVKHRVEAFFGRQIQLGYKTDALLINTVEEFEPTGLAMLRRTFRLPVIPIGPLVRASTKTTSPETDATAGAITSFLDSHPPSSVLYVSFGSQFSIQAEHMAELAAALEATGRPFVWAVKPPDWLPDGFEERVTATKKGLLLHGWAPQVGILAHHSTGAFLSHCGWNSVLESMTHGVPIIGWPLAGDQYYNAKMLDEEWGVCLRVEGARGDMDMSAIIVDKATLVAVVETVMSPTAKAAEMRQRARAIKEIMEAAREGGHGSSANQALEEFFKTMKLNG

SEQ ID NO: 105697 - protein, 51 aa, Oryza sativa
  Clone ID: PAT_MRT4530_102916C.1.pep
NRHEYVVKNFERFNNSHLLHIDTCIVNESRYAKLKGLYYLLLIQPKYEELN

SEQ ID NO: 105698 - protein, 82 aa, Oryza sativa
  Clone ID: PAT_MRT4530_102918C.1.pep
SFLHCKGDSHSSRCGGCCRRRRRPPSYWPNRRLWLLIPAYERQPYLDRRVDPRWHQPDGGAVDRGLSWLVRYAPTSRDTTGH

SEQ ID NO: 105699 - protein, 141 aa, Oryza sativa
  unsure (1)..(141): unsure at all Xaa locations
  Clone ID: PAT_MRT4530_10291C.1.pep
GGGXXPSRLXGGXXXXXPPKGFGLVGXSDXXTGPXXXLXXTRGXVXGXGWTLXRNYTQPCNVXXXXXSFGXXSPAXIXXXNXIFSXNNXXYRXIXHXVMXVXTCXXXXXVXXVXVXFXGXPWXKYPPXXXLXKXXSKKIXD

SEQ ID NO: 105700 - protein, 102 aa, Oryza sativa
  Clone ID: PAT_MRT4530_102920C.1.pep
MWATLKARAGVFTSCIGDGNFPDEGGYPPGTRPYGAGVGAIFGPAGAAGVGPRKYAFKGAPLEIGGPDLAYFRALSGAPMANKDVKQKLVLEQFVCHRRRSI

SEQ ID NO: 105701 - protein, 37 aa, Oryza sativa
  Clone ID: PAT_MRT4530_102921C.1.pep
VQCFALLARILLILIARVTLKSLGVFWLLLLCRADYY

SEQ ID NO: 105702 - protein, 201 aa, Oryza sativa
  unsure (1)..(201): unsure at all Xaa locations
  Clone ID: PAT_MRT4530_102922C.1.pep
EKLNFFFPRAEASLATRAALEALAALAAALATAARAEQGGAQAGRTRCPNSPCCSRXRWSGTTLDSCGDRCQSQRSGCGPTPPPTPTTPCDALGYSEPTDLRKRLQTLPMDRACPNPLCYAYDALLAAAAAYPAFGGTGNTETRKREAAAFQGQTXHETTGGWPTEPDGPLSRGYCFKQEQKPDRPTTCQPHPREGTAAPP

SEQ ID NO: 105703 - protein, 44 aa, Oryza sativa
  unsure (1)..(44): unsure at all Xaa locations
  Clone ID: PAT_MRT4530_102923C.1.pep
LFIIFIFXGGWGHNLSCILLLTISKTYFQYFSILRDTLHLILXI

SEQ ID NO: 105704 - protein, 73 aa, Oryza sativa
  Clone ID: PAT_MRT4530_102924C.1.pep
HTSGINRQSNVPNCRNAICPFFVWQLFCEGIKDPFLVRYVPRRTYCEIGLFFLRGRVVCDLQGFWWPCEPEKR

SEQ ID NO: 105705 - protein, 166 aa, Oryza sativa
  Clone ID: PAT_MRT4530_102925C.1.pep
MAAALAWRFNGTNGGADLEPKVQESEPPTPVSVMRMVKNRANVEDEETLSSVAQCIEQLRQGSSSTQEKENSLKQLLDLLETRDTTFGAVGSHAQAVPILVSLLRSGSSGVKMLAATVLGSLCKEEELRVKVLLGGCIPPLLALLRSKSAESQTAAAKTIYAVSQG

SEQ ID NO: 105706 - protein, 1398 aa, Oryza sativa
  Clone ID: PAT_MRT4530_102926C.1.pep
MTHNHADGKSNQVDMKNVDEPQDLDTSRLSNKGIKESVQLEGFIGSTSVKENSNHVQPEVSTTVPVKDESEAFDSAIVAQKDIVCSSPVHSMNKEESPALIWKLKLKHLERNLDQMAQKEHEDSILKKAHLIEVNLKRAGERSLYNMSLEKRTRGHWDFVLEEMACMANDFMQERLWKNMAAARVCHWVVSKGRAKFEEAIIQRKQKAVTRSLVKGIMSFWRSAEALRTIGRTAVIQEHNSDMLDTTNHTGLKAEKSEGNKSSEAEEPNYPRQSRIQDYAVKFLEYNSQTSGSLVLAEAPPTPDRLNDFGTLKVSDLSEGSLFYTVAPSAMKVYRESVESLSVHHKTGYIGLKDDYEASGCDFAADLPQENAYEDEGETCTYLPEAYDGGLLSQMGHRKQLGQQRINGARSYGISTHVPFEPYLESKLWNGKRPSSFLAVPTKRIRTAARQRIVSPYPAGIGGTTQVTSKTDVSSGDTSSYQDDQSSLHGGSLPWKNTDFESTVDFDRQLPYDGREVVTKANKKKKLKNPGYKTSQNAANSCALASAKGRICDQRSQADFFTQYDQKDFLKKKSDSEQFDSKWNIASHGGQHALKKLKLMRQGIDISQEASPVASQMSNMANSAKIIKIITNRDRGRKGKALKMASSGGWSNFEDQALVVLVHDLGQNWELVSDAINSIEQFKGSARQLFQRLQGPIEEENLKAHFEKMILLMRQLHARRRKSAFFTTLLVVTGKYFLWPLDLCDAVSSNLDASTPGSGYQSSYTIGLTPPNHHGSNGPTTPNSTLNSRLSGSPGTVLSNNFLPPSTFSASSRDAQKYGVPRCTSLQSDEQQKIHYNQILSGRNLQQTGGSVPGAFPPGVDRGARVMPGTHGMGMVSGLNRGMPAATVGFPRHSSPGKPNVVSPGNVLANSGQGAPNAVNVHPGAMSAPGNPTLRPHNPMQALHPGQNMEEHRQIVMPEFCMQVSQGNTQAISSMNHSLSNAASSSPVQSFPIQQHQQKHQISPPSHMFGNPQHPQIQGMSHSNPQQQTYAMRLAKERNIQQRMVPQQQNDLPGASAVPSVQNGSHGQQQKQSPAALSAPSSQPQHQRQQAAQNPPDSCAHPNQPTNATQHKPKKSQQQPRQNQQQRNQGSQQAKLMKSLGRGNMLIPQTTVDTTPTNAVSASSKKQITENKLIQHGQGTLPGNKASNPSIPHPGNQHKLYSSPLPQSPKQLPDIGNQGVLQGSPSQALLTSQQLPLHPKSSLTTQQQQQHVHSSQNSIQRMMMHQNLQSNSDCRPDSQVVQVQNNQIVPTPPIPQSTEKGSAGLSSISQQKHEVSNDSNAVNSTSMMLSSPQDTFAGGERLLPSSSHDVLERQMPGGLPMYGGQWHQEQSKQQLQSPNQQRPVVQGSVYAPLNPGPG

SEQ ID NO: 105707 - protein, 113 aa, Oryza sativa
  Clone ID: PAT_MRT4530_102928C.1.pep
IQQHQQKHQISPPSHMFGNPQHPQIQGMSHSNPQQQTYASVQNGSHGQQQKQSPAALSAPSSQPQHQRQQAGNKASNPSIPHPGNQHKLYSSPLPQSPKQLPDIGNQGVLQGS

SEQ ID NO: 105708 - protein, 1873 aa, Oryza sativa
  unsure (1)..(1873): unsure at all Xaa locations
  Clone ID: PAT_MRT4530_102929C.1.pep
MRRHARPQPLCAGMGRRGATLKGEAHAPAISSRCVVAAGCFLLHRAPSAASPPRSREMEVGEDGVKRVGNKSSPRSLAIEKAQEELRQEHDVREERKRELDFLEKGGNPLDFKFVHVASVSVQSTSLTEQIVEQNVISDAKGSFAFAASPRGDSGESNGRPGSSPCRETNTADNLMLFRGDKNDVVEEKIVKRGTKRTNAAQSKQPLPTDGHNNAKQAEDSVLSRLGVKSQAYVRRNRSKPCREITSVKSPTVPAKSSEPKDAKGEMQEKQADGHGARSVSGLKQAGQKRENATKSTASDEHVAMELDGIQTNRGSNCLVKNEASQSDGSSKAIEVLPNAYGNQQLGGCGEVVAAGEPVEIPDSTSNIILRSSYSSAKSTHHASETHAYDQKVEDGQLDKGFTSIHVDELDNSGISPVCAVESGTVCTNLVDPHCEESIDMTHNHADGKSNQVDMKNVDEPQDLDTSRLSNKGIKESVQLEGFIGSTSVKENSNHVQPEVSTTVPVKDESEAFDSAIVAQKDIVCSSPVHSMNKEESPGSEGRNSCLGNSNSIHPIVVGPVLPKNSLPEKYSSDMETEIKTSGENLDQMAQKEHEDSILKKAHLIEVNLKRAGERSLYNMSLEKRTRGHWDFVLEEMAWMANDFMQERLWKNMAAARVCHWVVSKGRAKFEEAIIQRKQKAVTRSLVKGIMSFWRSAEALRTIGRTAVIQEHNSDMLDTTNHTGLKAEKSEGNKSSEAEEPNYPRQSRIQDYAVKFLEYNSQTSGSLVLAEAPPTPDRLNDFGTLKVSDLSEGSLFYTVAPSAMKVYRESVESLSVHHKKTGYIGLKDDYEASGCDFAADLPQENAYEDEGETCTYLPEAYDGGLLSQMGHRKQLGQQRINGARSYGISTHVPFEPYLESKLSNGKRPSSFLAVPTKRIRTAARQRIVSPYPAGIGGTTQVTSKTDVSSGDTSSYQDDQSSLHGGSLPWKNTDFESTVDFDRQLPYDGREVVTKANKKKKLKNPGYKTSQNAANSCALASAKGRICDQRSQADFFTQYDQKDFLKKKSDSEQFDSKWNIASHGGQHALKKLKLMRQGIDISQEASPVASQMSNMANSAKIIKIITNRDRGRKGKALKMASSGGWSNFEDQALVVLVHDLGQNWELVSDAINSIEQFKGSARQLFQRLQGPIEEENLKAHFEKMILLMRQLHARRRKSAFFTTLLVVTGKYFLWPLDLCDAVSSNLDASTPGSGYQSSYTIGLTPPNHHGSNGPTTPNSTLNSRLSGSPGTVLSNNFLPPSTFSASSRDAQKYGVPRCTSLQSDEQQKIHYNQILSGRNLQQTGGSVPGAFPPGVDRGARVMPGTHGMGMVSGLNRGMPAATVGFPRHSSPGKPNVVSPGNVLANSGQGAPNAVNVHPGAMSAPGNPTLRPHNPMQALHPGQNMEEHRQIVMPEFCMQVSQGNTQAISSMNHSLSNAASSSPVQSFPIQQHQQKHQISPPSHMFGNPQHPQIQGMSHSNPQQQTYAMRLAKERNIQQRMVPQQQNDLPGASAVPSVQNGSHGQQQKQSPAALSAPSSQPPSISGSKLHKIHQIAVHIXNQPTNATQHKPKKSQQQPRQNQQQRNQGSQQAKLMKSLGRGNMLIPQTTVDTTPTNAVSASSKKQITENKLIQHGQGTLPGNKASNPSIPHPGNQHKLYSSPLPQSPKQLPDIGNQGVLQGSPSQALLTSQQLPLHPKSSLTTQQQQQHVHSSQNSIQRMMMHQNLQSNSDCRPDSQVVQVQNNQIVPTPPIPQSTEKGSAGLSSISQQKHEVSNDSNAVNSTSMMLSSPQDTFAGGERLLPSSSHDVLERQMPGGLPMYGGQWHQEQSKQQLQSPNQQRPVVQGSVYAPLNPGPG

SEQ ID NO: 105709 - protein, 525 aa, Oryza sativa
  Clone ID: PAT_MRT4530_10292C.1.pep
MERVLKDDAVEEKGERARMAAFIGAMAIADLVKTTLGPKGMDKILQSTGRGRSVTVTNDGATILKSLHIDNPAAKVLVDISKVQDDEVGDGTTSVVVLAGELLREAEKLVNMKIHPMTIIAGYRMAVECARNALLERTMDNKENIDKFRSDLMNIAMTTLSSKILSQDKEYFAELAVDAVLRLKGSTNLEAIQILKIPGGSLKDSFLDEGFILDKKIGLGQPKRIENAKILVANTAMDTDKVKIYGARVRVDSMAKVAEIEAAEKQKMREKVQKIIGHGINCFVNRQLIYNFPEELFADAGILAIEHADFEGIERLALVTGGDIASTFDNPESVKLGHCNVIEEIMIGEDKLIHFSGVAMGQACTIVLRGASEHVLDEAERSLHDALCVLSQTVNDTRVLFGGGWPEMVMAKAVDDLARKTPGKKSHAIDAFSRALQAIPTIIADNAGLDSAELISQLRAEHHKENCTAGIDVITGSVGDMQKRGISEAFKVKQAILLSATEAAEMILRVDEIITCAPRRREDRM

SEQ ID NO: 105710 - protein, 132 aa, Oryza sativa
  unsure (1)..(132): unsure at all Xaa locations
  Clone ID: PAT_MRT4530_102930C.1.pep
HGGVGRKRERGIQIEPRPLSGARGAGGAGEGQRCGREVWARRGGATWSGEGGKXGGVAVSAAAAVGAPAPTAGGXETTDRWGPPVGVPREEGGAAWAGPQGGGAAGXGMGRRPXQRKRREKKRKREKGFSWD

SEQ ID NO: 105711 - protein, 814 aa, Oryza sativa
  Clone ID: PAT_MRT4530_102931C.1.pep
MAKEAMATPTRPQVRETWPAGGGGGGGGWMGVGSGERVASAYDLVEQMHYLYVRVVRARGLTAAASTVAGGGGCNPYVEVRLGNYRGTTRHHERKAAPEWNQVFAFSRERVQASVLEVFVRDKDAVAAVARDGYVGRVAFDVGEAPVRVPPDSPLAPQWYRLEDVGGGGGRAVQGEVMLAVWVGTQADEAFADAWHAGAASVRGGGDGVAAVQSTRSKVYVTPKLWYLRISVLEAQDVVPGAVAGAGGDKGRHGEAFVVVKVQVGGVTLRTKPCCRPTSPSWNEELVFVVAEPFDEPAVLVIEARAAHPGKDEIVSRAVLPLTLFERRLDRRGAAAATHTQSQWFSLEPFVHRPRHSPEEPAFAGRVHLRACLDGAYHVMDEPAMYASDTRPTARQLWRPPIGVLEVGVLGAQGLPPMKTAADGGRGTTDAYCVAKYGHKWVRTRTVVDSSTPRWNEQYTWEVYDPCTVLTLAVFDNCNLGNGGGGGKDQRIGKVRIRLSTLEMDRVYTNAHRLVVLHPSGLRKNGDVCLAVRLTCLSLASVLRLYGEPLLPGAHYVHPFAVAQLDGLRRQAVGVVAARLGRAEPPLRREVVEYMLDAGSHLWSIRRSRANFLRATALLSGAAGAARWLADVCHWRSPATTILAHLLLVTFACFPELILPTAFLYASVAGAWSYRRRPRRPPQADAGLSCAEAAGADEFDEEADTFPTSRPDGVVRARYDRLRTVAGRIQAVVSDVATQGERVRSLLAWRDPRATAVFTAACLAAAVVAYATPPRVVALVAGLYLLRHPRFRSRMPSAAGNFFKRLPSRADTML

SEQ ID NO: 105712 - protein, 57 aa, Oryza sativa
  Clone ID: PAT_MRT4530_102932C.1.pep
PERPKPKAWTKKTFLGGTKTKLRWKSRGSPRDLGEGYLARTKGPQGGHPHRGIGSGG

SEQ ID NO: 105713 - protein, 57 aa, Oryza sativa
  unsure (1)..(57): unsure at all Xaa locations
  Clone ID: PAT_MRT4530_102933C.1.pep
GGLFTNKSRCATIFFFFFWXPKFIFLGVILFFIKLYYFIDFFFFDISEMIDYAVSNY

SEQ ID NO: 105714 - protein, 137 aa, Oryza sativa
  Clone ID: PAT_MRT4530_102934C.1.pep
TVVRRFNLTRIVVFIGAGAPPRRVGRRHQVADAGRNLLRPDGLRRSRPPSLPHAPPPASVPPSQAPSAAAPPQPPPPHRCRPFLLSPSPTAALRQAAISGASLLSGAREGAKGREENERENREEIERAGKGTERREG

SEQ ID NO: 105715 - protein, 38 aa, Oryza sativa
  Clone ID: PAT_MRT4530_102935C.1.pep
MGNFGKPVGLGYHCDIWSWLVYDRCNARILASPNKAIK

SEQ ID NO: 105716 - protein, 56 aa, Oryza sativa
  Clone ID: PAT_MRT4530_102936C.1.pep
MMAALPPLPSKGLRWYIPLARHGNLMDGPEVSLWMSFVLWTSPIWALDAAKVGSVA

SEQ ID NO: 105717 - protein, 46 aa, Oryza sativa
  Clone ID: PAT_MRT4530_102937C.1.pep
LCHNRSCLKGQSGNANLETLVGWNLWGAKRPRPQHLNIIYSDVSTP

SEQ ID NO: 105718 - protein, 63 aa, Oryza sativa
  Clone ID: PAT_MRT4530_102938C.1.pep
ARRPPPRRRPRAPRRRAQAPQARRRCQARPPPPYSHSSPPLVPLPPPAPRRSIFHPRTTPLPT

SEQ ID NO: 105719 - protein, 37 aa, Oryza sativa
  Clone ID: PAT_MRT4530_102939C.1.pep
KKKIKKKGLKKEKKRKKKGKKKKKKKKKKKKKKNHHT

SEQ ID NO: 105720 - protein, 482 aa, Oryza sativa
  Clone ID: PAT_MRT4530_10293C.1.pep
MAAAAARGKRRGAGAAAAEGADEAAEAADLVRFFLRRTSGGKERLVAVLDRHVKVVRTEHCFLLFEELGRRDGWLQCLEGVDVDQQEMNFEVPVFRWMQKQRWYVADNGIYSKLISVMGRKGQIRMAMWLFSQMRNSGCRPDTSVYNSLIGTHLHSRDKSKALAKALGYFEKMKTIDRCQPNIVTYNILLRAFAQAGDTKQLDILFKDLDESPVSPDIYTYNGVMDAYGKNGMITEMESVLVRMKSNQCRPDVITFNILIDSYGRKQAFDKMEQVFKSLLRSKEKPTHPTFNSMITNYGKARLREKAECVLDKMTEMGFKPNYVTQECLIMMYAYCDCVSRARQIFDELVSSQNNVHLSSVNAMLDAYCMNGLPMEADQLLDSVIKKGAVPSASTYKLLYKAYTKANDKKLIQKLLKRMNSQGIVPNKKFFLDALEAFGNTDKKPRTVPSKNSASKPDVESANNSGTDTSSKPNLSVWQVAA

SEQ ID NO: 105721 - protein, 36 aa, Oryza sativa
  Clone ID: PAT_MRT4530_102940C.1.pep
LIQEPSMSQDPLPLIICHISRHIVTKVDNESDTKWH

SEQ ID NO: 105722 - protein, 141 aa, Oryza sativa
  Clone ID: PAT_MRT4530_102941C.1.pep
DPRRSAWRGSGAVRDRGRDADAELECRRYRVGWRWRNIFDSSKALRLARVRHGSEEGQAAEPERTTPTTGASWRQERRRQGPGATLLLLVGRGRGDIGGGLDGEPLSLTVAAEGEIGGGSICRHGGGNDGDEEHGGHRGRR

SEQ ID NO: 105723 - protein, 121 aa, Oryza sativa
  unsure (1)..(121): unsure at all Xaa locations
  Clone ID: PAT_MRT4530_102942C.1.pep
MGGPLLRRGESGSWTTGHPGRPNSITPTLTTGLMSPRGAAPDGPACQWHKGRGRGHWGGPPAGGAHRAAAQGRRGSGWWLARLKPLTMQARXXTGSDDTGGDEARAGAKQERGGEEEEDWI

SEQ ID NO: 105724 - protein, 928 aa, Oryza sativa
  unsure (1)..(928): unsure at all Xaa locations
  Clone ID: PAT_MRT4530_102943C.1.pep
AGGIRCATVPENSTDMLSLLHFRKAINDTAGALNSWNKTSPHCQWNGVTCATKHPGRVTVLNLTGQGLSGPIAPSVGNLTFLRILDLSANYFSGQIPPLSNLHKLEILDMSMNSLEGNFPDWLTNCSTLSVLDLSKNTLVGAIPPKISLLSNLKKLGLSVNNFTGTIPPTLKNITNLRQMVIASNQLEGTIPSELGQLSSLQPLSLADNNLSGEIPRPFYNLSSLQGLSLRDNKLGKALAPDIGDKLPNLVQYFLAXNMFEDSIPASLGNASGLRRVDLSNNVFTGPVPSSFGKLSGLLALNLDNNDLEASDRVSWAFLHALGNCSSLQTLSLAQNKLTGPIPDSIGNLSKTLQNLVLGGNKLSGIVPDSIGKLSGLILLTLDSNFLTGTIGEWLGKLENLQVLILANNNFIGPIPSSIGNLAQLGRLSIXNNRFEGPIPPSLGSLSLLTSLDLSYNNLQGNIPIEIGLLRQLVNLILSSNKLTGGIPDSLSECKNLVNILMDQNFFIGEVPPFGNIVGLLALNLSHNNLSGTIPKTLSDLQLKSLDLSYNHLYGQIPTNGVFADATSVSLGGNWGLCGGNKDLHMPSCPSPTVSHRMSKQYYLIRILIPIFGFMSLILLIYFVILEKKKPRRKYSEQTSFGENFLKVSYNDLAQATTNFSESNLIGRGAHGSVYRGRLKEPKVEVAVKVFNLEMRGAERSLDSWLHHRVDGKASKGLRLSQRMSIAVNVADALDYLHHDCGRPTVHCDLKPSNILLDDDMTALLGDFGIARFYVDSFSTTAGSVNSVGLKGTIGYIAPEYAHGGHVSPSGDVYSFGIVLLEIITGKRPTDPMFKDGLDIINYVNNSAPRQVLDIIDDHLKEECKDYDQPGIFEESGFYQCMVSLLGLARSCTRQLPSERANMKQIASKLHTIRTSYLGWKQKTATLD

SEQ ID NO: 105725 - protein, 107 aa, Oryza sativa
  Clone ID: PAT_MRT4530_102944C.1.pep
GLQESARGESIGTINCGANHCRRKSIGTVNCGANHCGRKSIGTVNCGADHCRRKSIGTVNCGADHCGRKSIGTVNCGANHCGRKSIGTINCGVKDCQRKNIATTNCL

SEQ ID NO: 105726 - protein, 1630 aa, Oryza sativa
  Clone ID: PAT_MRT4530_102945C.1.pep
MGVVEFSVLGAVQKFRSLIAGPTPPAAAAEGEEVARQTSGPPSPATPTRSRSGAADTTPPLPARPGGGRRAIALRRQISSPQLLRCHAVRRGDGEDDDEPGVQFFTPGNDYLHDFSDTDSLSVSTPNGVARSLTPSPLESPTWMVGHNDASPTSKRNERLSLDSLGCDTRLNGGIADRSGGDMTRYPADFDANVWLPPSPEDEGDDVEARLFGFDYEDDEAGDSGKLLALGNFNTNKIVGVDTITDIAHKEGLRNAVLGHFRALVAQLLKGECIDLENDNGSKSWLEIVSSLAWLAAGYVRPDTKKGGSMDPTDYVKVKCLASGDPSDSNLVRGVVCSKNVKHKRMASEHVNAKLLILGGALEYQKVTNKLASIDTILEQEKEHLRAIVAKIESRRPNVLLVEKSVSSYAQELLAKDISLVLNVKRPLLDRISRCSGAQIASSIDNIASARLGQCELFKVHKVSEFSSGKQTNRRSMKTLMFFEGCPRRLGCTVLLRGSCREELKKIKRVVQLAVFAAYHLSLETSFFADEGATLPKVPSRPMVVVNDIRSDPSNYFAGSAGVGIPHGLKPVQGKHSEATRVNGMFKENSISPGSLSLNEEGEGVISEHRESKIPVEHMNCHDHDSFHATESCKGHKIFPCSLDHDIRTSDMVMQYQYLNDSTQLPINDDRQGMVSGKKFQEVDHYGPKPHDDYLMGDADGPNELSGEYFPATDNHQSILVSLSSTCIPKSMLCERSQLFRIKFYGSFDKPLGRYLREDLFDQAYCCPSCKESSESHVRCYTHQHGSLTISVRRLLSQKLPGERDGRIWMWHRCLKCEPKDGVPPATRRVIMSDAAWGLSFGKFLELSFSNHTTANRVASCGHSLQRDCLRFYGYGNMVAFFRYSPVDILSVNLPPSVLDFNCRSRQDWMRRMAVEIYSKMETLHSEVYDFLHHNENSVTSEDEPVKAGVQRQIIEMKDLLKMERNGYEILLLPVITDSNHSVQVSIDVLELNRLRRGLLLDAYIWDRRLCYIDSLLKKDSHVSNPDIFLDVRLKEWKADLLVGDTKIGKSTNLSQSSGSPRKSLLSREGCLNDTEYRMGETNSQIDLVTHPVDDAEDLDKVFRRFNGETEQPVTTATMGKEPVERLPSLASIFSDKIDLAWTGSSEIQDDLLQGFTKIDEYGSFNFPDNPSYGNSVTPVRIHSFDSKFAIHQRERNGLAPTSLHLSSFRSAEYFGDFTSILKDPMPNIRRACSQRSPGAVEKLNVVLTRTLTYISSASHMIDDGARLLLPQIGYEDDAVIAVYDDEPTSIVSYAMTSQEYVQQVTRKLNSSLSFLHLPNAIDSSHGLDGTLLSQEDHLDSKGTHFKFSFDDESPLSEDKAKFSITCYFAKHFAALRKKCCPKDIDFIRSLSRCKRWNAQGGKSNVYFAKTLDERFIIKQVTRTELESFVEFAPQYFRYLMESLTSGSPTCLAKIVGVYQVNIKGLKGGREVKMDLMVMENLFFERKISRVYDLKGSLRSRYTSSESKVLLDSNLLEALHTKPIFLGSKAKRRLERAVWNDTSFLATADVMDYSLLVGIDEEKKELVIGIIDYLRQYTWDKQLETWVKASGILGGPKNESPTVISPMQYKKRFRKAMSKYFLTVPDQWSS

SEQ ID NO: 105727 - protein, 1731 aa, Oryza sativa
  Clone ID: PAT_MRT4530_102946C.1.pep
MAAAASSSSPPGTASPVLSVRIVSLDYYMAPPLPGFDFSYSHFHGGEVEEVPVIRIYGSTPAGQKTCLHIHRLISLVIFDSRLQPSLRVFDALSVSVLPFLYVPCKEDLLHNVEKGNSFISGLLSDLEKALQDGAVLNRVFQPYESHIPYLLHFLIDYNLYGMGYVHVTDFKFRPPLPDDFHPKSSLHSKVDCSTESGHKVHPDNVAIRKPTIWISSTVPHSLILASSATSHCMEGTNWNVTNRHSSLMLEADSRIEGILNEKYKMYTSLSQATADSKIVRSLLSIWEELEHLRLLEEAKPVDMGRPLRDSVLRSFLHGIKYETALSMLCPKEEVSYHRVPTMEESEKLEECLKSLNDIIGTITFSQNDYCSIIDSDISAGTQQENQITNVLCLEPSEEGNTQCPVSSSAAQRTSSQLFEEHEKLVDAEALGLLSWLASSQAAEEPTTDDELVNEAILSPLFSKKSIAVALESAQLDFDGASQQECQDILDSIGPVIGEEQPNDQMSYRSSVRLGESSSLSNSIPQIDGSSDENKEVPQEDGKYKIDRKRAGLPSYSSPQSSSKASKRGGNELLWGSLPLSIKKRSDLNADGHSGGAMPTEKVLSASFMSGTGKNSHANPDNTERGSSSPTGEHDPLCDSVRDLMRRRRRSFRSEQSEVGNSGDAAYIVRKENEIVNSERLELHDISSDLSNSEMYYSGSEYLQMTFARKPPMKNEVLCLEGSSAGSELPQSSKLGFADIPPFFNQTAEENKQNESFQRMGSSWDTLGVPTHFQNDGSALYLLTHAFSPPSTVAVGQWLTQQSCSVSVSGIGHSNYGEKVSVDQEGANNSTLSPYMGGPALMDDSPASKMALEHSITTFPDDTVMIEPDLSNQEIKNLADWHDFSQISGGDEKDKLTPLSQIGFCDPASIGGGQQLTIISIEVITESRGELRPDPRFDAINAVSLAVEDDADNTIEVHVLIRGNNDSSHRRRNLDGVSGCDVNVFPGERELLNHLINAICSIDPDIIVGWEIQLGSLGFLAERAAHLGIGLLKRISRTPPHQMKHPPMNPVDESSQELPGASSADDVIDDASENNWSHAHASGIHVDGRIILNLWRLMRAEVKLNNYSLEAVANEVLRRKVPLVPTKILNRWFATGSGRGRYRCIEYVNKRSSLNLEILNQLDLVNRTSELARVFGIDFFSVLSRGSQFRVESMLLRLVHTQNYLAISPGNQQVASQPAMECLPLVMEPESAFYSDPVVVLDFQSLYPSMIIAYNLCYSTCLGKVFPSKSSVLGVSSYSADPQKIADLKNQLLLTPNGVLYVQPEVRKGVLPRLLEEILSTRIMVKKAMKKLSASQKVLQRIFNARQLALKLIANVTYGYTAAGFSGRMPCAEIADSIVQCGRRTLETAISFVNQHPLWKARVVYGDTDSYESPEQKEPIFDAKGIETVRRDTCPAVAKILEQSIRIMFEEQDLAKVRSYLERQWTRILSGKISIQDFVFAKEVRLGTYSARASSLPPAAIVATKAILSDPRAEPRYGERVPYVVIHGEPGARLVDMVIDPYGLLEVGSPYRLNALYYITKQIIPALQRVFGLVGADLNKWFNEMPRPIRETLAKRQSASGHGSFSRLGLNKKGVGKGSRIDTYYMSSHCIICGEIIQGSDTFCNNCLRNEAVVGTIVAGRTSKLEREIQHLAAICGHCGGADWIVESGIKCISLACPVFFERRKIQRELRGVSESAIEAGYYPFCCPELF

SEQ ID NO: 105728 - protein, 499 aa, Oryza sativa
  Clone ID: PAT_MRT4530_102947C.1.pep
MRRPWKHPTKARHGAADLCLREVGLLLPRRFARRAAASEDLVMRLQVHRKLNRHTGCVNTVGFNADGDTLISGSDDQMVMLWDWDTGAIKLQFPSGHSNNVFQARFMPYTNDQTIVTCAADGEVRLAKIGDGGDVPTTLLGDHDGRAHKLAIEPGSPYIFYSCGEDGLVQHFDLRTNTATKLFQCRNSLSKSGHSSNIHLNAITIDPRNPNLLAVGGSNCYARVYDIRKYKWDGSSDYPSDCYCPPHLIGNRFVGITGLAFSHQSELLISYNNENIYLFPKNGGLGPDPKSSVKIEANKGSKSTIVSSGEDVDRPAPLMYAGHRNCETVKGVTFIGPNHEYVASGSDCGRLFIWRKKDGKFLRAMEGDECVVNCIEPHPHTMTIASSGIDNDVKIWTPSATERAPVVNIEELKPRKRRTKLWHFSLPEELIFHVLASRRRQQAAGDDDSSEDLEDSTGLLNLVLRAAERDVLSDEDEESSEDSGDCSLNLSMAQPWKHC

SEQ ID NO: 105729 - protein, 129 aa, Oryza sativa
  unsure (1)..(129): unsure at all Xaa locations
  Clone ID: PAT_MRT4530_102948C.1.pep
PGLHLTWCQGYGLGIPFTLRYTSHIGMVFPCAYGYFLRTLRKSFTESTDGKSPTRTRLGRQYVVXGLISPSSTWKPPDLRYKRDPXGEDMGHRISEPTQPSQSTKSEPARSXTRRDLVEPTRPRSRRIR

SEQ ID NO: 105730 - protein, 111 aa, Oryza sativa
  Clone ID: PAT_MRT4530_102949C.1.pep
AGPDPGDNPENPARPPEGTPPPQKGGEKKPGEKRAKAGPGGKREPAQNSTKQTSRKQKGKSPGGPKGGPTQKKGGGPTAGLQGGKPGGPPGKKKGPTRGEGGFGNWAPGGP

SEQ ID NO: 105731 - protein, 155 aa, Oryza sativa
  Clone ID: PAT_MRT4530_10294C.1.pep
DRDQNRDRDRDQERDRDRERDRERGSRREARESSGANNDSTTSMRPKAVCVFLSIYYLAKFCTIISSMVNMSAAAVVVKGTALDRKEHKMEPLPFCTVDSDFTEQERHSVYALLCARACDWALFLADPRIAVAAVWGDRQPECLWPCILPCRSIA

SEQ ID NO: 105732 - protein, 175 aa, Oryza sativa
  Clone ID: PAT_MRT4530_102950C.1.pep
MALVRRKRSNEAATAIGDWEGMDGVGGGDDGSDRGEWMSDGAWVGALGASVGGGQWHGSTSLRLPLRPPTRQVLRGLRIDHSECSDVTVNWTPTGGLAVAAAEATALPDMTNAERLRYATLFAHLMFRQCTLLRGSGLNVVGISGFSLFMLVNWIFFMMFELIVKRCEARCGQIH

SEQ ID NO: 105733 - protein, 76 aa, Oryza sativa
  Clone ID: PAT_MRT4530_102951C.1.pep
MAVAGQFGYFPFANPRPSQDLVSPVTLAISGVQAKKRAASCFFSSDRLHQLQLAVVMLVTVDINSYRAAMKVSSGF

SEQ ID NO: 105734 - protein, 148 aa, Oryza sativa
  Clone ID: PAT_MRT4530_102952C.1.pep
MKKIQFTSMNKENPEIPTTFNPDPRRRVHWRNMRCANSVAYLSLSAFVMSGRAVASAAATASPPVGVQLTVTSEHSEWSILSPRKTCHPTGKVKWKGRREHFVERLVGTAHLPRRRPERQPQGSGAVPLPTPDACAECTYPRAVGLPK

SEQ ID NO: 105735 - protein, 127 aa, Oryza sativa
  Clone ID: PAT_MRT4530_102953C.1.pep
KRSRPESLLQRSSWYDTQIACVAISRFGQLRIPINCDGAGPGSSVCRKWRALTSDDELWRKLFNDRWGADAAAFYAPEGSKSWKDVLAVQDRCDRYGLGVRIIREGKDYYLIYQGEIQRYLGFRQDT

SEQ ID NO: 105736 - protein, 525 aa, Oryza sativa
  Clone ID: PAT_MRT4530_102954C.1.pep
MEQKKGWILDGNGINKTKLVYSSQHPAEDLLVVVNGKRAGTTGMYATTRPQTRPYFATNEYSTELGYFKKIPGSDILCDVYPSRARTLAAALHFPNTPPPPPPPELAAMSWLARSIAATLSSSHSDEDGDNLEASSGDDHRDEQPDTPSGGGGGVKGDLSELTDSLTRGLWGVASFLAPPPAPAAEAAETATGAVGEGEDGARSPRIAGIRSDLAEIGGRVRSGISLLSNANAVAEISKIASSLLPFGPGEDDDDDDDAEAVGVTEEVVEFVRHISTHPETWLDFPLFVNDRHADDFELSDTQYGHALAIERVVPSLSYLRTELCSTNMSEACFWKIYFVLLHSKLSKQDAELLSTPQLQTMISQVCKENVTMYELKNILKAREVLLQSSPTKKRLGPDDGSSQNWNVASTKGDNSGMSEAPSLEEATSVPMNVVEADKHPISVAEVEIIDKSVVEEELVVKNETKSIPSDSEKANLHITSDDDDKEVEDWLKDVAPVSSKTGNVNSAGQEEDISFSDLEDEEDD

SEQ ID NO: 105737 - protein, 470 aa, Oryza sativa
  Clone ID: PAT_MRT4530_102955C.1.pep
MEGGVHIVSRRMVRPAAEHAGELPDHETVHHLTPLDLRMITGDYVQKGVVLPKPPGGGEHVVEHLVSSFARALARFYPLAGRLAVAETPPSPGGARPTISLSLRCNGEGAEFVHAVAPGVTVADIADSLFVPRVVWSFFPLNGMLGTDAAVEPRRPVLAAQATELADGMFVAMSLNHGVADGFTFWHLFRTWSEINRRRSGADSADLELSTPPPVFDRWFVDGIPAPIPLPFAKLEDMVRRPAYTPVEECFLHFSAESVRTLKEKANAEMAAAAAAAAISSLQSVLAHTWRAVCRARRLAPELETSHGLSVGLRARVKEVPQEYMGNTVVGAVARATAGELLDRGLGWAAWLLNRAVAAAGDEASVRRTLPAWPETPSFVTVAGLQNAGVVVISGSPRFDVFGNDFGWGRPVGVRSGAGNKVDGKMTVYEGRGGGGGMAVEICLAPEALARLVADEEFMSAVTAPPPTHH

SEQ ID NO: 105738 - protein, 95 aa, Oryza sativa
  unsure (1)..(95): unsure at all Xaa locations
  Clone ID: PAT_MRT4530_102956C.1.pep
KRKLINQGIICISAINGDGLEEFCNAARPKLXKDSLVPIEAFVPYDKGELLSDIHKVGMVEKTEYTENGTFVKAHVPLPLARLLTPLRQQVAAVS

SEQ ID NO: 105739 - protein, 117 aa, Oryza sativa
  Clone ID: PAT_MRT4530_102957C.1.pep
CRNRHEEAMDTHMDLCRTRTVTTMNLGKHLQSSSASSRLSPSSSSSSPSSEEPAVSVAKAKGEQDGHHLAQIGSVGVAFSWALLWYLSYTSLLSFRVSFVVSLWAKTKRKPCRNDLR

SEQ ID NO: 105740 - protein, 243 aa, Oryza sativa
  unsure (1)..(243): unsure at all Xaa locations
  Clone ID: PAT_MRT4530_102958C.1.pep
MSSNNSMEANNGDDEKKQEQVVCVTGAGGFIGSWVVKELLLRGYRVRGTARGSPAKNAHLXLDLEGAKERLTLCRADVLDFASLRAAFRPGAMGVFHIASPVSKDPNLVPVAIEGTRNVMKAAATYPNAVAAYADVRDVARAHVLVYEHHGARDXYLCIRHPSSNRAELLRMLKELFPQYPVTSKCEDEGNQMVKPYKFSNQRLRDLGLEFTPLRKSLHEAIECLQRKGHLPVVTVAQQRACL

SEQ ID NO: 105741 - protein, 43 aa, Oryza sativa
  unsure (1)..(43): unsure at all Xaa locations
  Clone ID: PAT_MRT4530_102959C.1.pep
SISQSHAHQITCVGMPNKDEPLRAIFMSTHADTLAATXXCIFL

SEQ ID NO: 105742 - protein, 82 aa, Oryza sativa
  Clone ID: PAT_MRT4530_10295C.1.pep
FSEIEKQGCSVKDLLIEMDRIMRPQGYAIIRDKVAVINHIKKLLPAVRWDDWSSDVKPKKDALWSGDERVLIVRKKLWNQTL

SEQ ID NO: 105743 - protein, 419 aa, Oryza sativa
  Clone ID: PAT_MRT4530_102960C.1.pep
MSSNNSMEANNGDDEKKQEQVVCVTGAGGFIGSWVVKELLLRGYRVRGTARDPRKNAHLLDLEGAKERLTLCRADVLDFASLRAAFAGCHGVFHIASPVSKDPNLLMAVAVDGTRNVMNAAADMGVRRVVFTSSYGAVHMNPNRSPDAVLDESCWSDPEFCRQKDMYCYAKTMAEMAATEEAAKRGLELAVVVPSMTMGPMLQRALNLSSTHVANYLTGAKKSYPNAVAAYVDVRDVARAHALVYERHDARGRYLCIGAVLHRAQLLQMLMDLFPQYTIASKCDDKGKPMVKPYEFSNQRLKDLGLEFTPLRKKEMAPTRAMGCSRRIHVVVIDTGDRLSSLPDDILHTIMSFLPAWQAVQTCVLSRRWERLCHADAFLPSCVVLMDTNAARDCDLRLLRSVSESVEEINLGEFFPFNL

SEQ ID NO: 105744 - protein, 78 aa, Oryza sativa
  unsure (1)..(78): unsure at all Xaa locations
  Clone ID: PAT_MRT4530_102961C.1.pep
HGSKAGGTVPXACCGGIQSLLAAVNNTPERRTICGCLKNVGDGASGGPYITRADALPSKCNVSLPYKISTSVNCNAIN

SEQ ID NO: 105745 - protein, 1971 aa, Oryza sativa
  Clone ID: PAT_MRT4530_102962C.1.pep
MASGSSRANIDQFFPAKKRRPSSRKDEPPSGSPRGAKGSLEGYLVRSPSTAAAASLDSPRGGGDAAGARRSLSAAMDVDVGHPATAVATDEGDFELKRFAMEFLSLSHYCSVIPSVMGGASNGEAGKQQKRSAIQSFLAPCSNASAKKQRVAHSGDLEALKVVDVGHKTPFREKCGTQYGGPEALEELGEGTKLSSEGFVALQRCSFTPNTGQKRVGFSTAPGAGETPMSVSTNSLISPGEEFWNAAIEFADGISARAEKGPGRPECDVDDKSSCAVALCSKILPRSGNGGSDHENTVGSNETKQMDRSSYKEEPVAANNHHVNSSPLPVKHLDFFHEDEIQVPGLKIEEKGGAVDLSQKSQMKNRENLTHSVDNVNKSTFDMHIDSSATIHDECLSKLTTEGKNHPTRVGDSGSCLTRRDLNQLIYSEDKLLTAYSDHGKPSKDCTNKFASQEMEANTPTSSVPQKDHSKLSSWLPPELCAIYMKKGIPELYPWQIELITNPKNLFQLVECLLVEGVLEKRNLVYCASTSAGKSFVAEILMLRRILFSGKMAILVLPYVSICAEKAEHLEQLLEPLGRHVRSFYGNQGGGSLPKDTSVAVCTIEKANSLVNKLLEEGRLSELGIIVIDELHMVGDQHRGYLLELMLTKLRYAAGEGNSESSSGEISGSSSGKMDATHGLQIIGMSATMPNVAAVADWLQKDEEFTAQAALYQTEFRPVPLEEFIKVGNQVFDKDMNVVRVLPKVADLGGKDPDHIVELCNEVVQQGHSVLLFCSSRKGCESTARHVAKFLKVASVGSSDVGSEFPDATFAVEALKRSPSGLDPVLEETLPSGVAYHHAGLTVEEREIVETCYRKGLVRVLAATSTLAAGVNLPARRVIFRQPRIGRDFIDGTRYKQMSGRAGRTGIDTKGESILVCKPEEVKRITGILRSNCTPLESCLSEDKNGMTHAIMEVVAGGIVQTASDIHRYVRCTLLNSTKPFEDVVKSAQDSLRWLCHKRFLEWNNETKIYSTTPLGLAAFGSSLNPEESLVVLDDLSRAREGFVLACDLHLVYLVTPINVDVEPDWELYYERFMQLTSLEQSVGNRVGVIEPFLMHMAHGAAMPVRGKPQRAGIRNRSPTRGSGGNALINEQALRVSKRFYVALMLSRLAQEIPVTDVCEAFKVARGMIQALQENAGRFASMVSVFCQRLGWHDLEGLVAKFQNRVCFGVRAEIAELTSIPFVKGSRARALYKSGLRTPVAIAEASIPEIAKALFESSTWSGQGDSGLRRMQLGIAKKIKNGARKIVLEEAEAARVAAFSAFKSLGVQVPQFTTPLLPTIDEPPTRDSMVSVGRGQASDDTNNCFSYGSQRASTERTLGNDMHPGSSIQITESARIVNNANIVVQVASPFSIETKLSSRNVADKGPVNAYNFPGGFDSFLDQWSTVSEFSFDLHYVKKSIKSSSTYFDILGLAVCWENSPVYYCNFPKDLMMAGSNDSIEMWDELTRRWNRVIEIMRQNSVKKMTWNLKFQIQALKYPCVSCQRLSRLHLDYKMLKNVEVLDNLYVFLQPVSVHSGLDICLVAWVLWPDEESKTVPNLEKLVKRRLHNEAAAAANRDGRWRNQMHKAAHNGCCRRAAQTRALCSVLRKLLVSQNLNDLLETIEGPLVNVLADMELWGIGADMDACLRIDMDQHPIISVIKEHRTLAKLLNGTLGSICSRAQLCSKSQRYIIQGNWLQTSTATGRLSMEEPNLQENWLLVTADYSQIELRLMAHFSKDTALIELLSKPDGDVFTMIASRWTGKAESLICSKERETTKRFIYGILYGMGANSLAEQLECSPEDAAQKIQSFKRFFPGVSSWLHEAVASCRHKGYVETLMGRRRFLSKITAGNSKEKAKAQRQAVNSICQVFDEAIMKYPIFPGHTYIYVHDELVLEVDPCMVAEAVRLLQTVMENSASLLGPSVSFLLLRATLNLYKTGYIASVTESIVENED

SEQ ID NO: 105746 - protein, 411 aa, Oryza sativa
  Clone ID: PAT_MRT4530_102963C.1.pep
MSSNNSMEANNGDDEKKQEQVVCVTGAGGFIGSWVVKELLLRGYRVRGTARDPRKNAHLLDLEGAKERLTLCRADVLDFASLRAAFAGCHGVFHIASPVSKDPNLVPVAIEGTRNVMKAAADMGVRRVVFTSSYGAVHMNPNRSPDAVLDESCWSDPEFCQREDIYCYAKMMAEKTATEEASRRRLQLAVVVPCVTVGPILQPSVNFSCHHVVRYLTGAAATYPNAVAAYADVRDVARAHVLVYEHHGARGRYLCIGTVIHRAELLRMLKELFPQYPVTSKCEDEGNQMVKPYKFSNQRLRDLGLEFTPLRKSLHEAIECLQRKGHLPVVTVAQQRAYQWQYPCTKRFFQSGAPKEDATWIAATACSESKQGFHPENMRFGQDHRPQFFPPSTTRPHPDSSFPASTYHLRR

SEQ ID NO: 105747 - protein, 65 aa, Oryza sativa
  Clone ID: PAT_MRT4530_102964C.1.pep
AKPDEEGVPIRHDRHQALREGHHGTAACAKVTNSVIGTRDLTQGCSGIMRSGSAMYLRGLERAIC

SEQ ID NO: 105748 - protein, 43 aa, Oryza sativa
  Clone ID: PAT_MRT4530_102965C.1.pep
MGRLISTELNLGLGQRPLSGNVFFLIFAIGLELELEATKRLFL

SEQ ID NO: 105749 - protein, 1080 aa, Oryza sativa
  Clone ID: PAT_MRT4530_102966C.1.pep
MAARALGPPPPHALGATRQAPRCPHAAAADASAPPTHGYRRGAAALGSALSARRGRHTLCSVQLMDALRGGNLQVEPNILHSPKPLMSTRRDDSAITCKGFCTISWNLKSDVLDGYIIFVTGDPVTLGCWESDMAVQLSPSVESNNLWTAEIKVPYGVHFKYNYFVREENDASSDIIWRPGPEYSLSIPPVGRKKHVIVVKDLWMKTSVAGIPTPSWGSWLMEANFLEDQFAKSGEHQNIVKAHSVIDTVDRASSVGEHIILRLGNGTPLHVKNISENPSASVHDDFTVTDKANSIKSSISEHERNQPVEEPWILGSVMAAKKSVAAGKHEKNRWKFVNKKQNLSEVSENIPEQDQPVEEPWLFQSKVVAKKPVVQTKGKIEAKDIIRKLRKMDKPPAPLEEDKATSGEPSSRVIVINSSVCTMQRIAVLEDGKLVELLLEPIKNNVQCDSIYLGIVTKLVPHMGGAFVDIGLSRPSLMSIKQNRDPFVYPQIVKNAKRDSANFSDYNDDSLPTYEDEDDDMTDGELADEENDDESSAFPAEVVSENEEHMAFLPNSKINMIHSAEFESISSYDEEKDDEIDDHMEDEYNEDLLPGDQSEVSNDLKTLSSIQHALRESSDDTNGSRWSQVRKGTKIMVQVVKEGLGSKGPTLSPFPCLRSRFWILVSRGNKVGVSKKITGIERTRLKGITKLLRPPGFTLTARTVAAGHSWEELQKDLDRLLSTWKGIIEHAQSAALAAEEGVEGAVPVMLHRSKGQALSVVQDDFNEKVKRLVVDSPRTYHEVTNYLQEVAPELCNRVDLYEKRTPIFDEYKIEKEIDNILCKRVPLHNGGSLVIEQTEALVSIDVNGGHSMFGQGTSQEKAILEVNLEAAKQIARELRLRDIGGIIVVDFIDMTDDIFEEMKKAVEKDRSTVGVSELSKLGLMEITRKRVRPSVTFMISEPCPCCHGIGRVEALDTSFSKIEREICRRLAASGHKSDPEKPKSWPRFVLRVDHEMCTYLTSGKKTKLGLLSSSLKVWILLKIARGFARGAFELLPYSDEKETDERKEETSESPPKEAGSPKLSVFPIKKWMSRAKRAK

SEQ ID NO: 105750 - protein, 251 aa, Oryza sativa
  unsure (1)..(251): unsure at all Xaa locations
  Clone ID: PAT_MRT4530_102967C.1.pep
MSSNNSMEANNGDDEKKQEQVVCVTGAGGFIGSWVVKELLXAGYRVRGTARXPRKNAHLLDLEGAKERLTLCRADXVLDFASLRAAFAGCHGVFHIASPVSKDPNLVPVAIEGTRNVMKAAADMGVRRVVFTSSYGAVHMNPNRSPDAVLDESCWXSDPEFCQREDIYCYAKMMAEKTATEEASRRRLQLAVVVPCVTVGPILQPSVNFSCHHVVRYLTGAAATYPNAVAAYADVRDVARAHVLVYEHHGA

SEQ ID NO: 105751 - protein, 136 aa, Oryza sativa
  Clone ID: PAT_MRT4530_102968C.1.pep
ENGGTVGWICRRRSPPPRRLALPSAAAPHHRCTPPRRWTPSSPPHCCCCRMRPLPPHLVTVVAVGSPPTHRRRRRRRRPLPPPAPWPPPPPQPTTTWRAPRGGGGGEGGRLRGGRAASWIHLPRRQSRLRTCPAQC

SEQ ID NO: 105752 - protein, 146 aa, Oryza sativa
  Clone ID: PAT_MRT4530_102969C.1.pep
WHPLHPGVRRTPRPARERTQPRPPATVQNGRRPSRNLSPSSSELGSTWHTPSRRRPGSTTPPSPRVQVAKAAAARARRACRRRRPGKSGSRARARGTSPSARRGAARASRLVSPAPCAARTRTRTRRRRPRLQGPTGYGRARRRRR

SEQ ID NO: 105753 - protein, 58 aa, Oryza sativa
  Clone ID: PAT_MRT4530_10296C.1.pep
MVVQKMWMPVDLRLPSGPQAALGILAFEAAAAMSKLLSLHRSLSEQEVSRLRSDTMRS

SEQ ID NO: 105754 - protein, 109 aa, Oryza sativa
  Clone ID: PAT_MRT4530_102970C.1.pep
AAKKTSASLYIHMYCYAKTMAEMAATEEAAKRGLELAVVVPSMTMGPMLQRALNLSSTHVANYLTGAKKSYPNAVAAYVDVRDVARAHALVYERHDARGRKLIPYSEGL

SEQ ID NO: 105755 - protein, 442 aa, Oryza sativa
  Clone ID: PAT_MRT4530_102971C.1.pep
MRPPSPSQQRDTIGLAAWEDEALGQLEAIHHRHPPAGGSPCSCRPSRQRRRRRRRPSFPFLSPRQPQWRGYEPTARRPRRWPSTSLSLLCLQARGERRRAGHRVEGGGASAGWDVPSVAMPSGQGHDRSAVGGDGDELGTTGFDGKLAHLLALRPCHVGEGIVLGSMWARDQRQRSWRCRFDLPSVTARLSWLSGLPRGYVLYGFLRLPRGNRAYRRGTVTLAPTVWETLLTTGEIWFRRSNRHLTGGQTGDLLAVRPAKARRSDRRRRQELAIDLGGSTGVTTSVRPTISRRSDRRYYFGCREHNNVRTQQQRLRLASLADMAPRCATLAVVVVLVAAVVAPPTAVRAAISCSAVYNTLMPCLPYVQAGGTVPRACCGGIQSLLAAANNTPDRRTICGCLKNVANGASGGPYITRAAALPSKCNVSLPYKISTSVNCNAIN

SEQ ID NO: 105756 - protein, 477 aa, Oryza sativa
  Clone ID: PAT_MRT4530_102972C.1.pep
MAGSTSGGGGALSAQAAAALGEGIGLVFGRWTALQMAVENQWGGRDSRAKADQLAESILSWFANSKGKHYYEDLVDMMYDTVSKSFNADFEDGSVEEVAEQLLIMHEECLQSNYSSVEKLRNSRAQGNAVSQSRKMVVDGDDDSSDDEDDDDDGEPSMMDNEAGSAEKMAVDEPKPSKPVPDADGWTTVPPRRGDTSDFEVDGVENLTENDVSDEEIDAEELARRMWKDKIKLKRIKERQQKLALQQAALEESKTKKMSEQALRKKTARVQDGILRYMLKLMEVCNARGFVYGIIPHKGKPVSGASDNIRAWWKEKVRFDVNGPVAIAKYEVKNSMLVDAKRRGVLNQHSLMDLQDATLGSLLSSLMQHCSPQQRKYPLDKGVPPPWWPSGNEDWWISLGLPMGISPPYRKPHDLKKVWKVGVLTGTNESRKRKRPSGHLLTAESEVEMTSLSHVNTTETLQHQYVQGNFVSSPAAV

SEQ ID NO: 105757 - protein, 126 aa, Oryza sativa
  Clone ID: PAT_MRT4530_102973C.1.pep
MALAHGGNSGSGNLDILDIPLQELPQWWNQPTRVQLLDLTRVLAFTANYSFSDRRCTRRQRGACGDFVNLKICRPSLPEVLIWRAIDLVTFDPWQLTLTNSNWGPHGIQASNKNRMYAEIGMSEMR

SEQ ID NO: 105758 - protein, 86 aa, Oryza sativa
  Clone ID: PAT_MRT4530_102974C.1.pep
MDGWKDGCLCLADARRIRRKALYGAWANGLGRSGRGDAQARVRSGNGGGGRARAERPRSSLTGAELHRAMGPIRPSKSNKPIEDTQ

SEQ ID NO: 105759 - protein, 112 aa, Oryza sativa
  unsure (1)..(112): unsure at all Xaa locations
  Clone ID: PAT_MRT4530_102975C.1.pep
SQIRSLERGRRQLTLRLSPGRARLHLIAFIGHRLSHGVNXIYHLVINPXNVSPDKNFSVGHPSQIAPGQACLTLEFFGDQLPEKKLQLVDMSILLILLTPRSGCHTGQPPRH

SEQ ID NO: 105760 - protein, 83 aa, Oryza sativa
  unsure (1)..(83): unsure at all Xaa locations
  Clone ID: PAT_MRT4530_102976C.1.pep
GGVFFLGIIRLXGFMIYSPKIKGAKQNRPHRGRGGRPGNSGPAPGGDPGIPKGSRRRPRQTIGMAVSCAKKSSAHNATQQTSR

SEQ ID NO: 105761 - protein, 424 aa, Oryza sativa
  Clone ID: PAT_MRT4530_102977C.1.pep
MAAAAVTKSPPALVPPAGPTPGGSLPLSSIDKTAAVRVSVDFIQVFPSSAEAAKDQAASVAAMREGFARALVHYYPVAGRIAEPVPGEPEIDCTGEGVWFIEAEASCSLEEARNLERPLCIPKEELLPRPPPEVRVEDTVLLAQITKFTCGGFAVGICFSHLVFDGQGAAQFLKAVGEMARGLPEPSLKPIWARDAIPNPPKPPLGPPPSFTAFNFEKSVIEISLDSIPPRKAPRPRERGQKCSTFDVVTAMMFKSRTLAIDFAPDADVRLGFAASTRHLLNNVLPSVDGYYGNCVYPGGLAKTSQEVKDASLVEIVTAIREAKDVLSTRFLDWMSGGAKENHYNVSLDYGTLVVTDWSHVGFNEVDYGFGEPSYVFTLNDDVNIVPSVVYLKPPKPKQGIRLVLQCVEAQHSKVFGEELQKLA

SEQ ID NO: 105762 - protein, 96 aa, Oryza sativa
  Clone ID: PAT_MRT4530_102978C.1.pep
MSLYAVSIRPPRNLRDLRLGTPRADKALSDPVETKDHVRSGRVRVLAVRINQVVKSEINFPTSRLGVRIRAYSTKAGQESKSLILQENSSDDKAGG

SEQ ID NO: 105763 - protein, 56 aa, Oryza sativa
  Clone ID: PAT_MRT4530_102979C.1.pep
VVTHSLRISIHDNGCVYRTNLVVKLAQFGRNSSSPIAVCYKMAIGVRSWRHERRYY

SEQ ID NO: 105764 - protein, 836 aa, Oryza sativa
  Clone ID: PAT_MRT4530_10297C.1.pep
MPMSRHGALALTTSFLLAAVAVFLPGHAAARQFSTVAISNSPDATVVCALVRPKDVPDDVPGAKLRCTSMPTGEVMSYPSADVPYNAIAAGTDFLCGLMAPNGGHAAMRWWSFSDEAAANRSRPVGRRLYWGPSLRALSAGGPHVCGLSDAHDPTCWEWPGLSLPKGLDFSRIALGRDFLCGVVKGNASAMTCFGGGMAPPAFAGAASIVAVAAGHRHACAVDDDGGMSCWGEGYPDMRPGDLPADMKSMALGRNTTCILDGDDMVRCWGVEVPEEYRRASFVSIEADGDTVCGVLTTNFSVVCWGNERFHGRHLIFNDTMPGACATVGNCSSSCGFVPGSAALCGNGGGEGGEQLVVCQPCKLPLNASRLVVGNGTSKNAAAPTDSGKNRKAVKVAVTAACVGVAALVVAGLVLYLAVVRKRGGKKNATVQLGESSTLTLCRDLEGAVIMPAPEASPPPPPLGCEEFTVKELSRLTNGFAEERKIGSGSFGSVYRAKLPDGREVAIKRAERPRAASGGGRRRRRRYDAERAFRAELRLLSRVNHRNLVQLLGFCEERGERILVFEFMPHGALHDHLHGRVDGHSPLFASWEARLRVALDAARGVEYLHCYAVPPIIHRDIKPSNILLDGEWTAKVSDFGLSLASSSSSSATATPPAACSTSSTAGTVGYIDPEYYRLQELTQRSDVYSFGVVLLELVTGRKAIHRQEGGSGSPRNVIEFAVPAVEAGGVGRIMDGRVPAPRGNEAEAVSRVARIASECVRPRGRARPVMSEVVAELEWAVTLCEESVDRSSAAAQQQNSSRHGGSDVSRSESDDPSPFHTREFAGVGHGRSNSAM

SEQ ID NO: 105765 - protein, 75 aa, Oryza sativa
  Clone ID: PAT_MRT4530_102980C.1.pep
DGTVQHAPSGGYIRRGHAAVPGATAVEGRRRTTPGVMLAGIAWRDVTAGLWRQVEGESFETQLSYAYEPFIFTGV

SEQ ID NO: 105766 - protein, 453 aa, Oryza sativa
  Clone ID: PAT_MRT4530_102981C.1.pep
MAPLSFRCSIETIHAPNLSLGQQQQQQQEEEEEEEEETSISVTKDSKLNDFAFLIPVKLGTPAVQYLVTMDTGSSLSWVQCRPCTIKCHVQPAKVGPIFDPSNSSTFRHVGCSTSICSYLGRTLRIQSKACMEWEDICLYTMSYGGGWAYSVGKAVTDRLVLGGGETTRTTLSLANFVFGCSMDTQYSTHKEAGIFGLGTSNYSFEQIAPLLSYKAFSYCLPSDEAHQGYLSIGPDSSGGVPTSMFPGTPRPVYSIGMTGLTVTVNGEVRSLVSGSGSSPSPSSLMVVDSGAKLTLLLASTFGQLEDAIIPAMESLGYSLNTAAGQNQLCFLTESDRQNYLQRKPPPPSNWSALPVFHISFTLGLTLTLPPKNAFYLDARYRQEFLTIAWKQIYVRSIFPFQYFSDILGLCSSFARDDYLESGYQILGNLVTKSCGITYDIPRKQFRFRTGEC

SEQ ID NO: 105767 - protein, 59 aa, Oryza sativa
  unsure (1)..(59): unsure at all Xaa locations
  Clone ID: PAT_MRT4530_102982C.1.pep
RLRRVALRAQPLPLLQARRRLFSPPRPSRRRRPGAMRARARAISLYYSCTFYYYKFIXL

SEQ ID NO: 105768 - protein, 238 aa, Oryza sativa
  Clone ID: PAT_MRT4530_102983C.1.pep
MSAAISGASLVLSSPPAPGARPQPRPARVSVAAAAPAARRGVVAAAAVSSPAVSSSAGKDAKQIPKDFLHIDDFDKDTIMKILNRAIEVKAMIKSGDRSFQPFKGKSMAMIFAKPSMRTRVSFETGFFLLGGHAIYLGPDDIQMGKREETRDVARVLSGYNDIIMARVFAHQDILDLAKYAAVPVINGLTDYNHPCQIMADALTMLEHIGRIENTKVVYVGDGNNIVHSWLRLAALFP

SEQ ID NO: 105769 - protein, 87 aa, Oryza sativa
  unsure (1)..(87): unsure at all Xaa locations
  Clone ID: PAT_MRT4530_102984C.1.pep
KGDSXAVVDVXHGRAGVRSEEDRRQCGEIXAXLPALXXVAVSHLCRDENKVAHGFAKLGHKARRRRXXHVVXPNEVLVFLQRDADRG

SEQ ID NO: 105770 - protein, 128 aa, Oryza sativa
  unsure (1)..(128): unsure at all Xaa locations
  Clone ID: PAT_MRT4530_102985C.1.pep
VVGLLVMQQLNWVSLLLLLFFMVAALSSFVATAHRELPMARKVDEIGDHLQAKLDNQASSVSVTRATAKAEHDHQEAVMRKCKNGRKNCKXFRPRKLPAXADGKIHFDGHMPFTADYXSVRRHPPSHN

SEQ ID NO: 105771 - protein, 46 aa, Oryza sativa
  Clone ID: PAT_MRT4530_102986C.1.pep
SELGLRAEGSARLRRMARTVAASCVGGQGSKRPRWRHLGVERVGEW

SEQ ID NO: 105772 - protein, 116 aa, Oryza sativa
  unsure (1)..(116): unsure at all Xaa locations
  Clone ID: PAT_MRT4530_102987C.1.pep
MCRRLPAVAFLQIWLREGATAGSLGCRRLPFHQIWRSGGRATGPPSPPXLQWAVERERERESGGRWGRRHHXRVAGLSPPSLFPDLVEGRARHRAVAANSIRLLREREKERGTRAR

SEQ ID NO: 105773 - protein, 109 aa, Oryza sativa
  Clone ID: PAT_MRT4530_102988C.1.pep
MASKVVFFAGGLMGAMGAISGAHLTKSKMRFRNRQGQRKGQNSPLNPCRKGFNRKLTGRKRFQPMFRRPGALGLRMQGCQHLQDVSRKCRCPAIRRMVRSYKESMPMPL

SEQ ID NO: 105774 - protein, 102 aa, Oryza sativa
  Clone ID: PAT_MRT4530_102989C.1.pep
FGTRKSSRLACRAAPGHRDGAQIHRRNARDPDDDHRRRRAKPRRPPPRRRMRTTASSSSSTGGGGRRRKGEGIEAAGVPYAAAPSGPTSYGIGMKVLSMFIS

SEQ ID NO: 105775 - protein, 188 aa, Oryza sativa
  Clone ID: PAT_MRT4530_10298C.1.pep
MGEAINNVDRVSASIVQTSDLSGLVEEEGDTVMEKRDGMYPLQMAQVGEAINNVDRVPASVVQTSVRFKLLLADGKNAVPSDVATPWVVSVARALLCMRASTLRAAAAGTEALREKGEGDGGGGGREKAAAAGGDWACGGGVRGWTGPNLRWIGPEMGREAATLPGAAGGGAALNLLSRRMNCCAAAQ

SEQ ID NO: 105776 - protein, 371 aa, Oryza sativa
  unsure (1)..(371): unsure at all Xaa locations
  Clone ID: PAT_MRT4530_102990C.1.pep
MDLDKSTSTGASLKKLQEDGALPGRGTMEREPGGIEPELVLGRMVAVEDYILCGFLLPPSEFLLLVLNFYDRKFGSGEEQPDKISSWTAKPTLTPSLQSFIDIIDDLRVRGLSGYEVAADFIGLNSETVERRVGQVMISGPRTVSNVPIPLCEKGAAEREAAINEELQIEMGSILQAGARGIGREIAEARAAAASSANERADLAEVREDLQKMRKLVAGNERQRDVDVEDVQQRGRPELPVIVPALALEPYVPLDDVDQNLSVETGMATTSLDLESALADRDRRIQYWRTKFEVAELERTMLEVNKDRAVEALRGCEVWFNSYLWSCCTTMAGVCKELRVPRGDPEESTAGYISWLNGXCAQLEVLCRLPS

SEQ ID NO: 105777 - protein, 984 aa, Oryza sativa
  Clone ID: PAT_MRT4530_102991C.1.pep
MTQSNKFEDLNGRFASLGTGMTQRCEGKCLRSFHAVRDAGEDCQTLGYTRRQFDVSVLNLPLMNDTVFTSHVLHILDGNIHLAFPYLQALNPFLCKNCELEKYQCFACMRLGSAKTDTPEVFPCASANCGYFYHAKCVAQLLFTENEAKALEYTTKIASGVKFACPLHKCDVCKYGENKDEKELQFAVCRRKIAFDDFVDNGVFHFQRAWEGLLPNNRILIFCLKHDIDPKLRTPTRDHIKFPDNPAVTRKPFDVNGMNKKVVKIRLLEDCPPAPLSSDKKSFGTVNRFSSSDVITKKRKVLVSGGTKHCALSAVAREKTSVPSFIPLSSFPVIDKSTERRIHEFAQKVSSDITIEDIQKKLVVPSTHTPVSKNTDKITLGMVQRSVEAINAALHMLENGASIEDVKSVCAPSDLFQLARWKNKLNIYLAPFLHGMRYTSYGRHFTKLDKLEQKTTCGQALVYGTGASKHRLRPEPWGAGPRVKGPGFMDFLGWLWLLRLLREKAVGVIVDRLQWYIESGDTVVDFCCGSNDFSLLLKEKLEASEKSCFYKNFDLIQPKVGIMGLNPPFGFKASLANQFINKALTFKPKLIILIVPKETERLDRKYPPYELIWEDSHQLAGKSFYLPGSLDADNKIMEQWNMSPPPLSLWSRSDWARKHKEIAKTMGHISKNVWCLDDTQRSVVNTGHAQMANEGDDDLDNKERQEEAPLNASVIDQLLSDTYHDPTSSPGDYWTDTNGRSRQPCNYEGRNDPTHEYHAGMGCGSDMSISSSDKSDCEKQTETMSNSEHGHTGSEAHDHVGSAPVEQPTGFADCDEVTSAGIEYHSLENSPLTERPADAAGVQYKMLEDTPPPLDELVPGFSGQPIVSLPGGGRLSAGLQYQRLEDTLSRGTPEAGAGCRQLEDSLPAPPAASEVDAVVAKYLPQTTSDLPALPFVPAPRIPFPGLQFAPRNDLWQGWYPPPEFLSRGMDHPPFMHGSSGWLDD

SEQ ID NO: 105778 - protein, 348 aa, Oryza sativa
  unsure (1)..(348): unsure at all Xaa locations
  Clone ID: PAT_MRT4530_102992C.1.pep
SGHKGIELLXGKAGHNQIFKGRKXDMYNAAFLRCPXYCGVCLSXVVKTFELKTSGATIQGPKILIIHGLXLGXILVIXMENXGVKSDCMXXHRPNLRISFXXMRRYGLKMNPLXCAFGVSAGKFLGFMVHERGVEIILKKIEKIRDFKAPTCKKEVQKLLGKVNYLRXFISNLAGKIDAFVPILLLKKEADFTWEPKQQEAFEELKRYLSTLPVVRAPKAGKPFRLYIASEDKVIGAVLTQEEDGKEYIITYLSRRLLDVETRYVFIERLCLCLYYACTKLRHYLLSSTCIVACQADVIKHMLQRPILSGRIGKRAYALIEYYLAYEPLKSMKGQIVCDFIVDHHVXA

SEQ ID NO: 105779 - protein, 136 aa, Oryza sativa
  Clone ID: PAT_MRT4530_102994C.1.pep
MRRHKRSMRRRHGEELEHGSRRPPLVATADLRTRRRHHVARAYISSSPPSTSRAPGSRRRHLPPRRAWISSSLPYTSRVPGYLVVIASRPPGSSSLLPPASCGRIPVAVAPRLTCAGVLASERASKELEDGPMGLP

SEQ ID NO: 105780 - protein, 114 aa, Oryza sativa
  Clone ID: PAT_MRT4530_102995C.1.pep
GFVWSRKSTRHFHPAFFEPERGFWFKREPNSAPKSWGKLYEVIKAFIPSKKKTLGAIKGGGVFGPQSCLGVWGPASSLPLGPFGEIRAPFYLGTPFWWGPPRSQEYPPRFFRDK

SEQ ID NO: 105781 - protein, 244 aa, Oryza sativa
  Clone ID: PAT_MRT4530_102996C.1.pep
TRQKITPKKNEACEERSVGFTDKGLSSADVISRVFWPLDGEIIKSIRLSSRQDEDFIAWHPDKMGQFSVRSAYMLAVQLANAGESSSSSGNDTKKAWNHVWKCNIPQKVKVFSWRAISNCLPTMVNKKKRNLELSDICSICGLEPEDVAHALWRCPHARRYRDLMSSEMQVQRILHGSGEGSGWILDLLESISEDDRPVFLMSLWRIWYTRNEITHDKAAPYVEVSKRFVLSYVNSLMEIKISI

SEQ ID NO: 105782 - protein, 114 aa, Oryza sativa
  unsure (1)..(114): unsure at all Xaa locations
  Clone ID: PAT_MRT4530_102997C.1.pep
SSSSWASTTTTSAVEAGRRXVHSSREEDXPRVRTPKEDAAPATLQXTSSTPDVVVVPFPSPSTSVGHPGRRSVAXDATPSPPXXACRRIRXTSGGRRGGGGGAAAAMAREQRRH

SEQ ID NO: 105783 - protein, 2017 aa, Oryza sativa
  unsure (1)..(2017): unsure at all Xaa locations
  Clone ID: PAT_MRT4530_102998C.1.pep
MGFVSGIDDFVFPPGQAFQFGSLDFITNDFGNISLLDSDPNQSGRGQASAPFGLPNSAEIYSKIISSESASNYSEEIQSTSTRPDQDDGAYPSILMKLPDDLAAIFTTRMSPPRRSRRDLVSAPIQSSSREVGVILQPLGTVSTEELDGYLSFPGVDSRPTEILEYDNFGYHYDYSNLDDFDEGYEDNYMPLFFGVFMANNETAXQRQAREAEEQRTXQEAERRRLEEERLAQERDRLQREQQEREQAAKEAEDRQQRALEVGRRARELIGQQDVEGTAVFRTLQXNAVAAITLLDTLLQEDAPNHVVNILNQTKPMIASSVPINSSSIRTPTGSRVPSLRFQDYHQPSLSVAAVGSNRRSRDHGERSVHSPVDRHRERRAEQPRSSRRRRPVDLRDTINRRHAXRGYIPHHSPDRYDDDVDGVAAFTSDLRRVDWPAGFKPTGIEKYDGTTNPESWLTVYGLAIRAAEGDSKAMANYLPVALVDSARSWLHGLPRGTIGSWAELREHFIANFQGTFERPGTQXDLYNVIXKPGESLRDYIRRFSEQRNKISDITDDVIIAAFTKGIRHELLVGKFGRKPPRTVKQMFEKANEYAKAEDDVTASKQSGSTWKQKKDAPTTGGSGSANHKDRKRKPEELVATTTPSSRQQSRVNTFDKIMNAQCSHHPNSNHAAKDCFVYKQFAEQYTKKARKPTDGEQSSSKKKDEEDDAPIGFQDPRKELNHIFGGPMAYESKSKQKLTEREINAVQPDTPQYLRWSETTIKFDCSDHPDRVVHPGRYPLVLDPVVHNVKLRRSLIDGGSALNILFAKTLDDMRIPRTELKPSSASFHGVIPGLSXLGQITLPVTFGIRENFRTENICFEVVDFETAYHAILGHPALAKFMAVPHYTYMMMKMPGPRGVISLRSNIKQAVTCDKESCEMAQTREITLAREEIRLAASTTTEGEVPAPKISKNRESDAKTKKIPLDPSDPTKTAANKDIFAWKPSDMPGIPREVIEHSLHVKEGAKPVKQRLHRFAQDRKDAIKEELTKLLAAGFIKEVLHPDWLANPVLVRKKTGQWRMCVDYTDLNKSCPKDPFGLPRIDQVVDSMAGCELLSFLDCYSGYHQISLKESDCLKTSFITPFGAYCYITMPFGLKNVGATYQCMIQRCFSTXIGRNVEAYVDDVVIKTKXKDDLIADLEETFASIRAFRMKLNPEKCTFGVPSGKLLGFMVSRRGIQANLEKINAILNMKPPSSQKDVQKLTGCMAALSRIVSRLGEXGMPFFKLLKKTNNFQLGPEAXKAFEDFKKLLTTPPVLASPHPQEPLLLYVSVTSQVVSTVLVVEREEDGHVQKVQRPIYFVSEVLADSKKRYPQVQKLLYGVLITIGKLSHYFQGHSVTVVTSFPLGDILRNREANGRIAKWALELMSLDLSFKPRTSIKSQALADFVAEWTECQEDTPKEKMEYXTMHFDGSKRLSGTGAGVVLISPTGERLSYVLWIHFSASHNVAEYEALLHGLRIAESLGIRRLIVHGDSQLVVNQVMKEWSCLDDNTAAYRQEVRKLEDKFDGLELTHVLRHDNEAADRLANFGSKRETAPCDVFVEHLYEPTVPRKEITEAVDIQKVSMIDTDWREPFIKFLTKQALPQDKDEAERISRRSKLYVMHKTELYEKSPSGILQRCVSLEEGRQLLKDIHSGICGNHAGARTIVGKAYRXGFFWPTAVSDAGKIVRTCEGCQFFARQIHLPTQELQTIPLSXPFAVWGLNMVGPFKKATGGFTHLFVAVDKFSKWIEAKPIITITADKARDFFINIVHWFGVPNRIITDNGTQFTNGVFKDFYEDFGIKIYYASVAHPMSNGQIERANGMVLQGIKAQVFDRLRPYAGKWVDQLPSILWSLRTTPSRATGQSPFFLVYGAEAMLPSEVEFESLRFRNFKERYGEDRVDDLNRLEEAREAALIQSARYLQGLRRYHNRNVRSQAFLVGDMVLRKIQSTRDRHKLSPLWEGPFIISEVTRPCSYRLKREDGTHVDNSXNIEYLRCFYA

SEQ ID NO: 105784 - protein, 60 aa, Oryza sativa
  Clone ID: PAT_MRT4530_102999C.1.pep
FCIFLYIPDFVLEGSAGTPFEGGYYYGKLKFPPDYPFKPPSISMTTPSGRFAPHKRICLS

SEQ ID NO: 105785 - protein, 1105 aa, Oryza sativa
  Clone ID: PAT_MRT4530_10299C.1.pep
MAGSRGVGMGVGDPSSPSARAGAAAEEEAGAGKVKLLCSFGGRIAPRQGDGALRYVGGQMRLISVPRVASFGELMRKVEAVDDAGGAGGGGGGGVLVKYQLPGEDLDSLISVSCTEDYENMMEEYEKLAAAAPDGSAKLRVFLFPASGSEAAAAGASGSGSHLAAAVDESGQRYIDAINCVSAESAAVPPPSLPPEYLYSGGNKYHGAFPDSLGFSAVTASSPAMGIQAQNHIMVRTEPLPPQPHQVASYAPSHQPPQVASYAPHQQPQVASYAPQQQQQQQQPQVASYIPQMAQSFREPQQVQYINAQQLGVHGVPQSVNFVPVQMSPYMPSIPVTNSMPTSAAQVGTMKPASPASEPVLENVHNTRPMQATGDQSYRVLQPLSQLPPLPPVHLQTSDAHRYGVQTVMTSSASTPLVTTSGTIPMVISSATMPALRYDDCTMCQKALPHAHSDNMIQEQGTPHGVNNPDAAPVFYSLHQENVTKQHIPGATAGTPANYINSNNQVPDPFREYGHDLPHDYVRAINAQMQGVHLGPIAPPESSVQGKPASPHGAIGDGKLEKPSHVNIGGGSIYKSQAGGYHLGITNAFSAPAEDNLVRHTEQSSSAFDSQHLHSEIGHQLNVLQNVPVSNNLGVPAKPHISNERFLARPASAGVQVPVEHSPLRPAEMLNHVVSAPPNGNSQIPLQATAGIDSVEATRDPAYTDSLFSNQDPWNAVGNASVAPPRLNKLAKEPADIYPEPSQMSKGYGEETIKRQLQAVAEGVAASVLQSPFPEKPTVFSGDHTDKQGAVIDPKLEDAVNNQSDKTSQGVKVLDDIDNLQIIKNSDLEELRELGSGTFGTVYHGKWRGSDVAIKRINDRCFAGKASEQERMRTDFWNEADKLASLHHPNVVAFYGVVLDGPGGSVATVTEYMANGSLRQALQRHEKIFDRRRRLLIAMDVAFGMEYLHEKNIVHFDLKSDNLLVNLRDPQHPICKVGDLGLSKVKCQTLISGGVRGTLPWMAPELLNGSSSLVSEKVDVFSFGIVMWELLTGEEPYAELHYGAIIGGIVNNTLRPPVPESCDPRWRSLMEQCWSSEPSERPSFTEVGKRLRAMATPSTKAQPQK

SEQ ID NO: 105786 - protein, 249 aa, Oryza sativa
  Clone ID: PAT_MRT4530_1029C.1.pep
MKPRAKPSRWRSRSPRRRLVRSPHATAPNPSAAAPDPPPPPPWSSSWSSSPPDPPPPVLSAAELAPERGGEQPVSSPPPDPPAAPEELRFRCTVCGKAFASYQALGGHKSSHRKPPSPGDHYGAAAAAQQLASAGDSKEDSASSAAGSTGPHRCTICRRSFATGQALGGHKRCHYWDGTSVSVSVSASASAASSAVTASASGSGSSSVRNFDLNLKPVPETVAAGVRRWGEEEEVQSPLPFKKRRLSSP

SEQ ID NO: 105787 - protein, 210 aa, Oryza sativa
  Clone ID: PAT_MRT4530_102C.1.pep
MMNEAEREAVAIQLGWISDLLADTERLIASNRGYVRDLLESIDDGTCPFTFAELQDEIRDLRESRAVDAALDGIKEMLDDVRAILTRASSHGARDHKLKFRALQQMAYLTFCHSGEVRWQRICHFVLRYMDILPQTRRGEIKTAHLYKNTGTGYERVALYSDLIITFQLSKIEHNIPHRKFMINHIIYRYPRKVGNYSKCQNAQLFMHTF

SEQ ID NO: 105788 - protein, 460 aa, Oryza sativa
  Clone ID: PAT_MRT4530_103000C.1.pep
MDFFKSILAEPEPGPSSPPPPPETETEQEHAGSTSTPPTDDDVGGGGGGGGGGGWGFGGLLKTLTSQSETVLEAYRRDLAEFGTGLRRETEALRDAAARAARDLPAHAHALDGLADIVAQGKDAIAQVAAAAAAAPATGHSDGGGGESEPSSASGQVRYSRFEAQLRALQSDPATFTSDPEDSDDFAAWRVGFSVDERSGEIEALCYESDALEGMVEKLVPGTVESEVFWARYFYRVHRLKQQEDARAKLVKRVFAAEEDEEDLSWEVDDEDEEEQQRAEANEEGSKQEPIEEDVERVAGDKESERIVEEKEVEAVEESRGLEKEQQNADAPQPEVFGSSMVVVDKREKEEASVSNIEESSDKKAVTEEPRSSTGDDAVKDGAKHETSDSSKDSDYSMVSRQRTTTEEEDLEWDEIEDLGEHEEKRGSNNDSSSALKEELRKRLSVAEDDEDLSWDIEDD

SEQ ID NO: 105789 - protein, 50 aa, Oryza sativa
  Clone ID: PAT_MRT4530_103001C.1.pep
VSRLVGLSLYLTERQKSAFLFCKARNWIVLSAPPGASMAVLLSALLITIV

SEQ ID NO: 105790 - protein, 375 aa, Oryza sativa
  unsure (1)..(375): unsure at all Xaa locations
  Clone ID: PAT_MRT4530_103002C.1.pep
PASISLPGEVGEPAQAAGRCGWSRSLPTSRSSSEKGVTPWRAVRSSTWCAVPPSRTVISVCTAAFPXPSHAAASPSLFPVAVATADNLRVNLVSYVVELVNAAKGKVNMEYMRLVVDLMVKRGWYFSEATFGDGILAKPQPDDGKMSIFSNIWAVKEDLESTAHDTMGPLSVLSTGNRTQAFLWETGKKMLEPAAISLNKIVLNHYMENGTPTFAASLQQINAARASFCLPMDKSPPTADFSPLPTYRHLSSHSPAPAHRVGKPRRAAVEELLGRHGDELPGGTGRCLSVNPSTTPPPLEIRHWGDGRRRRDPRAVVAGDGCGHRRADGREARSWRAAVAVVDGLMGGRSATAAVARSWWAPDDGHAWRHGSLFL

SEQ ID NO: 105791 - protein, 242 aa, Oryza sativa
  Clone ID: PAT_MRT4530_103003C.1.pep
MGRARRSAGGGLHCCLAFLFKFLSFLQAFAAVSALLYAAWILSRWARHHHLHLQDLLPDLWFVCALMAAGLFYCLLLLAGCVAAEINSPCFLCFYTILAVVMMLLEAALAADLFFNKHWIQDLPYDRTGELDNLLSFIQTNLDLCKWAALAIVATQALSLLLATILRSMLSTPSADYDSDEDFVVIRRPLLVAQGAPAYLPTTADTRGFHPDLWSSRMRHKYGLNSSNYTYNTLDPNAPPPQ

SEQ ID NO: 105792 - protein, 96 aa, Oryza sativa
  unsure (1)..(96): unsure at all Xaa locations
  Clone ID: PAT_MRT4530_103004C.1.pep
GRSGGIEPISVDRCWGCGGLDTPIVHLLQSQPLAQQEVKALCXKAKEILMEESSVQSVTSPITIXGDIHGQCHDLVELSRIGGKSPXTYYLFMGDY

SEQ ID NO: 105793 - protein, 264 aa, Oryza sativa
  Clone ID: PAT_MRT4530_103005C.1.pep
MTGFGLLAQTISSGLVDTLMREQLRKRRPGGARIGEMSNEIFNVVLDEIIVDLNNRFAERSTRLLRCITCLDPRNSFTNYDEDKLIELAKIYAADYFEYDCIVFRDQLDTFICDAKKPASTNAEEPSSPTRGGQQQDSRRLRTLSDPELDLLITLKDLAMVCTENASLAVLGHDYDLPTLRALGIVLLETLKERLKETSIDPSVFDRLALLSDSDAYFPSIASDSESEAVRSKTPMGANGKRKQTQAGWLSEEGRKKRTPASQG

SEQ ID NO: 105794 - protein, 269 aa, Oryza sativa
  unsure (1)..(269): unsure at all Xaa locations
  Clone ID: PAT_MRT4530_103006C.1.pep
MANICANMKRCFSPPALRAYFAEFFSTFLFVFIAVGSTISARMLTPDETSDASSLMATAVAQAFGLFAAVFIAADVSGGHVNPAVTFAYAIGGHITVPSAIFYWASQMLGSTFACLVLHYISAGQAVPTTRIAVEMTGFGAGILEGVLTFMVVYTVHVAGDPRGGGFGGREGXAATALGALVVGAVTGACVLAAGSLTGASMNPARSFGPAVVSGHYSNQAVYWAGPMVGAAVAALVHQALVFPTVPEPAPAPATNESARHGSVQTVVV

SEQ ID NO: 105795 - protein, 73 aa, Oryza sativa
  Clone ID: PAT_MRT4530_103007C.1.pep
MLKNSPAFIDLTKEECFKKDQRKLTFPLTSDFVVKSCPHNDPPINMHSTYHSCHFEGLTFGGQRSFVEAFRGV

SEQ ID NO: 105796 - protein, 45 aa, Oryza sativa
  Clone ID: PAT_MRT4530_10300C.1.pep
MRGFPRSALTQSGRAGADVVPSWQPRGPAGGGRWGRPRWTADGGD

SEQ ID NO: 105797 - protein, 90 aa, Oryza sativa
  Clone ID: PAT_MRT4530_10301C.1.pep
IALFTHGTCGSHFRALSNIPHCCLLIEVRALFKPDVTDQPLRTVTDKWLGRLLLHQLPNPNRPISQLLTHFYIQFFIVPRKEQHLYLDCG

SEQ ID NO: 105798 - protein, 33 aa, Oryza sativa
  Clone ID: PAT_MRT4530_10302C.1.pep
MDSCQPSGAPSMGGAVGTSEVELLGGVGTPPLG

SEQ ID NO: 105799 - protein, 110 aa, Oryza sativa
  unsure (1)..(110): unsure at all Xaa locations
  Clone ID: PAT_MRT4530_10303C.1.pep
EILRRRGGPLRSTAARTRTFRSTGRRRRDQGLEVVDNSYFITEDNVGXLKLSKEANSILFDYRIPLSXSESAAXXAVSSDNSHCNGMVMNXLPISIYAPETXGCAXVDSS

SEQ ID NO: 105800 - protein, 190 aa, Oryza sativa
  unsure (1)..(190): unsure at all Xaa locations
  Clone ID: PAT_MRT4530_10304C.1.pep
VVDNSYFITEDNVGMLKLAKEANSILFDYRIPLSGSETCGAQAVSSXNSHGNGMVMNGLPISIYAPETVGCAVVDSNGHTAAAMSTGGLTNKMTGRIGDSPLIGXGEGNAIIRSTLARDVAAGLQEAIDYCVKERLDEGFIGLIAVSGTGEVAYGFNCTGMFSGCGFLSDTVLHQAHLSHLDFIEENQPP

SEQ ID NO: 105801 - protein, 237 aa, Oryza sativa
  unsure (1)..(237): unsure at all Xaa locations
  Clone ID: PAT_MRT4530_10305C.1.pep
SARDAPRSRXCGSQRHGGDCPQQPPPARGPARRRARRGPPRSVPLHLFVMGCYLGGADACAELVESGKLSVMVKRLGEERLMQELASGREGEAEHAVDAAAEKEEHAGHRAAAGSGGDEGDDDTDEKERIPSGVASAGHAXTPTTTMPTARGLPPPQAPPPPPLPTGRHALDCPPXRRAFAPLRFAGRRACTPPPRPPSFSPASPLPGYREVRERXSNVDNPDMWGPRGSYGDSAAT

SEQ ID NO: 105802 - protein, 334 aa, Oryza sativa
  unsure (1)..(334): unsure at all Xaa locations
  Clone ID: PAT_MRT4530_10306C.1.pep
MARWAIAIHGGAGVDPNLPEHRQEEAKRVLARCLQVGVDALRSGAAALDVVEAVVRELESDPFFNSGXRGSALTRLAAVEMEASIMDGRXGRSGAVSGVSTVKNPVSLARLVMDKSPHSYLAFDGAEQFARDQGLEVVDNSYFITEDNVGMLKLAKEANSILFDYRIPLSGSETCGAQAVSSDNSHGNGMVMNGLPISIYAPETVGCAVVDSSGHTAAATSTGGLMNKMTGRIGDSPLIGSGTYACGACAVSCTGEGEAIIRSTLARDVAAVMEYRGAGLQEAVDYCVKKRLDEGFAGLIAVSSTGEVAYGFNCTGMFRGCATEDGFMEVGIWE

SEQ ID NO: 105803 - protein, 282 aa, Oryza sativa
  unsure (1)..(282): unsure at all Xaa locations
  Clone ID: PAT_MRT4530_10307C.1.pep
MVVSIITRALILILGYAYPAYDCYKTVELNRPEVEQLRFWCQYWILLAVLTVFERVGDNFVSWLPMYSEAKLAFIVYLWYPKTXQGTSYVYESFFKPYIGKHEAEIDRNLLELRTRAGDMAVHYFQKIADYSHTRFYEILQYIASQSEAQRSRPQAQQHQQRPPPPRTRQVNPAPPPVPSPSAPPLPPQPPPPRNQAQADKAPIPVAPPGAAVPPAQPQPQPPQAGAEAVTTESTEATQAANPPATTASNPHQAPVIPDEETLIQEAIRMTRSRLRRRMGGA

SEQ ID NO: 105804 - protein, 182 aa, Oryza sativa
  unsure (1)..(182): unsure at all Xaa locations
  Clone ID: PAT_MRT4530_10308C.1.pep
QVSCSARSSLHRLVVQHDDVLAADLPAQCRRHGRRRGGGREGEAEHAVDAAAEKEEHAGHRAAAGSGGDEGDDDTDEKERIPSGVASAGHAXTPTTTMPTARGLPPPQAPPPPPLPTGRHALDCPPXRRAFAPLRFAGRRACTPPPRPPSFSPASPAQTGMTPRLRGRQSARWKTRLKSRQT

SEQ ID NO: 105805 - protein, 159 aa, Oryza sativa
  unsure (1)..(159): unsure at all Xaa locations
  Clone ID: PAT_MRT4530_10309C.1.pep
MRRPRQRGVHRQSHARGNSGSGRSLSSGSIVGGFFLARAAEGDGSRVEPRGDALRRRDVEHDKRAVRAKAEVVGGRPLSSLLLMLTPACICVGGXGGAATATWMGSLNSXRIRGMAKLEEPVGPRMGNSAPTTRITTTTTTRPRAGRWPAAGRPCVVAA

SEQ ID NO: 105806 - protein, 1140 aa, Oryza sativa
  Clone ID: PAT_MRT4530_1030C.1.pep
MSSGSAVTGGGGGGAEDAAAVALGQKLPVHVAENGHTFEFKCGGETPVEAIQRTIEGLCGIPPADQLLLCGNTSLDGAHHLAYYQLPRDDREVFLYNKARLHDGAPRPAPESIEIPQPSIPPPPRPQDSPPLDVSSDPALKALVSYETTFRYHFQVGNAVYQSSVAKHEVCCRLLREGQVQERALDTARSNLEHTARKLTQRYSDFVKCFSQQHRGHAEMLANFERDVERLRAVRLHPALQCEGRRSLIDLVKENDLRKLADGCFSSHKQFDVKVSQHKAKFMELKKRLENLFNIMSSTGCKDLEAMIKEHEKFIGDQKIIMQSLSKDVTTSKKLVDDCSNCQLSASLRPHDAVSAVGRIYEVHEKDNLPSVHNIDRLFTKLLEKCKAKKNEMNTLVHVSMQRVKSAQIVIKEMMNELHAFQEVMGHQDKIFDSLKLASGMGHAYRACLAEVVRRKSSFKLYTGLAGQLAEKLATEREAEVRRREAFFRTWSKYIPEDIMGSMGLFDSPSQCDVTVAPFDCNLLSIDVDDVEKLAPQSLVGSFLKSERSQLPKSSLSNSGTSGNLSKSEQYPPNADDKMDFQDFLGGFDSVDIAGTSKLEVENARLKAELASAIAVLCSFGAEYGYESIDEGQIDNVLKDAREKTAAALSAKDEYANHLQAMLTAKQNQNLSYEKRIQELEEQLANQYIQGHVISGSKDASDSLLSAFKANDCNLHISGGRQTQVRDESSVAMDEASSTSEQPSKQTEGGDENMTDISGALNLQLLDPIARTNLDAFMAELPPDSEHKIVDSDKEGQVLTQFTTTDTSGVRPEDPLGILNSRTNEHHTSELRNKELLVSELQSTLEDKSKRLDETESKLNALVDEVNSLKKELEHTQGLLDESQMNCVQLENCLHEAREEARTNKCSADRRAVEYDALRSSALRIHGLFERLNNCVTAPGMSGFADSLRALALSLASAKKDEGDTTIQFQQCIKILADKVGFLSRQSAELLERYSRIVRVLEEKKESIKNLYSKLQLEKQASKEKISFGRFEVHELAVFVRNPAGHYEAINRNCSNYYLSEESVALFTEQHPRHPAYIIGQIVHIERRIAKLPSHGDQMEASRLDSGGRRSPASMLNPYNLPVGCEYFLVTVAMIPDNIR

SEQ ID NO: 105807 - protein, 179 aa, Oryza sativa
  Clone ID: PAT_MRT4530_10310C.1.pep
MQNDEATIPFVYQVKNFNDTVSQMEANLGHQKLSKLLAKSLFLISIGTMDLSVNTWRVLRYSRKPSPFNIPYTLSSYKAIIMQLYGLGARKFGIINIQPLGCQPWMRKNLENNVDCNDSMNSLAREFNDGLKPLFSNLSSQLSGLSYSIADFYAFSNATFMNPRAYGFVNINSTCCITP

SEQ ID NO: 105808 - protein, 178 aa, Oryza sativa
  Clone ID: PAT_MRT4530_10311C.1.pep
MAALSQLVLVAVVSLVALLPLGMAATTYEYCFMRYYSSYNFIGDVDTREDASVTLRRWPDMDNPKAFQKVVGKAMVKATTQAVSVGGNGLGRAKEQYTPFVSVYALAQCTRDLAPPACAQCLSSTVSKFDKACGAAQGCQIDYSSCWARYEIYPFYFPLEANGRATIDMNKYTKVTMH

SEQ ID NO: 105809 - protein, 276 aa, Oryza sativa
  Clone ID: PAT_MRT4530_10312C.1.pep
MAALSQLVLVAVVSLVALLPLGMAATTYDPIGSFCSETWMNYGDLNSSEAVTRRRAVNFVVSDLVAKARTGGGFATSKAGRGSEVFYGLAQCRGDVSGGDCDACLAQAAKQMVSNCNYTSDSRIWYEYCFMRYYSSYNFIGDVDTREDASVTLRRWPDMDNPKAFQKVVGKAMVKATTQAVSVGGNGLGRAKEQYTPFVSVYALAQCTRDLAPPACAQCLSSTVSKFDKACGAAQGCQIDYSSCWARYEIYPFYFPLEANGRATIDMNKYTKVTMH

SEQ ID NO: 105810 - protein, 129 aa, Oryza sativa
  unsure (1)..(129): unsure at all Xaa locations
  Clone ID: PAT_MRT4530_10313C.1.pep
TDQPPLPLLPRNSRSASPPPRSLSPSPVTPGSASHPPRSLLDWPPLSRFSPPFSLPLGSLPPPXARSPPKMATPDPSLRRIARSLPKTVTPAXSPPAARRRRRCPPPPPHSPPAEDDDARLFLPALALH

SEQ ID NO: 105811 - protein, 38 aa, Oryza sativa
  Clone ID: PAT_MRT4530_10314C.1.pep
GIKGKMKIALISWEMHYDCTMCQKFSVNSGLQLTCSTS

SEQ ID NO: 105812 - protein, 93 aa, Oryza sativa
  unsure (1)..(93): unsure at all Xaa locations
  Clone ID: PAT_MRT4530_10315C.1.pep
ERDRSTHIERERGKMQIFVKTLTGKSITLEVESSDTIDNVKAKIQDKEGIPPDQQRLIFAGKQLEDWPHPXPTYNIQKXSTXHLVFRLPRRQE

SEQ ID NO: 105813 - protein, 101 aa, Oryza sativa
  unsure (1)..(101): unsure at all Xaa locations
  Clone ID: PAT_MRT4530_10316C.1.pep
YSPVCLISPSKRSVRGHNPRPIEPSSRYYNVTTTHDTASSAPVSLYPMAFASFVVAGAGDGIHPRTASLIHPIPGGQIKAPAXSCVYILDGEWSNRGGGFR

SEQ ID NO: 105814 - protein, 148 aa, Oryza sativa
  Clone ID: PAT_MRT4530_10317C.1.pep
STRPQNDISATRASMLCKIVFLGLLCGLASAQSNYDLLKDAYWSTVTEQSDSHCRIDVQFYYRNYLAMNTGITCATPGLFAGTFALSATDMYIQYASTPEGVSGLALMKFAYAFTNNGNTLTLTAAGLVPVVLQKQPADPFRMVFGMA

SEQ ID NO: 105815 - protein, 282 aa, Oryza sativa
  Clone ID: PAT_MRT4530_10318C.1.pep
MARRVSTTRLLLLLLLVAAAAAAAAAGDQEDPRGGGDNGTARLDRRTKMFLHAARASDGGATGMEKAGLGLFDAFFASLSMILVSEIGDETFIIAALMAMRHPKSTVLSGALSALVVMTILSTGLGRIVPNLISRKHTNSAATVLYAFFGLRLLYIAWRSDSKASQKKEIEEVEEKLEAGQGKSTFRRIFSRFCTPIFLESFVLTFLAEWGDRSQIATIALATHKNAVGVAVGATLGHTICTSFAVVGGSMLASKISQGTVATIGGLLFLGFSLSSYFYPPL

SEQ ID NO: 105816 - protein, 45 aa, Oryza sativa
  Clone ID: PAT_MRT4530_10319C.1.pep
AESYEAESALDILHYLRLLTDVVLVNVVSAPSSINLSLVMWFFPT

SEQ ID NO: 105817 - protein, 91 aa, Oryza sativa
  unsure (1)..(91): unsure at all Xaa locations
  Clone ID: PAT_MRT4530_1031C.1.pep
AARGRRWSAWCGEGXDGWRGVESITHKVFDRRAMEERMSSDTVIAMDELDLWIWLGRQGLGLKASDGRRRAKAVGHARAASKPTRGDTACG

SEQ ID NO: 105818 - protein, 74 aa, Oryza sativa
  Clone ID: PAT_MRT4530_10320C.1.pep
MAMMSRREEEVEERRLTQRAFYTESELARGCVARAGPSDLDPTVQIGRGGYPSQARIFFRNNPGVPDIYVPMCC

SEQ ID NO: 105819 - protein, 41 aa, Oryza sativa
  Clone ID: PAT_MRT4530_10321C.1.pep
IYMNLSSQSPDDVDFILTYRTIILFIRQKHKVGWSLGRHYR

SEQ ID NO: 105820 - protein, 575 aa, Oryza sativa
  Clone ID: PAT_MRT4530_10322C.1.pep
MSASGGLSLVRRAVEAARRTPRWQKRLLVLTAGVGSLTYACQDNQVLQINDGTGKKRVVIVGTGWAGASFLRNIDTSLYDVHVVSPRNYFTFTPLLPSVTCGTVEARSIVEPIRNIVRKRGGAFRFWEAECYKIDPTNKKIHCRSDSDGNSEFVVDYDYLVVSVGARPNTFNTPGVVENCHFLKEVEDAQKIRKSVLKCFERASLPNLTEEERKKNLHFVVIGGGPTGVEFAAELHDFVNEDLAKLYPDVKKYANISVIEAGDHILTMFDKRITQFAEDKFKRTGIDLKTNFKVVKVSDKAITMTNSATGEIAVPYGMAVWSTGIGTRPLIMDFMKQVGQANRRVLATDEWLRVHGCDDVYALGDCATITQRKVMEDIASIFRVADKDNSGSLTVKKIKNVLGDIYERYPQVELYLKTNQMKDFHDLLKDSDGNAIKESKELNIEEFKKALARVDSQVKMLPATAQVASQEGAYLANCFNKMKYCEENPEGPLRIRGTGRHRFKPFRYRHLGQFAPLGGEQTAAQLPGDWIHVGHSTQWLWYSVYASKQFSWRTRMLVVSDWGRRFIYGRDSSSL

SEQ ID NO: 105821 - protein, 127 aa, Oryza sativa
  Clone ID: PAT_MRT4530_10323C.1.pep
SMCYMEDNMISDKGVYSNDLLMLRWKIPLLRSIASIFSTRPSSKEPTTVEELWNENACVEECSSIMYHLLMLCQVLPVGRDMFACSLAFKEVASSYSCRGAVTSIFSQIQTSNKDESQKVRVRPVMT

SEQ ID NO: 105822 - protein, 43 aa, Oryza sativa
  Clone ID: PAT_MRT4530_10324C.1.pep
NSNCVTVSPSIMSTTCLIRQSSLYNVHSCTKLKVHIACLNLSI

SEQ ID NO: 105823 - protein, 45 aa, Oryza sativa
  Clone ID: PAT_MRT4530_10325C.1.pep
ATPPRKPPPSLLMDLLRCFAQFSYVLACQGPKTRVHACINKCSAK

SEQ ID NO: 105824 - protein, 99 aa, Oryza sativa
  unsure (1)..(99): unsure at all Xaa locations
  Clone ID: PAT_MRT4530_10326C.1.pep
ASNPTHHRXDXVAGERRRAARVERIAXXXYSXCGRHVLHPLLPGHLPVRRPVEPPPNQTLPKTPRRHRRVPPRWRQRAGALPAPLPKEACPARRGASRG

SEQ ID NO: 105825 - protein, 78 aa, Oryza sativa
  unsure (1)..(78): unsure at all Xaa locations
  Clone ID: PAT_MRT4530_10327C.1.pep
FFFFFFHPVKTQLTRLLSQTXVHSPHSLWVTRAPHHNTTHEGGAHHYPPSWYIVVTIPPIXGDIVXRRNPILISPPSL

SEQ ID NO: 105826 - protein, 590 aa, Oryza sativa
  Clone ID: PAT_MRT4530_10328C.1.pep
MEASAMEEALSKKTTSKGGLRTIPFIISNEVFEKVATFGLHANMILYLTERYHMTAATGTVVLYFWNALSNFLPIFGAVLSDSCLGRFRVIALGSVVSLAGMCLLWLTAILPADRRTPECEARRDDCQLVPWQLPLLFASFVLMSVGSGGIRPCALAFGADQLDRRDNSARNVRTLQTFFNWYYTVLGLSIVLASTVIVYIQQAKGWVIGFAVPVVLMLTALTLLLLGSPFYLKAEADRSVLVGLVQVLVASYRKRRGPLPPETADASRFHNRAGYKPRTPSNRLRWLNRACALGDNPDKEVNPDDGSARDPWTLCTVQQVEDVKAAVRVLPIWSTGFMPGVIIGQQMFPVLQAKTMERRVGGLEIPAASFGVFSILTLTVWVAVYDRALVRPLSRLTGHARGVTLRQRMGIGLALFAVAMAVAARTEAARRAEALAEGLRDYGPQSGRAVRMSAMRLVPQHCITGLAEALNLIGQIEFYYSEFPKTMSSIGVSLLALGMGFGSVAGSAIVGAINAGTRSGGGRDSWLSSNLNRGHYDYYYLVLAALCVANLAYFVWCGWAYGEEGQNRVTAEEEAVEDTKTKEEQQQKL

SEQ ID NO: 105827 - protein, 258 aa, Oryza sativa
  Clone ID: PAT_MRT4530_10329C.1.pep
MAAAAASTSLPVPRVSLPPSARPAAAPRHGLLIPGRRGCFRLRGSPAAPAAAASGSPSVPSSSPEAGSGIGDALGGVAIYSAATGEPVLFRDLWDQNEGMAVVALLRHFGCPCCWELASVLRDTKERFDSAGVKLIAVGVGTPDKARILAERLPFPLDYLYADPERKAYDLLGLYFGIGRTFFNPASASVFSRFDSLKEAVKNYTIEATPDDRASVLQQGGMFVFRGKELIYARKDEGTGDHAPLDDVLNICCKAPAA

SEQ ID NO: 105828 - protein, 42 aa, Oryza sativa
  Clone ID: PAT_MRT4530_1032C.1.pep
ISGRRRRSWPGTSSGSRSLGSYSAPFFKYSAPLAGAACLLRI

SEQ ID NO: 105829 - protein, 683 aa, Oryza sativa
  Clone ID: PAT_MRT4530_10330C.1.pep
MTGTKYVSWCLALLLRLAAVAGLADDGQFLYNGFAGVNLTLYGAARITPNGLLKLTNGTVQQTGHAFYPPPVRLRRTPSTKTNGTGNEKAVRSFSSSFVFGIVTADTQDLGGHGVVLVVAPRANLTTGLANNYMGLFNGTGSVGSASNHLFAVELDTIQNPDFRDINNNHVGININDLASRDNDKAGYYDDDDGRFHDMTLISGDAMQVWVDYDGDTTRVNVTLAPLGVRKPARPLLSAMHDLSTVIVGESYIGFSSATGTLSTQHYVLGWSFGVDMPAPAIDAAKLPKMPKRRTRSDQSKTMVIALPILSVVLLLFMVSCVILVRKRYNHGELREDWEVEFGPHRIPYKDLRRATERFKNKNLLGVGGFGRVYKGVLPKSRLEVAVKRVSHESRQGMKEFVAEVVSIGRLRHRNIVQLLGYCRLKNELLLVYDYMPNGSLDKYLYGHNNMPVLSWAQRFLIIKGIASGLYYLHEEWEQVVVHRDIKASNVLLDSEMNARLGDFGLAKLYNHGSDMQTTIIAGTLGYLAPEITRTGKASPLTDVFAFGVFLLEVTTGRKPVERDTEGGIHMLVDLISAHLDRETLPMDMVDPRLEGEYNTDEASLVLKLGLLCSHPLPDLRPSMRQVMQYLDGQLPFPELVPSHTSFSMLSMAQSRGLDSYAISKSLSSMASISQLSSFSSGR

SEQ ID NO: 105830 - protein, 1044 aa, Oryza sativa
  Clone ID: PAT_MRT4530_10331C.1.pep
MAIVLDAFASYVGDLLKQVAQDELTLLLGVSSEIASLHERLNSLKDYLADAERRRITDQSVQGWVRKLKDVMYDVTDILDLCHLKAMQRGGVGSSAPPVNISCLDSLLFCLRNPLFAHDIGSRIKALNARLDAICKSAAAFSFLKLEAYEDMAAPRRPSAADRKTDPVLERSAVVGEKIEEDTRTLVKMLTNGKNKKQNAVVVVAVVGTGGIGKTTLAKKVFNDEAIKEAFDKKIWLSVTQDVNEVELLRMAIRSVSVGGASDGRESNKSLLVPTLVDAIRDKRFFLVLDDVWSDRAWSGLLKVPFSHGAAGSRVLVTTRHDAVARGMQAMHPFHHVDKLCPPDAWSLLKKQVVSSEMEDVEIDETLKDIGMEIIDKCGGLPLAVKVMGGLLCQKERRRADWEKILHDSIWSVPQMPDELNYTIYLSYQDLHPCLKQCFLHYSLLPKNVDFFIDTVTSMWISEGFLHGETDDLEQLGEECYKELIYRNLIEPNAEYAGEWVSTMHDVVRSFAQHLARDEALVISSRDEIGRGALKSHKFLRLSIETDDLQPNDEFGWKIIQGQKSLRTLILVGELKINPGDSLITLSSLRTLHIENANCTSTLVESLHQLKHLRYISLKCGDITRLPENIGKMRFLQYLGLVCENLDRLPNSIVKLGQLSLQELGPLAQLWVLGLSNLENVPAISFAAKARLGEKAHLSYLMLECSSRLGEDGFVQDENGVPTEEQRQIEEVFNALTPPLCIESIEISGHFGEQLPRWMMSRVAGAYERLSMVIMDDLACCNQLPDGLCRLPSLYYFQLTHAPATKRVGPEFLTILPSSSQLRQAHAFPRLKRMNLIGMVEWEEWEWDQQLNSVHAMPALEELVIENCKLRRLPPGLSSQATALTSLYLRNIQQLNSVESFASLVKLEVYDNPNLESITSLNKLQKLVIDGCLKMRILEGVPELLRLELKDLDMEELPGYLLQSVSPRHLVLDCSLEMLTAISTGESGPEWSKLSRVQHVKAYADQGDNERRWHVLYTRDPYRFETNIGISSSSSSGESGDDEE

SEQ ID NO: 105831 - protein, 77 aa, Oryza sativa
  Clone ID: PAT_MRT4530_10332C.1.pep
LVSYYYCTCVRSDQHKVLAIGNSRKAIACASVYYSVSDFLSGSIAVYILKLGLNITVKIKKKKKKKKKKKGGGPAAR

SEQ ID NO: 105832 - protein, 174 aa, Oryza sativa
  unsure (1)..(174): unsure at all Xaa locations
  Clone ID: PAT_MRT4530_10333C.1.pep
MDACFSQYPSATAKHTRNQTISPITETAQLEPARRMLGGEGGARGEVEIPTEEHEDEPEPDGRRGHRPVVSDGHRGRRRRCRNSDLRLWIQLPASAEAEKGMAKVLTGGGCLEAAAKAERLGPSAAAESGAARGGPVAMVXPRWAGREQAEMGRLGGGWGAAEQRRLGLGLLGL

SEQ ID NO: 105833 - protein, 231 aa, Oryza sativa
  Clone ID: PAT_MRT4530_10334C.1.pep
QARGGEGGLNLMHCALQLVKGSMLSKPLVITEERGERAAAAGAGQVKSSPTAGPVPGLEEAIVVFVAAAVSIIIVVAATITVVVVAAATRSRSPKPAALALARLSPPPPLAMTEAGRSACCRPSRSRHAIPEDGGRWIHVPLRLPRTGGDGSACRRPSHLSLAAPKDRGRWIREPPSLPRTGGQIFAPPSLPLHSPPFQRRGVWRWSGGDTRTGSRERGRTDDFVGGGWRA

SEQ ID NO: 105834 - protein, 46 aa, Oryza sativa
  Clone ID: PAT_MRT4530_10335C.1.pep
LHHQLIFGTLPRASSTLGTVGLTKGSHYYDQPNYSTVLTNWAHSSK

SEQ ID NO: 105835 - protein, 104 aa, Oryza sativa
  unsure (1)..(104): unsure at all Xaa locations
  Clone ID: PAT_MRT4530_10336C.1.pep
MAAGSDGKLAGDWMIGCEFGGQVHVEDDETNPTSSGDRRRKRKGGRAFSHHGAPXAAAASGGDGANGAAARLDFDRRRXRLDTRGGGATEHGRGWERGQTKEED

SEQ ID NO: 105836 - protein, 261 aa, Oryza sativa
  unsure (1)..(261): unsure at all Xaa locations
  Clone ID: PAT_MRT4530_10337C.1.pep
MAXGKNKRICKGKKGGKKKAADPFAKKDWYDIKAPSVFQVKNVGKTLVSRTQGTKIASEGLKHRVLEVSLADLQGDEDHAFKKIRLRAEDVQGKNVLTNFWGMDFTTDKLRSLVRKWQTLIEAHVDVKTTDNYTLRMFCIGFTKRRANQVKRTCYAQSSQIRQIRRKMREIMTNQATACDLKELVRKFIPEIIGKEIEKATSSIYPLQNVFVRKVKILKAPKFDLGKLMEVHGDYSEDVGAKVDRPADEIVAEEPTEIVGA

SEQ ID NO: 105837 - protein, 90 aa, Oryza sativa
  unsure (1)..(90): unsure at all Xaa locations
  Clone ID: PAT_MRT4530_10338C.1.pep
FLIQKLGQSLRDWVLYTVIWLLMQTGRAKLVEPTDGHYRTNLAPXYNDQYLHPTENLPKGTGQSDLIGALTQGEPIDDSRPAGADILGGQ

SEQ ID NO: 105838 - protein, 93 aa, Oryza sativa
  Clone ID: PAT_MRT4530_10339C.1.pep
MGSWTGGVLRPQVPVYTAVSLPCGVHHVWVPPASDSVLNFSVALAFFWAEGAVLRAALALGDSIQEDSLLLQSPVPFGVRKDLRALPAWGHQF

SEQ ID NO: 105839 - protein, 259 aa, Oryza sativa
  Clone ID: PAT_MRT4530_1033C.1.pep
MSNDALWCISSHNDGWLMHMDVFKPCIMACDNRHFLKNSFSNATIDIPCRFDRPINAFVVDNRYSTWPERFTLHKIIVCSPDLIVAASRLIDNNIVSFRPGIDTSWSVLPYDDDDGDHKRMYEDIALYRGKLYALTSNGDLLVHEIRDNNTLSRAELVIRGAAAEPPLSHLQWQYSIDDIVHQYRVISCKYLVISCSGTLLMFRCTISPMLGTSANVDDYEIKFKVFEADLEGGQWLEVKSLDGQVVFLRSLLQGDPLF

SEQ ID NO: 105840 - protein, 246 aa, Oryza sativa
  Clone ID: PAT_MRT4530_10340C.1.pep
MAMVLRRLAGASAGGAPSPAAAAAAAALLLRPALARPISTGFREERDTFGPIRVPNDKLWGAQTQRSLQNFDIGGERERMPVPIIRAFGVLKKCAAKVNMEYGLDPTIGKAIMQAAQEVAEGQLDDHFPLVIWQTGSGTQSNMNANEVIANRAAEILGHKRGEKFVHPNDHVNRSQSSNDTFPTVMHIAAATEINSRFVPSLQQLHKSLDSKVKYGIDRIVCTLPRMYQLAQGGTAVGTGLNTKKG

SEQ ID NO: 105841 - protein, 498 aa, Oryza sativa
  unsure (1)..(498): unsure at all Xaa locations
  Clone ID: PAT_MRT4530_10341C.1.pep
MAMVLRRLAGASAGGAPSPAAAAAAAALLLRPALARPISTGFREERDTFGPIRVPNDKLWGAQTQRSLQNFDIGGERERMPVPIIRAFGVLKKCAAKVNMEYGLDPTIGKAIMQAAQEVAEGQLDDHFPLVIWQTGSGTQSNMNANEVIANRAAEILGHKRGEKFVHPNDHVNRSQSSNDTFPTVMHIAAATEINSRFVPSLQQLHKSLDSKSVEFQDIIKIGRTHTQDATPLTLGQEFSGYATQVKYGIDRIVCTLPRMYQLAQGGTAVGTGLNTKKGFDVKIAAAVAEEMELPFVTAENKFEALAAHDAFVESSGAVNTISASLMKIANDIRLLGSGPRCGLGELILPENEPGSSIMPGKDNPTQCEALTMVCAQVMGNQGGGAEGGARXTLSVECFKPXIAAXFLDTEIAGVPLCLEKXCRGFSNLKIHTYCSHESLMLVTSLNPKIGYDNAAAVAKKAHKEGSTLKEAALDLGVLTESEFHELVVPEKMIGPSD

SEQ ID NO: 105842 - protein, 80 aa, Oryza sativa
  Clone ID: PAT_MRT4530_10342C.1.pep
RTDDRSELILLRTHTVTYDSAMGCYHICDAHTAEAFSLSDCKPMHPMTFNDAANDILIIKDDCCMVGELQPACKDTSTRW

SEQ ID NO: 105843 - protein, 59 aa, Oryza sativa
  Clone ID: PAT_MRT4530_10343C.1.pep
PRAPPSQHAGVWPRCRHRRSKQAGARRARSPTPPARPHRPRSPRPAIPPPPPRRQPPAS

SEQ ID NO: 105844 - protein, 180 aa, Oryza sativa
  Clone ID: PAT_MRT4530_10344C.1.pep
YHVTNCWKTSPERYYYQIGVQQRERGIIEMAGRIVNETGSTSLPAHHNWLGAAGLSAARAADIDASNYYRGCWVSDWAITTLIVESFASHIVPPTAFKKTKLALILSLMSGAEDAESLPTEREPPKSGVLSVRDDHSEYDTDDAFEAAVRSQAHDRVSLCVVSDDLLIERLVQFAADLHP

SEQ ID NO: 105845 - protein, 150 aa, Oryza sativa
  Clone ID: PAT_MRT4530_10345C.1.pep
PRAPPSQHAGVWPRCRHRRSKQAGARRARSARRRSRPAHGRGKRPGASTASSRSARRPGEEGGGARRRRQRSPGLKRGERRGGGGRGHRSRRHRGWRGGSRRRGHRRLHQRVPIVLAPPGQRSRRRHRVASRRPHPHHPSAIEAMRGTGT

SEQ ID NO: 105846 - protein, 71 aa, Oryza sativa
  Clone ID: PAT_MRT4530_10346C.1.pep
YCCCCCCCCCCCCCCCCCCCCCCCCFFAFVCQWWIGSPSFLMMSCSTSWTASTPPTLSGPASSLRGRSTSD

SEQ ID NO: 105847 - protein, 65 aa, Oryza sativa
  Clone ID: PAT_MRT4530_10347C.1.pep
MKAVKTGAALSQAPGHPAPSGSVQGPMPPGHQPATAGGAQSLAFIESSCTSVGVDFCGLWAVMPR

SEQ ID NO: 105848 - protein, 82 aa, Oryza sativa
  Clone ID: PAT_MRT4530_10348C.1.pep
MANDEAVCLCAHVQSSLLSVVCCELKAVVSMVTGLEPREQRPLFRGKEREDSDHLKDMVLLLEDPALKDMKLRATLVARATI

SEQ ID NO: 105849 - protein, 139 aa, Oryza sativa
  Clone ID: PAT_MRT4530_10349C.1.pep
WLIVCRQTSAVDHFKKQFAYLEEHYAKGSTAAPPERQHNSLPRPSVLYSDDRPQNTANIAEDLSKCVLGDNTQKMHQGSASVCANRVPQGGAARPGKALGSALRYGNCSTSTAERYEHRRTDRNPALATNTVSPRGSFP

SEQ ID NO: 105850 - protein, 39 aa, Oryza sativa
  unsure (1)..(39): unsure at all Xaa locations
  Clone ID: PAT_MRT4530_1034C.1.pep
GNQEKLFXPVFQMPQRVSLTPQGIPIYFPPTTHVGGRVG

SEQ ID NO: 105851 - protein, 68 aa, Oryza sativa
  Clone ID: PAT_MRT4530_10350C.1.pep
FFFLNPYPTFVHSIWIKVGGQKQGAVTCQWSRVITTNRHETEHENRTTEQYCSLFKQLFNQTCARTHA

SEQ ID NO: 105852 - protein, 53 aa, Oryza sativa
  Clone ID: PAT_MRT4530_10351C.1.pep
MGRLQEYEVIGRHLPTEADPTPALYRMTIFAPNETVAKSRYWYFLRGLKKDKK

SEQ ID NO: 105853 - protein, 697 aa, Oryza sativa
  Clone ID: PAT_MRT4530_10352C.1.pep
KKTNKKIYKGRWKLNRKHGLGCQTYPNGDMFDGSWIQGEIEGHGKYTWANGNTYVGNMKNGKMSGKGTLTWKNGDSYEGNWLDGMMHGYGIYTWNECGYYVGTWTKGLKDGKGTFYPKGCRVPVNDELYINNLRNRGVLPDIRRQNHGSRILHSSSVDMGNMKVGLTRESSGPSSRRNSSEQPHSKNVSLERRWSLEVAIEKFIGHDATGSSGLERSESINDSDLPMLEREYMQGVLISEVVLDRSFSDSSKKAKRRQKKIVRETKKPGETIIKGHRSYDLMLSLQLGIRYTVGKITPIQKREVRASDFGPRASFWMTFPKEGSRLTPSHPAEDFKWKDYCPMVFRNLREMFKIDAADYMISICGNSALRELSSPGKSGSVFFLSQDDRFMIKTLRKSEVQVLLRMLPKYYHHVRTYENTLITKFFGLHRVKPSSGQKFRFVVMGNMFCTELRIHRRFDLKGSSLGRSTDKIEIDENTTLKDLDLNYSFYLEPSWREALLKQIETDSEFLRTQRIMDYSLLLGVHYRAPQHLRTRASYHRSMAADRLTVLSEEDAQEDDAFNYPEGLVLVQRGGDENSVVVGPHIRGSRLRSTAAGFAEVDLLLPGTARLQIQLGVNMPARAEQNPKEEESKSFREVYDVVLYLGIIDILQEYNMSKKIEHAVKSMQYDSISISAVDPQFYSERFLKFIQTVFPENS

SEQ ID NO: 105854 - protein, 67 aa, Oryza sativa
  Clone ID: PAT_MRT4530_10353C.1.pep
METAVAQSHALIKMYLFHDLKLVLHFASDDLEGVPFSMENFLADVTLRMIILFSDLKDMLPPSWRSP

SEQ ID NO: 105855 - protein, 37 aa, Oryza sativa
  unsure (1)..(37): unsure at all Xaa locations
  Clone ID: PAT_MRT4530_10354C.1.pep
GLHCFMGLIKKSHVGGGPASNCFGLNVXWYCSLPYLD

SEQ ID NO: 105856 - protein, 228 aa, Oryza sativa
  Clone ID: PAT_MRT4530_10355C.1.pep
MASAPLPQAAQLGYKLNVFSFWILYLQLRIKSTGTLTNLKARFWTCTEVKQIFQACVYFSHQHAFGTPSGTELRQLFLMAEKQSPASTGKPPNPPGAKSQNPPGTKHPKPPGTNQLSSEVDTENIVPVTIEKISPEQKKEFELMIKSAQEQFMNSIGETRQGKVIQKYKVKVVAADEPGMSSSQGGKAKGVADGSGDKGQGLQDGVVEDVDEDDTEEQESPGCNNFQD

SEQ ID NO: 105857 - protein, 85 aa, Oryza sativa
  Clone ID: PAT_MRT4530_10356C.1.pep
MLSGRSDRPYLGLTEYGSGSSVSGIPERTIPATRGPVRQHKCRRSDRHSCRSDHHKLAGQTGLAHAVRPALVITPLNSTAKLKIN

SEQ ID NO: 105858 - protein, 314 aa, Oryza sativa
  Clone ID: PAT_MRT4530_10357C.1.pep
MAMEKSRVLIVGGTGYIGRRIVAASLAAGHPTYVLLRPEIGLDIDKLQMLLAFKAQGARLLEASLDDHDGLVAAVRQVDVVVSAMSGVHFRSHNLMLQLKLVEAIKEAGNVKRFLPSEFGMDPSRMGDALEPGRVSFDEKMVIRRAIEDANIPHTYVSANCFAAYFCPNLCQMKTLLPPKERVGVYGDGNVKVFFVDEDDVGTYTIKSIDDPRTLNKTIYIRPQDNCLTQNELIAMWEKLSGKSLTKFHIHGDEFLASMKDTHFAHQVGVTHFYHIFYEGCLTNFDIGDNGAEATLLYPEVQYTRINEFLKRYL

SEQ ID NO: 105859 - protein, 79 aa, Oryza sativa
  Clone ID: PAT_MRT4530_10358C.1.pep
QCLRNDDALYQQHCKLLSYWTFCLLPYISLYIFSVLEKHCIQGTFMCLAFSCPLINFILRPFLLHTTGYSSLEKHIIMF

SEQ ID NO: 105860 - protein, 122 aa, Oryza sativa
  Clone ID: PAT_MRT4530_10359C.1.pep
MWAQVYHYETANFQGASLTGIVSLVRPADTRRLDRHISLGQTGPGYSNQSNRRFRGGRRRRASEANDDDDDEEVAGSGGGQRQRGPTLPRAPAPLSHVDMAAATTTTTSFGGGDSNDDDELR

SEQ ID NO: 105861 - protein, 430 aa, Oryza sativa
  unsure (1)..(430): unsure at all Xaa locations
  Clone ID: PAT_MRT4530_1035C.1.pep
PCRCGGGGDGGDAADGVRGVVERGGEEXMRQAXPVVVARRRTTAVESGGVALASVWREVQGERDWEGMVEGTAEEELHPLLRGEIVRYGELVAATYKAFDLDAASKRYLNCKYGKARMLDEVGMAGAGYEVTRYXYAAPDLAAGPPCPSRWIGYVAVATDEAVRRLGRRDIVVSFRGTVTGSEWVANMMSSLAPARFDPADPRPDVKVESGFLSVYTSDDATCRFTCGSCRNQLLSEVTRLIAKHKHEDVSVTLAGHSMGSSLALLLGYDLAELGXNXDARGRAVPITVFXFAGPRXGNTAFKDRCDELGVKVLRVVNVNDPITKLPGIFLNENSRVLGGKLELPWSSSCYTHVGVELALDFFKARDPACVHDLEAYLGLLKCPKVTKVMKEGEDLFSKAKKIVLEQSFDTWRWQMAAIQVGGLVQALGM

SEQ ID NO: 105862 - protein, 139 aa, Oryza sativa
  unsure (1)..(139): unsure at all Xaa locations
  Clone ID: PAT_MRT4530_10360C.1.pep
SRPAAAAARRCSPAACHHHSSHRHRRSPLRARRLGDRRGKHGARPARAEMVAAGSRRGRSWTRRWGHRGDGSGEGGGDGGGRGGGAAAVALEHEAGSXVAQGGEEGKVVRWRGGGEQGEGVDGGGPGRDGLGIDAALPH

SEQ ID NO: 105863 - protein, 131 aa, Oryza sativa
  Clone ID: PAT_MRT4530_10361C.1.pep
MAAPPPRLDYPRSRRLRPTVRLAQLPHVVIESPCNNAMGHRPIAYKTAIPAGVTPSLLRWASASYRPPPTATVDGLLLCRVGFMLSPASASHQSPTIVVHITPTRGRTTSPPWPHYIASPRLHAAPRSFWF

SEQ ID NO: 105864 - protein, 99 aa, Oryza sativa
  Clone ID: PAT_MRT4530_10362C.1.pep
TVVTFLQYRCLDGGYYGRRTMTLKGVNRAREQRAQELALPESCLRGRLLLESNMAKLPEMTPEDMIITTRKDLWDQEYEVQAWEKTLKECESYWGNTRL

SEQ ID NO: 105865 - protein, 55 aa, Oryza sativa
  Clone ID: PAT_MRT4530_10363C.1.pep
LMIQVLTCWPYGHQASAFFFKFITVRVCVLVFVESCGYYADELKDTREAPNRAAI

SEQ ID NO: 105866 - protein, 389 aa, Oryza sativa
  unsure (1)..(389): unsure at all Xaa locations
  Clone ID: PAT_MRT4530_10364C.1.pep
MEKDQIGFTFQAQHCSSLNGSLHHTTTCFSPPSATGARARGKEEPSFASPSCSPQPEAALPLSTAPIASPTAAASASEISPATGDCARGKEPSFASPSGSPQPDVTSPLFHCTSASWTNPNASPISEASGSELPPSSTSSCTSEFSGDSSRDNSATTITSGSKSSPVPSASFPCSISRXAASSRLTSPHGEAAARTEGSPLASSTPPPNRNRSSLQSSSTRGSNLPSGTESNPSPFPLSPGSERSPDHEPSSPGNPSTSEGATRAKWSCRTSPPPPPSPGTSTTKSSPSSSPPPPWAEAAESTSQSLISEAASSSMAVAAVVAPFASGGVFLFCSLQLTTFFGWTFLPPAGWLPFLDFCIISVLTTTLFPFEIFGAFAVLYGRMPTELL

SEQ ID NO: 105867 - protein, 79 aa, Oryza sativa
  unsure (1)..(79): unsure at all Xaa locations
  Clone ID: PAT_MRT4530_10365C.1.pep
AYYSWRLPPPRRLVEVLPGDLSEEIVEEARRRXVSGLEFTTFGVKEELPXVIEAWVVLSMGRLPPYPPLDEGGVRWLRG

SEQ ID NO: 105868 - protein, 170 aa, Oryza sativa
  Clone ID: PAT_MRT4530_10366C.1.pep
MKYSTPERASQGHGPSQARESENAAPCPDFLPCPRCTLPRGSGQRVVHLQRVHQHKSHLRWHGDGDSEWAAHVDQQHKQAKAMPCTSACHFSSTRCPIARGMQSFSKAFVIMFEEMSNHGMAFIIGARLQCRAAAARGGVRNRCSPPAPLTTASWCSSSEFIGGKIREGE

SEQ ID NO: 105869 - protein, 93 aa, Oryza sativa
  Clone ID: PAT_MRT4530_10367C.1.pep
MGKKTESIRAAEELYPQRQTTRDTSIQNQNQTSPRIFTRRTSRGRSSRAPHPHPTKKNKSSTHQIEQDEEEEDDESAIGAEHSHTRPGQSRRN

SEQ ID NO: 105870 - protein, 221 aa, Oryza sativa
  Clone ID: PAT_MRT4530_10368C.1.pep
MPRHAYISPAKTEEAVNWKNYLKQAFVSLTRIETLVIKRCTIGLPQEFEDRDIYKLISSCPWLNMLRLKYLRYLSEGCLLAELPGVFDRLRKICIEKCSWVWTEVLGACSIFRNASKFRELEIRSFYSDEEFWYQPIWDNDQAEIEEPTLHHLVTVTINDFVGLEHEIALVGLLLRWSPTLEELKIVREDADVPNDDCMFRVLTKLLALPRASSKAKIIVI

SEQ ID NO: 105871 - protein, 187 aa, Oryza sativa
  unsure (1)..(187): unsure at all Xaa locations
  Clone ID: PAT_MRT4530_10369C.1.pep
FPSMLSWSTRLNIAVGAAXGLVFLHDAEKPVIYRDFKTSNILLDPEYKAKLSDFGLAKDGPEGDDTHVSTRVMGTHGYAAPEYILTGHLTAKSDVYSFGVVLLKILSGRRAVDKTRPSREQHLVEHMRSWLKDPQKLSRVMDPALEGQYSATAAHKAALVAYRCLSGNPXNRPDMCQVVKDLEPLLN

SEQ ID NO: 105872 - protein, 67 aa, Oryza sativa
  Clone ID: PAT_MRT4530_1036C.1.pep
ILYILYGCYFKVFYILHYTKKTPLHQTPKNLNPTLHIKKNHPHFQTIISQKFQIPIEQFLKTLNPNS

SEQ ID NO: 105873 - protein, 130 aa, Oryza sativa
  Clone ID: PAT_MRT4530_10370C.1.pep
MAANSSNDTVNVASEVSSILSKLNDHLAGADEAKEPAGTSIITLAGENNGATMEVAGDVEDLVVVEAGGDEDDDEEEESVVSAYTNSNYQALNNSVLVAGSCAVKDPGVHVVIVEHVDEIRDYDDDVRDE

SEQ ID NO: 105874 - protein, 126 aa, Oryza sativa
  unsure (1)..(126): unsure at all Xaa locations
  Clone ID: PAT_MRT4530_10371C.1.pep
SEGYTDHGFHRRLSCDRYCSILLPTHDESGGRISAARISFILSGLSLGMSLPELTHFTEASVAATRTMSPXTRVPEINADDPSXLSVYLVRGELXTETCRFVYPXRPHMTVLRDFNLHSPAGQTAA

SEQ ID NO: 105875 - protein, 65 aa, Oryza sativa
  Clone ID: PAT_MRT4530_10372C.1.pep
MAQIIARLVLPLSFFAILVFLLPAQGSQYIPEGERNDIHLLEFHALIETMVIDDTMKSFCHLFDE

SEQ ID NO: 105876 - protein, 63 aa, Oryza sativa
  Clone ID: PAT_MRT4530_10373C.1.pep
SSGAPDVGHPPCPRCFPGCPRGDLEARRRRGLPAFCTRGHSPTAPEVVFCYLAGEIWLLARLL

SEQ ID NO: 105877 - protein, 99 aa, Oryza sativa
  Clone ID: PAT_MRT4530_10374C.1.pep
FFIKEPLYTINKKPHDTNKMTVVSHISFWGFHTCTFEVVLANPRPYGPYSTTSSEQNMNKLTNLKSLNPIELTKTLILFVDIHITISVLLALPYGFLYL

SEQ ID NO: 105878 - protein, 44 aa, Oryza sativa
  Clone ID: PAT_MRT4530_10375C.1.pep
MLITLLGYRHILITTWIEHRVRSNRRNPYFPLSFSDGTNSDSGL

SEQ ID NO: 105879 - protein, 118 aa, Oryza sativa
  unsure (1)..(118): unsure at all Xaa locations
  Clone ID: PAT_MRT4530_10376C.1.pep
MPQSVLVDRATSESLIGPDWSLNLEICDILNHDPSQAKDVVKSIKKRIGHKNSKIQLLALTLLETLIKNCGDFVHMHVAERDILHEMVKIAKKKPDYHVKEKILILIDTWQEAXGGSR

SEQ ID NO: 105880 - protein, 174 aa, Oryza sativa
  Clone ID: PAT_MRT4530_10377C.1.pep
MALPPPTSLEPSPVTVLPLHPRAVPPCGAATATSELKALSGAAATFAQDLSGDKAFHSPICLLANELSSREKETSERKKKWGGRRTMDKIRLDGRYKAFSRKHSDVEIFMHFTRKYSKGLSNSKRGSEFGKRVEGVGLGRERMEREQQPTGVELLGGKTIVRVVLFVDRRGASG

SEQ ID NO: 105881 - protein, 711 aa, Oryza sativa
  Clone ID: PAT_MRT4530_10378C.1.pep
MPQSVLVDRATSESLIGPDWSLNLEICDILNHDPSLLPDNILQLYRMVLSLLVYLLILQYSRSQAKDVVKSIKKRIGHKNSKIQLLALTLLETLIKNCGDFVHMHVAERDILHEMVKIAKKKPDYHVKEKILILIDTWQEAFGGSRARYPQYYVAYQELLRAGAVFPQRPDSSVPIYTPPQTQPLRNLPPALRNTERQQEAPESSSTPEVPTLSLTEIQNARGVMDVLSEMLNAIDPGNREGLRQEVIVDLVDQCRSYKQRVVQLVNSTTDEELLSQGLSLNDDLQRVLAKHDAIAAGIAVRVEKPKSVQARGDKSPSIKPEGAKQPDQRSSEAASTVTPFEQLALPAPASSSSSKPPVEPAVGPSIDLLSGDDYFKPEPVNSQALVSVGNPPAASANNTLDLVDMFAQSNVGNNPNPAVTSSMLNSNPSLSEPQLYPSQQTVPPQQPSPYSNGLTSNTMAPYDQPSDINATGSWNSQFAHGMLPPQLPPQLPPQQPPNYGQGQDQSGDLPPPPWETQPAESDQFQPGQPRGLAMPSGQIGGIQSQPVQVQPGQVAPLQPMLTGQPTGMQFQQGFGDQLGAQQTQPLHTQYGGMYPTMQGNQSAGMYPQQMAGDFYQQQMYGGQMAGYGYGQQSGGYYAPNAAYGYGGANELSQGMNGLAVQDNSLYGTSASSSFQQPMRPSRPEDSLFGDLVSIAKTKPSKTAANKAGGL

SEQ ID NO: 105882 - protein, 51 aa, Oryza sativa
  Clone ID: PAT_MRT4530_10379C.1.pep
NSINHYDRKLAHLMCQFGGTLMKYYCKNPCVKNRFLSPHQPTKTMGWFNKP

SEQ ID NO: 105883 - protein, 174 aa, Oryza sativa
  Clone ID: PAT_MRT4530_1037C.1.pep
MGRLGAAATCAAVLLLPPKWGRRLGTLLEYWLWRKRSEYVESGCSVQEGAPKPVDIEHSLGNKEIVRLLNSTVVKDTGYMWLSCHTCRHDLANTTRGGIAAAADTVITIEEKRGEEWCRKKLGHHAASPKGPCWRCHMTCLIVTFIATAGTGDRGMIAIVEEKRKMVERGWSKV

SEQ ID NO: 105884 - protein, 104 aa, Oryza sativa
  unsure (1)..(104): unsure at all Xaa locations
  Clone ID: PAT_MRT4530_10380C.1.pep
GLGRGRSCFASLRPLVASAAEARLSFFGARLLSAXADGAGALPQVLMMFHLARLPGVVPLNGAFDXSGAATLVWLLCAGGVLFVRLVVLGRFSERAAASVLRSV

SEQ ID NO: 105885 - protein, 443 aa, Oryza sativa
  Clone ID: PAT_MRT4530_10381C.1.pep
MLSLGAIRKLCAAFDAIALTVIAAGLSRTSHHPFSAHAHYSQPDFPTIASCRAAVASSKWRRRHPSTTKESAGVEPAEPPVLVRIKNERDPVRLYELFRANAHNRLLIENRFAFEDAVARLAGARRNDLVEEILEQHKALPQGRREGFVVRIIGLYGKARMPDHALSTFREMGLYGCPRTAKSLNATMKVLLRARLFDEVLQLFESSETYGVELDDISYNTVVKMMCDLGELRAAFRVMQEMEKAGVRPDVITYTTLMDAFYKCGQREVGDGLWNLMRLRGCMPTLASYNVRIQFLVNRRRGWQANDLVRKMYASGLRPDEITYNLVIKGFFMMGEHEMAKTVFGAMHGRGCKPNAKVYQTMVHYLCERREFDLAFRLCKDSMEKNWFPSVDTINQLLKGLISISKDRNAREIMKLVIGRKPSYSNDEVKTFQDILSLGNTRR

SEQ ID NO: 105886 - protein, 47 aa, Oryza sativa
  Clone ID: PAT_MRT4530_10382C.1.pep
PSAASRRPLLYYLSRVNDILRFLASVSKKTWLLDLSFKLRHQEALVL

SEQ ID NO: 105887 - protein, 103 aa, Oryza sativa
  Clone ID: PAT_MRT4530_10383C.1.pep
MVVMVRQRQQRQPVMVVVMVCWALLATAARGNCRDECLAGCQGWAIICHLSCNSACLGEVGISAMSTATPQSITDQDQQHPSQQQQQAQQSVSVLKGLDPDKI

SEQ ID NO: 105888 - protein, 84 aa, Oryza sativa
  Clone ID: PAT_MRT4530_10384C.1.pep
QRKKTLRSRRNSHEVAHVDVEEVVNRTGSTFSSSCVLLAVLPRRSAPQTSGASTGIHTPSPTCVRIINLVSFENLVKRRLFFIH

SEQ ID NO: 105889 - protein, 125 aa, Oryza sativa
  unsure (1)..(125): unsure at all Xaa locations
  Clone ID: PAT_MRT4530_10385C.1.pep
GMGPSGGGSPAQGRKRGRRWRGVTXRSAGVRREDHQASTLRPRRLRRHLRRGLXAPARLPGLRRXRGSRAFGKRSRTDAXRLRRPLRPLRQGARRPRRLGDXSPGQLPXSSPRSPNEKKNPPNQP

SEQ ID NO: 105890 - protein, 137 aa, Oryza sativa
  Clone ID: PAT_MRT4530_10386C.1.pep
MAKPTAEGAQQPCESWASTGGALLAGVLNSGWNDERANSSKKSMADTTSCLASPTRHVAAERAIPASMWPTEVERVLKQHRQPQSQETSTTTVLRWHHGRRQLKLQVDDQVNIFTQESGQLKQPSTICHSLSSYLDG

SEQ ID NO: 105891 - protein, 52 aa, Oryza sativa
  Clone ID: PAT_MRT4530_10387C.1.pep
MKSGQQRHRSLPCSDEIKVEASPPRIDGLLGNTPCNCDDHFQLCHQHREELG

SEQ ID NO: 105892 - protein, 172 aa, Oryza sativa
  Clone ID: PAT_MRT4530_10388C.1.pep
MADRDRAGQYYQQQRGQVGETVKGILPEKAPSASQALTVATLFPLGGLLLVLSGLALAASVVGLAVATPVFLIFSPVLVPAALLIGLAVAGFLTSGALGLGGLSSLTFLANTARQAFQRTPDYVEQARRRMAEAAAHAGHKTAQAGHAIQGRADQAGTGAGAGGGAGTKTSS

SEQ ID NO: 105893 - protein, 97 aa, Oryza sativa
  Clone ID: PAT_MRT4530_10389C.1.pep
RSPFPDSGQTTEVLFISSSVQVSLRLRVNRASVPTGEDQTTLSWPVSGVIGTDKMDCWSLAIEYSCQDQHSPSNCMSSKVWLIGWSHAPRIHQIRCN

SEQ ID NO: 105894 - protein, 64 aa, Oryza sativa
  Clone ID: PAT_MRT4530_1038C.1.pep
MVECHHQYTNSMKEKRPPPRRGQLKRQIARTLSNLMVPGGGKQIAAGSEEGQAAAKAHGCFRLR

SEQ ID NO: 105895 - protein, 91 aa, Oryza sativa
  Clone ID: PAT_MRT4530_10390C.1.pep
TAPTRAAMVLCPATTGMRLAAAAIPFSTALDGGGAIPFSAALDSGGDSVLRGARRWRPCSAARSGIMPLLRSGSAEVEDDGAVVHKKTGGG

SEQ ID NO: 105896 - protein, 110 aa, Oryza sativa
  Clone ID: PAT_MRT4530_10391C.1.pep
LCGAAARRRRRYRPGRGGRYGGALPSAKSGRGGRGGVVAADGMEVQQRQMAGGPDGGRRGGGGLVVARWRRILGATVAAVAPSPPPDPAGGEAAAVAAVAAMLGGFGSGG

SEQ ID NO: 105897 - protein, 160 aa, Oryza sativa
  Clone ID: PAT_MRT4530_10392C.1.pep
MATPTAQTAALLAAAAALFLLASAALPVVRSDAGGDGDVTAYDELRHRGFPLGLLPANVRGYTLDSGSGDFAVDLASSCRIVLPAGSYLASFSDRLTGRLDDRRISGLSGIRVRAFFRWWSITGIRADGDELVFEVGSVSAKFPARHFNASLECPAKADS

SEQ ID NO: 105898 - protein, 513 aa, Oryza sativa
  unsure (1)..(513): unsure at all Xaa locations
  Clone ID: PAT_MRT4530_10393C.1.pep
MPPGGGGAVFLGVDVGTGSARAGLFDEKGKLLGSASSPIQIWKEKDCIEQSSTDIWHAVCAAVKHACSLANVAPENVVGLGFAATCSLVAVDADGSPVSVSWTGDARRNIIVWMDHRAVDQAERINARNSPVLQYCGGGVSPEMQAPKLLWVKENLQESWSMVCRWMDLSDWLAYRATGDDTRSLCTTVCKWTYLGHAHMEQWKESDSRDMEACGWDEVFWEEIGLGDLVEGNHAKIGRSVAFXELGLRPGIPVGTSLIDAHAGGVGVMESVPDAESKADTSDESDEQAICHRMVLVCGTSTCHMAVSKNKLFIPGVWGPFWSAMVPEFWLTEGGQSATGALLDYIVENHVAAPLLANHAASQRISIYELLNKILFSMAHEQNISFISSLTQDIHVLPDFHGNRSPLADPKSKGIICGFTLDTSEKHLALLYLATIQGIAYGTRHIVEHCNAHGHKKFPGVRDAMKALNAAGKVVYPSSDPRVKKYHDAKYQIFRSLYEQQLSHRSAMAQALQ

SEQ ID NO: 105899 - protein, 493 aa, Oryza sativa
  Clone ID: PAT_MRT4530_10394C.1.pep
MKLVMGGKILWKDRDNKHIDLNLREWHILREISCVGKAHQLVSLTRDIWRLIHSLMPMRDAARAACVSRSFLSLWRCHPNLNFSSEAFGLNKNACGKEELAGLFYSKVDHILKRHSGIGVKKLKIQIYSDYSGKGSSYLNNWLQISVKPGIEELIISLTQFQAKYNFPCSLLSNGSGDSIQYLHLSNCSFHPTVTLSGLRSLMRLYLCCVRITENELGCLLSHSLALEQLEIRYCDRIVCLKVPCLLQRLISLKVFGCDKLKLIENEAPNVSIFAFQGDKTELKLGETLQIKSLCMVRSGYVYHARAELPSIMPNLESLAIKSCKETAFAPKLCSKFLCLRHLSIGLIGFFPAYDYLSLASYIYAAPSLETFDLNVMQRNVQSVSIFAHPADLRSIREEKHHNLKSVTVTSFISVKSLVELTCHILESTASLECLTLDASQTGFRCDTPGSKISKCPPLDRDIIMEGHRGVLAIRRYIQPRILRWVMVSKVCS

SEQ ID NO: 105900 - protein, 288 aa, Oryza sativa
  unsure (1)..(288): unsure at all Xaa locations
  Clone ID: PAT_MRT4530_10395C.1.pep
MGMLDLMRLMSIQRQRDQERRRRQAQAPPRDGLIALRAKRKGSPCQQDGDSQGAADIEIPSLPEDIWRLIHSLMPMRDAARAACVSRSFLSLWRCHPNLNFSSEAFGLNKNACGKEELAGLFYSKVDHILKRHSGIGVKKLKIQIYSDYSGKGSSYLNNWLQISVKPGIEELIISLTQFQAKYNFPCSLLSNGSGDSIQYLHLSNCSFHPTVTLSGLRSLMRLYLCCVRITENELGCLLSHSLALEQLEIRYCDRIVCLKVPCLLQRLISLKVXFXCDKLKLIENEAP

SEQ ID NO: 105901 - protein, 70 aa, Oryza sativa
  Clone ID: PAT_MRT4530_10396C.1.pep
RSFEEVISDQLPHRDRPPQYSLHHGRRGRARAPRPHPLRLRRMIDRAYIPPLYHVVWPCDPPCSVISLVL

SEQ ID NO: 105902 - protein, 73 aa, Oryza sativa
  unsure (1)..(73): unsure at all Xaa locations
  Clone ID: PAT_MRT4530_10397C.1.pep
FFFFXASQEAGMALLWNXGYNSIMGVLKVXRITKAESGPRWVDEYSGNSDGSQLVFCTKLGSIGVHLNRANGP

SEQ ID NO: 105903 - protein, 186 aa, Oryza sativa
  Clone ID: PAT_MRT4530_10398C.1.pep
MQLPGDHRPGATDLAAADLASLPAPESRRPRLDPPRTAAGVRERPPLPGSAARRRPRPDPLPAALRRPDPPPAALRWPDPPRPRPRACAFPGADTRGPSRAPRTPKEEEEEVEEKEEERLEEDRRWRGCRRKRRNGRGGGTGGLARRIREGRQPGGGGRRGGRCGDRRWRAAWLHKTGTIGITNQE

SEQ ID NO: 105904 - protein, 572 aa, Oryza sativa
  unsure (1)..(572): unsure at all Xaa locations
  Clone ID: PAT_MRT4530_10399C.1.pep
MKLVMGGKILWKDRDNKHIDLNLREWHILREISCVGKAHQLVSLTRVLIARFSLSGEGDSKVDIEAEWLSSLASCCAESGDGTIGGRMFWEKGSPCQQDGDSQGAADIEIPSLPEDIWRLIHSLMPMRDAARAACVSHSFLSSWRCHPNLNFSSEALGLSKNGIWKRRIXAGLFYSKVNHILKRHSGIGVKKLTIKVYSDYSGKGSSYLNNWLQIAVKPGIEELIIALTQFQAKYNXFPCSLLSNGSGDSIQYLHLSNCSFHPTVTLSGLRSLTRLYLCRVRITENELGCLLSHSLALEQLEIRYCNRIVCLKVPCLLQRLISLKVFGCDKLKLIENEAPNVSMFAFQGDKTELKLGETLQIKSLCMVRSGYVYHARAELPSIMPNLESLALKSCKETAFAPKLCSKFLCLRHLSIGLIGFFPAYDYLSLASYIYAAPSLETFDLNVMQRNVQSVSIFAHPADLRSIREEKHHNLKSVTVTSFISVKSLVELTCHILESTASLECLTLDASQTGFRCDTPGSKISKCPPLDRDIIMEGHRGVLAIRRYIQPRVPSTVKLTVLEPCSCHSTEL

SEQ ID NO: 105905 - protein, 152 aa, Oryza sativa
  Clone ID: PAT_MRT4530_1039C.1.pep
MAVSSAVLVGLLVVSCAAVAAATRYTVGDGEGWTTGVNYNNWANGKFFRQGDELVFNYQARAHTVTEVSQTNFDSCNGNSPLSNDNGGSTTIRLSYPGMHYFICTIPGHCSSGMKLAVNVNGDPSYSAASSPAAASAVAAAAAGALIKLALF

SEQ ID NO: 105906 - protein, 216 aa, Oryza sativa
  Clone ID: PAT_MRT4530_103C.1.pep
MAPTSAGNLAPATAILVVVVAVVLAAAAASQDGDALTEFRKGMSDPDGALASWDPDLVNPCTWFRVTCNADNRVIRLDLEEMNLSGHLSADLARLDQLQFMEIASNNIEGPIPPEFGNLENLISLDLCNNTISGPIPPSLGKLKSLKFMRIDHNLLTGPIPNELAGLSNLMILNVSNNDLCGTIPTSGPFDHFPPSSFASNPRLRYPGMDDDDTGR

SEQ ID NO: 105907 - protein, 170 aa, Oryza sativa
  Clone ID: PAT_MRT4530_10400C.1.pep
MTSLDWQSLLQTCLQVPPPVLEQQQPAAAAQADQYSGENDHGDLQAAESSGAGNKEKQVMAKGGAGRPSGTKKKASRPRFAFQTRSDNDILDDGYRWRKYGQKAVKNSKHPRSYYRCTHHTCNVKKQVQRLAKDTSIVVTTYEGVHNHPCEKLMEALTPILKQLQFLSQF

SEQ ID NO: 105908 - protein, 505 aa, Oryza sativa
  Clone ID: PAT_MRT4530_10401C.1.pep
MYTSPTLLALSFALLLLILLFYYSSSLLYSQLATRRRLTHACARSLPDAYESGMNRGHISSSELIDAKLEERRISTAKHCPSCGNKLDCKPDWVGLPAGVKFDPTDQELIEHLEAKVREEGSRSHPLIDEFIPTIEGEDGICYTHPEKLPGVTRDGLSKHFFHRPSKAYTTGTRKRRKIQTECDVQKGETRWHKTGKTRPVMVSGRQKGCKKILVLYTNFGKHRKPEKTNWVMHQYHLGDLEEEKEGELVVCKIFYQTQPRQCSWSSDRGGGAAATASAVTTAAVQQDQQRRRDSGSGSCSSTRDHEVSATSYSTAGYAVAAAVEMQHLKHAADHFSFAPFRKSFEEVGISGDQVHSNQLGRSEQQHAGQEQQPHRPLLATTTAVPATAFLISRPTNPVSNIVPPAMQHASVVLDHDQFHVPAILLHHDKFQQQQQQKLDRRSAGLEELIMGCTSSSTKGVVYTCTFRKLQFLTPKRQNGLTSHTGLLTTRIIMDSSNKAAFDMH

SEQ ID NO: 105909 - protein, 51 aa, Oryza sativa
  Clone ID: PAT_MRT4530_10402C.1.pep
FHYIFMDTYYSLPKSQAGETHIIYYVTCAKSSKYTCAYISIRCETHRCTTI

SEQ ID NO: 105910 - protein, 102 aa, Oryza sativa
  unsure (1)..(102): unsure at all Xaa locations
  Clone ID: PAT_MRT4530_10403C.1.pep
LFCYTFLCCSAADVIVRLKTLPLSSSFSTTRKSIIASGRKGSSQAGRSSACKPTTVKISDLRRRGGRPLAKIIFAGGRWLVRSACENRNRPXCKKKNFRLRR

SEQ ID NO: 105911 - protein, 526 aa, Oryza sativa
  Clone ID: PAT_MRT4530_10404C.1.pep
MIKMAGIVDTAAFCTLLCLLLTLVVFKLKTATSSRHNAGVNLPPGPWALPVIGSIHCLLGSLPHHAMRELSRRYGPVMLLRLGHVRTLVLSSPEAAREVMKTHDAAFATRAVTPTASILTYGARDIVFAPFSKHLRELRKLCTLELLSPRRVRSFRHVRDEEAARLARSVAAAAPAVVNVSELVKIMANNIIMTAIIGDTCPQRDEYLEALDKTMDLMNGFNLIDLFPGSRLARVLGARSLRATKRVHQKLHQITDTIIQGHEIIKDGSVGDDTIQETVGTHNMHGHGHKCEDILDVLLRFHRDGGLGITLTKEIVSAVLFDLPAARSETTSTTIIWAMSELVRTPHVMERAQSEIRQVLQGKTVVSEADIEGRLHYLQLVIRETLRLHPPVPFLIPRLCSEANSKIMRYNIPQGAMVLVNISAIGRDEKIWKNANEFRPERFKDDMVDFSGTDFRFIPGGAGRRMCPGLTFGLSNIEIALASLLYHFDWKLPNDASSCKLDMRETHGVTARRRTELLLKATPLYT

SEQ ID NO: 105912 - protein, 180 aa, Oryza sativa
  unsure (1)..(180): unsure at all Xaa locations
  Clone ID: PAT_MRT4530_10405C.1.pep
WRSWERHRQRRQQRASASASSPAPAPAPAPATPSPRPPPVSAAAPIRLPRPHPPPPPPPPPSAAXPPPPPSAAAPRSALPALHSLNVWLGFDSMDDSTWLQIVGSRLAMLMEQGGTSSQPALASQVTCKRRLNIAESSSTAGSIKEDMYKEAHTQENEAYLNSSSCITTNIVCCACEAQL

SEQ ID NO: 105913 - protein, 175 aa, Oryza sativa
  unsure (1)..(175): unsure at all Xaa locations
  Clone ID: PAT_MRT4530_10406C.1.pep
GCGGGGPRCRRLRLRRRGAPCACTAAGGFTGSWVVKLLLSRGYAGHASLRDPDYPRNAFRDAPGETLRDNLHLFNAXALDCGSVTAAFAGCQGVFHPATAVPEHNTDDPEKDRLAPAVKGTINVLEACSAASVQKLGVACSVWADGYNPNLPRDTLINETCCSDKQSCLNDENWD

SEQ ID NO: 105914 - protein, 175 aa, Oryza sativa
  unsure (1)..(175): unsure at all Xaa locations
  Clone ID: PAT_MRT4530_10407C.1.pep
MDGWMYHVHRSTGAQSAYQMSFYGQYSFTYADLLWHAKGPAKCKFFLXFVFQRRRWTADLLQKRGIDSHSVGPLCTQELETANHILLDCVFARHVWLRVLSSAGWAALSPSRGSYLQVWWPSSRACLPEHLRHGFDSLILLVSWQLWKERNSRVFDSALSPISEVLQSIRSEGHL

SEQ ID NO: 105915 - protein, 301 aa, Oryza sativa
  unsure (1)..(301): unsure at all Xaa locations
  Clone ID: PAT_MRT4530_10408C.1.pep
STRWLWFEWKEDSKPWINMQTPCDETDTTLFRAGTSISIGNGKKIKFWMDNWLEGRSPKECSIFXLAKGKSNCLXKMDLENNHWLSLLNQITSLEEIEELIQLGSRLQEVALVISTTRDILWKXTENGQYSAKSAYLAQFQGSITHASFDPIWTIQAKPKQRFFGWILLHQKALTAENLLKRRWPCDWICCLYCTSTFEDNCRLAKECPFSIAVWGKIYQWQGHSNIPQQXTTNSHAEWWNMLCQISPSSRRKKILGDLIIIWWNIWIERNRRIFQQIXKTENQVASLTQENINQISLSRR

SEQ ID NO: 105916 - protein, 68 aa, Oryza sativa
  Clone ID: PAT_MRT4530_10409C.1.pep
MEAVVREIATYWFGNQRASRIISRTPMEAVVREIATYWFKNQRASRIISRTPMEVAVREISTHWFEDQ

SEQ ID NO: 105917 - protein, 189 aa, Oryza sativa
  Clone ID: PAT_MRT4530_1040C.1.pep
MAMAAAASLLPASAAPTLPGRAFRPPRNSTPTASLSCDGGSRCRGVGLGVILGGCRAQGVRRNAAAETYVPGSGKYIAPDYLVKKVTAKELEELVRGERKVPLIVDFYATWCGPCVLMAQDIEMLAVEYENNALFVKVDTDDEYELARDMQVRGLPTLYFFSPDQSKDALRTEGLIPIDMIRNIIDNEL

SEQ ID NO: 105918 - protein, 117 aa, Oryza sativa
  Clone ID: PAT_MRT4530_10410C.1.pep
WIGWGNPRHLALWDPASAAAADHCRWEGVTCSNATTGGGGGAGVVTELSLHDMNLTGTVPTAVCDLASLTRLDLSNNQLTDAFPAAALSRCARTSFLDLANNALDGALPNTSGCPRR

SEQ ID NO: 105919 - protein, 100 aa, Oryza sativa
  Clone ID: PAT_MRT4530_10411C.1.pep
MEREGPSGRPYPLHSPPSHEGAAVGIDLLGGGASHQGHGVQAASAAFRGGSGSGGGVSSFPLRILGCQRLPMAVAMTAVVEKEAGPSSYPFSDGGGSGCS

SEQ ID NO: 105920 - protein, 464 aa, Oryza sativa
  Clone ID: PAT_MRT4530_10412C.1.pep
MEGNGTFPFFSQFSSDPGSSAAGFNLSSAAGFYGCSSCSMLAMLFIQENSRAGCAGTMEGEADIDECELRDEQPALRDQYRCYGICKNTIGGYDCQCKFGTKGDAKTGTCTQLFPLPAMVATLGIIGLTSIVVVVVLFKLLFDERRKTKEFFIKNGGPVLEKVDNIKIFKKEELKPIIQSCNVIGKGGFGEVYKGLIDDKLVAIKKSINVDKLQEKQFTNEIIIQSKVIHKNIIKLIGCCLEVDVPMLVYEFVPRGSLHDILHGNRKESLPLQKRLNIAAGAAEGLAYMHSKTSTTILHGDIKPGNILLDENFDPKISDFGISRLIAIDKTHTKCVIGDMCYMDPIYLQSGLLTKQSDVYSFGVVLLELLTRQKASSGEDTRLVTTFLDAYTEDHKGAIDLFDREILLEGDTEVFNNLAILVVDCLKFEVERRPEMTDVEERLQTMKRSYVPKSISDASSSIDT

SEQ ID NO: 105921 - protein, 266 aa, Oryza sativa
  unsure (1)..(266): unsure at all Xaa locations
  Clone ID: PAT_MRT4530_10413C.1.pep
ENLAKLPDGMTRITNLKHLRNDQCRSLKQLPNGFGRWTKLETLSLLMIGDKHSSITELKDLNNLTGELRIECWSHKMDLTTAAKRANWRNKKKLSKLTLLWXTIPCSADDFENVETFLEVLVPPENLEVLEIDGYMGTRFPSWMMKSMESWLPNLVSLDLSNIPNCSCLPPLRHIPYLQSLHLRYMAGVHSMSSEILVKRQKCVLYQSLKELHFEDMPNLETWPTSAATDDRATQPERSMFPVLKTVTATGCPKLRPKPCLPDAIT

SEQ ID NO: 105922 - protein, 125 aa, Oryza sativa
  Clone ID: PAT_MRT4530_10414C.1.pep
IVWHLLFSHDLHLLLHHLFFIPSSQLQLLGGHGKADQLQCLMAIFQCSTPEASHRHRRISTHAACLQGTAQVLDAAQSRTLATASNDNRASSTFGIAPVFKHQAFQFLQQVNWHTPSAYNTCYSY

SEQ ID NO: 105923 - protein, 120 aa, Oryza sativa
  Clone ID: PAT_MRT4530_10415C.1.pep
MARHPGLLLILLAAVAAVATTSRAQWVGGWNVIEDVAGNNQIQRVGAWAVGKHNQLGTNDRLQFVRVVAAEEQVVQGSNYLVVIDAASSRKKTRELYVAVVADLVGATTYQLSSFKLATK

SEQ ID NO: 105924 - protein, 481 aa, Oryza sativa
  Clone ID: PAT_MRT4530_10416C.1.pep
MEQDLKRLVVEKYGGPNQPEQRLPTIYRVPGEMKRRDEEGNSYSYLPVAVQIGLLSYPRQQSREEDYRVLELYKWRCVGSLIGRHHLLQEPTRTPELLRRCLSAINGFLPRILASYNFDAEALDVGQRHVVLGIMLLDGCFILRRLLKFARIASEEQSGAKASSSSSRSGTGGQDDDEDRAVLFGRCWVWSFVTCDLLLLENQIPFCVVQKLFHQLRTDADDTSDVLVAGALRLFGSLRPRKLYSSPISCRDVHVHHLLHLFYLSVGFPPPPDAAAAPDDDPSEHLVPPSELPQWIPCARELEEAGVTFRPRKDATSFLDVRFAGHGGVLEIPELQLYDYSEPLFRNLIAFEQTYPYTRGHVTAYAVFMDCLVTSPEDMRLLHLSGVLVNHMNRDRDPTGFFSRLCSEAHLAADRNYLAGVIGEVNRYRRSRWPRWRAALVRNYFSNPWVATSLAAAVILLALTMMQSFFAAYAYFKPPKQ

SEQ ID NO: 105925 - protein, 174 aa, Oryza sativa
  unsure (1)..(174): unsure at all Xaa locations
  Clone ID: PAT_MRT4530_10417C.1.pep
VRSTRAALILPLLGAVAACSTGTWAELTRVTARFNDEWVWAGLLVVLNLLVLAHAALTLSAREGWRERAFNWLEQRAGWLVAIAGFAGAVMMLALVFDPRYRSFPSAALVLPALVYLVRPATGPRREIALLAFIIGAGIAPQLYREGCXNQQAWGWAXGSVMMAGALXRCLPVR

SEQ ID NO: 105926 - protein, 180 aa, Oryza sativa
  unsure (1)..(180): unsure at all Xaa locations
  Clone ID: PAT_MRT4530_10418C.1.pep
LLPWPVAQPLLRRLALRGAADLLPSFVGVAREPGDGGARAAEWKGACFYDNRAWMEFHNGTDGGLGGGTLHLETNKAHSWTCIDLYVFATPYRVTWDYYFVGREHTLDFKEWESEAEYEYVKRKGVSIFLMPSGTIGTLRALWDVFPLFTNTQWGENSNLAFLKKHMGATFEXRPKPWVQ

SEQ ID NO: 105927 - protein, 105 aa, Oryza sativa
  Clone ID: PAT_MRT4530_10419C.1.pep
LLVVSTRHLPSLCKAKKPSCTVALHAMHASSVTGHHHPPSLAAGSKHVGLFTPLSLCKLLCLFFLVFDLQIKPQPMYISAGHICKNQRRLTLHRAHRRREENMHA

SEQ ID NO: 105928 - protein, 40 aa, Oryza sativa
  Clone ID: PAT_MRT4530_1041C.1.pep
FNHYTVGRLIQGYVHCMCSIVQSINHQPVLLSENTCYNLR

SEQ ID NO: 105929 - protein, 219 aa, Oryza sativa
  Clone ID: PAT_MRT4530_10420C.1.pep
MGLLRCRKSCCLHWMNYLSPDLKCSNFTDDDDELTINLHALLGNKWNTHIKRKLMSQGIDPQTHQPVTNTFGNVVFAGLAYLTSYLKAKKHNSCIFSKNILLEALLASLFCLTASKMPKGVGALTIALKEGAVFAACAGQILQAFPFWWKWNSMCHRKAEIVRSILAIIVVIYQPIQSSNRALADLPSLLQKSPSPSVAFVNFFLAKKVVKHTSQHDIN

SEQ ID NO: 105930 - protein, 128 aa, Oryza sativa
  Clone ID: PAT_MRT4530_10421C.1.pep
TTNNLTCAPHQTFLSIVMNLKMHAHSILETFSRWQRQPQRRRRRRLRRREGGHHRARLRPSGGLVRGERSGGGGRRGTQWRRARSLTSRVRGRFWSAVHRGRASPGDPRGGGGGHRRSDASTGDHRDS

SEQ ID NO: 105931 - protein, 378 aa, Oryza sativa
  Clone ID: PAT_MRT4530_10422C.1.pep
RIASSAATTVTTTTTSSSSSNSQNPNPFNLPPWLRSLRCPFTFLCPPPPPPPPPPPPPPPPPPPLEVVSPSPRWRRPGLRVTTEYDSEEAMFAHKVSCKVAGGLAKLRLSFQSDPSGQGLGEEGDPRRQLFVAPVVGLIAENFSVLYDVEARNALLSGQGSLPGGAIQLRGSHDVKERQGEVSVITRLGDPSYKLELSSLVPYNGLPRATLHFPIGQVSVEERRNEADEKMLSLYGIAKSNFLDGILTAQYSENDINLRYCYKDNELTLIPSVSLPSNAVSLGFKRRFGPSDKLSYRYDFTTDDWNAVYKRTVGKDFKVKAGYDSEVRVGWASVWVGQEDGKAKTAPMKTKLQLMLQVPQDNFRNPTFLFRVKKRWDL

SEQ ID NO: 105932 - protein, 136 aa, Oryza sativa
  unsure (1)..(136): unsure at all Xaa locations
  Clone ID: PAT_MRT4530_10423C.1.pep
RHEGAAGPVTVYIXHKMFPNKKWNXPLTNLPVLIGATAFXCPPATAVNYNSWLLFGTIFNFFVFRYRKKWWERYNYILSAALDAGVAFMAVLLYFSLSLENRSIDWWGTAGEHCPLATCPTAKGVDLGPTSVCPVF

SEQ ID NO: 105933 - protein, 49 aa, Oryza sativa
  Clone ID: PAT_MRT4530_10424C.1.pep
HLSSVCNQNTMQTYHLLNYNMFLSSIKAEKRRQCRIILHLTYNALYSLP

SEQ ID NO: 105934 - protein, 88 aa, Oryza sativa
  Clone ID: PAT_MRT4530_10425C.1.pep
MANLQVGVTRKISDPNTKAVATDRTIRNLVCHEDLRLTCRNHLSHQKYRSSLLGETPGRSRRAKTKGFVTKNRAKPGDEDQWVRHQAW

SEQ ID NO: 105935 - protein, 62 aa, Oryza sativa
  Clone ID: PAT_MRT4530_10426C.1.pep
MAHLHRLHHGSSPSLPRAPGKCRWEEKRCPAATVIVTTRKLAVYLGRGQDLGKARREALAAA

SEQ ID NO: 105936 - protein, 43 aa, Oryza sativa
  Clone ID: PAT_MRT4530_10427C.1.pep
FPRSPRPRPVMGLQVGRSVQLLCLIFSAASPFVCPNHCRLAHS

SEQ ID NO: 105937 - protein, 67 aa, Oryza sativa
  Clone ID: PAT_MRT4530_10428C.1.pep
LRNQNPVHIGVLPTNRKTQASAPTSPSDVGLDAGMTTTTTAAAAALTSSVGDGPPPSRSTTTINAGR

SEQ ID NO: 105938 - protein, 132 aa, Oryza sativa
  Clone ID: PAT_MRT4530_10429C.1.pep
MGRPARPRSPPPPHPTAARLLRRTPPPLSPLASTAAAAPYRPPASVRCRIERRWWRIEEEAVDRAAAVADRAVAVTDRGGGRDRSSGHGSTRRRLGPMHYILSFSDAPIFFSPPTGLELVGSARRRRSQPRL

SEQ ID NO: 105939 - protein, 48 aa, Oryza sativa
  Clone ID: PAT_MRT4530_1042C.1.pep
MESLTAIDNQTIPLLFDPNVGEAKIVMSKGFMRRKQEQTFTLLDNNST

SEQ ID NO: 105940 - protein, 439 aa, Oryza sativa
  Clone ID: PAT_MRT4530_10430C.1.pep
MGPTWAGVPSQGWEENGIMFRMMRCSDHFTLFFSEYEMCGRARCTLSPSQAARAFGFPTTTSVAGGGTGGGCGGGDAPAVPLLRMDRYRPSYNVSPGTYLPVGTVRARPAGYDGGGDMDGEVSVIQCMKWGLVPSFTGKNEKPDHFRMFNARSESIKEKASFRRLIPNNRCLVAVEGGNTMLWHDRWLPGRTIAELAPNLFELITQRSSCLPRMASPSFFVCGYASPLSDEYVSFYEWKKDGPKKMPYYIHFQDQRPLVFAALFDTWTNSEDRMPVILGDKDSISTWLNGASVKLEEITVPYEGADLPYKSIGWLCRKLMYGYFAIPHQPKIEIGVSDQHYWKFSKSGVYTSKSAHGTFFIPDGQAVKGLRMSEKKGLNSLIILVTWAIWKHRNACVSNGVTPSMADVILSITNEGTLWCMAGASRLQELLAKAIALVP

SEQ ID NO: 105941 - protein, 211 aa, Oryza sativa
  Clone ID: PAT_MRT4530_10431C.1.pep
SFTGKKEKPDHFRMFNARSESIKEKASFRRLIPNNRCLVAVEGFYEWKKDGPKKMPYYIHFQDQRPLVFAALFDTWTNSEGETIHTFTILTTRASISLKWLHDRMPVILGDKDSISTWLNGASVKLEEITVPYEGADLVWYPVTAAIGKISFDGPECIKQVQMRPSEKPISTFFMKKPVKSEKKDQDHAETKAFRAANKEWHESAENQLDK

SEQ ID NO: 105942 - protein, 165 aa, Oryza sativa
  Clone ID: PAT_MRT4530_10432C.1.pep
GMSLATHCMMADTSPSGATAQRLRHFLRSRPQSHRPRQSRGPGKAESPSGLGRAKGAASPAAHLVLLGKPEKNSVKWSEHRIILNIMPFSSHPSFLSSGCEGATGRTEGRPRRAAAAAATAMVVLAKGVTEIRARGGASAQVVREREEGGGGVGVSAREDGGNSE

SEQ ID NO: 105943 - protein, 74 aa, Oryza sativa
  Clone ID: PAT_MRT4530_10433C.1.pep
MSTVTRAYLDQKLALAKRCSREATLAGAKAAAVATVASAVPTLASVRMLPWAKANINPTGQALIICTAAGMEYF

SEQ ID NO: 105944 - protein, 60 aa, Oryza sativa
  Clone ID: PAT_MRT4530_10434C.1.pep
YATDEPRMSLNKLSGVDGANTPGSAKPWLSPLTAPFIWVTAWWVLMSFWGVWTKLRRFTS

SEQ ID NO: 105945 - protein, 153 aa, Oryza sativa
  Clone ID: PAT_MRT4530_10435C.1.pep
MSSSSPQIAPCLGGSGILGTPAVTGQSPALVTGPQDTGSATSVPRFYKLEFPKYDDKDDPLNRFNHCEQFFCGQKTHDSDRVGLATYHLGDNAQEWYFHYEIHKGPPTWDEFKDLCHGQFGPPIHCNSLGELKRLMQTSTVAAYQTMFLTLAC

SEQ ID NO: 105946 - protein, 171 aa, Oryza sativa
  Clone ID: PAT_MRT4530_10436C.1.pep
MAYGSVGGTTVSGSQTRWSRKSVLQCYHLNEWSVKRAQKKKLMSTVTRAYLDQKLALAKRCSRVYLGSHTLVVEIVAEATLAGAKAAAVATVASAVPTLASVRMLPWAKANINPTGQALIICTAAGMAYFVAADKKILSLARRHSFENAPEHLKNTSFQGTGHPHPAFFRP

SEQ ID NO: 105947 - protein, 90 aa, Oryza sativa
  unsure (1)..(90): unsure at all Xaa locations
  Clone ID: PAT_MRT4530_10437C.1.pep
AGSTAATLLLFVSSGEXKLELKXTTVDPPSSXNVLAXRKAAKMPHLVVEANKKSPFGPIDERGASSMATDIHTPWXSYEESLDVARCCCA

SEQ ID NO: 105948 - protein, 85 aa, Oryza sativa
  Clone ID: PAT_MRT4530_10438C.1.pep
FPVVLSTSPKPMTCKVGHPTEINLFLIHTKISKSLLIHRSVHNYYWPRQSRNQENCRITKRKGRHQAICIKSSTRQFLLINLPTV

SEQ ID NO: 105949 - protein, 55 aa, Oryza sativa
  unsure (1)..(55): unsure at all Xaa locations
  Clone ID: PAT_MRT4530_10439C.1.pep
MAEDAPATSLPPPPRGASTRRLSRREAPPPLPRHXPPRPRRRCSRRSASGRCRRH

SEQ ID NO: 105950 - protein, 67 aa, Oryza sativa
  Clone ID: PAT_MRT4530_1043C.1.pep
CSYRRATDSPRGVHTTFKLEVPHQPLPRWVSHHHSDRARALAGVWVYTSSLSKAQPPLSLSLSHKQG

SEQ ID NO: 105951 - protein, 85 aa, Oryza sativa
  Clone ID: PAT_MRT4530_10440C.1.pep
MGHRHRHFSFVPDSPQHAIASALISPRFLQPIPRNTDLATGALERGHTVVKAQPWDHVAIPRGGRSTTAFSDSDLAPPSSIPVQA

SEQ ID NO: 105952 - protein, 254 aa, Oryza sativa
  Clone ID: PAT_MRT4530_10441C.1.pep
MESFLPYVTAIQLIVSTMLMVEHDKGEVTVYFANSSSCASPPSPSPSPPPLIFPVPASNCPDKCGNVSIPYPFGIGRGCYLDLPGSGSFSITCNHKTDPPQPYTADALLVLNITLETAEMFVVSAGALAVVKYPSVRARINMTFLPSGYTLSAPYRLSPTGNMFTAVGCVTMAKLYGSRAYAYDAGCITYCPSLSDAAADGAPCKDLGCCESPITPGLTQFAVGWGRWPGASDDDYGELDPEQYYQYAFVAQDW

SEQ ID NO: 105953 - protein, 98 aa, Oryza sativa
  unsure (1)..(98): unsure at all Xaa locations
  Clone ID: PAT_MRT4530_10442C.1.pep
WLASPSSLPSSPSSPSRLLCRPRERPSSRRSRWPCCLLPQRGPWPPPPCRSPPHPPPXSPSPMVPPPTPPTDAPXPMLPPPSPRPWSPPPPLHRPVPP

SEQ ID NO: 105954 - protein, 97 aa, Oryza sativa
  Clone ID: PAT_MRT4530_10443C.1.pep
STNFILHNSTQATRDSQLDVKLWDIPHCEHQNHMGQHYHNDQNILKFMHTKVCLILTQPSLKDNKISDTLFKPRMYNAQSRRNVDNTDGTKWNSSIV

SEQ ID NO: 105955 - protein, 36 aa, Oryza sativa
  Clone ID: PAT_MRT4530_10444C.1.pep
NDTLIKHTTPALRNRWPLYTSILSERQKHRATLREC

SEQ ID NO: 105956 - protein, 114 aa, Oryza sativa
  Clone ID: PAT_MRT4530_10445C.1.pep
GPSGGHRRRRRRRSVPPRQRVRSTTTTSPTRRLRRRRRQRQLRRRRGPIQPPPRVPSSSSHHHPAAATPSPRRRHRRAARQADVQRQVRWRRRRARLHRPIDQTPPSPPRQQQR

SEQ ID NO: 105957 - protein, 43 aa, Oryza sativa
  Clone ID: PAT_MRT4530_10446C.1.pep
ASRITDYLVEMRGGVMTQDSLEHIGAKAYRNIEFWSMLEQLNL

SEQ ID NO: 105958 - protein, 265 aa, Oryza sativa
  unsure (1)..(265): unsure at all Xaa locations
  Clone ID: PAT_MRT4530_10447C.1.pep
MMNNLDCLLQEIATPWEGEKVQEEDAGHXGLSSPLLRPPVSTAAGYRRHHRHWLPSPLPPNISAVLANREGLGSGGRLGARSGRRDDGGGRIRHRDDEGGWIRHYDNGLGRICRCNDVGDQICRRDDDATATGSREGRKRWIGPPEGRDADVDVDFVMRMRMWSSTLTDVPMGQVLSAPTPPDTGRDVGTLLSVPSACWPALESTPLSAHSATMWQPSGGLGAACPRAPRAVLVWLPPAKIIFSDGSLKPSASENISSLAVGHRQ

SEQ ID NO: 105959 - protein, 47 aa, Oryza sativa
  unsure (1)..(47): unsure at all Xaa locations
  Clone ID: PAT_MRT4530_10448C.1.pep
PNPATKLISWTYGTLYXITSXQIKSTSSLXASSYTNISTLVATVVLS

SEQ ID NO: 105960 - protein, 112 aa, Oryza sativa
  unsure (1)..(112): unsure at all Xaa locations
  Clone ID: PAT_MRT4530_10449C.1.pep
QKVFLPPLVERVAPGGGLPGAEEVLGWGGGKTDGRAPPGALQRVWVDPRGGRGKATPALXWVPFNARVRFAFPRAMVGKPLFLAKNKGSFFWSHVFPRPVFFWFLDEKFKIR

SEQ ID NO: 105961 - protein, 70 aa, Oryza sativa
  Clone ID: PAT_MRT4530_1044C.1.pep
QSETECSPAEFRVSDGLCDTSCVCFRWNWNSDCTLTTQCRRPARRRRGGAGGCAEAVAAVGGRSAATGTA

SEQ ID NO: 105962 - protein, 61 aa, Oryza sativa
  Clone ID: PAT_MRT4530_10450C.1.pep
FRDDPAYVPVCLCSILVSYQSDGRNERYVIGRFITGCRCFAYGVQPPGGALIKRLELCFGS

SEQ ID NO: 105963 - protein, 134 aa, Oryza sativa
  Clone ID: PAT_MRT4530_10451C.1.pep
SDTGSITLPLYLYHKNPLLKVGVKLLYTIIHNRTPSFSFHTFYNFQTCSKQLAAPEIQNGFAPKLTSTRDHLRLAASWTLASPRPTWHAANSHRSPPSLSRAARPTSHAHIHASPCMYRSHIPVQHRTCMHTCR

SEQ ID NO: 105964 - protein, 70 aa, Oryza sativa
  Clone ID: PAT_MRT4530_10452C.1.pep
FFFFWEVAPVTTSFHFDSFLSKLELCKHVHTPFLSKFSPPRDTGDFTVSNSFFRPSIIINSYGSDNFTFT

SEQ ID NO: 105965 - protein, 177 aa, Oryza sativa
  Clone ID: PAT_MRT4530_10453C.1.pep
MSEAAHSCSFRCRHSPADRRNSTDAAAAAAQAVKPVRSCLQANAHVVIVLFIVLTKPAKKKIYDYSSVTILSFNLSSAGLMVMNVTRSKESTYIRMASAHRLRDQPFDYAPHVPRRIQYDFIFRFIRKNLGRKDSNLRVTGPKPAALPLGHAPFRVLCDTNKQYYVYFLFVNPTSIT

SEQ ID NO: 105966 - protein, 335 aa, Oryza sativa
  Clone ID: PAT_MRT4530_10454C.1.pep
MAVALALLAAMSALSSCTSPATAELTRHEHPVAAGAPLRLLVVGDWGRKGGYNQTRVAEQMGKVAEETEIDFVVSTGDNFLENGLAGVDDMAFHDSFMDVYTAQSLHKPWYLVLGNHDYRGNVLAQIDPALRKIDSRFICMRSFIVSAGIVDFFFVDTTPFQLQYWTDPGEDHYDWRGVAPRDAYIANLLEDVDAAMKKSTATWKIAVGHHTMRSVSAHGDTQELLELLLPVLKENGVDFYINGHDHCLEHISSRNSPIQYFTSGGGSKAWRGIFQQNEDKLQFFYDGQGFLSLELSENRARFAFYDVFGEALYHWSFSKANLQKVQSSASVTEE

SEQ ID NO: 105967 - protein, 257 aa, Oryza sativa
  unsure (1)..(257): unsure at all Xaa locations
  Clone ID: PAT_MRT4530_10455C.1.pep
MAMGFVGRRTDGGGRLHTAAARGEARRRSGRGGRRPRERFGEVEGVPRKAMASRFEERETDGSTRPCAAAASRATWRRSWRAGQRSGRRFGVAQGDSRRVVARGIDERGADSDARLSAAAAGRAGREQKRRPAAELAVWGGSLELETDGVAARQSRRRGGTTPRGRGRGTRXGEVAPGAPRHAPTHAPVPPMLGGGRRRRDRVERQQGGDGVEECLFVEGGNRPRALSRMQGRQAGGRRVRPRRRQEGEGTRETLPP

SEQ ID NO: 105968 - protein, 444 aa, Oryza sativa
  unsure (1)..(444): unsure at all Xaa locations
  Clone ID: PAT_MRT4530_10456C.1.pep
GVDSVWWGRQMRWRPRGCHASARERGGRRPHRTAGGARSVPANGGETEXARTPVARGGDGESVHRHGLERGGTTAAGGGSEARRMSDVDARGKGQERAGPGLAETIRHCDAHATARRPMVAGLGLAGRHGAGAEGEVGGRGKGLGRSRGSRGRRWRAGLKRGRPTAARGHARRRRVGRHGAGVGGQASGRGDGLGWLKGTQGGWWREESMXAGSRQRRTTVCGGGGKGGXREGFGAGPTGGSARLLTAAAEVEHRQGPXWRTNAQTTMSQCCLGVARGCRXGFGXELTDERERRRQXGWRRGEAVATAGRHDTERARPGNKRGELLVTRPRTHRFLRCSAADGDGEIGSSGNKAATVVRRQWRGGCEASENERRRGLGRGLGFIVEECLFVEGGNRPRALSRMQGRQAGGRRVRPRRRQVMTPAVSGKGGKRRGERGSVLCRFF

SEQ ID NO: 105969 - protein, 131 aa, Oryza sativa
  Clone ID: PAT_MRT4530_10457C.1.pep
MKINVRGSTMVRPAEETPRVRLWNSSLDLVVPRFHTPSVYFFRRGEAAAAEGGSYFDGERMRRALAEALVPFYPMAGRLAHDEDGRVEIDCNGEGVLFVEADAPGATVDDFGDFAPTMDLKRLIPTVDYTD

SEQ ID NO: 105970 - protein, 118 aa, Oryza sativa
  Clone ID: PAT_MRT4530_10458C.1.pep
MAMHQAATAVKQATGGGGAGRGETAERQRHMIMDDGTSRRGGWVNVAEASLSQRDKLTGTCGAVEALSVSCHRHLLDEKLYTNTRHKRGSDGSTIQVLWISGSALDGVCTRDCGRQPA

SEQ ID NO: 105971 - protein, 222 aa, Oryza sativa
  Clone ID: PAT_MRT4530_10459C.1.pep
DLTGISQVIEFDLSGNQISGSLPTTIGVLMRLNALYLSGNQISGNIPAGFGFITGLTDLDLSSNKLSGEVPKDFNKLLLNFLNLSMNQLTGEIPTSLQNKAYEQSFLFNPGLCVSSSNSLQNFPICRARANINKDLFGKHIALISAVASIVLLVSAVVGFILLRRKKHIQDHLSWKLTPFHVLHFTSNDILSGLCEQNWIGSGRSGKVYRVYAGHRTSGLQP

SEQ ID NO: 105972 - protein, 117 aa, Oryza sativa
  Clone ID: PAT_MRT4530_1045C.1.pep
MRAGRLVILVAVAVVVVVAGGGAAEGAGECGRASADRVALRLAPCVSAADDPQSAPSSSCCSAVHTIGQSPSCLCAVMLSNTARVAGIKPEVAITIPKRCNMADRPVGYKCGDYTLP

SEQ ID NO: 105973 - protein, 127 aa, Oryza sativa
  Clone ID: PAT_MRT4530_10460C.1.pep
GYIAPEYCSQNVYSTKSDVFSFGILVLEIISGKRAVGSYKLSGRSYELRRAWQLWKEERCDELVDPSFGEDYQEMDIIRCIQVALLCVQDSAEDRPTMHDVTTMLSNGNRRLLMPAQPGSFNIDIGD

SEQ ID NO: 105974 - protein, 105 aa, Oryza sativa
  Clone ID: PAT_MRT4530_10461C.1.pep
ASSVELIQISTFITLHSFFLGSSIPQPGQSVTKYFNHGGQPSFFSHHCIWCIHPGCSNTYNRVTSTRARITQGHIGAWPPSIDPVPTQTHFLSKGAPPQVSVALR

SEQ ID NO: 105975 - protein, 88 aa, Oryza sativa
  Clone ID: PAT_MRT4530_10462C.1.pep
SQVQHPSCLILVPSWKTCLMCSIYTTSTAPVEKKKEKNGQIYLTGARDTASSRERGVWWGVVFPAPCGGLVVLPRVCARHRRARRKNR

SEQ ID NO: 105976 - protein, 140 aa, Oryza sativa
  Clone ID: PAT_MRT4530_10463C.1.pep
MALRTLGSLLTRRLSPRAQAQAEPWLGLSIQAAAAATGRRVFYSGALAGLVAVLHLDKNTEDSDSAAEQLDETEDAKGLPFGRTRYAGWTDEHFRRMDLRREFDWNLYIAQRNAHGRFISNDPDVSLNAIKQAASERIDQ

SEQ ID NO: 105977 - protein, 734 aa, Oryza sativa
  Clone ID: PAT_MRT4530_10464C.1.pep
MWVFYLISLPLTLGMVTVTLRYFAGPGVPRYVIATVGYAWFCSLSFIILVPADIWTTLTGREKGGIGFFWSWSYWSTFILTWAVVPTIQGYEDAGDFTVKERLKTSIHMNLLFYSIVGAIGLFGLILLLVMHRAWDGGIVGFAMACSNTFGLVTGAFLLGFGLSEIPRNIWKNADWTHRQKVLSHRVAKMAVKLDNAHQEYSNAIVVAQATSNQMSKRDLLRPYMDIIDKMLAQMLREDPSFKPSGGRLGENDMDYDTDDKTMATLRRQLRRAHEEYYRCKSEYMTYVMEALELEDTIKNYERRDANGWKFVSSFRESRPGTLGSLLDTMEFIWRCVLRKQLQKGFAIVLGCMSAAILLAEATLLPSGVDLSLFSILVKSVGKQEVLVQVAAFVPLMYMCICTYYSLFQIGMLMFYSLTPRQTSSVSLLMICSMVARYAPPISYNFLNLIRLGGDAKTTFEKRMGNIDDAVPFFGRGFNRIYPLFMVVYTLLVASNFFGRLINFFGSWKRFKFQREEENMDGFDPSGMIILQKERSWIEQGCKVGEQVIPLARNFNNVNTDVESGKVPLVENTLEMKSGATSSRADGRVGQSKYANNRETIATKYSAIREQSRQAVKPAKKEISSTSVSLLEEGSSEQWSNTGAPVGSSAGISQTWATMKIGFQNFKANMGSKKFIPLRQDPGFAPHSNVSSPESLDEIFQKLKRRPADMPVDYLDDDDDNTGDMDPTFPGSTR

SEQ ID NO: 105978 - protein, 261 aa, Oryza sativa
  Clone ID: PAT_MRT4530_10465C.1.pep
MAKHTRKSFISFEPDYARFMHHHMKNASCTSFHSLTYTTRMGDTPGYEQKVYVVCFYHSVNYRVFQGNTLQQLLLRSVHLEHWGTPGYWSITLANMARTAAGRVERGGGRGGRACGRRSHPSSPAPWPCPLRQAWGSLDVLVGRLRTAFDEHGGHPEANPFGARVVRLYLREVCDSQAKVRGIAYEKKRRKRPPTSSSHSQDGTAATCPASPAASPTPLPPPPERSADMGACVAIVVAVGCTPLSLAARRGCSYCALARRR

SEQ ID NO: 105979 - protein, 352 aa, Oryza sativa
  Clone ID: PAT_MRT4530_10466C.1.pep
MATAVMDSEFGSLVKVSAAVWAAMFYARLAAASLRPGAPRLAALLPVVALFCVVPFSFSTTTFRGCSAFFLSWLGVFKLLLLAAGRGPLNPTHPLHHFVFSASLPVKLRHLASAKPAKGVDPAPANESAAGKILVSGAVIPLIIYTYQFKNAMSRYQLLILYTGHIYFSLQLLLAVVHGLIHGVLGMEMEPQVDRPYLASSLRDFWGRRWNLMVPAILRPSVYRPVRARLGDAAGVLAAFLVSGLMHEAMFFYIMWRPPSGEVTVFFLLHGVCTAAEAWWARHAGWWRPPRAAAVPLTLAFVAGTGFWLFFPAMIKAGLDEMVLHECQGMVAVMEQSGRWLAGATNLTFATR

SEQ ID NO: 105980 - protein, 42 aa, Oryza sativa
  Clone ID: PAT_MRT4530_10467C.1.pep
FPPPFLPPPIRKTFSPPNPLPKFPGSPPPPPKPPLPPPEKIS

SEQ ID NO: 105981 - protein, 213 aa, Oryza sativa
  Clone ID: PAT_MRT4530_10468C.1.pep
MGDTPGCEQKVYVVSLYHSVNYRVFQGNTLQQLLLRGVHSEHWGTPGKWSITPANMARTAAGRVERGGGRGGRACGHRSHPSPPTLCPCPLRQAWGSLDTLVGRLCTAFDEHGGHPEANPFGARVVRLYVRDSQAKVRGIAYEKKRRKRPPTSFSHSQAAAAATCPASPAASPTPERSADMGACVAIAVAVGCTPLSLAARRGCSYCALAYRR

SEQ ID NO: 105982 - protein, 67 aa, Oryza sativa
  Clone ID: PAT_MRT4530_10469C.1.pep
FISSRTRVYDPKHSTVATLLPTQPNCGFYTYLLQLSEALNALHHFDTFNRSITVQTACINYRTRHAS

SEQ ID NO: 105983 - protein, 283 aa, Oryza sativa
  unsure (1)..(283): unsure at all Xaa locations
  Clone ID: PAT_MRT4530_1046C.1.pep
GGEASHGRKRREEDEGRRTEARVGSWSGVGRRTGRRSKRGGRGRQRRRRRRPFPRPPLAISSAPTFCPGGLPPQRRGCRSLPVARCTEGRAADGGWRRVGAGVPREDDDALAPGEGATMRKRRKGLEWAFFFICCSWTSGIGXDAVLRVVGELAELLHPLQDEVVHGAVVGLGLHAVEGVHGGQLGDLATDAVELPVFLGQQRGGDVDGGRRRRRGGAVAERQAARHANPAPATGAAVRADYHRSRPSSSTRRRLPPPAPARRRARRPPSSSSERRHAAYIVH

SEQ ID NO: 105984 - protein, 1213 aa, Oryza sativa
  Clone ID: PAT_MRT4530_10470C.1.pep
MSDPRYAYPYPSQGYYNQGPYQGPPVMAPPHAQYQYQYAQPPPPPRQPGFLEGWYGIYLSIYLSIYLSMSSSSSSSMAKGKQPQQQWKPKATDPAAAAPAVVAAASSPASSTSSSADFAGGVERMTISPSPQGGASQVWVPRGYATSASSSSSSSSAAAAEQRIDAEKLSRVFKAAPNFEVDNNTFIQSQIRATFYPKFENEKSDQETRTRMIEMVSHGLATLEVTLKHSGSLFMYAGHHGGAYAKNSFGNIYTAVGVFVLGRLFREAWGKEAPRMQEEFNVFLEKKCISISMELVTAVLGDHGQRPKDDYAVITAVTELGHGKPKFYSTPEVIEFCRKWRLPTNHVWLFSTRKSASSFFAAYDALCEEGTATSVCKALDEIADVAVPGSKDHVKVQGEILEGLVARIVSRESSVQIEEVLRNYPLPPLDGEVLFSYAVGSDLGPSLREICAANRSDEKQQIKALLENVGPSMCPDHSDWFGCSGLDDHQSPSANRSVVTKFLQAHPTDYTTKKLQEMIRVMKQRNFPAAFKCYWNYHKIDSLSNDSLYYKMVIHVLSDSVFRRYQQEMRRNQGLWPLYRGFFVDVNLFKVNNMKSSIPSEDIDTSLKNINGALDSNSSAKDGLADEDSNLMVKLKFLTYKLRTFLIRNGLSTLFKDGPSAYKTYYLRQMKNWGTSASKQKELSKLLDEWAVYIRRKYGNKPLSSSTYLSEAEPFLEQYAKRSPENQALIGAAGDLVQTENFLAILEAKRDEEGDLQAERGTAPPSPTSTSLDVVPKAEGLIVFFPGIPGCAKSALCKEILTTPGGLGDNRPLHSLMGDLIKGRYWQKVADERKKKPFRITLADKNAPNEEVWRQSYRFYNKLRDHLFQIEDMCRTTKAAAVPVIPDSEGTDSNPFSLDALAVFMFRVLQRDNHPGNLDKASPNAGYVLLMFYNLYDGKKHALQSRREFESELYERFGSLVKMPLLKPDRAPLPDEVKAILDEGISLFRLHQSRHGRAEPSKGAYAKEWAQWEKRLRQVLFANKDYLNSIQVPFDFAVKEVLEQLKSVAKGDLKTPDTAKRKFGNIVFAAVTLPPADILGALPKLAEDTDANKFLNNTKLADNLTKAHVTLAHKRAHGVAAVSSYGVYQNHQVPVIFNAFLFSDKMAALEVELGTVNGEKIASRNDWPHATLWTAPGVAPKEANTLPQLVTEGKAKRVAIDPPITISGVLDFY

SEQ ID NO: 105985 - protein, 701 aa, Oryza sativa
  Clone ID: PAT_MRT4530_10471C.1.pep
NPLEEDSVCRWHTLKHVAGDVLDVGAGGSLGDDVPEVHHAAPHLRERLRDDLRRRAEPAGEVDQGGDPPEHLAVLPHDVVHDDAAVRDHPVVDERVERRVAAGQLPQAPAVRLLEDAVRVLLRRLAVAAEPLADAEEGDDERRVEDHGHDAGQVRGADEEPRRRRELSSSRHQQFRNLAKTRVDDLQEMFSGLQSARKESRSADAALLEEQVHHMLREWRAELSQGNNREASDPPSETLRLLQLAGAEEEDDATSKLVMPRSPMPPSSHQSHGHGQDGGQNLQGEAVMGSTAATAAPHLGQGMQGDCGGMAGVTNAMFHDQLYYIDHELNIDDFLQDDDYKINLPGSNPDGPNTMQGIGQLEHQQYNLPLDLPPNSFVDANNSAQSSGDVFFHMSDLLTTMCPSPSQYLGPKCALWDCGRPVRGSDECQHYCNPYHAGLALNDDGLLGTRPVMRPRGIDLKDGPLFAALSAKVQGKNVGIPVCEGAATTKSPWNAPELFDLSLLEGESLREWLFFDTPRRAFDSGNRKQRSLPDYNGRGWHESRKQVMKDFGGLKRSYYMDPQPSSNYEWHLFEYETNDSDALALYRLEYKSSDTKRSVKSKLASSPLSEIQQQMVRLSADSPVESKRTARSRAKANQKDNNSNAYPALNTPVQVSASNAHQTMSMDQMTFLDGSVVYGPHLPYGYSTERSDFYWNPSDGT

SEQ ID NO: 105986 - protein, 211 aa, Oryza sativa
  unsure (1)..(211): unsure at all Xaa locations
  Clone ID: PAT_MRT4530_10472C.1.pep
SFRQLTTIEGIHELISLGALIQNVHLHPSLPDDILCKFSPNGNYISKSAYMLQFQGIFTTIDFTRIXSAPTELKHRFIGWLILHQKTLTAQNLLQRHWPCDWIFPLCREAFENIAHLFKECFFTINVGNKICAXKGLGQNTLPNTLDLXSWWSLLSTFRPKTQRKRTPGCLITSWWNIWLERNQRIFKNLCKAAKHGGFSNFARPRVTLLS

SEQ ID NO: 105987 - protein, 110 aa, Oryza sativa
  Clone ID: PAT_MRT4530_10473C.1.pep
EPARHDVNIKEEISRSHQHSRQEAYDQDGPPKPATGPGGQCAQQYRQFNAMRTRRFSVSHHPKPSVAYEFMVFAFLAIPLLRSLGHVICSHWWERVCRLVCCLKFEALVN

SEQ ID NO: 105988 - protein, 299 aa, Oryza sativa
  Clone ID: PAT_MRT4530_10474C.1.pep
MCDSLFWQSSADQGDLSDVVRASLQLQTAPRHQAASPPYVHLLGGGGGGGEDQLAAVSQHAEQQQQSMVDASAACDLLHALLPPPPVVQVQQQGASRTRTTIEEDTTGDGEELFAGAHYVVPPIKRRKSQTKKVVCIPAGASGGGGGEVVPSDLWAWRKYGQKPIKGSPYPRGYYRCSSSKGCSARKQVERSRADPTMLVVTYTSDHNHPWPTHRNALAGSTRPSSSNSSNIRLQDSTPVHHQSQTGHDRLTTTHLKQEDVIISPSLLQPDHHQLCTIIDTKHHLLFHQDYPHSFGLFD

SEQ ID NO: 105989 - protein, 159 aa, Oryza sativa
  Clone ID: PAT_MRT4530_10475C.1.pep
ETTRLKKKKEGQGKGPFYQTQGVGKKPGRRRLAKKRNKMAFGIGETKKKTKPGGPNKLQSFLGAEKKPPTNGKKGEPNHPYRGFLPGGGKRWGAQPRGLGEMEGAGYGPGGQPGDPIARETKGGKGHPTIYQGGHGRKRGGFFHLMAPILTTPRGGGGG

SEQ ID NO: 105990 - protein, 56 aa, Oryza sativa
  Clone ID: PAT_MRT4530_10476C.1.pep
QNAGPTTPPRNTAAVPRASSTPRNAATGPRATPPPRRAPHAAAGPRRCRARRHAAA

SEQ ID NO: 105991 - protein, 72 aa, Oryza sativa
  Clone ID: PAT_MRT4530_10477C.1.pep
GCARRRRPWRLLLPLGRRRRRRQVRSALARAAACTVSLSISKTSVCFCVWIERSINRSIDGEIKRSIWIMDS

SEQ ID NO: 105992 - protein, 1599 aa, Oryza sativa
  unsure (1)..(1599): unsure at all Xaa locations
  Clone ID: PAT_MRT4530_10478C.1.pep
MPKRLFCLKNFVMDRQWMYADRRSKEFIDGVHYFLRVAEANKQKGFICCPCNKCKNQKEYSASRTIHFHLFESGFMPSYNCWTSHGEQGVEMEEDEVEDDNIPDFAQYAGFEGNQTGEEDIDADYNDVADDLGQMLQDAKEDCESEKGAHKLDKMLEDHRTSLYPGCEQGHKKLDTTLEFLQRKAKNGVSDKAFGDLLKLVKNILPEGNKLPETTYEAKKIVCPLGLEVQKIHACPNDCILYHGEVDGQLTKKRIPAKVMWYFPIIPRLRRLFRNKGNARMMRWHAEERQQDGMLRHPADGSQWRNIDRKFKDFGNDARNIRFGLSTDGMNPFGEMSSGPKQPGNDIDVFLRPLVEDLKLLWKKEGVVYMGHRRFLAANHSVRKKGKHFEHTADNRTKPKHRSGKIVFAMVKDLKLPYWEFLDVRDAIDVMHLTKNLCVNLLGFLGVYGKSXKIHWKHHMEQRGDLHPEPQEKGSHYLSPASYTLSKAEKESMFQCLESIKVPSGYSMNIKRIISTKEKKFTNLKSHDCHVLMTQLLPVIIRGILPDNVRATITKLCSFMNAISQKVIDPDRLEALQNDVVQCLVSFELIFPPSFFNIMTHLLCHLVKEIGILGPVFLYNMFSFERYMGILKKYVRNRARPEASIAKGYGTEEVIEFCVEFIEDLRPIGVLESRHEGRLRGKGTLGRKAIMMVDNNLFRKAHFTVLQQSSLVAPYIEEHLALVRARNIAQNMKSTNQNNVVRIDAMGHDGTTGTYYGAIEEIWELDYGPLKVPLFRCQWIRLTGGGVTIDDSGMTTVDLNKVGYSDEPFVLANDVTQVFYVKDMSSKGKKGKGPDEPKCHVVLPGKRKTVGVEDKTDEDYDQFDRQPPFTVMVDPSILLSNEDTLYSRSDYKEGTIVRRKEDVVVVVPQAEVMADRDEEQILYDTIASGSSQFWNEEEGNEEPNQHLNEEGNAERDAEGNEEEFQTFKGDLYRKYILKGQTPNFDVFPKLRDHWDKFVAYKTGQQGQAMMERNKENAAKKKYHHHLGSGGYSVAMPKWEEIEASLLEMVDGSLVFSDQIREAANRLTGAVEASSQGTFRPDREKDELSLTLQTPEHPGRTRGKGVIPWKMGFKEDIHTYRSRMRSKRDTEAKIADLEYRVSSYELSMQEEVARKVASGMAIPTDISGTXTAGRFQQDTRGSKLSWWKPCTRTSSWTTQEEMRHLVHHLLRLRRLLLHHLLRLLRHLLLHHLLRLLRLLRLLLHRVRLHXPKTRSRQAPPPTSTRATKKAKVDTTKNKEPPYGCSQEELDAYVAGEVKRQLKPRSPEKKIPIDPSVKNFFKEMSTANKEALKLSDYDRTLRKAYYKKSKPVPQLGEQPHQVVEPLVTGEDFGITDFISDTGLTMAQLVGGAPIPKAEVAYKFELGKPLVRPEQLQSLPTQMYKFHERYMEMSANGREMFGARIRNPNFLQGEDVLWIHFKDVFNLYHRDALDVSLLSVWILMEIQRARRRGVYNTGFIDPRKINTEMLDKYEKDTEDNLVHLLTQQHFKTFILLPYNTEVTVYDSMNKEEKVFDKVFQLIDRAWDRFRQLVRGTWKAKLGRRFHFPGSTCMIQNYIELNL

SEQ ID NO: 105993 - protein, 1111 aa, Oryza sativa
  Clone ID: PAT_MRT4530_10479C.1.pep
MDMLQDAKEDCESEKGAHKLDKMLEDHRTSFYPGCEQGHKKLDTTLEFLQWKDKNGVSDKAFGDLLKLVKNILPEGNKLPETTYDAKKIVCPLGLEVQKIHACSNDCILYRGEEYENLEACPIFKALRYKIRRDDPGEVDGQLTKKIILAKWQNINRKFKDFGKDARNKRFGLSTDGMNPFGEMSSGHSTWPVTMCIYNLPPWLCMKRKYIMMPIIIQGPKQPGNDIDVYLRPLVEDLKLLWKKEGVPVWDEDKQEEFNLRALLFVTINDWHALSNLSGQSNKGYKACTHYMDETETNHPVRKKGKHFEHTADHRTKPKHRSGKTVFAMVKDLKVVFGKGPGSQPIESEDGHAAMWKKNSIFWELPYWEFLDVRHAIDMMHLTKNLCVNLLGFLGVYGKSKDTLEARNDLKHMEQCGDLHPEPKEKGSHYLSPASYTLSKAEKESMFECSESIKVPSGYSTNIKRIISTKEKKFTNQKSHGCHVLMTQLLPVIIRGILPDNVRATITKLCAFMNAISQKVIDPDRLEALQNDVVQCLVSFELIFPPLFFNIMTHLLCHLVKEIGIPGPVYLHNMFPFERYMGILKKYVRNRARPEASIAKGYGTEEVIEFCVEFIEDLSPIGVPESRHEGRLRGKGTLGRKAIMTVDNNLFRKAHFTVLQQSSLVAPYIEEHLALVHARNIDKSDAWITRHYIDTFSAWLRQHLIGNETINQQLAFLTRGPSGSIATFQGYEINGYTFYTRAQDMKSTNRNSAIRIDAMGHDGTTGTYYGAIEDIWELDYGPLKVPLFWCQWVRLTGGGVTIDDSGMTTFDLNKVGYSDEPFVLANDVMQVFYVKDMSSKGKKGKGPDDPKRHVVLPGKRKIVGVEDKTDEDYDQFDGQPPFTVTIDPSILLSNEETPYSCSDHKEGTIMADRDEEQILYDTIAEGSSQYWNEEEGNEDPNQYLNEDPNQYLNEEGNVERDAEGNEEEEASGSHPSAGQKRARGQRGAAKKIEGRHIITKVDEDGRPSAPVEAAKNFVRHSGWVVRDNVPVSTVYWRRTRARGDNDSFVPESEKEMMWTTMLETFTLPAGTENIVKQWTLKKMAEQFQSFKVVKSIWRSFFSVGVINQDYK

SEQ ID NO: 105994 - protein, 148 aa, Oryza sativa
  Clone ID: PAT_MRT4530_1047C.1.pep
MGMTAPLPLLLLLLLLYFSFPLSTLVLPAIAAAALAVPLSILVLSQEDGGVTQLLAIHGADGHLTFMRTTATSRSFLTSMASGHGKRRWQDASNEVSRGGDVITSARGEIRSSPRWFNVYLGRKGYMRLEVKRHTFNEFAFIKGYIGI

SEQ ID NO: 105995 - protein, 118 aa, Oryza sativa
  Clone ID: PAT_MRT4530_10480C.1.pep
MPEERTTGACEQQALHEKSFKNRSMPGDWSIRISRTDRSLPADVAMSLREKGDMQFHRMLQKYVFRQGVFPGQMLQILKQQGRSHSILGVLFVPLNPRKYRGIADLQWMHNMYGIMSK

SEQ ID NO: 105996 - protein, 405 aa, Oryza sativa
  Clone ID: PAT_MRT4530_10481C.1.pep
MADEFPPPGPPHPAPMADGGEPPPPWADLPIHIVRGIASRLLCKIDRRFGEGVCRSWREAFLQVGPPPPPLPLLVVANAGEHAFHCVPSNWRTHPIPIPMPRFAHHRYFGSYDGGWLFLSISQSSRHGLHNINKNVNSKRFRFSLPDQRLYQIRPTTAEADKFIVIVAATLSCQPTEPGCVAAGIIDLHSFPDHPSRHGAGAFLFLTNGEHIRELPQPIFPPPGTAKRVRNELYFKPRGDDGGGGRPVLARYLVESRDELLMVVRLGTLEHSWIKLADLGGRMLFVGRGCSRSYEAADGYPGMEGVYFLDDRSFYDRTTVFKNDDKRKYHRSDIGKWSGSPPQVRHCLPEQVLNHVHNEADRVADREFDGIALNIEVLGSNAKLTKSSMNINGMHGASYVDFTNL

SEQ ID NO: 105997 - protein, 848 aa, Oryza sativa
  Clone ID: PAT_MRT4530_10482C.1.pep
MPSKKKEEDEVENENIPNWAQYAGFEGNQTGEVDRDADDNDAADDLGCEQGHKKFLQWKAKNGVSDKAFGDLLKLVKNILPEGNKLPDTMYEAKKIVCPLGLEVQKIHACPNDCILYRGEDNISGQSNKGYKACTHCMDETESTYLKHCRNVVYMGHRRFLAANHPVRKKGKHFEHKADHRTKPKHRSGKIVFDMVNDLKVVFGKGPGSQPIESEDGHAAMWKKNSIFWELPYWEFLDVRYAIDVMHLTKNLCVNLLGFLGVYGKSKDTLEAHNDLKHMEQRGDLHPEPKEKGSHYLSPASYTLSKAEKENMFECLESIKVPSGYSTNIKRIISTKEKKFTNLKSHDCHVLMTQLLPVIIRGILPDNVRATITKLCAFMNAISQKVIDPDRLEALQNDVVQCLVSFELIFPPSFFNIMTHLRCHLVKEIGMEDLITPSPLGGWNFDFGKSFASQVLDLFGCPVHFSPYFSSSPFILVVDFVRFNFRLTVKSVAIALQACLGGSPHGFSVLSLKANCFSFQVCNKNVGLYVNSFRDFTCKDFHVRFFLWGNGGPNWRREFDLWEKEENDLWAHLHDADFRPELFLLEGTNIEVPWEGRTPRADLTLQGVLPNSHQEFAAVVVDPQPPEHLFGQLIQEVANIIEHQHHIHVVRIQRYPLALCLVQLPSVLDRDILVASGPVLLGNWFHGTFVRHDQLANWRNSPYTREGWLMILGIPLNLKTGAIIERITNLCGEFIDWHYRDRVLGRVLVKARYKSANEVPNCIVLGDTMAYGGNGQTWTFHVYVLNGEPTDMLPGDEDLLPIWQMMPPPQQHHHHNKHQHHNEEDFNANHNQNEDIGGQPDDFGAEPD

SEQ ID NO: 105998 - protein, 775 aa, Oryza sativa
  unsure (1)..(775): unsure at all Xaa locations
  Clone ID: PAT_MRT4530_10483C.1.pep
MEEDEVEDDNIPDLAQYAGFEGNQTGKEESDADGNSVADDLGQMLQDAKEDCESEKNILPEGNQLPKTTYEAKKIVCPLGLEVQKIHAWPNDCILYRGEEYENLEACLVCKALRYKIRRDDPGEVDGQLTKKRIPAKVMWYFPIIPRLRRLFRNKGNVRMMRWHAEERQQDGMLRHPADGPKQPGKDIDVYLRPLVEDLKQLWKKEGVPEANHPVRKKGKHFEHKADHRTKPKHRSGKTVFXAMVKDLKVVFGKGPGSQHIESEDGHAAMWKKNSIFWELPYWEFLDVRHAIDVMHLTKNLCINLLGFLGVYGKSKDTLEVRNDLKYMEQRGNLHSEPKKKGSHYLTPASYTLSKAEKDNMFECLESIKKVIDPDRLEALQNDVVQCLVSCELIFPPSFFNIMTHLLCHLVKEIGILDPVYLHNMFPFERYMGVLKKYVRNRARPEASIAKGYGTEEVIEFCVEFIEDLRPIGVPKSRHEGRLRGKGTLGRKAIMTVDNNLFCKAHFTVLQQSSLVAPYIEEHLALVRARNIGKSDAWITQYHIDTFSAWLRQHLMGNETINQQPAFLARGPSSSIATFQGYEINGYTFYTRAQDMKSTSQNSAVRIDAMGHDGTTGTYYGAIEDIWELDYGPLKVPLFRCQWVRLTGGGVTIDSGMTTVDLNKVGYSDEPFVLANDVTQVFYVKDMSSKGRKGKGPDEPKRHVVLPGKRKIIGVEYKTDEDYDQFDGQPPFTVTIDPSILLSNEDTLYSRSDHKEGTIVRRKYVRSTVTADVLL

SEQ ID NO: 105999 - protein, 89 aa, Oryza sativa
  Clone ID: PAT_MRT4530_10484C.1.pep
RRHDATRGSARRVARPGGDGDGTALSSGRHLLSGSLKSTGRDIPDNLFDGSNFLRFLKIYCFRQHDESQGIIIVSPAAQLIPLINLFSL

SEQ ID NO: 106000 - protein, 1906 aa, Oryza sativa
  Clone ID: PAT_MRT4530_10485C.1.pep
MMDRQWMYADRRSKEFIDGMHYFLRVAEANKQKGFICCPCNKCKNQKEYSAFRTIHFHLFESGFMPSYNCWTSHGEQGLEMEEDEVEDDNIPDFAQYAGFEGNQTGEEDRDADYNDVADDLGQMLQDAKEDCESEKGAHKLDKILEDHRTSLYPGCEQGHKKLDTTLEFLQWKAKNGVSDKAFGDLLKLVKNILPEGNKLPDTTYEAKKIVCPLGLEEYENLEACPVCKALQYKIRRDDPGEVDGQLTKKRIPAKVMWYFPIIPRLRRLFRNKGNARMMRWHAEERQQDGMLRHPVDGSQWRNIDRKFKDFGKDARNIRFGLSTDGMNPFGEMSSGHSTWPVTMCIYSLPPWLCMKRKYIMMPIIIQGPKQPGNDIDVFLRPLVEDLKLLWKKEGVPVWDEDKQEEFNLLALLFVTINDWPALSNLSGQSNKGYKACTHCMDETESTDLKHCRKIVYMGHRRFLAANHPVRKKGKHFEHKADHRMKPKHRSGKIVFAMVLPYWEFLDVRHTIDVMHLTKNLCVNLFGFLGVDGKSKDTLEARNDLKHMEQRGDLHPEPKEKGSHYLSPASYTLSKAEKESLFQCFESIKVPSVYSTNIKRIISTKEKKFTNLKSHDCHVLMTQLLPVIIRGILPDNVRATITKLCSFMNAISQRVIDPDRLEALQNDVVQCLVSFELIFPPSFFNIMMHLLLHLVKEIGILGPVFLHNMFPFERYMGVLKKYVRNRARPEASIAKGYGTEEVIEFCVEFIEDLRPIGVPESRHEGRLRGKGTLGRKAIMTVDNNLFRKAHFTVLQQSSLVAPYIEEHLALVRSRNIDKSDAWITRHHIDTFPGWLRQHLMDNETINQQLAFLARGSSSSIATFQGYEINGYTFYTRAEDMKSTNQNSVVRIDAMGHDGTTGTYYGAIEEIWELDYGPLKVPLFRCQWVRLTGGGVTIDDSGMTNVDLNKVGYSDEPFVLANDVTHVFYVKDMSSKGKKVKGPDEPKRHVVLPGKRKIVGVEDKTDEDYDQFDGQPPFTVTIDPSILLSNEDTLYSHSDHKEGTIVRRKEDVIVVVPQAEVILYDTIAEGSSQYWNEEEGNEDPNQYLNKEGNVERDAEGNEEGNVERDAEGNEEGNVERDAEGNEEAASGSHPSTGQKRARGQREKEKLWTTMLETFTLPAGTENIVKQWTLKKMAEQFKSFKGHLYKKYILKDEFVADKTGQQGQAMMVKNKENAAKKKYHHHLGLGGYSVAILKWEEMEARMIERGIEPATAKWPDRSKFWYYAHGGTLNPVDGSLVFSDQIREAASRLTDIVEASSQCTFRPDREKDELSLALQIPEHPRRTRVASGMAIPTDISGTYHCRPIPAGYSRVEVELVEAVYEDLELDYLGGDGEVKRQLKPRSPEKKIPIDPSVKNFFKGMSTTNKEALKLTDYDRTLRKAYYKKSKPVPQLGEQPNQVVEPLATGEDFGITYFISDTGLTVAQLVGGAPIPKAEVAYKFELGKPLVRPEQLQSLPTQMYKFHERYMEMSAKGREMFGARIRNPDFLEGEDVLRIHFKDVFDRYHLDALDVSLLSAWILVTVYDSMNKEEKVFDKCAKQDQGTNLCGYYVCEYAHCLSNQIYTTRELDRIHMRKNLPYKDFITAVQEQLMGFINEEDLIPDELRDPLGLLRVAGGLRNTPDPKGSTTLTRIVLGAKKLRQTIGMGTPQDRAPTPDENDRVLHFLRHHLCATLKNEYMGLRSPLTLWTILKKRFEKLKYTILPQAEQDWARLRFADFKSVSEYNSTLHQICTNLSLCDKVVTDTEKIEKTLSTFHPSTVQSACNYRQASYKEYDEMIDIMQVSESHDEVLRKNFVSQPPGKSVGLEVNASSYKVRKPVQRKRGKRGGKKVAEKSEGKAPAAQGAQGGKGKKEAKPPRNDKAYGQQD

SEQ ID NO: 106001 - protein, 66 aa, Oryza sativa
  Clone ID: PAT_MRT4530_10486C.1.pep
MAYGNSVRKLGRRMRACLEKIKILRSSWLVASLLESRKVGFSSFRFLGYFRIWKKTGLFGGASDFG

SEQ ID NO: 106002 - protein, 1175 aa, Oryza sativa
  Clone ID: PAT_MRT4530_10487C.1.pep
MEEDEVEDDNIPDFAQYAGFEGNQTGEEERDADGNNVADDLGQMLQDAKEDCESEKGTHKLDKMLEDHRTSLYPGCEQGHIKLDTTLEFLQWKAKNGPKQLGNDIDVYLRPLVEDLKLLWKKEGVPVWDEDKQEKFNLRALLFVTINDWPTLSNLSGQSNKGDLYPEPKLKGSHYLSPASYTLSKAEKESMFECLESIKLLPVVIRGILPDNVRATITKLCAFMNAISQKVINPDRLEALQNDVVQCLVSFELIFPPSFFNIMTHLLCHLVKEIGILGPVYLHNMFPFERYMGVLKKYVRNRARPEASIAKGYGIDEVIEFCVEFIEDLRPIGVPESRHEGRLWGKGTLGRKAIMTVDNNLFRKAHFTVLQQSSLVAPYIEEHLALVRARNIGKSDAWITRHHINTFSTWLRQHLMGNETINQQLAFLARGPSGSIATFQGYVINGYTFYTRAQDMKSMNQNSAVRIDAMGHDGTTGTYYGAIEDIWKLDYGPLKVPLFRCQWVRLTGGGVTIDDSGMTTVDLNKVGYSDEPFVLANDVTQVFYVKDMSSKGKKAKGLNEPKRHVVLPGKRKIVGVEDKTDEDYDQFDGQPPFTVTIDLSILLSNEDTPYSRSDHKEGTIVRRKYVRSTVTADGNPAPTPPSSLAVAWQSSPPPLQTPPPHLLGESRRCLSLSLDLDLDISLSPRPTTDFDAAAAAADAIATTTPPPLPRAHHAAASRRRAATPRRRDATPSPVPLRRHHLELAMPRRGRHTPTPPGPDAAAAPTRHRAPTPPPRPHAAGPAHGAPTPPPRHHATAAHAQYCRMLTNVIETGWVVRDNVPVSTVYWRRTRARGDNDSFVPDSEKEMLWTTMLEMFTLPAGTENIVKQWTLKKMAEQFQSFKGDLYKKYILKGLTLNFDVFPKLRDHWDEFVAYKTRQQGQAMMARNKDNAAKKKYHHHLGGTLNPVDGSLVFSDQIREAASRLTDTVVASSQGTFRPDREKDELSLALQTPEHPGRTRGKGVIPWKIGFKENIHTYRSRMRSKRDTEVKIADLEYRVSSYELSIQEEVARKVDERMAAHRSQDPQPYIHPAMVSPSGNHSSCASTGQVGSQSMDAMQTQDETTCPVDEITQRTPCELHIPFKNLSIKVASGMAIPTDSSGTYHCRPIPAGYSRVEVELVEAAYEDLELDYPGGDG

SEQ ID NO: 106003 - protein, 225 aa, Oryza sativa
  Clone ID: PAT_MRT4530_10488C.1.pep
MAANMEAAAAAHHASAPQRGDGGGRWCGGGGGRAVPPLGAPSAASVAPNGGVDSGELAAVGGEKGGGDEIVGANNAENKKEFKGNSSNNPKNLTGKRKRNNNRRKFKGRKKGKGKDKAPQPRSNGNKHCNMCGSDTHVAKDCRIPKHLVLLYEKSLKDKKSSENPRFEAHFNLTHKERPEVASSHQAPIEPESNLNVLPEDVAPLSAMDDMFIEYCSTDPLGDLQ

SEQ ID NO: 106004 - protein, 63 aa, Oryza sativa
  Clone ID: PAT_MRT4530_10489C.1.pep
TNRLNARRCHQEPTKPAAKKPPFISANEPSISDDACSRRNPEKKGFGVRFEGLVVLLPQGGSW

SEQ ID NO: 106005 - protein, 112 aa, Oryza sativa
  Clone ID: PAT_MRT4530_1048C.1.pep
LRRRAPPPRRESNYGHNYDDDDEEERRRRTEAAPAERRTDTTPTTLDPRRLWTLDGTSPNDDSTDGRHRIASATVLRHSQDPSSLTHRTRLTSDLLPIVRHITLTDGLTTLI

SEQ ID NO: 106006 - protein, 711 aa, Oryza sativa
  unsure (1)..(711): unsure at all Xaa locations
  Clone ID: PAT_MRT4530_10490C.1.pep
MESKGLKWKKMNWKTTIFRTLLSTLDLKKIKRARRKGMLMEYENLEACPICKALRYKIRRDDPGEVDGQLTKKRIPAKVMWYFPIIPRLRCLFRNKGNARMMRWHAEERQQDGMLRHPADGSQCNLSGQSNKGYKACTHCMDEIESMYLKHCRKVVSMGHRRFLAANHLVRKKGKHFEYKADHRTKPKHCSGKTVFAMVKDLKVVFGKGPGSQPIESEDGVYGKSKDTLEARNDLRHMEQRGDLHPEPKEKGNHYLSPASYTLSKAEKESMFECLESIKVPSGYSTNIKRIISTKEKKFTNLKSHDCHVLMTQLLPVIIRGILPDNVRATITKLCSFMNAIPQKIGILGPVYLHNMFPFERYMGVLKKYVCNRARSEASIAKGYGTEEVIEFYIEFIEDLRPIGVPESRHEGRLXERLRGKGTLGRKAIMTVDNNLFLKPISRFCNNLHWWLXYIEEHLALVRATNIDKSDAWITWHHIDTFPAWLRQHLMGNEAINQQLAFLARGPSGLIVTFQGYEINGYTFYTRAQDMKSTNQNSVICIDAMGHDGTTGTYYGAIEEIWELDYGPLKVPLFRCQWVRLTGRGVTIDDSGMTTVDLNKVGYSDESFILANDVTQVFYVKDMSSKGKKGKGPNEPKRHVVLPGKRKIVGVEDKTDEDYDQFDGQPTFTVTIDPSILLSNEDTPYSRSDHKEGTVVRRKYVRTTVTADVLP

SEQ ID NO: 106007 - protein, 1103 aa, Oryza sativa
  unsure (1)..(1103): unsure at all Xaa locations
  Clone ID: PAT_MRT4530_10491C.1.pep
FPNNAKGKHFEHKADHRTKPKHRSGKIVFAMVKDLKVVFGMGPGSQPIESEDGHAAMWKKNSIFWELPYWEFLDVRYAIDVMHITKNLCVNLLGFLGVYGKSKDTLEARNDLKHMEQHGDLHLEPKEKXSHYLSPASYSLSKAEKESIFECLESIKVXSGYSTNIKRIISTKEKNFANLKSHDCHVLMTQLLPLPVIIRGILPDNIRATITKLCAFMNAISQKVIDPDRLEALXNDVVQCLVSFESIFPPSFFNIMTHLLCHLVKEIGILGPVYLNNMFPFERYMGVLKKYVHNRACPEASIAKGYGTEKVIEFCVEFIEDLRPIGVSESRHEGILWGKGTFGRKAIMTVDNNLFRKAHFTVLQQSSLVAPYIEEHLALVHARNISKSDAWITRHQIDTFPAWLRQHLMGNEAINXQLAFLARGPSGSIATFXGYEINGYIFYTRAQDMKSTNQNSAIRIDAMGHDGTTGTYYGAIKDIWELDYGPLKVPLFQCQWVRLTGGGVTIDDSGMTTVDLNKVGYSDEPFVLANDVTQVFYVKDMSSKGKKGKGPDEPKRHVVLLGKRKIVRVEDKTDEDYDQFDGQPPFTVTIDPSILLSNEDTPYSRSDHKEGTLVRRKYVRSTVTADVLPYFLYEQMADRDDEQILYDTIAEGSNQYWNEEEGNEDPKQYLNEEGNVERDAEGNEEGNKEEEASGSQPSAGQKRARGQRGAAKKIEGRHIITVVDEDDRPSAPAEVAKNFVRHGGWVVRDNVPVSKVYWRRTRARGDYDSFVPESEKEMLWTTMLETFTLPAGTENIVKQWTLKKMAEQFESFKGDLYKKYILKWLTPNFDVFPKLRDHWDEFVAYKIGQQGRAMMDKNKENAAKKKYHHHLGSGGYSVAMPKWEEMEASLIERGIEPVTAKWPDRSKFWYYAHGGTLNPVDGSLVFSDQIREAASXLTDVVEASSQGTFXPDREKDKLLLALQTPEHPGRTRGKGVIPWKIGFKEDIHMYRSRLRSKRDTEAKIADLEYRVSSYELSMQEEEARKVDELMAAHRCXDPQPYIPPVIVSPSGNRSICASTGQVGSHSMDAMQTXDETTCPVDEITQRTPGELHIPFKNLSIEVC

SEQ ID NO: 106008 - protein, 1095 aa, Oryza sativa
  unsure (1)..(1095): unsure at all Xaa locations
  Clone ID: PAT_MRT4530_10492C.1.pep
MDRQWMYADRRSKEFIDGVHYFLRVAEANKQKGFICCPCKKCKNQNEYSASRTIHFHLFESGFMPSYNCWTSHREQGVEMEEDEVEDDNIPDFAQYAGFEGNQTGEEDKDADYNDIADDLGQMLQDAKEDCESEKGAHKLDXMLEDHRTSLYPGCEQGHKKLDTTLQWKAKNCVSDKAFGDLLKLIKNILPEGNKLPETTYKAKKIVCPLGLEIQKIHACPNDCILYRGEEYENLEACPVCKALRYKIRRDDPRKVDGQLMKKKIPAKVMWYFPIIPRLRRLFRNKGNARMMRWHAEERQQDKMLRHPADGSXWRNIDRKFKDFGKDARNIRFGLSTDGMNAFGEMSSGHSTWPVTMCIYNLPXWLCMKRKYIMMPIIIQGPKQPGNDIDVFLRPLIEDLKLLWKKEAVPMWDENKQEEFNLRALLFVTINDWPALSNLSGQSXTESTYLKHCRKVVYMGHRRFLAAKNPVRKKRKHFEHKADHRTKLKHRNRKTVFAMVKDLKVVFGKGPSSQPIECEDGHAAMWKKNSIFXELPYWEFLDVRLAIDVMHLTKNLCVNLLGFLGVYGKSKETLEARNVLKHMEQRGDLHPEPKEKGSHYLSPASYTLSKAENESMFQCLESIKVPSGYSTNIKRIISTKEKKFTNLKSHDCHVLMTQLLPVIIRGILPDNVRATITKLCSFMNAISQKVIDPDRLEALQNDVVQCLVSFGLIFPPSFFNIMTHLLCHLVKEIGILGPVFLHNMFPFERYMGVLKKYVRNRARPEASIAKGYGTEEVIEFCVEFIEDLRPIGVPKSRHEGRLRGKGTLGRKAIMMVDNNLFRKAHFTVLQQSSLVAPYIEEHLALVRARNIGKSDAWITRHHIDTFTAWLRQHLMGNETINQQLAFLARGPSGSIATFQGYEINGYTFYTRAQDMKSTNQNSAVRIDTMGHDGTTGTYYGAIEEIWELDYGPLKVPLFRCQWIRLTGGGVTIDDSGMTTVDLNKVGYSDEPFVLANDVTQVFYVKDMSSKGKKGKGPDEPKRHVVLPGKRKIVVVEDKTDKDYDQFDGQPPFTVTIDPSILLSNEDTPYSRSDHKEGTIVRRKYVRTTVTADVLP

SEQ ID NO: 106009 - protein, 79 aa, Oryza sativa
  unsure (1)..(79): unsure at all Xaa locations
  Clone ID: PAT_MRT4530_10493C.1.pep
MKDCGRKNSSAAKNRAARGRRCSAWCGEGYLGRXDRWRGVESIAHKVFNRRAMKEWMSSDTVIAMDELNLWIGLGRQRL

SEQ ID NO: 106010 - protein, 934 aa, Oryza sativa
  Clone ID: PAT_MRT4530_10494C.1.pep
MLEDHKTSLYPGCEQGHKKLDTTLEFMQWKAKNGVSDKAFGDLLKLVKNILPEGNKLPETTYEAKKIVCPLGLEVQKIHACPNDCILYHSEEYENLEACPVCKALRYKIRRDDPGEVDGQLTKKRIPAKVMNKGNARMMRWHAEERQQDGMLRHPADGSQWRNIDRKFKDFGKDARNIRFGLSTDGMNPFGEMSSGHSTWPVTMCIYNLPPWLCMKRKYIMMPIIIQGPKQPGNDIDVFLRPLVEDLKLLWKKEGVPVWDEDKQEEFNLRALLFVTINDWPALSNLSGQSNKGYKACTHCMDETKTNHPVRKKGKHFEHTADHRTKPKHRSGKTVFAMVKDLKVVFGKGPGSQPIESEDGHAAMWKKNSIFWELPYWEFLDVRHAIDVMHLTKNLCVNLLGFLGVYGKSKDTLEARNDLKHMEQRGDLHPEPQEKGSHYLSPASYNLSKAEKKSMFQCLESIKVPSGYSTNIKRIISTKEKKFTNLKSYDCHVLMTQLLPVIIRGILPDNVRATITRLCSFMNAISQKVIDPDRLEALQNDVVQCLVSFELIFPPSFFNIMTHLLCHLVKEIGILGPVFLHNMFPFERYMGVLKKYVRNRARPEASIAKGYGTEEVIEFCVEFIEDLRPIGVPESRHEGRLRGKGTLGRKAIMTVDNNLFRKAHFTVLQQSSLVAPYIEEHLALVRARNIGKSDAWITRHHIDTFPAWLRQYLMGNETINQQLAFLARGPSGSIATFQRYEINGYTFYTRAQDMKSTNQNSAVRIDAMGHDGTTGTYYGAIEEIWELDYGPLKVPLFRCQWVRLTGGGVTIDDSGMTTVDLNKVGYSDEPFVLANDVTQVFYVKDMSSKGKKGKGPDEPKRHVVLPGKRKIVGVEDKTDEDYDQFDGQPPFTVMVDPSILLSNEDTPYSRSDHKEGTIVRRKYVRTTVTADLLP

SEQ ID NO: 106011 - protein, 157 aa, Oryza sativa
  Clone ID: PAT_MRT4530_10495C.1.pep
MQTIRWSSSPASLCFFLLMSLLVHSSHGARPSPRELQGWFAAAAGSSSAEKQLVDPRIIAAGAAGRVADVVAAPVMTVTTPAGAVGDDRRRRGGDDDVQLLPRRGRSVGVALVMARAARRALAAAAAAAASSSATDGTGPSCHSNNVHITCSPPLQN

SEQ ID NO: 106012 - protein, 174 aa, Oryza sativa
  Clone ID: PAT_MRT4530_10496C.1.pep
GSLFCITGASFRRRSCLNLNNVISGAIMLPKMWLKNLIMLAYVSAIRLVSSVALTAPLVWAGMADMCFHMAGSSLLNMNRGGEYRPRTRLGRGPLLGKLKDMACAGVGRGGKEGKGRITGIFASGGRRGKWVWEGGIAGGVALARIAGKGRRGGGPLEVDHHDMHKYAPAVFGR

SEQ ID NO: 106013 - protein, 99 aa, Oryza sativa
  unsure (1)..(99): unsure at all Xaa locations
  Clone ID: PAT_MRT4530_10497C.1.pep
DSQSSDDLPLQEYEEWRKLGKDPAHSRKNNPMISIALKTRHHGAMALHQQGFRHPWEDDEGNVEQGXRSDLKPNCRLGRMYMCYDSLVYFHSVLFFIQN

SEQ ID NO: 106014 - protein, 100 aa, Oryza sativa
  unsure (1)..(100): unsure at all Xaa locations
  Clone ID: PAT_MRT4530_10498C.1.pep
ASSYSSXSVPCXAXAXAFVSXAXSRXRXSSXATXXRLYHVGSVLELXXXAXXAAYGQMPVXDXXGXXMLXHXSXRLVLXRCXXAVSXXEXRDXEVXLXXR

SEQ ID NO: 106015 - protein, 80 aa, Oryza sativa
  unsure (1)..(80): unsure at all Xaa locations
  Clone ID: PAT_MRT4530_10499C.1.pep
GRRRAAVEVAKKKTXRSTRAPPFDPTRPIVASDASPPSDILKYKIHIRYLYTSIVYYSLVCVRGYTYVHHDACLFWIINK

SEQ ID NO: 106016 - protein, 947 aa, Oryza sativa
  Clone ID: PAT_MRT4530_1049C.1.pep
MSSPLSPFLLPHLTLSLILFSPRRLATGCTIRVNCCCGGPWQCSGGGSLYISLAKWREEMRGEQRQRRARRRPACMARRGEGRWAATRGQAGGRCARGARGGGGDGGETGAGGHGGEASHGRKRRGEDGGWRTKARVGSWSGVGMRTGRSKRGGRGRQRRRRRRPFPRPPLAISSAPTFCPGGLPPQRHARHSLPVACCTEGRAANGGRRRVGAGGGRRTAMRGGGRSRALRRSTRTSTTSPMLTTCWCLAAVPPLLAWWSSCVGDANAAITGEAATGNGVALADGDGEAAAQEERGEQDEVVHGAVVGLGLHAVEGVHGGQLSDLATDAIELPIHLQLGVSPTCASWKGRTAMNKPYRHSRARSLARPSDNDATAKPKLPDVDAGSSNRDSLVTTVADMAPIRDDMVIFQQYEREEWLLGTPYPDVFPGSYQDEPDGEAGRAGLRRRQAVDEVAARREEPQGGAPHDDERGERGKCSMWTLWTHSQLVVVGWLLKRRPPTKLSELESQLSQLQDELKKAKEQLLSTEHSKRRALQEAEDARAQAAAASAQVRDSEAQLAELSSAEESRLLELRRLSQERDRSWQSELEAMQKQHAADSAALVAAMGEVHRLRVQLAAAARADRKQDVVEAMATIDELRVKLKASEEAEAQARALHEECKQQLETSRATIDSLLTDGSKLMDSFSLVVKELEESRAKVKALEEEIAETSAAKAGERCNCSASASASEVAELRSELESTEARFQEERILSTVETQCAYELMDQIKMESDSRHGKLAAALESTKSEVIFLKASLFDKDSELRRALDANEKLQSETRTDNELKEQLQGALLENGQLKRELQQHTSEKKASAKATDAADAAAEAAKKGEMEAELRRLRVQAEQWRKAAETAMALLTVGKGGNGKVVDRSESLEGGGGGGGKYAGLWDELDDDAAARKNGNVLRRISGMWKK

SEQ ID NO: 106017 - protein, 234 aa, Oryza sativa
  Clone ID: PAT_MRT4530_104C.1.pep
RIAHIPPRLPHRPLFPFSILPGRHSSIPSPLPRLNPSPHATTSPPPPPPPPTKTTMKVVRNLDLERYMGRWYEIACFPSRFQPRDGTNTRATYTLAGDGAVKVLNETWTDGRRGHIEGTAYRADPVSDEAKLKVKFYVPPFLPIFPVVGDYWVLHVDDAYSYALVGQPSLNYLWILCRQPHMDEEVYGQLVERAKEEGYDVSKLKKTAHPDPPPETEQSAGDRGVWWIKSLFGR

SEQ ID NO: 106018 - protein, 32 aa, Oryza sativa
  Clone ID: PAT_MRT4530_10500C.1.pep
VTYEDGEGDWMQVGDVPWEAFAKSVKRLKILV

SEQ ID NO: 106019 - protein, 56 aa, Oryza sativa
  Clone ID: PAT_MRT4530_10501C.1.pep
GKKQALFYGLGFIGKPSLTIQAFDGHFWVIPPQIFLGSFWGLDWGGTPLTYFPCGA

SEQ ID NO: 106020 - protein, 881 aa, Oryza sativa
  Clone ID: PAT_MRT4530_10502C.1.pep
MAALRLPTPPPPRAPAPWLHSSHRRRVAAPRGAGGGGGGGGAVPPPPVRTLLIDNYDSYTYNIFQELSVVNGVPPVVVRNDEWTWRDVYRWVYKERAFDNIVISPGPGSPACPSDIGIGLRILCECGDIPILGVCLGHQALGFVHGAKIVHAPEAIHGRLSELEHNGCYLFNHIPSGINSGFKVVRYHSLVIEPDSLSEDLISIAWTASPKMLSFLESDKPDITSSTLWGSLDNLFVTNQSECSTTDGKMPSINDASELDGYRVLMGVRHSTRPHYGVQFHPESVATHYGRQIFQNFKKITTDFGLQTPLLQERKISSPDLKNFVANDLLHSARLKLWDSVGPCALPKRSSGDKCLRLQWKKIDNFLNRIGGSENIFSVLFGHHSAEDTFWLDSSSVDQNRARFSFMGGKGGPLWKQMTFHLASQRANCGGNLTIRDAYGCTVRNFLKDGFLDFLDKEMQSIQYIEKDYEGLPFDFHGGFVGYIGYGLKVECDASSNSAKSSTPDACFFFADNLVVVDHNNGDVYILSLHDEYSSGNGDGDYQNSIHSLWLANTEKKLLRMDAMAPRLSINGNSSINGNSFTISSSVNKQRFVIEKSKDEYIRDVQSCLDYIRDGESYELCLTTQMKRRTDYMDALKLYLKLRKQNPAPYAAWLNFSSENLSICCSSPESEKDQAENLMIVDLLRNDLGKVCEPGSVHVPRLMDVESYKTVHTMVSTIRGTKMSDLSPVDCVKAAFPGGSMTGAPKVRSMEILDSLETSPRGIYSGSVGFFSYNKTFDLNIVIRTVVLHNGEASIGAGGAIVALSDPEAEYNEMLLKAKAPTKVVEECSQQIYNPDRSDSMQTTIAHVSPEFKYLKFTMYCFSIHASIDPTGDCPILKFEI

SEQ ID NO: 106021 - protein, 94 aa, Oryza sativa
  unsure (1)..(94): unsure at all Xaa locations
  Clone ID: PAT_MRT4530_10503C.1.pep
MLPHPPSLSFSSASGGGSRRAAVVGGGGRXRRAGEGGGNSWQWEDEGNGGGREKHAAAATSTLTPAMAMAMAAWSAAKRPKRNLDTSVTSPFLA

SEQ ID NO: 106022 - protein, 132 aa, Oryza sativa
  Clone ID: PAT_MRT4530_10504C.1.pep
VVFFFSLFAFVHCLFSLFFLFFFFFLFGNTGDPLKFNGKNGDHAISYSQQVTPRGGGGTESPPTPPLRWDHPRPSKAKKPPKSNGLSFLGKKSRAWESQPTGKTTLLFGIPETRKWQQSKKTPSPPPFKDPP

SEQ ID NO: 106023 - protein, 67 aa, Oryza sativa
  Clone ID: PAT_MRT4530_10505C.1.pep
SGIWLGICCHHISVHGYLCSVIGVILACIRLIVKAPNKSDVLLPRDGPLRHLQVGRRQAGEADCPHR

SEQ ID NO: 106024 - protein, 856 aa, Oryza sativa
  Clone ID: PAT_MRT4530_10506C.1.pep
MEEDEVEDDNIPDFAQYAGFEGNQTGEEERDADYNDVADDLGQMLQDAKEDCESVKGAHKLDKMLEDHRTSLYPGCEQGHKKLDTTLEFLQWKAKNGVSDKAFGDLLKLVKNILPEGNKLPETTYEAKKIVCPLGLEVQKIHACPNDCILYRGKEYENLEACPVCKALRYKIRRDDPGEVDGQLTKKRIPAKVMWYFPIIPRLRRLFRNKGNARMMLCHAEERQQDGMLRHPADGSQWRNIERKFKDFGKDARNILFGLSTDGMSPFGEMSSGHSTWPVTMCIYNLPPWLCMKRKYIMMPIIIQGPKQPGNDIDVFLRPLVEDLKLLWKKEGVPVWDEDKQEEFNLRALLFVTINDWPALSNLSGQSNKGYKAYTHCMDETETNNPVRKKGKHFEHTADHRTKPKHRSGKTVFATVKGLKVVFGKGPGSQPIECEDGVYGKSKHTLEARNDLKHIEQRGDLHPEPKEKGSHYLSPASYTLSKAEKESMFQCLESIKVPSGYSTNIKRIISMKEKKFTNLKSHDCHVLMIQLLPVIIRGILPDNVRATITKLCSFMNTISQKVIDPDRLEALQNDVVQCLVRFELIFPPSFFNIMTHLLCHLVKEIGILGPVFLHNMFPFERYMGVLKKYVCNRARPEASIAKGQLAFLARGPSGSIATFQGYEINGYTFYTRAQDMKSTNQNSAVRIDAMGHDGTTGTYYGAIEEIWELDYGPLKVPLFRCQWVRLTGGGVIIDDSGMTTVDLNKVGYSDEPFVLANDVTQVFNVKDMSSKGKKGKGPDEPMRNVVLPGKRKIVGVEDKTDEDYDQFDGQRPFTVTIDPSILLANEDTPYSRSDHKEGTIVRRKYVRTTVTADVLP

SEQ ID NO: 106025 - protein, 1081 aa, Oryza sativa
  Clone ID: PAT_MRT4530_10507C.1.pep
MEEDEVEDDNIPDFAQYAGFEGNQTGEEDRDADYNDVADDLGQMLQDAKEDCESEKGAHKLDKMLEDHRTSLYPGCEQGHKKLDTTLEFLQWKAKNGVSDKAFGDLLKLVKNILPEGNKLPETTYEAKKIVCPLGLEVQKIHACLNDCILYHSEEYENLEACPICKALRYKIRRDDPGEVDGQLTKKRIPAKVMWYFPILTRLRHLFRNKGNARMMRWHAEERQQDGMLRHPADGSQWRNIDRKFKGFGKDARNIRFGLSTDGMNPFGEMSSGHSTWPVTMCIYNLPPWLCMKRKYIMMPIIIQGPKQPGNDIGVFLIPLVEDLKLLWKKEGVPVWDEDKQEEFNLRALLFVTINDWPALSNLSGQSNKGYKACTHCMDETESTYLKQCRKVVYMGHRRFLAANHLRKKGKHFEHTADHRMKPKHRSGKTVFDMVKDLKVVFGKGPGSQPIESEDGHATMWKKNSIFWELPYWEFLDFRHAIDVMHLTKNLCVNLLGFLGVYGKSKDTLEARNDLKHMEQRGNLHPEPQEKGSHYLSPASYTLSKAEKESMFQCLESIKVPSGYSTNIKRIISTKEKKFTNLKSHDCHVLMTQLLPVIIRGILPDNVRATITRLCSFMNAISQKVIDPDRLEALQNDVVQCLVSFELIFPPSFFNIMTHLLCHLVKEIGILGPVFLHNMLTFERYMGVLKKYVRNRARPEASIAKGYGTEEVIEFCVEFIEDLRPIGVPESRHEGRLRGKGTLGRKAIMTVDNNLFRKAHFTVLQQSSLVAPYIEEHLALVRARNIAQDMKSTNQNSAVRIDAMGHDGTTGTYYGAIEEIWELDYGPLKVPLFWCQWVRLTGGGVTIDDSGMTTVDLNKVRYSDEPFVLANDVTQVFYVKDISSKGKKGKGPDEPKCHMVLPGKRKIIGVEDKTDEDYDQCYGQPPFTVTVDPIILLSNEDTPYSRSDHKEGTIGHPTRRRHCRLSPSSRCRRRRRRRLLDLSLSKPPPPRRRRRCDTAVPRRCRPRLRLPPMPTPTSTRPALSTTYANPVDADPAMRRHCQQRRRHCRALPCRRPRCGTPPPLLFGAAPSMPNGNERERK

SEQ ID NO: 106026 - protein, 57 aa, Oryza sativa
  Clone ID: PAT_MRT4530_10508C.1.pep
LGQCFIYSTAHIIQCSAPCIICSVLYIHYISIRFTGVHETCTCNTYHMRYNASSHAS

SEQ ID NO: 106027 - protein, 163 aa, Oryza sativa
  Clone ID: PAT_MRT4530_10509C.1.pep
SAPATASSASWTAARAPSRWPTRRRASRCPCRRRRRARRGSCRASRTRARTRRTGSRSTRRRCGTPSCTSRATSTSPARSTPCRCTPSAAAGAARRRRGGACLPQAPAAVSSREGSPASTAWRTGSPPGRRRRSCRSISRTTASRPSSGRRRRRGAGAGAATA

SEQ ID NO: 106028 - protein, 67 aa, Oryza sativa
  Clone ID: PAT_MRT4530_1050C.1.pep
RYSLRPRARQGARVPDIVKVFHSPRGSSKGLGGLVTVTLVCVMKTYGVLSPDLGRYPWVVWSPLQEY

SEQ ID NO: 106029 - protein, 838 aa, Oryza sativa
  Clone ID: PAT_MRT4530_10510C.1.pep
MEDCESEKGAHKLDKMLEDHRTSLYPGCEQGHKKLDTTLEFLQGMAKNGVSDKAFRDLLKLVKNILPEGNKLPETTYEAKKIACPLGLEVQKIHACPNDSILHRGEEYENLEACPVCKALRYKIRRDDPGEVDGQLTKKRIPAKVMWYFPIITRLRRLFRNKGNARMMRWHDEEHQQDGMLRHPAEGSQWRNIDRKFKDFGKDAQNKQFGLSTDGMNPFGEMSSGHSTWPVTMCIYNLPPWLCMKRKYIMMPIIIQGPKQPGNDIDVFLRPLVEDLKLLWKKEGVPVWDEDKQEEFNLRALLFVTINDWPALSNLSGQSNKGYKACTHCMDETESTDLKHCRKVVYMGHRRFLAANHPVRKKGKHFEHTVDHRMKSEHRSGKTVFDMVKDLKVVFGKGPGSQPIESEDGHAAMWKKNYIFWELPYWEFLDVRHAIDMMPLTKNLGVNLLGFLGVYGKSKDTLEARNDLKHIEQHGDLHPEPQEKGSHYLSPASYTLSKAEKKSMFQCLESIKVPSGYSTNIKRIISTMEKKFTNLKSHDCHVLMTQLLPVIIRGILPDNVRATITKLCSFMNAISQKVIDPNRLEALQNDVVQCLVSFELIFPPSFFNIMTHLLCHLVKEIGILGPVFLHNMFPFERYMGVLKKYVRNRARPEASIAKGYGTEEVIEFCVEFIEDLHPIGVPESRHEGRLRGKGTLRRKAIMTVDNNLFRKAHFTILQQPSLVAPYIEEHMALVRAGNIGVTIDESGMTTVDLNNVGYSDEPFVLANDVTQVFCVKDMSSKGKKGKGPDEPKCHVVLPGKRKIVGVEDKTDEDYDQFDGQPPFTMTPLTHVAITSKEQ

SEQ ID NO: 106030 - protein, 97 aa, Oryza sativa
  Clone ID: PAT_MRT4530_10511C.1.pep
PSSTPPRAPPPPPASPPDDGRGLPRTTEGAGEPPVPGPTDEKKQHVTGYEVVLRTAGTTNGERVRVAAGVTAHLVDERGPHGLMLQPRAQRNCHSRY

SEQ ID NO: 106031 - protein, 158 aa, Oryza sativa
  Clone ID: PAT_MRT4530_10512C.1.pep
EPQCSSPIALSTCSSPIALSPWGEHGYYQGDSVGSSLWGVQDDDPETNDASVSMIDKNSGLVDSQPSANDGSDVGTARNTNHNTNLSLNHETAVPLSRSSGEASRKHGFITDLNVATSEEALGNTKNWNPYAGNANRGSQRNHHRDRYSQISESWLLS

SEQ ID NO: 106032 - protein, 112 aa, Oryza sativa
  Clone ID: PAT_MRT4530_10513C.1.pep
QDMALVVLYQENNKGEQILDKPGLEREWSGVEERKVLGSEGCAAALAWLRSSGARLPVKGLRQMAAPRREADDGGPSAYGSAMTPGGRRSRGGTTTEVKGTATAANGGGPGR

SEQ ID NO: 106033 - protein, 1774 aa, Oryza sativa
  Clone ID: PAT_MRT4530_10514C.1.pep
MEGAAAAAGGGEMLSPGEADWPPELRLPPPPPPSAASEGEPPPARAAVGMDDSQFLGSIIGLPAQPPQATAEALAVVGVKRRRGRPPKKRDGAAAATAVVPAARPARRREDEEEVVCFICFDGGNLVVCDRRGCPKVYHPACIKRDEAFFQSRSKWNCGWHICSSCEKAVHYMCYTCTYSLCKVCIKQGKFFSVRGTKGFCDTCYSTILLIESKDEGDTKIVVDFDDQNSWEYLFKLYWVDLKGKLSLTLEELTSAKARWNAPTTYTRKEKDESSDDLYDANNDDDAGSDCSSGKRKRNSSRKKGRKRRKPNSDCSIATKKVETVTRDDGTLPNKVPTEEASLPVDTKWASPELLEFVGHMRDGDQSFISQFDVQALLLDYIKQNNLRDPQRKSQIICDSRLHRLFRKTRVAHFEMLKLLEMHFIVSEPSAVNDGSQGIINPDSAQIDHASGYNDMAAKFSPDRRRRMHRKMEREPQANPEDYAAIDMHNINLIYLRRSLMEDLIDDPTLSDKISGAFVRIRISGLGQKQDMYRLVKVVGTHKVSEKYSIGKKMTNFALEIMNLNKKEIITMDTVSNQDFTEEECKRLRQSMKYDLISRLKVGDIQEKAKIFQFVRVNDLLNTPEERARRINEVLDVHVDSHMDPDYESDDEFGNKKAVERSVNWARSDPFVSPVKVKYSNSSQKNGDATRHLKNLSKQNTERKSGAARNFENSHSPVGMDIPKSGTNVKSTRCETTSPSSHGVVSSDMEPEKVWHYKDPSGNVQGPFTLVQLSKWTSYFPRDMRVWLTFESEERSLLLTEVLSKQPKDFGQPASVTTSSKSTVADTGQNRNTEIVDLNKAPSPVGYSMLNSFETTVQSTKHSAPERESVNSLDDRLSHSTDSVPPKDANASNSQAMCQIKHSGSLPSPGSPHQRSDLHHDEVQGGRSGEWNNQHNSELWSPSMPQTSSSAHSNVESHHDHYPSWSQVQHDPKNSLQAGSGKDLNSRYDIAQKLPSQRITRDVPSPVFAWSPSESRTASSQHEGSCLSSTTNLCTHDELHSSIASAKAKSFAPATPVEDRGSSSPSGMLSLSERAPICSPQSAPSASASDTCKMEENMNQQKTLEADISNTSVNQSPQSKILPESSPDNQDAEHEYRSPPPISESKELSPQSRTTPGSSPDNQDTEREYPSPPPISGSKEISPQSRTILESSPDNQDNGHEYPSPPPIPESIELSPHSKALPESSPDNQDIEPECPSPPQIPESKELSRQSKILPESSPGNQDIEPECPSPPQIPESKELSQQSKILPESSPDNHDIKCEYSSPTPIPESKELSLQSKILPESSSDNQDIKCEDPSPTPISKSKEVSPQSKILSESYLDNQDVERECPSSILITESKELAVDLPGSISLAPEKTASTDVGENSSLAFIFPKSTLAGDDALKSVFDMAKAHLECEDSKVKEELYVESTVVIRDDMVVNPASGVESIDMSENLLESLMEQSCGTFYMDGTTALEGFLSGSTKEEPQCSSPIALSTCSSPIALSPWGEHGYYQGDSVGSSLWGVQDDDPIGNIWPLSSQAPALQYSSGSTAHFIDEATVTHGNNGVVLSSTPGEEVGLPNSGVCTDWGLVEQVNPETNDASVSMIDKNSGLVDSQPSANDGSDVGTARNTNHNTNLSLNHETAVPLSRSSGEASRKHGFITDLNVATSEEALGNTKNWNPYAGNANRGSQRNHHRDRYSQISESWLLSSNYSRSRSDGFGTGGSSRSTPRGQTQRGICKFHENGYCRKGASCNYLHP

SEQ ID NO: 106034 - protein, 75 aa, Oryza sativa
  Clone ID: PAT_MRT4530_10515C.1.pep
FSITKWKKKNPLGPIKLAPFQPAVGALLKTPPPPFLYFKMEYRVGHFCLGNTPIKAPWFFLFYSPLLIFWVIVRE

SEQ ID NO: 106035 - protein, 63 aa, Oryza sativa
  Clone ID: PAT_MRT4530_10516C.1.pep
MIGQGRRDSATPSLGAEGGESFTSPAATRLCGVRFKCSMKCLTESGHGDSFAGEVTDMTTCRC

SEQ ID NO: 106036 - protein, 71 aa, Oryza sativa
  Clone ID: PAT_MRT4530_10517C.1.pep
AAIYPNGWEWIISPLLNFKHLKKKFFTLLKPQSFFFCPQGPPKKGPPGGLSPLKGGPPPPLGLKKKFYGFL

SEQ ID NO: 106037 - protein, 58 aa, Oryza sativa
  Clone ID: PAT_MRT4530_10518C.1.pep
GGHFMAASQDKPEYGLALLQKYRKEETATVDLYGERAANQGQHFEALNISDIWKLPAL

SEQ ID NO: 106038 - protein, 59 aa, Oryza sativa
  Clone ID: PAT_MRT4530_10519C.1.pep
FFWLDPQNSITKKYTLPKTSKYSNIWGKYRGQKDKPREPILLKTKLTHALFYNTLQKTI

SEQ ID NO: 106039 - protein, 67 aa, Oryza sativa
  Clone ID: PAT_MRT4530_1051C.1.pep
CMLKAHHRNSISLPCVPTVPRQISVVSPVSTPGGDARLLDCERSFPRRALVEDLLERARGSRVSSHY

SEQ ID NO: 106040 - protein, 87 aa, Oryza sativa
  Clone ID: PAT_MRT4530_10520C.1.pep
TRSHRQTVPWNGATKGLLDQKGRKASRGAATGGATTSTAVKPMGDLPGGAPFGGAPAEPPLTNKVPGATDGDGPGARYLLKGEGLGP

SEQ ID NO: 106041 - protein, 72 aa, Oryza sativa
  unsure (1)..(72): unsure at all Xaa locations
  Clone ID: PAT_MRT4530_10521C.1.pep
SQFASRTHXFASRRGGXAFSAXXMAGAAXXVEDAGMDEVQKRLXXDDECIXVDEQDNVFGHESKYNXHXXEK

SEQ ID NO: 106042 - protein, 40 aa, Oryza sativa
  Clone ID: PAT_MRT4530_10522C.1.pep
MASCPQGHIFQAKPAHITRATRTIYPPSLSSYQLSMKPSR

SEQ ID NO: 106043 - protein, 518 aa, Oryza sativa
  unsure (1)..(518): unsure at all Xaa locations
  Clone ID: PAT_MRT4530_10523C.1.pep
MAGYRGGGSASGGGGGGASSASAFATRVLLLLTLLPMALAAFAFALQWRGGMRDPAGAAWPAETQRFPGMENSPLGSSSSSSGGGGGGGSYFAVTSSQSSSAAADCAEILGRSAASSSHGGISLYRGWGFDSDAGLTPKICITGSTSAGLHQILPWLYYHKVIGVSHFFLFVEGEAAKPAVTSVLESIRGVKIIYRTKELKEKQDRSRIWNETWLAGFFYKPCNYELFVKQSLNMEMAIIMARDAGMDWIIHLDTDELIHPAGAREYSLRRLLLDVPDNVDMVIFPNYESSIERDDIKDPFTEVSMFKKNYDHLPKDTYFGLYKEATRGNPNYFLTYGNGKSAARVQEHLRPNGAHRWHNYMKTPNEIKLEEAAILHYTYTKFSDLTSRRDRCGCKPTKEDVKRCFILEFDRLAXRYQFEAFEEGCVDTHICPNGXIRGLKESGVFTTAVTSAKAHAKFKSSNTDLKNKESIHPNITQGDHLQATVRKILEMVDAQEEAMPPMSPPGFLHQTVETALS

SEQ ID NO: 106044 - protein, 100 aa, Oryza sativa
  Clone ID: PAT_MRT4530_10524C.1.pep
AVDATTWAAEGMAAQHSTARPTAIACALRRPAQHEPGGGPCCAPLKCGVWRSIGAGMAHALQRRRVLEQCGTMGLGARALLDTPPPESHLTGCGCGGGVG

SEQ ID NO: 106045 - protein, 679 aa, Oryza sativa
  Clone ID: PAT_MRT4530_10525C.1.pep
MAQGVMLWYDDLLAVLVLSVLVGTSTAANCGRKCGDVRIPFPFGIGVDCAWPGFDLSCNHSFTPPRPYTGNVEIKDISLEKGEMRVYTPVVSDCFTSDNTTEYEGNASSWAYLGTPFLFARSRNEFTAIGCGTIAFLLGRDDASYLTGCITTCASLDEAAHDGEPCTGLGCCHVPSIPPNLGILNISLGESIVNPAWKDSPCSYAFVAEQGWYNFSRQDFSRSGSKSFVNSTGERRVSTVLDWAIRRNGSCSSATGAPACVSAHSYCVNATNGDGYLCNCSTGYAGNPYVTGGCININECELRREEPTKYPCYGGSRCYDTEGGYKCKCRFPHRGDATAVAGGILAFVVLYILKEHRRRQRNRSFDKNGGNILNKMMDIKIFSEEELKKMTKNYCEKRMIGKGYFGKVYKGITQDNQQVAVKRFVRNGHELNKQDFADEITSQARIQHENLVRLVGCCLHTDVPMLVLELIPKGSLYEKLHGDGRHTHLPLPTRLDIAVGCAEALACMHSNIGHKSVVHGDVKSGNILLGNNLEPKVSDFGSSKLMSVAKSDNWSVMADMSYIDPAYIKTGRFTEKSDVYSFGVVLLELITRKKALDDDRESLPLNFAKYYKDDYARRNMYDQNMLSSTDDALRPRYMECLDRMANIAIRCLMEDIDERPTMAEALEELKQLSASLNVT

SEQ ID NO: 106046 - protein, 356 aa, Oryza sativa
  Clone ID: PAT_MRT4530_10526C.1.pep
MSSSLPILPKSLKDIPRSHNTQNILMPGQLPNDSMPLHQSATQSSISHPRASVVRSSYSAMLGYAANPIDSVSSHEGHFMAAPFISQSSNAEMLQYLCNNNTHGGHTVPTFFPAPACGAPDYMDTITVPDNHTQSGSSTVTSDAAKQNEWWADIMNDDWKDILDATATDSQSKKYRTARYKPDLSEGKTQEGKTTDELSLDLKASYHYALLREWWYFMFIFLLDQSMDLTEALRLQMEVQKRLHEQLEIQRKLQLRIEEQGKYLQKMFEKQCKSSTQSVQDPSSGDTATPSEPSNSVDKDSEAALDPNRIGDNHPKNSTNVGANLKTAATESPDSPVIATDGSELPQEKRRRVHES

SEQ ID NO: 106047 - protein, 71 aa, Oryza sativa
  Clone ID: PAT_MRT4530_10527C.1.pep
CTAVLTKLRTYHTESVELVISALCSLAILQYVMSCILDENRVRCQAALHAQILQNPIDTWYLSTIQQKLCW

SEQ ID NO: 106048 - protein, 724 aa, Oryza sativa
  Clone ID: PAT_MRT4530_10528C.1.pep
MPALCAFQRSRGDMCSKQAAKLAMLIQLVLLLLFYGLGNAPGSTVHENRIDLQSLLDFKNGVTDDPSGALDSWNTSTHFCRWNGVTCTTMRPLRVSKLNLTAQNLAGKISSYLTNLTFLSFLDLSSNHFSGQIPLLNNLQQLNTLNLSINTLEGTIPDELMNCSNLRELDISGNSLHGTIPPKIGSLINLEILDLTDNNLTGIIPESVQNLTQINFIRLKHNRLEGSIPNRIWQLPNLSSLYLGDNTLSGEIPSTLNFSHIRKLSLEMNKLGNVLPPNFGDAFLQLQEVSLGQNNFEGQIPPSLANASELWYIDFSLNNFTGQIPSSVGRLSKLSRLNLEQNKLEANENKGWEFLYALTNCTSLTILSVAKNNLQGSLPHSVGNLSINLQILALNGNNISGNIPPSIGNFPNLTKLSLGTNSFSGEIGEWIGNLKNLVGLSLHDNNLIGPINPSIGNLTRLSVLLLQHNKFEGLIPPSIGRLSQLSVLEMSYNNLQGSIPVEVGNLQQLVELHLSSNKLTGEIPDALSQCQILQIIEMDQNFLTGSIPISLSNIKSLTSLNLSHNNLSGNIPTDMEDMPVLSVLDLSYNDLQGEIPRNGVFKNSTAVSLRGNRGFCGGVMNFHMPPCTTISQRRERRSNLIKILIPIFGFMSLALLLYFLFLLKKTSRRTHLPLTYVGENFPKVSYTDLAQATKNFSASELIGRGSYGSVYRGKLKESKTDVAV

SEQ ID NO: 106049 - protein, 123 aa, Oryza sativa
  Clone ID: PAT_MRT4530_10529C.1.pep
IKGILTIMRTADTKEILMIIGNMVISTTKMGQTIILNQAVVQDGPQREYDRMSRVRSNDVSTTSHTRHRSVSVTQDKFSDRSDPQSAYSDVDPATSMIDEASTGQREIYHDGAHHRRKHDRHY

SEQ ID NO: 106050 - protein, 163 aa, Oryza sativa
  Clone ID: PAT_MRT4530_1052C.1.pep
MKSLCPKPGKGGKIHPSPLGGGDGDPVRAALRLLPAAILALATALRPEDQQVLAYLVTRCLQGAGAAHHPEREHPPARGGGGGRRRRGAHPPAIGCGCFDCYTSFWSRWDCSPSRELIHDAIEAFEDHLAAAESSAPPSSSSTKRRDKGKRRPPPPPSPMSPK

SEQ ID NO: 106051 - protein, 43 aa, Oryza sativa
  Clone ID: PAT_MRT4530_10530C.1.pep
MVSKVELQDRLLKRGKRRCRLFAGKRTMVWMVFSGRREFHYKG

SEQ ID NO: 106052 - protein, 105 aa, Oryza sativa
  unsure (1)..(105): unsure at all Xaa locations
  Clone ID: PAT_MRT4530_10531C.1.pep
TFXGPPLPSHYPHRKSPLVFRGVFFAVHKGSPAKGESQLKTPPRGFCYCKIWFCPSNNKTPFCTKVIGKMKGSVLQGLGPRWVLKLAREGLLLRVEGYFEDDVQK

SEQ ID NO: 106053 - protein, 117 aa, Oryza sativa
  Clone ID: PAT_MRT4530_10532C.1.pep
LYVYNVLHFFTKHRVHRCAANPPPCTAACTCSRTRSPRTWTPPAPRRTRSRTPTPAERATPRSPARSRRRPPRRTARPRRRRPASPARTTPPPRAPSPQAATRGGARPRRRRTRALC

SEQ ID NO: 106054 - protein, 1159 aa, Oryza sativa
  Clone ID: PAT_MRT4530_10533C.1.pep
MDGGGETEHGSGGNGEEANGRGRKGGGGAWVYWRREGYYRKFVQGYSIIARPLTLLLKKKAFLWTDAAQLAFDQLKTAMSNTPVLALPNFQLPFTLENDACAYGLGAVLSQQSHPIAYYSKTLGPVNQKLSIYEKEFLAIMMAVDKWRCYLQRGPFIIKTDHKSLCHLDDQILGTELQQKAMTKLMGLQYSFQYKRGVDNIVADALSRMPSSSQFCALSVVQPIWIQEVINSYTVDPQAQQLLAELAVHSPNSQGYSLTQGIIRFQNKIWIGSNAGLHTKLIQAFHASALGGHSGIAATYHRFKKLFAWPGLKLDVENFVKQCQVCQQAKHEHCRLPGLLAPLPIPKEAWQDISMDFIEGLPRSDGYNAILVVVDRFTKYADFIPLRHPFTASQVAHLVDKTVFKTQGIPRSIVSDRDRLFTSKFWTTLFATWDTQLQMSTAYHPQTDGQTERALFGVDPHYSQVPDLTLATLPDVVDVQTERQHLSEFLQQQLTRAQLRMKNKADKGRSDRVFAMGDAVFLKLQPYAQSSVVNRPYPKLAYKFFGSFTVLERIGVAAYRLDLPASSTVHPVFHVSQLKAQVLLKWSLLPADHATWEDYHVVKTRFPDAPAWGQAETPAGGTVMTGNGDTEKEVRLSKERNTNEDRLSSLPDEILILILDKLDARTTITTTILSKRWLNLPRRSHTCYDFAVDDLLPPRYHRLKRLWMEAKAAYEAEKSPYVTTNRDAVNLSDFYAMKDKMDQWTRRIRPLTAALERYERWAMRHYVKRVDAFLLPPDGVHRTIQKLRLQTFGRKWNQFIQRWVTAAIARWGVEDFELNVEGRCIAYDFKILDGCQNLQLKRLVLFNCPPLGSFNSLTFQRLTRLSLCKTSYFGLANRILTHCVHLLDFSIRYCPGYCAGGLRINVPTSRLKNLLVDNCKFGKIYLHSLPCLETFACRGLLPSKIYYGEVPGLRHVGLDYLKTEGDSKVDPSVSNRTYPLSKFLKRIPPIESLVLQFKGPEVWIEPIAVPDPLLHLKKLFIANVPINWDIFWIVTLLDAAPVLESCHVHIDNRSENMASWLDVQAQDRQYHCLKELVVVGFNAVGWQIGFVRHVMKASPRMRRVHLLDGHVVEDKERVLEGLEVVPHTREWHEFERSEVLDDLWDGNGICSPQLEIILE

SEQ ID NO: 106055 - protein, 83 aa, Oryza sativa
  unsure (1)..(83): unsure at all Xaa locations
  Clone ID: PAT_MRT4530_10534C.1.pep
CPLPRHQPSGAVGKPTRHKDCGGGALLPPRGSQRRRHPGCSGAAVPGAGGGARGXGVADPGTPEADPSPPEADLGPAWAGPNN

SEQ ID NO: 106056 - protein, 1133 aa, Oryza sativa
  Clone ID: PAT_MRT4530_10535C.1.pep
MESKLLEKLEGITKWMHEIDQRLDSQGGSLEKVTTKVDLAMDSVGKFRMAVETEFEGVVEREKMSALDTLTQTGTMTEYKQQFDSLVYQIRVFDPSVGEIRAAVVVQLPDTVQQASAIALMQESVLASRATKALKGKFVKLPQYKSDISSDTAPGRVDKEDLWKAKQLKDYRRAQGLCFKCGDKYTPEHRCAVGGQIKAMQLEEVLTDDILDVVIAAEQSDDEEDCHISLNALTGAHLPTAIHLRALVHSKVLLLLVDSGSSHSFIDYNFAQMLGLPLKPIPSTLVKVANGDCLPCQYVVPGFSWWIQGHTFTYDMRVVTLGGHDAILGRDWLEQWGEMSCHWANKTLKFQYQGSWISLQGVQDAAVPSEIAAVTLPQLLKWHKGCEIWTAALLEHSQDDVQHVIPSSVQQLLTDFDDVFHDPKCLPPHRVFDHAISLVPDAIPVNCRPYRYYPLQKDEIEKQVNEMIDAGLITPSMSPYASPVLLVKKKDGCWRFCVDYRRLNALTIKSKFPMLVVDELLDELSGTKFFSKLDLKAGYHQIRMVETDEAKTAFKTHHGQFQFRHQLFAKRSKCSFACTQLEYLGHIISDKGVSTDPEKTAAMLAWPVPTSVTELRGFLGLTGYYRKFVQGYSIITRPLTLLLKKNAFLWTDAAQLAFDQLKTTMSNTPVLALPNFQLPFTLETDACAYGLGVVLSQQGHPIAYYSKTLGPVNQKLSIYEKEFLAIMMAVDKWRCYLQRGPFIIKTDHKSLCHLDDQILGTELQQKAMTKLMGLQYSFQYKRGVDNIVADALSRMPSSSQFCALSVVQPIWIQEVINSYTVDPQAQQLLAELAVHSPNSQGYSLTQGIIRFQNKIWIGSNAGLHTKLIQAFHASALGGHSGIAATYHRIKKLFAWPGLKLDVENFVKQCQALFGVDPHYSQVPDLTLATLPDVVDVQTERQHLSEFLQQQLTRAQLRMKNKADKGRSDRVFAMGDAVFLKLQPYAQSSVVNRPYPKLAYKFFGPFTVLERIGVAAYRLDLPASSTVHPVFHVSQLKAQVPDHTPVYTSLPSPVVLNAADIVPEAILERRLVKRCNAAHVQVLLKWSSLPADHATWEDYHVVKTRFPDAPAWGQAETPAGGTVMTGNGDTEKEV

SEQ ID NO: 106057 - protein, 1481 aa, Oryza sativa
  Clone ID: PAT_MRT4530_10536C.1.pep
MAYRAPTLRPQLAASPASRVPLSDSRRPPVYSGSNGFWSGRGRSGRASTSSSRVEDKVLRRRGLDGDQTSVRAFSSPREGANWMGSSPASSSSSSSSHASSSSESWIRDKLSGVRPSSLAGRAPTTGTKRQCSSPPPSADRSEKKAKEDLAMEEPPEALAMEEQQDALATKEQALAMEEEQGAPATKGEQEVLPEMEEEQLVMEEEQESLAMDKMESGMEEQPGIEEEVLPEMEEQLMIEEEQELSAMDKMESGMEEQPGIEEEVLPEMEEQLMIEEEQELSAMDKMESGMEEQPGIEEEVLPEMEEQLMIEEEQELSAMDKMESGMEEQPGIEEEQPATEELGADDALPSANTHLDLVSSHLRDDGNWLTVMSSLCHPSRGWCLWAIFGSHAFAIDTTADADILTLDLAGLKETTSCPRAKGNNVKHCGTESCASSWIKPGILQAPLKQAMDSMESKLLEKLEGITKWMHEIDQRLDSQSGSLEKVTTKVDLAMDSVGKVQQECAELARSMKRVASCSDQAGILGSPFGISQVSASGSATPPPLNPLVPPVLDGVDLGHGFGDGIYRRHQPLPKMDFPRFDGSDVRIWLDMCETYFDMYQITQNFKVSAAVLHMSGNAAQWYHSYKLVNEVNSWDQFRMAVATEFECVVEREKMSALDTLTQTGTMTEYKQQFDSLVYQIRVFDPSMGGKMLVTHFMNGLTEEIRAAVVIQLPDTVQQASAIALMQESVLASRATKALKGKFVKLPQYKSDVSSDTTLGRVDKGDLWKAKQLKDYRRAQGLCFKCGDKYTPEHRCAVGGQIKAMKLEEVLTDDILDAVIAAEQSDDEEDCHISLNAFTGAHLPTAIHLRALVHSKVLLLLVDSGSSHSFIDYNFAHMLGLPLKPIPSTLVKVANGDCLPCQPYRYSPLQKDEIEKQVKEMIDAGLITPSMSPYTSPVLLVKKKDGSWRFCVDYRRLNALTIKSTKFFSKLDLKAGYHQIRMVETDEAKTAFKTHHGQFQFREVINSYTVDPQAQQLLAELAVHSPNSQGYSLTQGIIRFQNKIWIGSNAGLHTKLIQAFHASALGGHSGIAATYHRIKKLFAWPGLKLDVENFVKQCQVCQQAKHEHCQLPGLLAPLPIPKEAWQDISMDFIEGLPRSDGYNAILVVVDRFTKYANFIPLRHPFTASQVAHLVDKTVFKTHGIPRSIVSDRDHLFTSKFWTTLFATWDTQLQMSTAYHPQTDSQTERVNQCLEMYLRCMTQANPKKWSHWIHLAEFWCNTNYHTSLGCSPHKALFGVDPHYSQVPDLTLATLPDVQQLTRAQLRMKNKADKGRSDRVFAVGDAVFLKLQPYAQSSVVNRPYPKLAYKFFGPFTVLERIGVAAYRLDLPASSTVHPVFHVSQLKAQVPDHTPVYTSLPSPVVLDAADVVPEAILERRLVKRGNAAHVQVLLKWSLLPADHATWEDYHVVKTRFPDAPAWGQAKTPAGGTVMTGNGDTEKEV

SEQ ID NO: 106058 - protein, 624 aa, Oryza sativa
  Clone ID: PAT_MRT4530_10537C.1.pep
MESKLLEKLEGITKWMHEIDQRLDSQGGSLEKVTTKVDLAMDSVGKVQQECAELARSMKRVASCSDQAGILGSPSGISQESVLASRATKALKGKFVKLPQYKSDVSSDTTPGRVDKGDLWKAKQLKDYRRAQGLCFKCGDKYTPEHRCAVGGQIKAMQLEEVLTDDILDVVIAAEQSDDEEDCHISLNALTGAYLLTAIRLRALVHSKVLLLLVDSGSSHNFIDYNFAQMLGLPLKPIPSTLVKVANGDCLPCQYVVPGFFWWIQGHTFTYDMRVVTLGGHDAILGMDWLEQWGEMSCHWANKTLKFQYQGSWISLQGVQDAAVPSEIAAVTLPQLLKWHKGCEIWAAALLEHSQDDVQHVIPSSVQQLLTDFDDVFHDPKCLPPHRVFDHAISLVPDATPVNYRPYRYSPLQKDEIEKQVKEMIDAGLITPSMSPYASPVLLVKKKDGSWRFCVDYRRLNALTIKSKFPMPVVDELLDELSGTKFFSKLDLKAGYHQIRMVETDEAKTTFKTHHGQFQFRVMPFGLTNAPSTFQCLMNSVFAPFIRKFVLVFMDDILVYSPDLDSHLHHLQQVFAILRQHQLFAKRSKCSFACTQLEYLGHIISDKGVSTVSRPELVPTGTSP

SEQ ID NO: 106059 - protein, 1366 aa, Oryza sativa
  Clone ID: PAT_MRT4530_10538C.1.pep
MESKLLEKLEGIIKWMHEIDQWLDSQGGSLEKVTTKVDLAMDFVGKVQQECAELARSMKRVANCSDQAGILGSPSGISQVSASGSATPPPLNPPVPPVLDGVDLGRGFGDGIYRRHQPLPKMDFPRFDGSDVRIWLNMCETYFDMYQITQNFKVSAVVLHMSGNAAQWYHSYKLVNEVNSWDQFRMAVATEFEGVVEREKMSALDTLTQTGTVTEYKQQFDYLVYQIRVFDPSVGGKMLVTRFMNGLTEEIRAAVVVQLPDTVQQSSAIALMQESVLASRATKALKGKFVKLPQYKSDVSSDTTPGQVDKGDLWKAKQLKDYRRAQGLCFKCGDKYTPEHRCAVGGQIKAMQLEEVLTDDILDAVIAAEQSDDEEDCHISLNALTGAHLPTAILLRALVHSKVLLLLVDYGSSHSFIDYNFAQMLGLPLKPIPSTLVKVANGDCLPCQPYRYSPLQKDEIEKQVKEMIDAGLITPSMSPYASPVLLVKKKDGSWRFCVDYRRLNALTIKSKFPMPVVDELLDELSGTKFFSKLDLKAGYHQIRMVETDEAKTAFKTHHGQFQFRVMPFGLTNAPSTFQCLMNSVFAPFIRKFVLVFMDNILVYSPDLDSHLHHLQQVFVILRQHQLFAKRSKCTFACTQLEYLGYIISDKGVSTDPEKTAAMLAWPVPTSVTELRGFLGLTGYYRKFVQGYSIIARPLILLLKKKAFLWTDAAQLAFDQLKTAMSNTPMLALPNFQLPFTLETDACAYGLGAVLSQQGHPIAYYSKTLGPVNQKLSIYEKEFLAIMMAVDKWRCYLQRGPFIIKTYHKILCHLDDQILGTELQQKAMTKLMGLQYSFQYKRGVNNIVADALSRMPSSSQFCAFSVVQPIWIQEMINSYTVDPQAQQLLAELAVHSPNSQGYSLTQGIIRFQNKIWIGSNAGLHTKLIQAFHASALGGHSGIAATYHRIKKLFAWPGLKLDVENFVKQCQVCQQAKHEHCRLPGLLAPLPIPKEAWQDISMDFIEGLPRSDGYNAILVVVDRFTKYANFIPLRHPFTASQVAHLVDKTVFKTHGIPRSIVSDRDRLFTSKFWTTLFATWDTQLQMSTAYHPQTDGQIERVNQCLEMYLRCMTQANPKKWSHWIHLAEFWYNTNYHTYLGCSPHKALFGVDPHYSQVPDLTLATLPDVVDVQTERQHLSEFLQQQLTRAQLRMKNKVDKGRSDRVFAVGDAVFLKLQPYAQSSVVNRPYPKLAYKFFGPFTVLERIGVAAYRLDLPASSTVHPVFHVSQLKAQVPDHTPVYTSLPSQVVLDAADVVPEAILERRLVKRSNAAHVQVLLKWSSLPADHATWEDYHVVKTRFPDAPAWGQAETPAGGTVMTGNGDTEKEV

SEQ ID NO: 106060 - protein, 47 aa, Oryza sativa
  Clone ID: PAT_MRT4530_10539C.1.pep
RSTGGAHAYGRHPLHVERSRRPGEARIHASGLGDNSRSLGVRGVCFC

SEQ ID NO: 106061 - protein, 224 aa, Oryza sativa
  Clone ID: PAT_MRT4530_1053C.1.pep
RRKYPSALSPHIHSRIPPPSRGATPSPMASSLETTVPPESTHMGSPPPSHSPSPPPPLQGDHSLPTGAPPEPSPQPHHATPILPPSPGQATKERPRVEEPQPPIDGTPCAAGPPTQPSFFPSLLELGSSAAPSAPAATRQPDSPSPHPPAEPSVEFYPRSAASSPSSSYETAEDDWPAPPPPTPPPLVLCASLDSSYTESSPVRDRFGEEEGSHAAPEPPPLPP

SEQ ID NO: 106062 - protein, 94 aa, Oryza sativa
  Clone ID: PAT_MRT4530_10540C.1.pep
NMFTVCTRRDLVNQFGSHKKSKTSSYSDQFRVICHVKPFSGLSADNQLTVDLYCSDLPHPSVHSFVVNYSFIIPQKSSRSLCTRTCTIHQIDTR

SEQ ID NO: 106063 - protein, 101 aa, Oryza sativa
  Clone ID: PAT_MRT4530_10541C.1.pep
MGDGLIEPAATKLPPGRRGFLAIRASREWKARIQRCIERSELSFIPQYRDKCKPLDPQGSIGPEPELWINFHVSALELLGFLLMAHVPNSLIGYSVNIIKS

SEQ ID NO: 106064 - protein, 93 aa, Oryza sativa
  Clone ID: PAT_MRT4530_10542C.1.pep
WWHTSGERESGAPRYFRPPLSRYFCPPLFSLLRPPLSPSHPATPSPSPHPLRMPSPFPSHGSFPAPSSSVPSPSMAPSPWPAAPSSSPSPVWW

SEQ ID NO: 106065 - protein, 143 aa, Oryza sativa
  unsure (1)..(143): unsure at all Xaa locations
  Clone ID: PAT_MRT4530_10543C.1.pep
LKMTRTTRIVSILVSLVLFGQXDTYGYKYKAPXEERGHETIDQYXKPTYAKTSRRISTSEISLVVPIRXATTTVKRDLTLSLISLDTDSRRKTTLLSTTCQHFRPPYRQQIERLPQIFYCLAYILVPTFPILCKYRNRDIKRR

SEQ ID NO: 106066 - protein, 86 aa, Oryza sativa
  Clone ID: PAT_MRT4530_10544C.1.pep
MQEGEDDEDINTIDTSTSPQVQLHGTMERIQRGEDSRGLDSDCRTAPTSDGRHDFMRTPIWACKGLRQTQSPTWPGTFGDVGPEGE

SEQ ID NO: 106067 - protein, 311 aa, Oryza sativa
  Clone ID: PAT_MRT4530_10545C.1.pep
MALRRLAALLSLAVVLLSAGLAAASPTSQNTGDTVIFWGRNKDEGSLREACDAGRYTTVIISFLSAFGYIPGSYKLDISGHPVSAVGPDIKYCQSKGILILLAIGGQGGEYSLPSPQAAVELHDHLWYSYLGGRRNGVYRPFGDAIVNGIDFFIDQGAREHYNELAKLLYAHNKDYRATVGVMLTATTRCGYPDHRLDEALATGLFHRIHVKMFSDGRCPASSWRQSFQKWAKTYPQSRVLVGVVASPDVDRDAYIPPEALNNLLQYVFSKLPNFGGVMVWDRFYDEKTGFTARLPAGGGGGRRGSDDRRT

SEQ ID NO: 106068 - protein, 48 aa, Oryza sativa
  Clone ID: PAT_MRT4530_10546C.1.pep
THPRVNARTGGPCHQLAMLKASVGLCIPTAKGFSALLVAGFQSACNAP

SEQ ID NO: 106069 - protein, 113 aa, Oryza sativa
  unsure (1)..(113): unsure at all Xaa locations
  Clone ID: PAT_MRT4530_10547C.1.pep
HRLLSVHSKKGKTRPSNSNSHLTTFKIKKSIRSTSSLWFEDDRAAINNSFFITQSLCSQLQSPQQFNGNNRPSKFDAAIPTYHHWTSRXSSTPFGGGGDNXNNILVXNTPPXV

SEQ ID NO: 106070 - protein, 282 aa, Oryza sativa
  Clone ID: PAT_MRT4530_10548C.1.pep
MSRSIASSASSSSLTALFDPSSDSPLPSPPGSPPRDVSTTPSFVLSTQYSGDYRADWHQRDVQVQGLDKSWMDPTPTPSIFGVDDLCTIFAANLDCQMVKSRSRVPPREELRRISDERDYNSLRIALKAYISRSSEKTPELRVVSVLERNLIVEHGQGFLHFNFLVQPVDLESSTLKMFFAEVHLDCKGDEDVYVCCPLHVHDNGHCFGCSVRAKFLRHPSSHVFLGGHKDVDFPFTDSSSNDHSNGTEDSLRDEESENSKIETDDKDSNSDTEEETESKDD

SEQ ID NO: 106071 - protein, 114 aa, Oryza sativa
  unsure (1)..(114): unsure at all Xaa locations
  Clone ID: PAT_MRT4530_10549C.1.pep
MVNLVEAPKPLVYFLLRRAGLRQHTVDVDGAGTVISFWMPEGKVPKDRGTVAANRGQTAKERPAVVLVQAFAPEGVVTWQFQAXVLARXYDVYXPDCLLWRVDVALTDRRRVQA

SEQ ID NO: 106072 - protein, 142 aa, Oryza sativa
  unsure (1)..(142): unsure at all Xaa locations
  Clone ID: PAT_MRT4530_1054C.1.pep
MREMVPELEGRLXGAVGRHRRAGKGGRARRSDHARSSAAPGRLPEAGPDGAGAGAARLKPSLRALFSSAGSGFDDXSTSPTAVVMEAAASSAGKWATVIVSMTISEPAAAASIATVGEWRWEAAASNGGKYWKLNVRILQVS

SEQ ID NO: 106073 - protein, 124 aa, Oryza sativa
  Clone ID: PAT_MRT4530_10550C.1.pep
MSSDNHVVPLAAKPSPPHTAQAGSPRCAIVVAWEGSRPTSRRVGRHRAPLCALSPPRSPWPRATCMPPNLLVRHLSWPCTPPASFPTTHVGHLRTSRWAPRLLPGHRTCERRPSFSEVEGRRGR

SEQ ID NO: 106074 - protein, 83 aa, Oryza sativa
  Clone ID: PAT_MRT4530_10551C.1.pep
MDVEVAETLVSTDTLIPIPARRPNAMDNALSSPLVGFKYNARRYSLWTATNSKRPSPVRSSTSVTIFFASREGQGAPRKLKRR

SEQ ID NO: 106075 - protein, 46 aa, Oryza sativa
  Clone ID: PAT_MRT4530_10552C.1.pep
TVEHGNGASQQRKFLKPSVPGEASVKTIVAWPGVSSEARLCRGLHL

SEQ ID NO: 106076 - protein, 170 aa, Oryza sativa
  unsure (1)..(170): unsure at all Xaa locations
  Clone ID: PAT_MRT4530_10553C.1.pep
PRVRKEMSKNDFERVLMRLRKLRVVYLDLQDMRTVPACIGELKHLRYLXFSSPAKMGNLVNLRYMHTWKGLDIPNIGRLKSLRNLFRFTVRKEKGYEIHQLEYLNNLRGRMFIDCLDNIRSKEEAVRARLADKRHITDLTLXSWGGDERSASRTAPVTEMSSGPELQMQA

SEQ ID NO: 106077 - protein, 231 aa, Oryza sativa
  Clone ID: PAT_MRT4530_10554C.1.pep
MTMHLFGVDLLYPDRQSLDAVHNDTITFFTYLCRGGSIPQVLIEKAEEYLPDDIRFLIKFVKDDDGDSVYVVPSWIHSDIMDDNILIEGTTEPGTSTDCIAVEDLNKMDAIHIIDFSDLSIGDPLCDLIPLHLDVFRGDIDLLRQFLRSYQLPFLRAESNKDIYKSIQNSKFSRASYRAMCYCILHEDNVLGAIFSLWKDLGTATSWEDVEHLVWGELNQYQQSCSVGEIN

SEQ ID NO: 106078 - protein, 1270 aa, Oryza sativa
  unsure (1)..(1270): unsure at all Xaa locations
  Clone ID: PAT_MRT4530_10555C.1.pep
GKSMEDCSCGLGRNRXVGWLIAPIMNLLVNKFVSYIGFNASRKLRELEIHTLPKLEDMLRELEEQRMQKEAEDDRSAVKKLEQPCEELRSALYEAEDILDLIDYHQIKNKVNDCDDDINWLHYLQDAVGACIKLCTSKSAALFPISRPPPDSTDPNCSSKSAALLPISRSPLDTPAPDPNCSSSKSASAAPLPISRPPPDTTDPFPLEGVDIVPSLQRVRSFYQLACFYRNWSYEVMGITNYKGSDSFLTICAKRKLRKRIEAIEEILNDWKHLCTESHQSHLSNQERSSRWNTISSNYRQSIKPVTKPTVFGRDEEREVIHRILREGPDDHAASSSNRSGKTTLAQYVCDYEKEDKDKYFDPIILIHVSETLRADYIFHDMLEEITENRHSSITDRRELQNKLKKELRGKRFLLVLDDVNDKNDQEQRDLLSPLDVGKRGSRILVTARRTDVALRANRYIQISDLDKEIYFSMFMHYALEGTSFDDRDFIPLGRKIAEKLQRSPIAAVIVGVRLKQNPDITYWRATSNLDVLNSTTGALLWSYQQLDMDVRRCFEFYSIFPRRYELERERLISMWIAQGLVKTTNAREEDMEDVGELYFHELQVCSFLQLKRKVNSDTSSGEYFTAHDSLYDVAKMVAGSDRVEIKKGIVQHISKYVRHVCIMFYDEVFPEQILELANLRTLIMCYSIKEMSKNDFERVLMRLRKLRVVYLDLQDMRTVPACIGELKHLRYLGISPSLNYNDITLPAEFAKLYHLHEFSVTPFVNLQFSSPAKMGNLVNLRYMHTWKGLDIPNIGRLKSLRNLFRFTVRKEKGYEIHQLEYLNNLRGRMFIDCLDNIRSKEEAVRARLADKRHITDLTLSWGGDERSASRTAPVTEMSSGPELQMQAEVLEELHPPAWITSLCIREYNGTTYPSWLSVKGVVQQGEFPAALQILMFWSCKGSNNPPMIGVCKLKTGSEGLGILNLEKFARALRLRWLWQEWKSPEKAWVGSGTPCDDTDKLLFAAATSITIGNGATVSFWESAWWQERRMKDVAPLVYAVSKKKNSTLQHALQSDQWLLDLGFPADVGWTTELIDQLVTVWTAIQTIELTEHEDDQISWKLTSHGQYTATSAYNAQLLGTTANNLIWKPWALRKCKTFAWLVIQNRVWTSDRLSTRGWPNGSICPLCRRVQETALHLLAGCRYTKRIWATLAEWTACNNIHPNHWWQVSSVLEWWDQTTSVKEAPKKALRSLTFLVVWEIWNERNRRTFQHKELPPSGLLTKIKDEAKI

SEQ ID NO: 106079 - protein, 97 aa, Oryza sativa
  Clone ID: PAT_MRT4530_10556C.1.pep
MEVKKPVGNRRRQLVLKVMTPICGGGGVASREDDSTSWRHTRRPVDEDVDVQQRRHNKPAVQAETPVGGGEGEPAAETPVGGDTSRRQRRQAGSEDV

SEQ ID NO: 106080 - protein, 42 aa, Oryza sativa
  Clone ID: PAT_MRT4530_10557C.1.pep
PHNALTSRVHCKARLIILNHRWLEGYTPNLKCLYNIYYVASI

SEQ ID NO: 106081 - protein, 964 aa, Oryza sativa
  unsure (1)..(964): unsure at all Xaa locations
  Clone ID: PAT_MRT4530_10558C.1.pep
MAMAYHQHQPASSFGVVDGPELNVGYDDSNRLIRATALGHCADWKLERADTSLSFATAAQSPYLAVSGIATFASAGSAAASXIARRHEEHSVELWDMETSSCGAFLHGRRPAASARVFGPSGAILATGGKQGEKVRRDLARLIXVYAIHDNHDQVTGLVFLDSGKKLVSCSKDKLIRVWDLDTQHCLHNVGVHRSELWSIEEDHSEGFLLSASADLELRVFTVRKSAEEGEDWSKWDVLKPSGHCHSQMHXKIMSYLKEWSMVPLKVELVCRVCLVLLQTYHSQLTTTPSARSILTELKGILYSRVKECKDAIGFNLAAMDHIKELLAMRSDAPFRDARAKLXRSGRNNQDDRIGQMGLKKTKTKSLNNNMLETYSVDNENVSNMYSIEMHGHRSDIRSLALNSEDNLLMSTSHNAVKIWNPSTGDCLRTIDSDYGLCSAFVPGNRYALVGTKSGTLEIIDINSGSSIEVIEAHAGSIRSIVLIPNEDGTAGAWGFVTGSADHDVKFWEYQLMQKSDNDSKQLSVTNVKTLKMNDDVLAVTISPTGNHIAVALLDGAVKFSNLEQDKHKQISIFRQSVYMGKAIIVNIFLASCKLGNAVFTMDSLKFALTLYGHKLPVLCMDISSDGVLIVTGSADKNLKIWGMDFGDCHKSIFAHTDSVGKDRTVKYWDADKFELLLTLEGHHAEVWCLAISSRGDFIVTGSHDRSIRRWDRTEEQLFIEEEQEKRLEETFEADLDSAMDHKYGQKDGAPDEGSVGVPGRKTKETVTAADAIIDALDTAEEEVKRLDQHQEGQNNGNGTTFQPNVIMQGQSPSDYVLNVVSNVRPNDLEQALLSLPFSDALKIMSYLKEWSMVPLKVELVCRVCLVLLQTHHSQLTTTPSARSILTELKGILYSRVKECKDAIGFNLAAMDHIKELLAMRSDAPFRDARAKLMEIRQEQSRRSDRSDGAEKRKKKKRRTSGES

SEQ ID NO: 106082 - protein, 80 aa, Oryza sativa
  Clone ID: PAT_MRT4530_10559C.1.pep
GLPPSGKNNKTWGEGFPQNLPSQRGGAKKTPILKGNPPGGGEKTKKVPKGGKIIKPAPGGGFPPPNSSPHGREAFGEPRG

SEQ ID NO: 106083 - protein, 86 aa, Oryza sativa
  Clone ID: PAT_MRT4530_1055C.1.pep
QVSCLRLIFCLCQTRPSSWQGTRSPQTARCMGKKNQVVDTPCRRRSPQHASVHLSQKPVLGARWINAGARYEPRVFLFGAYFLLNR

SEQ ID NO: 106084 - protein, 124 aa, Oryza sativa
  Clone ID: PAT_MRT4530_10560C.1.pep
GNFTSLLCLLLFFTPGTPRTYNQSQLTKTFRIAHINNCCSTHLEHSLQTNDLICASPCPSSVGKEIHLHVKRVISGKKNISRTSAPMTFQHGRYASIPNAYILLSKGETCYSLSVENVKRSQIN

SEQ ID NO: 106085 - protein, 81 aa, Oryza sativa
  Clone ID: PAT_MRT4530_10561C.1.pep
MLDSRKSQSQRGYLANPKNTSPAERRVYYEISSSRASRLRHQEAIQSFVKEKSFVISEKGALGIVKSLVSLTGHQVTRIRV

SEQ ID NO: 106086 - protein, 131 aa, Oryza sativa
  unsure (1)..(131): unsure at all Xaa locations
  Clone ID: PAT_MRT4530_10562C.1.pep
INASVFYYLLHHINNSRCQDAYVYNLKNEKKNSQRNKTRTRTTALQALHSSSLISLCLHMDPAIHACNAHHRVGHRRSYRXSTPSPRRPAGRRARARYCTRSSVPSLQLALAHRRRNSWRLELLLGRRRPG

SEQ ID NO: 106087 - protein, 138 aa, Oryza sativa
  unsure (1)..(138): unsure at all Xaa locations
  Clone ID: PAT_MRT4530_10563C.1.pep
LSESEMRITHRQCHREVQDSSLDACRXSSTRXVTVRKRLQAMFRRPGALXCEMQRCQHMHDLSRKCRCAGIQPMARSYDESMPMPLXKAXSWSSSDYYGGEGSTPDQAYYGQRSSDEGYYREQHNAPTMTTMRLTTAR

SEQ ID NO: 106088 - protein, 305 aa, Oryza sativa
  Clone ID: PAT_MRT4530_10564C.1.pep
MGRRHIGTVAHLAAGGFAGAVSKTCTPRVRRLTILFQVAGMHSDVAALKKYSIWHEASRIVREEGFGAFWKGNLVTIVHRLPYSAISFYSYERYKKFLQRVPGLDEDSNYVGVARLLSGGLAGITAASVTYPLDVVRTRLATQKTTRYYKGIFHAVSTICRDEGVKGLYKGLGATLLGVGPSIAISFTVYESLRSHWQMERPQDSPAVVSLFSGSLSGIASSTATFPLDLVKRRMQLQGAAGTSSVCKSSITGTIRQIFQKEGLRGFYRGIVPEYLKVVPSVGIAFMTYETLKSLLSSIDEDDES

SEQ ID NO: 106089 - protein, 78 aa, Oryza sativa
  Clone ID: PAT_MRT4530_10565C.1.pep
MAGTCVGAKKLTSFGSATVAEGVGRGGAEGDHDDGLDSSNAGLPEVDPEVARDIGSVSRTWIQPGRIQQWRQWVAVDQ

SEQ ID NO: 106090 - protein, 81 aa, Oryza sativa
  Clone ID: PAT_MRT4530_10566C.1.pep
LIHMRLTSKCEESYGIGFSGVANCTCKMTRCVAARLISVLSYPFYMQAKQILAQKKKKQTKKKIKKQTNKKENYKKKNKKT

SEQ ID NO: 106091 - protein, 122 aa, Oryza sativa
  Clone ID: PAT_MRT4530_10567C.1.pep
MPPKEVVAGGVAAVKGYMARWWRDARAEAAPSPRAPRCRRPRSGRYGIGQAAEEGIARAAGGGRQGRSGMRAAGEQLGKGIARRAVAYGEDAVEVGGWHGGQRRRGAKDGEQVGGMARWQRM

SEQ ID NO: 106092 - protein, 122 aa, Oryza sativa
  Clone ID: PAT_MRT4530_10568C.1.pep
SRSRGRGRLTAGPHAATARRARRWPRRRGRREAAPAPRWSPPATTGAAERRPREGREGGKEATVHGSPRGDGGGGGGGRSGGRRWRGSGRRGRWCSGGRRAKRRGGRGRQGCGEAARRSRAP

SEQ ID NO: 106093 - protein, 144 aa, Oryza sativa
  Clone ID: PAT_MRT4530_10569C.1.pep
LALLAFPNVGFNLHGERIFRSCSVRGRGRLTAGPHAAATRRARGRPRRPGRREAARPRPDGRRRRPPARRSGGRERGGKGERRRRSTAHPGATAATEGAARAEGGGGAARVDGVDGVPAVGDRNGEVDEVGEDAAKRRGVLGLH

SEQ ID NO: 106094 - protein, 289 aa, Oryza sativa
  Clone ID: PAT_MRT4530_1056C.1.pep
MGDHEARGDDFEKKAEKKLSGWGIFGSKYEDAADLFDKGANSFKLAKNWSRAAQVYIKIANCHLKGDSKHEAASAYVEAANCYKKFSPQEAAQALNQAVDLFLEIGRLNMAARYCKDIGEIYHQEQDLEKASDYLEKSADLFDSEGQSSQSNSIKQKVAEIAAQLEQYQKANEIFEAIARQQINNNLLKYSVRGILLNAGICQLCRGDVVAITNSMERYQDIDPTFSGTREYKLLSDLAAAMEEGDVAKFTDAIKEFDSMTRLDPWKTTLLLRAKNELKKKEDDEDDLT

SEQ ID NO: 106095 - protein, 242 aa, Oryza sativa
  unsure (1)..(242): unsure at all Xaa locations
  Clone ID: PAT_MRT4530_10570C.1.pep
KIFGSADDYERLDVVGQGAFGVVLRARDRRTGKVVALKRLIGADEGGRFAPDFDALRVEAACQHACRGHPNIVQIKDVVADAKTGDLFLVLEFVGSSLRDEFPRAHPEDIVRAMMRPLVDAAKKMHASRVIHRDIKPENILVSFSGQLKICDFGAATLMKPAGKPYDLCRPGTLPYTSPEQLAGNRXDQLNELFYDVLPELSPAAREVLSGLLAFDPEKRMTAVEALEHRWFAEEPKKAEFP

SEQ ID NO: 106096 - protein, 325 aa, Oryza sativa
  Clone ID: PAT_MRT4530_10571C.1.pep
MAPAVASRKRAAPEDPEPRACCGSSPADGAKRRRYNFGSADDYERLDVVGQGAFGVVLRARDRRTGKVVALKRLIGADEGGRFSRDFDALRVEAACQHACRGHPNIVQIKDVVADAKTGDLFLVLEFVGGSLRDEFPRARPEDIVRAMMRPLVDAAKKMHASRVIHRDIKPENILVSFSGELKICDFGAATLMKPAGKPYDLCRPGTLPYTSPEQLAGNRCYGPAVDMWALGCIMGELLTGAPLFGGDMTEKELLADLSTNLGDQLNELFYDVLPELSPAAREVLSGLLAFDPEKRMTAVEALEHRWFAEEPKKAEFPGFVPLFG

SEQ ID NO: 106097 - protein, 326 aa, Oryza sativa
  Clone ID: PAT_MRT4530_10572C.1.pep
MASSAVASRKRAAPYDLEPRACCGSSPASGPKRRRYNFGSADDYERLDVVGQGAFGVVLRARDRRTGKVVALKRLIGADEGGRFAPDFDALRVEAACQHACRGHPNIVQIKDVVADAKTGDLFLVLEFVGSSLRDEFPRAHPEDIVRAMMRPLVDAAKKMHASRVIHRDIKPENILVSFSGQLKICDFGAATLMKPAGKPYDLCRPGTLPYTSPEQLAGNRCYGPAVDMWALGCIMGELLTGAPLFGGDMTEEELLADLSANLDDQLNELFYDVLPELSPAAREVLSGLLAFDPEKRLTASEALEHRWFAEEPKKAEFPGFVPLFG

SEQ ID NO: 106098 - protein, 325 aa, Oryza sativa
  Clone ID: PAT_MRT4530_10573C.1.pep
MAPAVASRKRVAADDPEPRSCCGSSQASGPKRRRYNFGSADDYERLDVVGQGAFGVVVRARDRRTGKVVALKRLIGADEGGRFAPNFDALRVEAACQHACRGHPNIVQIKDVVADAKTGDLFLVLEFVGGSLRDEFPRARPEDIVRAMMRPLVDAAKKMHASRVIHRDIKPENILVSFSGELKICDFGAATLMKPAGKPYDLCRPGTLPYTSPEQLAGNRCYGPAVDMWALGCIMGELLTGAPLFGGDMTEKELLADLSANLGDQLNELFYDVLPELSPAAREVLSGLLAFDPEKRMTAVEALEHRWFADEPKKAEFPGFVPLFG

SEQ ID NO: 106099 - protein, 83 aa, Oryza sativa
  Clone ID: PAT_MRT4530_10574C.1.pep
MGGGDGGAGKAKARPVFSSFMTVFMHADAADVALMVLGLLGAMGDGISTPVMLLITSRIFNDLGSGADIVKEFSSKVNVVRTL

SEQ ID NO: 106100 - protein, 110 aa, Oryza sativa
  Clone ID: PAT_MRT4530_10575C.1.pep
ECESKAELDRFWDALISIREEIAEIENGKADVLNNVLKGAPHPPQLLMGDTWSKPYSREYAAFPAAWLRGAKFWPTTGRVDNVYGDRNLICTLQQATQVAEEAAVATATA

SEQ ID NO: 106101 - protein, 170 aa, Oryza sativa
  Clone ID: PAT_MRT4530_10576C.1.pep
MKFTKLIAFSAVIFSGSLFAQKPLLTVYTYDSFVSDWGAAPKLEEKFEKVCDCDVKFIPFEDGITMLNRIRLEGKKTKADIMLGIDNFTMPEAVKSGLFAAHNLPIDQIKWQDNTFFPYDYSEYAFIYNKEKITNPPKSLKELVERQDLKVIYQDPRTSTVGRGLLFWLN

SEQ ID NO: 106102 - protein, 122 aa, Oryza sativa
  Clone ID: PAT_MRT4530_10577C.1.pep
KQPQDPGVNFGGNPKKNVEIFFLGGPGPGKRKKRWRGPKGPPGDQTTREKGLPQRAGGKKKPTGEGPQGDYSQIPPLGSTKTGPKKKKKGGNPLPPPGGAKEPKIGLTPGIGKTRERDTGAH

SEQ ID NO: 106103 - protein, 129 aa, Oryza sativa
  Clone ID: PAT_MRT4530_10578C.1.pep
RQQNRRRPTAKPGQTTAKQRAAATWRTKRPRKRRPPTATTGGTGTMSRKKPQRRQRGHRPARRSANPRGGGGAGARATAPVRDRRGGAGGRAEAAAAVGGRSAATGTAPAGRRGGEAAVAAGRIFFLFF

SEQ ID NO: 106104 - protein, 78 aa, Oryza sativa
  Clone ID: PAT_MRT4530_10579C.1.pep
PPNLVLVVATWGPWGGRMALAGGDIEMDSFLAVVIEVPHMRFVVIGRKLPLVIAQPVRLRLVVVQLGVVARVLKFRNF

SEQ ID NO: 106105 - protein, 157 aa, Oryza sativa
  Clone ID: PAT_MRT4530_1057C.1.pep
ELTAGFYSSNGQDRYEAIAEIFAKNSCRMIIPGMDLSDEHQSPESLSSPESLLGHIKTSCKKQGVVVSGQNSSTPVPGGFERIVENLKDENVGIDLFTYQRMGALFFSPEHFHAFTVFVRNLSQFELSSDDQASEAEVEAETASIGSGTGAPSLQTA

SEQ ID NO: 106106 - protein, 216 aa, Oryza sativa
  Clone ID: PAT_MRT4530_10580C.1.pep
MQLRSTSMQKRQQQRSRIHVKLQISTSQCGSGGVASGCRRSIPQPRKRSCKWLGTLAIAEDPVWTFDRAAHGPATARTSNPPCRPPVRHRHLLRRLIPLSPQGRSHLEDSKLVGGIRRTTVSPTNRVNGPNRIHPLPEKTDRTRQHIHAMRGVGARWHAMARRGRALECLRSSCGARAWLGAARTGRARPPAEQARPARCARGTQPRPEKIIVQVP

SEQ ID NO: 106107 - protein, 88 aa, Oryza sativa
  Clone ID: PAT_MRT4530_10581C.1.pep
IISIATITSTKSLGGVSTGVTTATSIDHFRDSVFCISSTSIAPCGDVPALLLSCKPLPMNAVHFLGFGIDNETMVSNNLSALQMSSTQ

SEQ ID NO: 106108 - protein, 123 aa, Oryza sativa
  Clone ID: PAT_MRT4530_10582C.1.pep
MAPIVIASLATSVAPFQGLKSTAGLPVSRRSTNSGFGDITNGGRIKCMQVPPVLGFFFFVTVSSPGYYDGRYWTIWKLPMFGCSDNSQVIKELEEAKKAYPDAFIHIVGFDNVRHVQCISFIA

SEQ ID NO: 106109 - protein, 75 aa, Oryza sativa
  Clone ID: PAT_MRT4530_10583C.1.pep
MAVAPLCRRPTGVVWQGRPRAASQRGGPGRRRGEEARGSSATGRVDVVHSGRRLQRGGCRRRRVESHMRRRGGYP

SEQ ID NO: 106110 - protein, 52 aa, Oryza sativa
  Clone ID: PAT_MRT4530_10584C.1.pep
RYMKRNISGGNEQEDFSALDHMPENLGLVWLGSSSRFLLCGAGAKPNTPRSS

SEQ ID NO: 106111 - protein, 264 aa, Oryza sativa
  unsure (1)..(264): unsure at all Xaa locations
  Clone ID: PAT_MRT4530_10585C.1.pep
MRGRGPRGSRRRRGVELGAGGSXPGRSWAATVGGGAVRGRRGRRSARPAGWSLARAAAAGGGAGRRRRRAGELEGVDGDVVAVVELDAAAGVALAEAVEAVEDGVVLADVEVLERPDLVLLGRRRGSGRGRGRALEVAHPPLHPVGAGRRQGVPPPXGGGVHGGDGGGRGARGWVRASRGELGGDGAAGDDDDAVTAHLTEHAAGGGREDARVRRRRPQRRHARDRQASAARAGWLRVCGAADVLLSHLAPPLPRRRQGLPHRP

SEQ ID NO: 106112 - protein, 68 aa, Oryza sativa
  Clone ID: PAT_MRT4530_10586C.1.pep
MSRQMLPLYTSTASPLSLLFIIIEILKIENNYRLVYFLLSKSPAKPSPDNRLTRLLHGLPDIPPFNRH

SEQ ID NO: 106113 - protein, 256 aa, Oryza sativa
  Clone ID: PAT_MRT4530_10587C.1.pep
MAVVGVLDSLAAEERWLYPGFLAMYAAIYCVGQLALLRRWAWPLRLDGASCLISLAHGTPAALAAAGAILALPPEARGFAAPNTRLQDHVLDYSVAYFTMDLLHYLAFLPGDTLFIAHHVATLFVFVTCRYLVRHGAYALLVLLVLAEVTSLLQNVWTLAGIWRAEKPAAARVYRALSPPFYFIYTVVRGVAGPLFFLKMSLFYLSGQAVDVIPWWVRISWIVVVGTAITVSNLWIWNLWKELFRERKQSMTKKST

SEQ ID NO: 106114 - protein, 297 aa, Oryza sativa
  Clone ID: PAT_MRT4530_10589C.1.pep
MKNKKKGSRCNRNKSDPVMLDGFTKLPEDVLLNILDRLNTPDAVRTCLLSKRTLHLRHMLSNLHIRINSFVPRCGYATLKDTIPMNAAVAGATDNILSFRRQDIPLRKLSIGFYLRYYDCLTIGKAVARAMATHNIHSAEFNILTEKPPDYSTIDDRRRDGKQLMTFFCSFWDHWCEIETDKVKREKQGYCDKTNVEWESSAPDGFRHYNLTKLTIYGFQPNENFMGYIRHVMEAAVNLENISLHDRKVLKCCEELDPKIKVAPSRYPQTIEEQELLRKQITEGLVMASPHAVHFRS

SEQ ID NO: 106115 - protein, 221 aa, Oryza sativa
  unsure (1)..(221): unsure at all Xaa locations
  Clone ID: PAT_MRT4530_1058C.1.pep
KRKFTVQRGPLSYVSSSSSRSSLVEVVAAPRLRPRYAGHRAPVLRWFNGLDGGGQACSRSLCIRGGRWKAXGVNRMAGTAAARAQLWPAMVVPVVLVAXLKERGNRKKWNHLGEAELVAQGFGFRSSGEGDRPTTATAGHGKREKDGALFGRGAVGRGGSGGGRRLDHGXRWREGRKDGADYFVTTEGSLRRRAPCACTTRTPGRRRREAAGLWSELDRLG

SEQ ID NO: 106116 - protein, 232 aa, Oryza sativa
  Clone ID: PAT_MRT4530_10590C.1.pep
TFPTDPIPRIALVDVSEHPRPHDTGTTDHHSSLVCTSRISLDSGNLRPVDEAYTISLLLFFSSLDFDFLKSPEHGTDEKESRRLRIRRRRHRRRRHRRRRRDVLPGRIWRLFTSFFFLGKFSINFGIRLLMIARYGVQLEKGAFEKRTADFLWMMIFGAISLLALSAIPFLDIYFLGVPMVSMLLYVWSREYPNSQISMYGLVQLRANAPVRPAAANTGSGAFRGRSYRLSQ

SEQ ID NO: 106117 - protein, 62 aa, Oryza sativa
  Clone ID: PAT_MRT4530_10591C.1.pep
DTQCPTAKTGLFEGSAFLALQATLFWLVYHMLALNTRSHYLDKNGKGNYGQVFACNVHAPKV

SEQ ID NO: 106118 - protein, 278 aa, Oryza sativa
  Clone ID: PAT_MRT4530_10592C.1.pep
MSSPAEYYNSLPPISKAYGTLCFFATVLCQLQILNPPFLALYYPFVFKKFQIWRLFTSFFFLGKFSINFGIRLLMIARYGVQLEKGAFEKRTADFLWMMIFGAISLLALSAIPFLDIYFLGVPMVSMLLYVWSREYPNSQISMYGLVQLRSFYLPWAMLGLDVIFGSEILPGLLGILVGHTYYFLSVLHPLATGKNYLKTPMWVHKIVARFRIGVQANAPVRPAAANTGNTPSAGPPRRFPSMVTGRPNQIPTLPIEFVVCPVKKKKKKKKKKKKKKK

SEQ ID NO: 106119 - protein, 75 aa, Oryza sativa
  Clone ID: PAT_MRT4530_10593C.1.pep
NFPVEWMNISGSGADVARHQQWSFHFIRTLMRSKALLLAPATGERKKSSSFLCKNHKFGHKSLVPNSKGKYIIAN

SEQ ID NO: 106120 - protein, 140 aa, Oryza sativa
  Clone ID: PAT_MRT4530_10594C.1.pep
MGRLRGKVFPACFALNAACTAASAAAFAWLHRPPWPPAERRQLAVLLVAAGYDLANLLIFTPRTLEAMRERHKVERSLGIGGDGSFVGWRQNARAARSSSTLAAENARFWVAHSFSAVALVISAAGLFSHFCYLSGKIVI

SEQ ID NO: 106121 - protein, 32 aa, Oryza sativa
  Clone ID: PAT_MRT4530_10595C.1.pep
FIFLQNKKPDLLHRGHNTKTGHTHHQNLYIIT

SEQ ID NO: 106122 - protein, 1479 aa, Oryza sativa
  Clone ID: PAT_MRT4530_10596C.1.pep
MEVEQAAEVGEVTAPKLPDKAVDKAQVHDDDKENLVNGNSNLQVKEAHNDEDDGTGSDGFELIDVKENFDSAKVVEEEKASPIEQGKTAALEEQALTRESAMLNQEAKQLEELTRRIEELELEKEKLVKGVTEAENKQNLHYTSLQEAQRSLADKDKELADATQSLKELGSELESSKERIQEIEAELAASADKLHKLEELKDERSLHAAQEAKRASELDKTLETAQLNMKEMEAQISSLQEEIKGHQDKAIDHQQVEESLRSTLSELKMNRLKEKTLKLENELSSAHEELQAKILNLQEMEIKLEEQAKEKQTWEATLEKQQEQILNLQTELDESKGGNETLRGTIADLNSKLAERDSLLRQAEDEHAKAQLLLSEALSHKDELEVNLKSINEQHGESRAAAENASQKILELEALLQTLHATEEALKLQLEEAEARVEVAEKKGSDLEQLLGESENKLVASSGELKLLEERVQQEAASSAEKEKLLEEATNSVEAYKEKINELQASLDSTTSKNQLLEQEVKDLSDKFTEHQEQAHSVHERSLELESLLHTSKSDAEVAHTRTQDLENELNTANEKFKEVEADLEQYRSKVSQLSDELEAYQTKAASLEAVMESASEKEKELVESLGQITEEKKKLELLVLEYEEKTEEYLKEKQSLEERLQSQESKVLALEESLVKMGEEKESHEGTIADLNLQLSNKNDMYMQLESQLSQAGDDHSKTRSLLSEAQLHKEELELNLKSLNDLHVESKTAAESALQRIAELETQVQELSAAEQSLKSHLTEFESKLASAEKKSMDLEQELKDATEECNSSRLRVDELSGELEEYKEKRTSLEASLLEAKQKEAELSEKLDQVNEEKEKFEELSKKATIKHLEAENQVQALQGELESARHKLEEVESDLEALGIRETSVLDKLKSAEEQLEHKGKALEHATSKKIDLEALYQSLLEDTEMKLQQAGENLTQKETECQELSEKLKAAEEQAASYQAKATAAAEEVESVKVELEAFETEISTLETTIEELKTKASNAESRAEQALVESAMMSETNQALKEDLDAKLAMLRELQEQFDSTHAEKEEVFTKLSAHEKTIEHLTEVHSRGLELHATAESKNAELEAQMHEALETIGKKDSEVKDLNERLAALESEIESLTHVNEAMKQEINAKLVKVDELQEKLSSISSEKEEVAEKVVVHEKTIEHLREEHSRGLELQSAAESRSAEIENELREVLETVAQKEAEVTDLKEKLVSLETENEKLVGINEALKGELDTKVAMFDELQEQFSSTHAEKEEAAEKLAVHERTISHLTEVHTRSLELHSAAESKNEEIESKLHEALEMAAQKEAEVKDLSKKLDALEIELGYYEEQATEAAAAEETHKIKFDEAVHKIKSLEEQLAVTENKVELFHTEKENLVIANSKLNEELELHQNKLNELQVALAAAVAEKEGSSEEIHSLRKTLDGMIQRKEELESQLSLNSYIAITYFVALRK

SEQ ID NO: 106123 - protein, 126 aa, Oryza sativa
  Clone ID: PAT_MRT4530_10597C.1.pep
AVSLLSDALAVSAQALIASSFAKLDYEKVKEVTYYVLKIGLLVGAAIALLLFASFGRIAELFSKDPMVLHIAGSGVLFVSASQPINALAVIFDGLHFGVSDFSYSASSMITAGAISSIYLLYAPKV

SEQ ID NO: 106124 - protein, 53 aa, Oryza sativa
  Clone ID: PAT_MRT4530_10598C.1.pep
PFNLNTAFANFALCLFGVRITETVRRTAYWYVCIQKPLQPTGPNLINYATHIT

SEQ ID NO: 106125 - protein, 256 aa, Oryza sativa
  Clone ID: PAT_MRT4530_10599C.1.pep
MARHLVALSRKAPTSEDLSIIVHDSLEYIDGQSDLVNYGRKIVEHIILLRAKPNISDAEEKDMLDYLYTSQYQMRGILAVSLGRIEDPNTENFTHAVLMRFQQKDDIAKFHSSPYYYKILDEHGSVSVDFESEVEDDIIPLFRRGEDFNYGVEFMLLISFLESASGDSVEDALASLQRFISQCSSFIVQATLGCCLNHMDSGYSHAAVIRFPSFDDFKIFREGMEYKDMWASTFQPIVEKSLELHFTVDPVGNQLM

SEQ ID NO: 106126 - protein, 75 aa, Oryza sativa
  Clone ID: PAT_MRT4530_1059C.1.pep
GRPFFFFFFFFFFFFFFFFFFFFFFWKRKGIVFFKTIFLFYPGKRKIGSPQPLLKGLKQTPLKITLETHKNIFLK

SEQ ID NO: 106127 - protein, 95 aa, Oryza sativa
  unsure (1)..(95): unsure at all Xaa locations
  Clone ID: PAT_MRT4530_105C.1.pep
VPSGGNEKLFGFFLKPAXNRGVTSRGLSNQAVQKKPMGPPFKARVENVGFYDLTNFLNVDLSNHPPKVPPIFVVKNQCPCDALWRGPIGEIGFSV

SEQ ID NO: 106128 - protein, 71 aa, Oryza sativa
  unsure (1)..(71): unsure at all Xaa locations
  Clone ID: PAT_MRT4530_10600C.1.pep
RRAVLALLAPSTASSVMKVAPSASPYRAATNLFTKPKTNTWLTAYSGYGIKLVIPSNWNSVTEPXFPAQVL

SEQ ID NO: 106129 - protein, 881 aa, Oryza sativa
  Clone ID: PAT_MRT4530_10601C.1.pep
MSGVSAATGGGAPPGAGASAANDNINGGNSASQSSGGPFSGSPDLSQKQGSEFQLAAGKVIRHEGCAEHDHISIGDHGNFLARRKRTGCFSFLPGGPRTLFFYELDHFDGVVTCIPLDDEPVDEGYSFLCFCLGWDKRRSGIFDCVCKTCGHHVPVPYPFPKKKTYACGHGIGEENSRSGIRGTWDATISKFYVTVGNRAVTGLTAGDWASDSDNDKFEWDTDGEAETSSAPALRNIDAPGPSTRLPQDANGKANGSGALVAEFMGMGFPKEMILKAIKEIGDTDTEQLLELLLTYQAIGGDASVGNCSASACAPQTLEVDEEEDDTNWDEYDTAGNCDRTPHSDGSGDEDFFQEMSEKDEKMKSLVNMGFPEDEAKMAIDRCGLDAPVAVLVDSIYASQEAGNGYSANLSDYEDTEFSSFGGRKKTRFVDGSKKRKRYGSGPSGNQVPFDGSHEEPMPLPNPMVGFSLPNERLRSVHRNLPDQALGPPFFYYENVALAPKGVWTTISRFLYDIQPEFVDSKYFCAAARKRGYIHNLPIENRSPVLPMPPKTISEAFPNTKRWWPSWDPRRQFNCLQTCMASAKLTERIRCALGRFSDVPTPQVQKYVLDECRKWNLVWVGKNKVAPLEPDEMEFLLGYPRNHTRGVSRTERYRALGNSFQVDTVAYHLSVLRDLFPNGMNVLSLFSGIGGAEVALHRLGIHMKTVISVEKSEVNRTILKSWWDQTQTGTLIEIADVRHLTTERIETFIRRFGGFDLVIGGSPCNNLAGSNRHHRDGLEGEHSALFYDYIRILEHSSKTTVGPNKYQNLGSRTEKDSAVRFSHSLPVKSCSPHYVHLTKISHFNWQISHHSSSKAPTPNPSHKTFATTMRAKLPSSEFSGC

SEQ ID NO: 106130 - protein, 59 aa, Oryza sativa
  Clone ID: PAT_MRT4530_10602C.1.pep
KTPHGKFLSLQRPVHHIRNDPINSAPNDYTHLHQTSLYVSIYPCRCNFLNNPRDYTTLD

SEQ ID NO: 106131 - protein, 96 aa, Oryza sativa
  Clone ID: PAT_MRT4530_10603C.1.pep
SRRQYHGHHHHRCLARGLSSSSPPCLRPAAVVPAVAGNGSSLLVVAGDGSDIPVVAGHGSGLPAAAGHGSCLPAAAGNGSGLYAAAGDRSAPPPTP

SEQ ID NO: 106132 - protein, 80 aa, Oryza sativa
  Clone ID: PAT_MRT4530_10604C.1.pep
MDGDPPGGEDGESAVQRGWRPPGRPLAPAGSPGRPAPAAREAIPRPARPANPRRAQDRQLMATAAHAGSSQAGTDSNPLD

SEQ ID NO: 106133 - protein, 127 aa, Oryza sativa
  Clone ID: PAT_MRT4530_10605C.1.pep
SARFGGSLPHPRRRRPRPRPQLSWRRPRPQPRRRAVILRHRCLLRSPFIARASTASSLVLPLPPHPGEHILRHRRSNEAISHGVARSDADPVPTPDSSSYTHEGGVGEPTVHDDAGQMTYSEWHYDY

SEQ ID NO: 106134 - protein, 1131 aa, Oryza sativa
  Clone ID: PAT_MRT4530_10606C.1.pep
MGAGAEEAGSKSAPLLCLDPGKGFETENHWLSNFSIPLISNESPSTKSEGASSPVSADAASSFNPAGVQISIVAVTESPGLYTSLSVWSFNLGECRCLAAAASAFLSSNHPTLLRKESPCGIGSFSDISSTGCLRFNRRPLPPSLPMGTQSDLLSATSGALGANSAPVICPFATINIKLHVPMTLELKPSNFTKWSTAFQATCGKFGLLHHLATASTSRPTDEAWKQADFCVRGWMYSTVSDAVLNLAMTDDTQTASVLWTAIGGVFQANKAPRAIFLNHEFHSMTQGDLSIDAYCVRMKEKADELRDVGQPVSEPNLVLNLLRGLNEVYSGVADNIAGQQPLTLATARHQLLLKELRLQNDEKTRAAAALLAAASSNGGFQQPQQQGGRRPNTKKGAQQPFPNSSGGFSNNSGSPGTNKRVPWGFNPWTGERVAPGERVTPPGQRRQGGSGAPGGPGAPAGRNQGILGPSPQAHTAFAPLQASSSGSNTSTSTWDAAGLIAALQNMQLQGNSPWVVDSGASTHMTSSDAALRCCGLTRIAFFEHRAGAGPVPPPGPSVVPFPRVYVRRSRTASTSEPATAPAAPVAPDAPAPPTTPTPAPAAFPVPAPPPPPPPRATRTMTGVIPRVSYKGLAATTSSSPSPVPTNYRSALADANWRAAMMDEYQALVDNNTWQLVPRPPGANVVMGKWIFRHKFHADGSLARHKARWVVRGFSQREGVDYDETFSPVVKPATIRSVLTIAASRAWPIHQLDVKNAFLHGHLEETVYCQQPPGFIDPGAPEHVCRLQKSLYGLKQAPRAWYQRFATFVRKLGFVASTSDTSLFILREGMSLAYLLLYVDDIVLTASSSALLQRIMTRLSSEFAMTDLGALHHFLGIAVTRSSDGLFLSQRQYAVELLQRAGMAECHPTSTPVDTHAKLSATDWDLLSEKDASEYRSLAGALQYLTLTRPDLAYAVQQVCLFMHAPREPHRALIKRILRFVQGTLSSGLHIGTGSVDKLTAYSDADWAGCPDSRRSTSGFCVYLGDTLVSWSSKRQTTVSRSSAEAEYRAVAHVVAECCWLRQLLQELHIQLPSATVVFCDNVSAVYMTTNPVHHKRTKHIEIDIHFVREKVALAFASGSLPLRLRAGVRQ

SEQ ID NO: 106135 - protein, 437 aa, Oryza sativa
  Clone ID: PAT_MRT4530_10607C.1.pep
GCRFRTRVSLPLPTGHHRRSPSIPRAIAASSLVLPLPPHPGEHILRHRCLLRSPFIARASTASSLVLPLPPHPGEHILRHRRLLRSPSIARASEGRRRSSCCFRRIDKMPNRATHWCYACRRPIRVSGQDITCPNCNDGFIQEISEIGGSLNTYGIFDPSFDERRDRSFGMVEAMSDLMRQRMAEMGRNRVLDFHGTRGASSHQGRQPTVRPMLIFGSNAPDRVSSSSEEADILLRQGRRIGADRPNFSRFLVGPSLEALFEQLLLHNNRQGPPPAPQSAIDSMPVVKINLRHLRDDPHCPVCTDKFEVGTEAREMPCKHLYHAECIIPWLVQHNSCPVCRHPLPSSSHRSGSTRSSSTHSNEAISHGVARSDADPVPVARSDDSRNHEMHGSFSFLWPFDSPTPDSSSYTHEGGVGEPTVHDDAGQMTYSEWHYDY

SEQ ID NO: 106136 - protein, 70 aa, Oryza sativa
  Clone ID: PAT_MRT4530_10608C.1.pep
RAHNKDEFKTMVTRETIPPCYEKIVPILICIHLKAIVIYRSRICTDSESHKFCHISRLLKHHLVYMQLLV

SEQ ID NO: 106137 - protein, 513 aa, Oryza sativa
  Clone ID: PAT_MRT4530_10609C.1.pep
MAWLDDVLSLCNNNTRMCNALVLSVVVVSFLQLLKHVLLTPSRLPLPPGPRNLPVVGSAHRLVNTLAHRVLRDLADVHGPLMHLRVGQVPVVVVTSKELARDILKTHDANFATRPKLVAGGIVAYDWTDILFSPSGDYWRKLRRLCIQEILSAKRILSFEHIREDEVRMLADEIRAVGPSVAVDLSARLHRITNTIVSRAAFGNKRSNAADFLVAIKQSVIMASGFYVPDLFPRFSVLLCWLTGMRRTLHGIRDTIDSILEEIISEKEEAKQQQDNNLVDVLLSLKDKGDFGFPITRDTIKAIVLDIFAGGSGTSANAMEWAMSELMMNPRVMNKVQAEIRDAFHGKQSIGEADLRARDLKYLKLVMKETLRLHPPAPLLVPRESIDACEINGYMIPAKARVIVNSWAISRDPRYWEDAEEFKPERFAEGGIDFYGSNYEYTQFGSGRRMCPGYNYGLASMELTLAQLLHSFDWSMPDGATEVDMTEAPGLGVRRKTPLLLCAAPYVASHIYA

SEQ ID NO: 106138 - protein, 84 aa, Oryza sativa
  Clone ID: PAT_MRT4530_1060C.1.pep
PGYLAGFVLLTPGGSITFVCSFRPKCVPIVGSLSPNSFLSPTGFFLFCPLDSLGFLFFGPLLIKSSLPFKRAKTLSHKKKNQQP

SEQ ID NO: 106139 - protein, 234 aa, Oryza sativa
  Clone ID: PAT_MRT4530_10610C.1.pep
MYHPTRGGVRGGRDQFKWDDVKVDKHRENYLGHSIKAPVGRWQKGKDLFWYTKDKKSDSEDALKEEIRRVKEEEEQSMREALGLVPKRSSRPKGNRLDKHEYAELIKRGSTAEDLGAGHAEAAQVQGLGLYKGPRREEESSSFNLDPPEMVPAEQADNPPPETKPEREDSDDDRRSKRGREERGGEKERKRERHSEGKERRRDKQEKRSRHESDDRSKRHRKDKHKRRHDSDSD

SEQ ID NO: 106140 - protein, 55 aa, Oryza sativa
  Clone ID: PAT_MRT4530_10611C.1.pep
SIMIHIVGCSVCESSRFEICGYGDIKVLICCLSLFIQLMNNVWACLVGLYIVSPV

SEQ ID NO: 106141 - protein, 385 aa, Oryza sativa
  unsure (1)..(385): unsure at all Xaa locations
  Clone ID: PAT_MRT4530_10612C.1.pep
RVLGQPLTAATKPTSLRRLQLRRTSTLAGPTGQRLKGERKGAPASGARMSAAQGGRSTGPRVRIGPSRSDGAGSSHRARPRLQAGRQAXERRRHAVAGDGNRRRGRRRRAARKAAAAAEGDGARAKDGGAHGREGKRGAEGSLTGXTATRAEDEXAAVTRRRGGVDGRRRHLESSPASEGNGASGGTRERDXAASWRGSGSSGGGARPETAVGGGARGERRGDDRKHGRARRVRKTREGDVGXIYRXREGADVAGEVADLAGDVGVERERMGGIQIRIPPLASARKGREMRGRGWRRGEDAGAARRGRGRSXIRRRRGRFRRRLPSWGGRLEEGDDLIGGPHLSASRREGKGNGPAQRKEAERGREWADGPKEEKEGKEKRKRRK

SEQ ID NO: 106142 - protein, 65 aa, Oryza sativa
  unsure (1)..(65): unsure at all Xaa locations
  Clone ID: PAT_MRT4530_10613C.1.pep
APKNSSSKQPYYSKGSQKKGYYVXHHHQPGIPRVRLSRARQYTAQLPSMFRVKPHQCSIFPPGQY

SEQ ID NO: 106143 - protein, 95 aa, Oryza sativa
  unsure (1)..(95): unsure at all Xaa locations
  Clone ID: PAT_MRT4530_10614C.1.pep
ERERGXITIDIALXKFETTKYYXTVIDAXGHRDFXKNMIXGTFQADWAGLIIDFTXGGLRLXFKDGXNXNTXFWFNFGGKKKLFCTKCPNPKIQG

SEQ ID NO: 106144 - protein, 74 aa, Oryza sativa
  Clone ID: PAT_MRT4530_10615C.1.pep
MSDRITSTSTSMTPAELPAPPPFTITGAGAGGSRVKAEALPISYKEKREGPKFLQTRLKKILRGPSSESDRNNF

SEQ ID NO: 106145 - protein, 38 aa, Oryza sativa
  Clone ID: PAT_MRT4530_10616C.1.pep
LALWTRSRYFFCCNFCPRSRGCLLSCVSQFTACIQCSC

SEQ ID NO: 106146 - protein, 46 aa, Oryza sativa
  Clone ID: PAT_MRT4530_10617C.1.pep
KKLLVGLVYKWNKKLNRHCLNYTDTPFVSMFEITRFSHKMEPYKLT

SEQ ID NO: 106147 - protein, 79 aa, Oryza sativa
  Clone ID: PAT_MRT4530_10618C.1.pep
RPGQNPPPPPPPPTPLSYLPHTALSLSRRRPPPFEVGEATAPHRTLPWQRQNETVRHPRYLQEDRTLPLRPPPPPPQPK

SEQ ID NO: 106148 - protein, 87 aa, Oryza sativa
  unsure (1)..(87): unsure at all Xaa locations
  Clone ID: PAT_MRT4530_10619C.1.pep
LWTPKASWRRWRRHGRRKVGAAAPXWSRLEGRVVLVTGASSGLGREFCLDLARAGCLVVAAXRRXDRLRSLCDEINASAPRAXAAAA

SEQ ID NO: 106149 - protein, 253 aa, Oryza sativa
  unsure (1)..(253): unsure at all Xaa locations
  Clone ID: PAT_MRT4530_1061C.1.pep
LXXXXKXXXRPXXXXXXKXXXKXXXXXXXXXXXXXKXXKXKXXXXXXXXXXXNXXXKKXXIXXXKXXXRXXXXXXXXXXXXLRXXXXXGNXXKXXNXEXXXXXXXXXXRXXXXXXXXXXXXXXXKXQXGXXXXXXXXXCXGXXXXXXRXXXRRRXRXXTXLYXXTXGXTXXXXXDXLMXRDEGVLXNXNXVLGLVDXRXKXTHNXKPXPPXXXXQSSWYHHIQXXXXTLARAEFLQPGGSTSSRAAAPRWSSX

SEQ ID NO: 106150 - protein, 141 aa, Oryza sativa
  Clone ID: PAT_MRT4530_10620C.1.pep
MVWKQTGQQKGGASRKVRRFASPEEELKDEARLTETSESSMFRRDRGGGISTQNRWASREHLLQLRRSLPTLPPTQRRVGASRATDHLDNLQGGGNRAKNVANPRDCAQRALVVVVITSPCHATNVADVKFGGGEVGHGDG

SEQ ID NO: 106151 - protein, 57 aa, Oryza sativa
  Clone ID: PAT_MRT4530_10621C.1.pep
MAVAGEQWPAAVEVKALLQASLLDARQHHNQQGEVKVESTGDGDCLLFFFCSSSVLT

SEQ ID NO: 106152 - protein, 25 aa, Oryza sativa
  Clone ID: PAT_MRT4530_10622C.1.pep
SDNIVHFRLAYRTSLNDNNKAIVNR

SEQ ID NO: 106153 - protein, 86 aa, Oryza sativa
  Clone ID: PAT_MRT4530_10623C.1.pep
FHTLNFTKTNSPHNQITYYNKTKTKTPNSKLYPKTLTNNNPILFFHKPTILNLPFTTITIPTTTNIPQPNKPTTSNTSIFPLKLQT

SEQ ID NO: 106154 - protein, 96 aa, Oryza sativa
  Clone ID: PAT_MRT4530_10624C.1.pep
YSFSTDRCTFSSKNCLNERRSTSTATTPKSLPHSRAAGLRPDQDTCHAQGELPLFTPSSRPHAGAAAARRPVLRATIAVPHGSPSRTLANGVMGNG

SEQ ID NO: 106155 - protein, 149 aa, Oryza sativa
  Clone ID: PAT_MRT4530_10625C.1.pep
MPWLRNPCGGARPGGGSAGATGARPGVGTRRDGPRMARRSGGARIVRRGDASGWAEVARRLRDVWLWRRRGGPTAAGDLARQDAGVAGELLRCVMPSCRGTLAGRQLSAAHPAPQEDATGVVPLPAGPKQLPRSCSCPNIGLSKLPPSS

SEQ ID NO: 106156 - protein, 70 aa, Oryza sativa
  Clone ID: PAT_MRT4530_10626C.1.pep
LRISLTKTPCIRTRGVTYPLHPKKRLILATNLDTCVFKFVARVCLFRGQRSSSFQNSCIMYALTLILLSN

SEQ ID NO: 106157 - protein, 161 aa, Oryza sativa
  Clone ID: PAT_MRT4530_10627C.1.pep
MARRSGGARIVRRGDASGWAEVARRLRDVWLWRRRGGPTAAGDLARQDAGVAGELLRCVMPSCRGTLAGRQLSAAHPAPQEDATGVVPLPAGPKQLPRSCSCPNIGLSKLPPSSATSTASSQPQPLRMTAQRLPVRGATLAHASLCSRPRLKKEQGEREKE

SEQ ID NO: 106158 - protein, 73 aa, Oryza sativa
  Clone ID: PAT_MRT4530_10628C.1.pep
MTRRKGSSPPPPRRWGCPPGPPPPALSPRSERMVLGWRCVACRSSPVAHRLPHAAPLPPPAAACGMKTWSKRP

SEQ ID NO: 106159 - protein, 101 aa, Oryza sativa
  Clone ID: PAT_MRT4530_10629C.1.pep
MAISSSSSSSVSIMQYLRNSCSRSWKQMCGWTAPPATVALPGVETSEAAAFESSTKKDTEEVPHVSAAVSVLAMKAEEEARAGRCESPHSGGRGRAARRRL

SEQ ID NO: 106160 - protein, 591 aa, Oryza sativa
  Clone ID: PAT_MRT4530_1062C.1.pep
MAEERESFESQWAPSDVTEENLKEMVAHGVLPAKEIIGWRPAYGEMFPTLDTHEVVVFSHFFYCGFSLPTSNFFRGILDFYGISLHHLNPNSIVHIANFIHACEAFLGIRPHFALFRRIFFLKPQPNKSKPCVVGGAGFQLRGTLSQKYFSMPFKTSNKGWHANWFYVQNPEPALLEYSCLPPTYQETWNSLPMRDEAAQAITLMDRMLKLKEQGLQGEQITRHFIKSRLAPIKERSRTAFEFDGKNDPNREDPESLEFRIMKERMYKSFSNAIMVSYSHLLQVVPYNAFNPPPLEFALMKSDPPIAQRRSPCRQAGQASGGPKIRSDAQPNTSKSTTQSDSCKRKLVLSDDEGDDAGKTGSKGVTGKQPRQANPKKKTPSCPKKSGSHPVCRKPSDIDPSGKNSEPTGMETGTMTKTGTADKDRPSDDQLATDNVEASSEIPTGNQSAEAKANADQEPPTGNQSGTKQNEDIPEVEAQANSPQKDTNSDLKSSSPDKVQGPTRPRPEIITAENNTAQAAKISKLERRIKALEKDKGELTKQRDSALKDVEDRKMKSQAQFDVLFNKIKRLEGARDEVANAATPLIHAMFF

SEQ ID NO: 106161 - protein, 201 aa, Oryza sativa
  Clone ID: PAT_MRT4530_10630C.1.pep
MASKDQTASSSETTTAVADDTSSQQDAPPHPLQVTSPDSSLPSPSPRQRRCVAAYMDLTREECGRLFPSGRLRSQPLRLAGRPFYLTARCNMDQRDTFRCFGLFLAMEVDDEEEEEEGSPSPAASVTVEYDFAARTRQQSGDEFVSMYKGHYTFAAGKSCGYRNLLGMPWASFMGDGGGDSVFFIDGVLHLRAELCVKEDA

SEQ ID NO: 106162 - protein, 411 aa, Oryza sativa
  Clone ID: PAT_MRT4530_10631C.1.pep
MAPGYSSGGSSKRTRSDSTRDALNRLADLRVQSNESWARREEQKQAKSARACMEMLKADGITRQDPIYHTALRMFRDGYLRDFFIKDCITPEERLNFIHQHGGLPYPPAFAPDPLLFAPLPPPTCSGHMDDWYKRFGPQDDDGGDGANGGSDGNMSTSSERSYGSDDGYYSDEEDSILDMLVAALKARLSVCLMEALGIFLYIMAGGNSNRATNNRMVRSGSTISKYFHRVLNAIYAMAADKNKPVDPNFERVHYRVVNEEEFLPFAGAAGAVDGTHIPCIVVVDDSIQHRNCHHITSRNVLFVVGWDDRVIFADAGWPGSVHDQRVLTEAVRSYPFAFPRLPWGKYFLVDSGYASRYGFLPSYPHFLYHLDEFGGNTEAALPHGREETFNYMHNSLCNTVERAFGVIKSQ

SEQ ID NO: 106163 - protein, 73 aa, Oryza sativa
  Clone ID: PAT_MRT4530_10632C.1.pep
NFSLNFCASRICFIFVKNVLFFPRRCVWVQLYIGPPVVELSHSAPGKLLLPCKQNCLPFRYFVHTVLIYLYGF

SEQ ID NO: 106164 - protein, 65 aa, Oryza sativa
  Clone ID: PAT_MRT4530_10633C.1.pep
PLNPVRPRLYQDKNMESHEQEPRFRTHDRSAFNPSSTCTYFLFFFFFFSFFFFFFFFFFFFRTRG

SEQ ID NO: 106165 - protein, 73 aa, Oryza sativa
  Clone ID: PAT_MRT4530_10634C.1.pep
FFPIYCFPFSVLGYLPVLIAPRFLGSPQLMVVSVCPLCVAGLVPGSAQPPPVFDCCCPYVAAEPTGGVLYNVC

SEQ ID NO: 106166 - protein, 607 aa, Oryza sativa
  Clone ID: PAT_MRT4530_10635C.1.pep
MASLKELLPTPKAAASTFYDHSSDPWFKERYGGESAQSDAAAAAAKPSGPAKPVPPYGKRGGFVPRRPEDFGDGGAFPEIHVAQYPLGMGRRDEKGGSKILALTVDAKGSVAFDAVVKQGENASKIVYSKHSDLVPKIATADSEATADDEEYQKQIEETTERTKAALEKVVNVRLSAAQPKNVPTHDSESKFIKYKPSQQSAAFNSGAKERIIRMSEMAQDPLEPPKFKHKRVPRASGSPPVPVMHSPPRPVTVKDQQDWKIPPCISNWKNPKGYTIPLDKRLAADGRGLQEVQINDNFAKLSEALYVAEQKAREAVQMRSKVQRELQLKEKERKEQELRALAQKARMERTGAPPAPTGVPAGGGRGAVDDREEDMDLEQPREQRRESREEREARIERDRIREERRRERERERRLEARDAAMGKKSKLTRDRDRDVSEKIALGMASTGGAKGGEVMYDQRLFNQDKGMDSGFATDDQYNIYSKGLFTAQPTLSTLYRPKKDGDSDVYGDADEQLEKVMKTDRFKPDKGFSGASERSGKRDRPVEFDKQEENDPFGLDQFLTEVKKGKKAVEKIGSGGAMRASGGSSMRDDYEGGGSGRSRINFERGR

SEQ ID NO: 106167 - protein, 51 aa, Oryza sativa
  Clone ID: PAT_MRT4530_10636C.1.pep
WMSMPNLSLRFPQTFYDFLNLERYRKCCVLVNSLSQKADLFSKNQSSDYIP

SEQ ID NO: 106168 - protein, 283 aa, Oryza sativa
  Clone ID: PAT_MRT4530_10637C.1.pep
MATATATATAAAAAASSSRLPFRRAASSSSSSQLRLPAVPPPHRASFAVVALHKRNPKRLKYASQRQFTRGDAGMLRVQVEPSGEDAWKLEPVVELINRGAVGIIPTDTVYSIVCDLSNNDSVERLRRIKGIGDSKARYAKTILCRSLRDIDTYTTGFPRGTNQGQANIFRAVKRVIPGPYTFILPATKELPKQCIRHGSSTRYAKRRQVGVRLPDDPICEAILQNLDEPLICTSVKSLSEDEWILDPVIIADIYEQQGPKLDWMVAEDEEQESRPTFAYKAA

SEQ ID NO: 106169 - protein, 44 aa, Oryza sativa
  Clone ID: PAT_MRT4530_10638C.1.pep
GRVGVIWGCTDCAKAKAGCAYTMNTASAGTVMSTIRRMRNQTEA

SEQ ID NO: 106170 - protein, 62 aa, Oryza sativa
  Clone ID: PAT_MRT4530_10639C.1.pep
MQCKLQLIAFYQESIDNRELRVALHIGFGGVGKNEMMCLRKEKHGKSDNRVITFAFVNLAED

SEQ ID NO: 106171 - protein, 133 aa, Oryza sativa
  Clone ID: PAT_MRT4530_1063C.1.pep
MNSCIFPFPPKSKKTQHKIKEKYHPDATVLAILLADVVVPILVPSDLVPTTHHSAAVASSGHGGGTGIRDDDLAPCGSEASRRMEGHGRRCRLHPATALAGIVAEVHHPPFGQIWWRGGRGPLRRATATTATV

SEQ ID NO: 106172 - protein, 316 aa, Oryza sativa
  Clone ID: PAT_MRT4530_10640C.1.pep
MATATATATAAAAAASSSRLPFRRAASSSSSSQLRLPAVPPPHRASFAVVALHKRNPKRLKYASQRQFTRGDAGMLRVQVEPSGEDAWKLEPVVELINRGAVGIIPTDTVYSIVCDLSNNDSVERLRRIKGIGDSKARYAKTILCRSLRDIDTYTTGFPRGTNQGQANIFRAVKRVIPGPYTFILPATKELPKQCIRHGSSTRYAKRRQVGVRLPDDPICEAILQNLDEPLICTSVKSLSEDEWILDPVIIADIYEQQGLDFIVDGGTRIADPSTVVDMTGSYPTIIRQGKGPKLDWMVAEDEEQESRPTFAYKAA

SEQ ID NO: 106173 - protein, 257 aa, Oryza sativa
  Clone ID: PAT_MRT4530_10641C.1.pep
MAAEADSAREARAVEMEAGLAREAWPMEGGRIGARGASSGGGRLGAGGGERQVKTQSGLCQTDNDGSFPLLRALSFCLTPQRVVAGPQVTPGASSSTPTRANKYSGNGYSTVCLKLHAADPGTATAAGGGIRTNVRFRMVSLQPCVPPTNEVRSYATSFHGTGKAEYCCFTFIRHDVLASQWSSTDDEFAIHCDVAVVEEAAAAATMSTELGPDDLHGLMMICKCSVDNDDEPCKSGTRQNLKEAFRKQFLGCFGPK

SEQ ID NO: 106174 - protein, 52 aa, Oryza sativa
  Clone ID: PAT_MRT4530_10642C.1.pep
MAQLLQLRVHASLEPVTVQLWQRRLPGGITAWRKILLDVGGGDDDACDGPAM

SEQ ID NO: 106175 - protein, 223 aa, Oryza sativa
  Clone ID: PAT_MRT4530_10643C.1.pep
MSSSPTKDVVTASTATSTSVAATGCNLLKIKVRNAIKKSHQGSKYDIESSKFQVAGHTWSFFFHLNASKYSGNGYSTVCLKLHTADSGTAAAAGGIRTNVRFRMVNLQPCVPPTNEVRSYATSFHGTGKAEYRCFTFIRHDVLAGQWFSTDDEFAIHCDVAVVEEAAAAATMSMELGPDDLDGLMMICKCSVDNDDEPCKSGGTRQSHKEAFRKYFLGCFGTK

SEQ ID NO: 106176 - protein, 168 aa, Oryza sativa
  Clone ID: PAT_MRT4530_10644C.1.pep
MASRQVLLLAIVSAVALLPAMVSATDYTVGDGHGWTLEYPSTNWADGKSFQIGDKLVFTYTKGKHTVTEVDGAAFHACNRQGNTLMTWNSGNDTVALDKAGKRWFFCNVDNHCELGMKLVVDVADPNAPAPASPPPPPSSSSSAGRLNYRARGGAVAGAVAAAALVWF

SEQ ID NO: 106177 - protein, 514 aa, Oryza sativa
  Clone ID: PAT_MRT4530_10645C.1.pep
MKDILLLSYYDLPYHLKTCLLYLSIFPEDYWISKVDLLLRWIAEGFIPEVKDQALYQVAENYFNELINRSMIQPVNIDYDGSANACRMHDVMLELIVSLSEDENFNTLVDGKVYKCSSSNIRRLSLQSSCVENDVMQDLMNKCSHIRSLSFFRENKETPHLPKFRYLRVLIFEDCDSLGNQHIKYLRFFCQLKFLRINSEGITELPDKIGDLKNLQTLNIHGSKIGKLPAAIGHLQNLLYLHVNSDVELPDEVGDLQALQVLSDAFSYNSIKFVEELRRLTKLRSLHIGLHSSLKLCYHDMRTYEEALKSSLTVLGKHSLRSLVISRADCLGDYLMDLLCDTVPVSKSIKQKDLWVLGGLPSLLKLELHLLYGPDERLIISSQLFQCLKKFKLKYELGGGLSMVCEKEAMPKLQMLHLRFKAMETKSNTGFELRLEHLSSLRHLSVTVDCDDATRRRVEAAEATIRNTVRIHPRCPTLEIKRKWESDMVKDEDEDEMERRECTIEEEEVQHQDP

SEQ ID NO: 106178 - protein, 133 aa, Oryza sativa
  Clone ID: PAT_MRT4530_10646C.1.pep
MERRAGGGLLRRRSGPKVAEIEVQRRAIPPVQVTGGAAVGEGAGAVVPKRSRRGETFLAGVAIVLRWVCSSMRFVGATIFTILAWMVRPLVLLWKWWRDLIDDGHSDYLCEAVCLFIVLAPIVFVSTLKALLE

SEQ ID NO: 106179 - protein, 89 aa, Oryza sativa
  unsure (1)..(89): unsure at all Xaa locations
  Clone ID: PAT_MRT4530_10647C.1.pep
FFFFFFFFFFFFFFFIFFFTTTNVSLIIIKPSRXIKKVMPFFFXKMTTTRTTIQLLHCMQHFQTKSANCYDSRHVLSPMXFTNVCLFFP

SEQ ID NO: 106180 - protein, 51 aa, Oryza sativa
  Clone ID: PAT_MRT4530_10648C.1.pep
IVKLCKIIYMYMKDAIFNLFSFYITWSVYSTVLRLMHNLIGCRNKKRKKRK

SEQ ID NO: 106181 - protein, 380 aa, Oryza sativa
  Clone ID: PAT_MRT4530_10649C.1.pep
MDARSMSSSSSSEWRDWSSLPEDLLLLILERLRWSSHPSVAAVCSPWCSAVPPSYPAWITPLLLNAADVGTTNIRYYSPYFHKNFEIDRTLTDPGAKICCSAAEHLTTLCTPDDVVLDADMVSGSIRELPRLPDSKFNFIVYDDGALRTTMYAIDTVGSLRICRTGLNDDSEWDDWDLVDSPDEQMVPTLPISNPVFHGGMLYLLGKDGRLALYDPCNHERGFEIHDKPESFGFETDDSYLVESEQGELMAILVGRRGTPVHIVKLNEEAMKWEEVESLQGRTLFTGTLTTMMRSVKIKWMQNKVFLPKLYDWPETIQVNLVLRDGELAFVPKSGGENTILKDGEDYMEKMWCYEPGQRQAKKFWGTKSVDYGIWVNFST

SEQ ID NO: 106182 - protein, 147 aa, Oryza sativa
  Clone ID: PAT_MRT4530_1064C.1.pep
HEATGCPYPISRSLSLSPSLSLSCSLPLTYLSISLSLAKRSGSSGGSGGPAKGAAPSPPPDLAEGGVVHLGDDTGKGGGRVEATTAAVPLHPPRCLRAAWRQILGHLRGRGLATIPNYRGWGYTGYRWPSDLHHRLLDSRCHRRGHC

SEQ ID NO: 106183 - protein, 612 aa, Oryza sativa
  Clone ID: PAT_MRT4530_10650C.1.pep
MSSAAGGGGYGGGQGGGAEHHHHHHGHAGHLLLHHHPQHVAGAAVAAAAAAAGGQMYHVPQHSRREKLRFPPDAGDSPPPHGHGHGHAPQQQQQHGSWPPPPAFYSYASSSSSYSPHSPTLAQAQLVAHGLAPPLPQIPTQNFSLSLSSASSNPPPPQAQPRRQLGGLAQATGPFGPFTGYAAVLGRSRFLGPAEKLFEEICDVGGAASHVDRTISDEGLLDADPMDGVDHDVVDHDLGGADRAAADAGPISGAEQQWKKTKLISMMEEVCKRYRQYYQQVQAVMASFETVAGFSNAAPFAALALRAMAKHFKCLKSMILNQLRNTSNKVAVKDGLNKEIAVFGLAGGSSGGAGLQRANSASAFGQPHNIWRPQRGLPERAVSVLRAWLFEHFLHPYPTDGDKQMLAKQTGLTRNQVSNWFINARVRLWKPMVEEIHNLEMRQMHKHSVVDKGQHSVHHQAQHSSQCSGNPSVPSDSHPGQSSSITRNHNTAASQGFPDELSQMSQSIQGQVSFAYNGLTSQHNIASPHHQHQQVGGVGIGGGNGGVSLTLGLHQNNRVCIAEPLPAALPANLAHRFGLEEVSDAYVMSSFGGQDRHFGKEIGGHLLHDFVG

SEQ ID NO: 106184 - protein, 686 aa, Oryza sativa
  Clone ID: PAT_MRT4530_10651C.1.pep
MGSSPSKATGEDALVLCKERMRHIRRAIDSRDALSASHLSYTQSLRSVGTALRRYAESEISPESSLSISEADKSPSHSSMASPSPSRAVESTGSPVHRESPVSTFVPPPPPLPPELCTSWDFFDSNYTSGSATSNNENGVTLNFSRLKGLRDSRESEAVSLREETTNRSDRMHPELPGDNAAPKQEAQAKKGGMSKPSGSVEVTTEATTSGQVGAKVEEDDMEKELCTEAEDPSEFITHRAKDFVSSMKDIETRFVRAAEAGNEVSRMLETKKIRLDICAKIPGSPGKPPTARFVSALRVCCNRENILNQETAQNISKVVTWKRSVSSLSSSSKSPLTAAMITDDVGDSNSDFVEQFAMVSGSHSSTLDRLHAWERKLHDEIKASEHVRKTYDEKCNLLRRQFARGLNAQLIDKTRAVVKDLHSRVSVAIQAVDAISKRIEKIRDEELQPQLVELIQGLIRMWKAMLECHHKQFITISLAYHVKSSTMVQQGEHHRRAAAHLWNELDCFSSSFRIWVTAHKSYVESLNAWLQKCVLQPAQDRRRRKRKVSFPPRHALSPPIFVLCRDWLAMMESQSLPTDELCKSIKEVMQLLRGSFDHPADHQDKTTTESQSRNESQECGMLENNEQEVSGSVEAVEGLQSKLTTVLDRLTKFSEASLKHYEELKQNYEIARDDYQTGRSNAHLV

SEQ ID NO: 106185 - protein, 951 aa, Oryza sativa
  Clone ID: PAT_MRT4530_10652C.1.pep
MEMRRRAPSPSPPPPPLPPPPSPEGQEEGRDSPPVGWSGGEGVTTTTVSPPTRSGKEEGTAAVTRPSPPPLQSDGAEGRACHGAAATSASARSGGGEGAAAYPPTARPPLPPPGGTKPLTFTIDPSAADFVGQESPGLRDSRESEAVSLREETTNRSDRMHPELPGDNAAPKQEAQAKKGGMSKPSGSVEVTTEATTSGQVGAKVEEDDMEKELCTEAEDPSEFITHRAKDFVSSMKDIETRFVRAAEAGNEVSRMLETKKIRLDICAKIPGSPGKPPTARFVSALRVCCNRENILNQETAQNISKVVTWKRSVSSLSSSSKSPLTAAMITDDVGDSNSDFVEQFAMASEHVRKTYDEKCNLLRRQFARGLNAQLIDKTRAVVKDLHSRVSVAIQAVDAISKRIEKIRDEELQPQLVELIQGLIRMWKAMLECHHKQFITISLAYHVKSSTMVQQGEHHRRAAAHLWNELDCFSSSFRIWVTAHKSYVESLNAWLQKCVLQPAQDRRRRKRKVSFPPRHALSPPIFVLCRDWLAMMESQSLPTDELCKSIKEECGMLENNEQEVSGSVEAVEGLQSKLTTVLDRLTKFSEASLKHYEELKQNYEIARDDYQTGQGFRGGVRGGWHLEVEIGLTGVAWEAVDRSNISSSLQIHRAVSLGHGAQAAERELGCGRRLSGAGDGGDDGGELRTVQSRRRAASSGLGGGAWVQATEERAAALGRERWRRGQRCSGVGTGAGSGAGGGAQDGEARGDISTAGPAESYGKYNSLIYSASTEMEDALVLGHERPLTFLRYNRDGDLLFSCAKDHTPNVWFADNGDRLGTYSGHNGAVWSCDVSRDSTRLITGSADQTAKLWDVQTGAELFTFRFDAPARSVEFAIGDGLAVITTDNFMGNVPTAQVKRIADDPDDQSEESLLVISGIKGRINRAVWGPLNRTIITAGEDATIRIWDTER

SEQ ID NO: 106186 - protein, 674 aa, Oryza sativa
  Clone ID: PAT_MRT4530_10653C.1.pep
MGSLPSKATGEDALVLCKERMRHIKRAIDSRDALSASHLSYTQSLRSVGTALRRYAESEISTESSLSISEADKSPSHSSMASPSPSQALESTGSPVHRGSQLTPPSTKIHYMKAAGTKPLTITIDPSAADFVGQESPVSTFVPPPPPLPPELCTSWDFFDSNYASGSATSNNENGVTLNFSRLKGLRDSRESEAVSLREEATNRSDGMHPELPGDNAAPKQEAQAKKSGMSKPSGSVEVTTEAATSGQVGEKVEEDDMEKELCTEAEDPSEFITHRAKDFVSSMKDIEIRFMRAAEAGNEVSRMLETKKIRLDICAKIPGSPGKPPTARFVSALRVCFNRENILNQETAQHVSKVVTWKRSVSSLSSSSKSPLTAAMITDDVGDSNSDFVEQFAMVSGSHSSTLDRLHAWERKLHDEIKAVDAISKRIEKIRDEELQPQLVELIQGLIRMWKTMLECHHKQFITISLAYHVKSATTVQQGEHHHRAATHLWNELDCFSSSFKIWVTAHKSYVESLNAWLQKCVLQPAQDRWRRKRKVSFPPRHALSPPIFVLCRDWLTMMESQSLPTDELCKSIKEVVQLLRGSFDHQADHQNKMTTESHLRNESQECGMLENNEQEVSGSVKAVEGLQSKLTTVLERLTKFSEASLNHYEDLKQKYEMAREEYKMGRSNAHLV

SEQ ID NO: 106187 - protein, 100 aa, Oryza sativa
  Clone ID: PAT_MRT4530_10654C.1.pep
MEPGSIAERFRDRSILITGSTGFLAKTLSILYSLVKKILRVQPEVRKLYQLVRAPDAAAAEERVLTEFIEKCSEPFRQPYDGALVPLVEKPSLLPGWEPL

SEQ ID NO: 106188 - protein, 71 aa, Oryza sativa
  Clone ID: PAT_MRT4530_10655C.1.pep
FGLGGLVIDLKGKVVGMTGLIHAFIPSSVILKCLKLWHKFRCIPRPQLGVKLACLQVDSRGSPGTELEFAL

SEQ ID NO: 106189 - protein, 122 aa, Oryza sativa
  Clone ID: PAT_MRT4530_10656C.1.pep
YGKQRRPRLPLASPFPCPGAPPSSSPSLAASRPRHRSAQHCPACCLSILFVPSSCRFPVRALCSPAHPNGFRWTWLVGYGLENLWTKIPLAALRGRNPLGSATCPGGPDPLLGDLRPSLGRH

SEQ ID NO: 106190 - protein, 38 aa, Oryza sativa
  Clone ID: PAT_MRT4530_10657C.1.pep
NYSVPTPLLAGSLSPTKDGDSHCWVPPHGLPRGSLSLP

SEQ ID NO: 106191 - protein, 44 aa, Oryza sativa
  Clone ID: PAT_MRT4530_10658C.1.pep
PANAAGTVDGIVKVNGCIVFGCLPTYKDKCAFKPSKQLKKPIIT

SEQ ID NO: 106192 - protein, 48 aa, Oryza sativa
  Clone ID: PAT_MRT4530_10659C.1.pep
MAVMVLMTTKVVMAAVMKMAMCVASGAKPGSADAWQASLGQSFLLNVS

SEQ ID NO: 106193 - protein, 79 aa, Oryza sativa
  Clone ID: PAT_MRT4530_10660C.1.pep
GGGGLPSSTARRIPPPQRHGGGGGSAASGGAAQRRFGAVADGSGDSVRRGDGSGGGLGFGGFLDFIFFVCRIYFCMRPV

SEQ ID NO: 106194 - protein, 239 aa, Oryza sativa
  unsure (1)..(239): unsure at all Xaa locations
  Clone ID: PAT_MRT4530_10661C.1.pep
CLLQPHEPSSGRYNGVHRLFHARRLAGGGTRRKPAGAASAASRPLEEQHLFHSSNPSTSKSIILDLRARMRSSSTSSLQAPSCKAATIXRPMRTEGGKNTGAFYREAQGLQEQKVKTSVKKKSVNPIWHEELTLSIMNPIAPIKLGVFDKDTFSRDDPMGDAEIDLEPFMEVLNMDPENIRNGSIIKTIRPSNQNCLADESHLFWRNGKFVQDIILRLRNVESGELQVQLQWVKIPGRH

SEQ ID NO: 106195 - protein, 340 aa, Oryza sativa
  Clone ID: PAT_MRT4530_10662C.1.pep
MAAAADHAATAIAIPGDPLADSACSTPFVSAPSSPTREREREHHFASPHGAPCFFSAPASPTRGGGGGGCLGDFDFDFSSRFPSPSAAAMSSADELFHNGQIRAVRLSAMLLQPQPLAPLVDGDGHASHLAEEDAAAVEEDGAEADERGRIRSRSVRRKARSMSPFRTRWRAPSPAPETAEEVEAVATPAASRSSSSSSTASSASSTSSRGSRRWAFLKDLLHRSKSDGGKNHHHDTAPPPPPPKRSPSPSPSPSPAPAAASARGGRGAATGRRSRRRSAHERLYEARRAEAEEMRRRTYLPYRQGLLLFGCIGLGSRGYGAVHGLARGLNAAAAVSSRS

SEQ ID NO: 106196 - protein, 106 aa, Oryza sativa
  unsure (1)..(106): unsure at all Xaa locations
  Clone ID: PAT_MRT4530_10663C.1.pep
FFFFFLQTSRXSTVXNRHTTHNTDVYXTDLHTXXTICAASIHSTGSHVHTQVPMARWATHTSHAHAHSIISTHASPAITPTXFQRMLHSLSMAALPPWITPLDTPV

SEQ ID NO: 106197 - protein, 246 aa, Oryza sativa
  Clone ID: PAT_MRT4530_10664C.1.pep
SSLEDDSTVGSTPCTHCGFTSTTFEPCMDISLDLDAGYNNSLGVANPKVHVRNGERSSGGTNTKVSTLMRCLERFTRAERLDAEQKFFCERCKERQESLKQMSIRRLPLVSCFHIKRFEHSSVKKMSRKVDHCLQFPFSLDMAPYLSSSILRSRFGNRIFPSEASDADSVSEFSSEFEIFAVIMHSGKLEAGHYVTYLRLNNHWYKCDDAWVTRVEEHTVRTSQAYMLFYVQKTLYYKACERATAV

SEQ ID NO: 106198 - protein, 92 aa, Oryza sativa
  unsure (1)..(92): unsure at all Xaa locations
  Clone ID: PAT_MRT4530_10665C.1.pep
TEPELLCPLPMQLDAPASSVESVASRDSFPKLVEGISSLILLFLXPQESEQIPSYIAWIRSGVHLLFSRRTLTNPPPNPHGSEPISSTFAYK

SEQ ID NO: 106199 - protein, 358 aa, Oryza sativa
  Clone ID: PAT_MRT4530_10666C.1.pep
MGRAPCCEKVGLKRGRWTTEEDEKLAGYIAKHGEGSWRSLPKNAGLLRCGKSCRLRWINYLRAGVKRGNISNQEEDVIIKLHATLGNRKSYVVKRMDYVCLGARDYCFQQNTHVRWSLIASHLPGRTDNEIKNYWNSHLSRQIHTYRRTYTAPSEAAVTIDVTKLQAAGKRRGGRTAGQSRKGDKKRAEDDPPKETAAADTPLPESSPRRAQSDEARSGSVVVDPEEPSSQPNNGSSGGGGGTPDGPCSEETATGPTSLDPMEMGLWEVESEFAEMEALLCGGVAPDGPGIPGLEPLDVAAQADDLLDMDWDGFAADLWGDPAQRGGLVQDAGEPNGSMGCSSDELESFASWLLSDSC

SEQ ID NO: 106200 - protein, 137 aa, Oryza sativa
  Clone ID: PAT_MRT4530_10667C.1.pep
MRDTTMVIFTILVCLVAGLGDGHSDSDTMSHGPREGAEAPTRWDRRCDCCNNMEKISLEMYRSMDQWNDEVKHCYDCCKERVEAPRDFFRGAYWCCDWDSTEDRTHMCTATDQTTTKRSYKSWDMIEQMSQRIWRSY

SEQ ID NO: 106201 - protein, 73 aa, Oryza sativa
  Clone ID: PAT_MRT4530_10668C.1.pep
MEGRTREWVDKCEKYLKLFQINTLQKVKGVVREGMGWNEFLNEGFDRFDQEGEWKLLKQWSDVERTRCRSRKP

SEQ ID NO: 106202 - protein, 194 aa, Oryza sativa
  Clone ID: PAT_MRT4530_10669C.1.pep
MSRGWVSSYKLLYQECDVASFSVREDDDRMLKGPLDTAAAHRSTLLSLAAGTRRVLPFSHRLSSSRWGREEERRASASAGARSWRRHSRASAAQEQVLRVTRGHKAWVAVLLNLNSDSPQFSTPAPLPTPLLAPSSPLLPYRGGDGELELPRLPPPRHSPLTSLLPDTPPSPPLSLQTAAALLAGRPPPLLLYL

SEQ ID NO: 106203 - protein, 121 aa, Oryza sativa
  Clone ID: PAT_MRT4530_1066C.1.pep
LTSSSDDKLQEDISHAGYSLSSILTVCRIHAIQKVLKPRDLYNDGCCARRRRRDHVARLVQPMHLAQLHDVSRVRLCHLCIARYQLYISWGSTRLALIAMQAIAAPPPPPRSSRRAVQIRG

SEQ ID NO: 106204 - protein, 55 aa, Oryza sativa
  Clone ID: PAT_MRT4530_10670C.1.pep
LFNFPQQWLSSFWNQNKKFFCPLKKFPPLLKRGGPGFFNRPLVGQGPVFSPRLKF

SEQ ID NO: 106205 - protein, 1860 aa, Oryza sativa
  Clone ID: PAT_MRT4530_10671C.1.pep
MEFLLWVSYLTITLATILLFLRTLILRHNRRVYNLPPGPKPWPIIGNLNLMGSLPHRSIHSLSKKYGPLMHLRFGSFPVVVGSSVEMAKFFLKTHDVVFADRPKTAAGKHTTYNYSDMTWSPYGAYWRQARKVCLAELFSAKRIESYEHIRREEVRALLRDLHAASGRVVALKDYLSAASLNVISRMVLGKKYLEREVVHEGEVVTTPERFRWMIDELFLLNGVLDIGDSIPWLGWLDLQGYIRRMKKLSKMFDQFLEYVLDEHENRMCREGESFVAKDMVDVLLNVASDPSLEVKFSRDSVKAFTQDLIAGGTESSSATVDWAIAELLRKPEVFAKVTEELDRVVGRGRWVTEKDIPSLPYIDAIMKETMRMHPVAPMLAPRLSREDTSVDGYDIPAGTRVLVGVWSIGRDPKLWDAPEEFMPERFIGSKIDVKGQDFELLPFGSGRRMCPGYSLGLRVIQVSLANLLHGFAWRLPDGMTKEQLSMEEIFVVTASVVAAVRFPNFFMVSERLEEEIDSASESEEIASESSEEEVASEKSTQMASTSNSAASSNPLIGVQVTEKLSKANHGLWVAQVLTAIRGARLEGHINGKNPAPPAEITKTVDGKEVKTSNPNYDEWFAADQQILGFLFSSLTRETLSQVAAVKTAAEAWKTLDDMFTSRTRARSLNMKTLADEVAAAGKPLDDEELIAYILNGLDEDFDSVVSTIVGRVEPVTVAEVYSQLLSFENRLAMRQAQATANMANRGGRGGGGSRGGGANPGRGRGATRGRSAAPGRGRGNNQQQRSYDNRPLCQVCYKRGHVAADCWHRFDEDFVPDDKLVAAAIHTHARDSNWYVDTGATDHITWELEKLTARDVYKGHDQIHTASGSGMEIKHIGHSIVHTPTRPLHLNNVLHVPQANKNLISAYKLAADNSVFLEIHSKHFLIKDQATRRTVLKGRRQKGLYPVPSASPPSSAKVVCAVTPSFERWHSRLGHSSAPIISRVISKNKLPCLDESNKEPVCDACLKAKSHQLPYSKSLSISSHPLELVFSDVWGPAPVSVGNKKYYVSFIDDYSKFTWIYLLKNKSEVFQKFHDFQNLVERLFDRKIISMQTDWGGEYQKLNSFFEKIGISHYVSCPHTHQQNGSAERKHRHIVEVGLSLLAYASMPLKYWDEAFLAATHIINRVPSRVIEFESPLERLFKQTPDYSSFRVFGCACWPNLRPYNAHKLQFRSKQCVFLGHSHRHKGYKCLDIASGRIYISRDVIFDESVFPFSKLHDNAGARIRHEISLLPSDLIIHTSHQGGELENDQMFNSPNEMPDQSVEHAEDTGNIGAEDWVDEANTQQLSQQQPSSPQSPGSVTPLCVRRSGSDTHAATSGTRVENEPSDQSPSATTMAGNDDVSESSASHEEAASSPVAEQHQPEIVRPRTRLQSGIRKEKVYTDGTVKYACFTASGEPENLHEALNDKNWKNAMDAEYEALMGNKTWHLVPAEKANNIIDCKWVYKIKRKADGSLDRYKARLVAKGFKQRYGIDYEDTFSPVVKAITIRIILSIAISRGWSLRQLDVSNAFLHGILEEEVYMKQPPRYEDKSLINHVCKLDKALYGLKQAPRAWYSRLSTKLQELGFMPSKADTSLFFYSKGDVIIFVLIYVDDIIVASSMPDATTALLQDLNKSFALKDLGELHYFLGIEATKVHWAAVKRILRYLQQTSGLGLKIRKSSSLLVSGFSDADWAGCLDDRRSTGGFAVYLGPNLVSWSARKQPTVSRSSTEAEYKALANVTAEIMWVQTLLKEIKIEVPKTAKVWCDNIGAKYLSANPVFHARTKHIEVDYHFVRERVSRKLLEIEYVPSQDQVADGFTKPLNEKQLAVFRYNLNLYGLD

SEQ ID NO: 106206 - protein, 73 aa, Oryza sativa
  Clone ID: PAT_MRT4530_10672C.1.pep
PTRTVRSNMIGEIANRSTFLLAVKAHVETQGDFAESVANEVRAASFVNIDYVDAFVNWLDEVLYYLVDVRPIL

SEQ ID NO: 106207 - protein, 1334 aa, Oryza sativa
  Clone ID: PAT_MRT4530_10673C.1.pep
MEFLLWVSYLTITLATILLFLRTLILRHNRRVYNLPPGPKPWPIIGNLNLMGSLPHRSIHSLSKKYGPLMHLRFGSFPVVVGSSVEMAKFFLKTHDVVFADRPKTAAGKHTTYNYSDMTWSPYGAYWRQARKVCLAELFSAKRIESYEHIRREEVRALLRDLHAASGRVVALKDYLSAASLNVISRMVLGKKYLEREVVHEGEVVTTPERFRWMIDELFLLNGVLDIGDSIPWLGWLDLQGYIRRMKKLSKMFDQFLEYVLDEHENRMCREGESFVAKDMVDVLLNVASDPSLEVKFSRDSVKAFTQDLIAGGTESSSATVDWAIAELLRKPEVFAKVTEELDRVVGRGRWVTEKDIPSLPYIDAIMKETMRMHPVAPMLAPRLSREDTSVDGYDIPAGTRVLVGVWSIGRDPKLWDAPEEFMPERFIGSKIDVKGQDFELLPFGSGRRMCPGYSLGLRVIQVSLANLLHGFAWRLPDGMTKEQLSMEEIFVVTASVVAAVRFPNFFMVSERLEEEIDSASESEEIASESSEEEVASEKSTQMASTSNSAASSNPLIGVQVTEKLSKANHGLWVAQVLTAIRGARLEGHINGKNPAPPAEITKTVDGKEVKTSNPNYDEWFAADQQILGFLFSSLTRETLSQVAAVKTAAEAWKTLDDMFTSRTRARSLNMKTLADEVAAAGKPLDDEELIAYILNGLDEDFDSVVSTIVGRVEPVTVAEVYSQLLSFENRLAMRQAQATANMANRGGRGGGGSRGGGANPGRGRGATRGRSAAPGRGRGNNQQQRSYDNRPLCQVCYKRGHVAADCWHRFDEDFVPDDKLVAAAIHTHARDSNWYVDTGATDHITSELEKLTARDVYKGHDQIHTASGSGMEIKHIGHSIVHTPTRPLHLNNVLHVPQANKNLISAYKLAADNSVFLEIHSKHFLIKDQATRRTVLKGRRQKGLYPVPSASPPSSAKVVCAVTPSFERWHSRLGHSSAPIISRVISKNKLPCLDESNKEPVCDACLKAKSHQLPYSKSLSISSHPLELVFSDVWGPAPVSVGNKKYYVSFIDDYSKFTWIYLLKNKSEVFQKFHDFQNLVERLFDRKIISMQTDWGGEYQKLNSFFEKIGISHYVSCPHTHQQNGSAERKHRHIVEVGLSLLAYASMPLKYWDEAFLAATHIINRVPSRVIEFESPLERLFKQTPDYSSFRVFGCACWPNLRPYNAHKLQFRSKQCVFLGHSHRHKGYKCLDIASGRIYISRDVIFDESVFPFSKLHDNAGARIRHEISLLPSDLIIHTSHQGGELENDQMFNSPNEMPDQSVEHAEDTGNIGAEDWVDEANTQQHEPAQPIT

SEQ ID NO: 106208 - protein, 55 aa, Oryza sativa
  Clone ID: PAT_MRT4530_10674C.1.pep
ARGEQGGQPVCIRGFMGFEKPPPRGPFWIFGKVFRGAFQRVFDFGKKRMGFVKFA

SEQ ID NO: 106209 - protein, 1933 aa, Oryza sativa
  Clone ID: PAT_MRT4530_10675C.1.pep
MEFLLWVSYLTITLATILLFLRTLILRHNRRVYNLPPGPKPWPIIGNLNLMGSLPHRSIHSLSKKYGPLMHLRFGSFPVVVGSSVEMAKFFLKTHDVVFADRPKTAAGKHTTYNYSDMTWSPYGAYWRQARKVCLAELFSAKRIESYEHIRREEVRALLRDLHAASGRVVALKDYLSAASLNVISRMVLGKKYLEREVVHEGEVVTTPERFRWMIDELFLLNGVLDIGDSIPWLGWLDLQGYIRRMKKLSKMFDQFLEYVLDEHENRMCREGESFVAKDMVDVLLNVASDPSLEVKFSRDSVKAFTQDLIAGGTESSSATVDWAIAELLRKPEVFAKVTEELDRVVGRGRWVTEKDIPSLPYIDAIMKETMRMHPVAPMLAPRLSREDTSVDGYDIPAGTRVLVGVWSIGRDPKLWDAPEEFMPERFIGSKIDVKGQDFELLPFGSGRRMCPGYSLGLRVIQVSLANLLHGFAWRLPDGMTKEQLSMEEIFGLSTPRKFPLELLLHLSSLQSERLEEEIDSASESEEIASESSEEEVASEKSTQMASTSNSAASSNPLIGVQVTEKLSKANHGLWVAQVLTAIRGARLEGHINGKNPAPPAEITKTVDGKEVKTSNPNYDEWFAADQQILGFLFSSLTRETLSQKGNSSISEYIGKMKTLADEVAAAGKPLDDEELIAYILNGLDEDFDSVVSTIVGRVEPVTVAEVYSQLLSFENRLAMRQAQATANMANRGGRGGGGSRGGGANPGRGRGATRGRSAAPGRGRGNNQQQRSYDNRPLCQVCYKRGHVAADCWHRFDEDFVPDDKLVAAAIHTHARDSNWYVDTGATDHITSELEKLTARDVYKGHDQIHTASGSGMEIKHIGHSIVHTPTRPLHLNNVLHVPQANKNLISAYKLAADNSVFLEIHSKHFLIKDQATRRTVLKGRRQKGLYPVPSASPPSSAKVVCAVTPSFERWHSRLGHSSAPIISRVISKNKLPCLDESNKEPVCDACLKAKSHQLPYSKSLSISSHPLELVFSDVWGPAPVSVGNKKYYVSFIDDYSKFTWIYLLKNKSEVFQKFHDFQNLVERLFDRKIISMQTDWGGEYQKLNSFFEKIGISHYVSCPHTHQQNGSAERKHRHIVEVGLSLLAYASMPLKYWDEAFLAATHIINRVPSRVIEFESPLERLFKQTPDYSSFRVFGCACWPNLRPYNAHKLQFRSKQCVFLGHSHRHKGYKCLDIASGRIYISRDVIFDESVFPFSKLHDNAGARIRHEISLLPSDLIIHTSHQGGELENDQMFNSPNEMPDQSVEHAEDTGNIGAEDWVDEANTQQLSQQQPSSPQSPGSVTPLCVRRSGSDTHAATSGTRVENEPSDQSPSATTMAGNDDVSESSASHEEAASSPVAEQHQPEIVRPRTRLQSGIRKEKVYTDGTVKYACFTASGEPENLHEALNDKNWKNAMDAEYEALMGNKTWHLVPAEKANNIIDCKWVYKIKRKADGSLDRYKARLVAKGFKQRYGIDYEDTFSPVVKAITIRIILSIAISRGWSLRQLDVSNAFLHGILEEEVYMKQPPRYEDKSLINHVCKLDKALYGLKQAPRAWYSRLSTKLQELGFMPSKADTSLFFYSKGDVIIFVLIYVDDIIVASSMPDATTALLQDLNKSFALKDLGELHYFLGIEATKVCDGILLSQEKYVKDLLKRINMDKCKPVSTPLSPTEKLSIHQGDVLGPNDATNYRSIVGALQYLTLTRPDISFSVNKVCQYLHSPTTVHWAAVKRILRYLQQTSGLGLKIRKSSSLLVSGFSDADWAGCLDDRRSTGGFAVYLGPNLVSWSARKQPTVSRSSTEAEYKALANVTAEIMWVQTLLKEIKIEVPKTAKVWCDNIGAKYLSANPVFHARTKHIEVDYHFVRERVSRKLLEIEYVPSQDQVADGFTKPLNEKQLAVFRYNLNLYGLD

SEQ ID NO: 106210 - protein, 942 aa, Oryza sativa
  Clone ID: PAT_MRT4530_10676C.1.pep
MPGIQAVRQHRQDPMKVWIDLLDRVYRHDSKLREEMVPKVGMVFDSYEEAYDFYERYSYHAGFDIKKSRNKPTFREICCTREGKNKYRGDESKRERMRGSARIGCKAYVKVKNVIREGEFVSVRFDDVIIEHNHPLTSSPSAVKLMRSHKHRDETLMEFVDTMQQSRVPNSSIVGVLSDMHGGRENIPFTTRDLENRKAANVRAENADDISKLLEFFKECKKENPKFYWDIKSTLFGCALIRDERAESFQWLFETFKNCMGDSPSPRCILTDQDQAMAVAVERVFPEAIHRLCMWHIIDGHSDHLNTIFSRNDDIEGEMMVCINQTYTPTEFENAWDRFIDKYELRDSVTLRNLYDLRERWVPAFFKKHYCGRMTSTQRSESFNRMVKSNFVDHQTALHRFARRMLDVVVSRKDKESAETRGCEGVPIVKTPWPFAEQLSRVYTRAVFKVFEDSLHDSVYFRIELEGSDGIHWVISHTKRSEKHDWCQRQFKVIVDVDNGNFSCECLQWEHTGMFCPHLLRAFVHAQVEKIPHMYVLRRYTKQAKSDVNYDRRDRPMAGPDGVKESYRTKLLSYDAMQIVKLGRRSKVAFDRATAVLKGLRKQLEEIPPDSDVGVGNAVTSGKDAESVADTMRAGQSMSMSEHDCERVSRRPPPRSMTKGRASEPTEKVKLGARGDKKCTRGCGWCGLKVGHNSSTCPNNPANFKRIAEANNKGKRKRGRPRGSGVGGGRGRKAVRRNLIDEWAEGPVGGECSMRSEEGWLGVGGGVGVGVGGGVIGQKSTSPANLVVSGFFSAASDSQRLAGKVAVITGGASGIGKGTATEFIKNGAKVIIADIQDDLGHSVAAELGPDAAYTRCDVADEAQVAAAVGLAVKRHGHLDVFHNNAGIAGALPQDDMAAVDLGDFDRVMAVNARSTLAAVQHAARAMAPRCSGCVLCTSSGAG

SEQ ID NO: 106211 - protein, 83 aa, Oryza sativa
  Clone ID: PAT_MRT4530_10677C.1.pep
FDWANSSRCQGNYNYIVNTKGTSISHQMILQAKAIIITELPYQVANVMVTSHAKCTPCPANVPRVPTPQQSPVGCGWKAFLMI

SEQ ID NO: 106212 - protein, 85 aa, Oryza sativa
  unsure (1)..(85): unsure at all Xaa locations
  Clone ID: PAT_MRT4530_10678C.1.pep
LTLPAVWPCIAVPELAASSPLRPPCPPLPRPPRTTPPRRRHGPQAPRLRXDLPPPPSNPALLPPDATEPPPPPTSVGALTPPPAT

SEQ ID NO: 106213 - protein, 92 aa, Oryza sativa
  unsure (1)..(92): unsure at all Xaa locations
  Clone ID: PAT_MRT4530_10679C.1.pep
LDPALINAFXXSVASFFVRXXEXGVHEXXXXXXWXXXWXSXXXLXXXXXVXXXDXXXLGXXGXDXXXXXXXSIXEXXXXXXXXXXXXXNXIR

SEQ ID NO: 106214 - protein, 154 aa, Oryza sativa
  unsure (1)..(154): unsure at all Xaa locations
  Clone ID: PAT_MRT4530_1067C.1.pep
RPTPSAAADSSELPPPSSRLPLDPRRPRPPPSRRRIPPPPHHRRRSTPPPPHPRSRPLWARSSSANRFSPHRQIALAIQPPTPLPSSFAAPLPRLHRRRSHRRAPTTFPPSRSRHPLRLHXRRPHHAFADRRSCSPESRXXRAGDRRGSPRDPT

SEQ ID NO: 106215 - protein, 50 aa, Oryza sativa
  Clone ID: PAT_MRT4530_10680C.1.pep
MVPRARSRVDVQPQQTLPTASRTYVGLGGNVHQQQPPGGARGSEDIVKKW

SEQ ID NO: 106216 - protein, 114 aa, Oryza sativa
  Clone ID: PAT_MRT4530_10681C.1.pep
ITITAPISIKEFSSASMRYLLGLRHVEMEQQYRGLYMTLHDSLVRPKVFPKCIWDLSLPGYHDRLLETKGLHLYTSISRLCKCISINTPDWRPCSPAPCGAGAHFRYVHLPITQ

SEQ ID NO: 106217 - protein, 64 aa, Oryza sativa
  unsure (1)..(64): unsure at all Xaa locations
  Clone ID: PAT_MRT4530_10682C.1.pep
RNREITRAIHQHKAYNNTADENLKSMRTTHALNHPPLVHLRRRRHRLRHALPAAAAAPGRXPRR

SEQ ID NO: 106218 - protein, 610 aa, Oryza sativa
  Clone ID: PAT_MRT4530_10683C.1.pep
KARQTLVRTNREQHEVVDGNESFPMALYVVSGDEDGERGGAPVVCIDVAAQLCCDFNKGQSTWSPILLLVPLVLGLDKINPRYIPLLKETFTFPQSLGILGGKPGTSTYIAGVQDDRALYLDPHEVQMAVDIAADNIEADTSSYHCSTVRDLALDLIDPSLAIGFYCRDKDDFDDFCSRATELVDKANGAPLFTVVQSVQPSKQMYNQDDVLGISGDGNINVEDLDASGTDAGGVGVTYGMRGTTMPPPADVARFLSRDTIFDRVRLLDADPRALRAFAGTGLAVDVTVPNADVPRLAASRASARRWVRASVAPYAEATNVSRVLVGDEVISQANRTLLLSLVPAMRNLHAALAAVLPPSPRRREIIKVSTPHSLGILAASTPPSAGRFHDGYDTAVVKPLLGFLRATGAPFMVNAYPFYGGLTNETLDYVLFRGLQQERHPPPRLPRGTPLMPNRTFELSIFSLFDENLKPGPVSERNFGLYHADMTPVYDAGILTAPQEIVGTKVTPAPAPALAPAEDGRRRWCVPKPAADEVALQVNIDFVCGQGGIDCGAIRAGGSCYDPNNVQAHAAFAMNLYFQSNGQHEFDCDFGQTGVITTVDPSYKSCKFT

SEQ ID NO: 106219 - protein, 1064 aa, Oryza sativa
  Clone ID: PAT_MRT4530_10684C.1.pep
MGSSFPLKKATKGLPKIQIDDDSELIDEDSLLTEDDLKKPELPVVGDCEVGATRKACKNCTCGRAEAEEKVEKLNLTSEQINNPQSACGNCGLGDAFRCGTCPYRGLPAFKPGEKEIDFGAPVVLGQEIDFASVMTSLPDRGVSSSSSDPLCEGNIAPCSSSSEQKEDCSLKQSKTSILSCVFNSPFNIFEAHQDSSANKSPKSSSGSYDWLRVLRRIVCSGSMWRFLGTSKVLTSSDVWFLGKCYKLSSEESSSDSDSESGHATFLEDFSSRIWITYRRGFDAISDSKYTSDVNWGCMVRSSQMLVAQALIFHHLGRSWRRPSEKPYNPEYIGILHMFGDSEACAFSIHNLLQAGNSYGLAAGSWVGPYAMCRAWQTLVRTNREQHEVVDGNESFPMALYVVSGDEDGERGGAPVVCIDVAAQLCCDFNKGQSTWSPILLLVPLVLGLDKINPRYIPLLKETFTFPQSLGILGGKPGTSTYIAGVQDDRALYLDPHEVQMSATVIIWLFLQYPFYAWNPFCYGSYSGVFSTSQAVDIAADNIEADTSSYHCSTVRDLALDLIDPSLAIGFYCRDKDDFDDFCSRATELVDKANGAPLFTVVQSVQPSKQMYNQDDVLGISGDGNINVEDLDASGTDAGGVGVTYGMRGTNMPPPADVARFLSRDTIFDRVRLLDADPRALRAFAGTGLAVDVTVPNADVPRLAASRASARRWVRASVAPYAEATNVSRVLVGDEVISQANRTLLLSLVPAMRNLHAALAGVLPPSPRRREIIKVSTPHSLWHPGRVHACRRPGVFSTDGYDTAVVKPLLGFLRGRARRFVVNAYPVLRAVSPTTPLDYALFRVNAGVPADATGLLYANMLDAQLDAVHSAMRRLGFGDVDVVVSGTGNYNKNAIRHLGSGVGTPLMPNRTFELSIFSLFDENLKPGPVSERNFGLYHADMTPVYDAGILTAPQEIVGTKVTPAPAPALAPAADGRRRWCVPKPAADEVALQVNIDFVCGQGGIDCGAIRAGGSCYDPNNVQAHAAFAMNLYFQSNGQHEFDCDFGQTGVITTVDPSYKSCKFT

SEQ ID NO: 106220 - protein, 75 aa, Oryza sativa
  Clone ID: PAT_MRT4530_10685C.1.pep
ATFHDFFWKQTELFFMEKLAFTNTNRFAKLAETMKVESKQKLGRSIHTPTTIWRIPVSLYRVLNTDSEIDIQEAC

SEQ ID NO: 106221 - protein, 185 aa, Oryza sativa
  Clone ID: PAT_MRT4530_10686C.1.pep
MTSLPGRGVSPSSSDPLCEGNAAPSSSSSSGQDLKQLKNSILSCVFSSPFSIFEAHQDSSANRSLKPHSGSYAWSRFLRRIACTGSMWRFLGASKALTSSDVWFLGKCYKLSSEELSNSSDCESGNAAFLEDFSSRIWITYRKGFDAISDSKYTSDVNWGCIDFPPSWKVLEKALTEGEIHDYLF

SEQ ID NO: 106222 - protein, 216 aa, Oryza sativa
  Clone ID: PAT_MRT4530_10687C.1.pep
MCGGAIISDFIPQREAHRAATGSKRALCASDFWPSASQEAADFDHLTAPCTFTPDQAAEEPTKKRERKTLYRGIRRRPWGKWAAEIRDPAKGARVWLGTSGRAEAAARAYDRAARRIRGAKAKVNFPNEDPPLDDPAADGHSHGGAAIPCREFMDYDAVMAGFFHQPYVVADGVPAVPAEEAPTVAYVHHHLPPQPQQDAGLELWSFDNIHTAVPM

SEQ ID NO: 106223 - protein, 52 aa, Oryza sativa
  Clone ID: PAT_MRT4530_10688C.1.pep
YYTYALSRNAGWDFHHLSEYLAGGYMMYINMFVSDLKDGVFPLPDNILQFRI

SEQ ID NO: 106224 - protein, 1216 aa, Oryza sativa
  Clone ID: PAT_MRT4530_10689C.1.pep
MAATAAALAVTDELALPLRAVGDLAAAAGVSREEVVVITQCASLGGKLPFDDASVGSVLAVIKKVENLGDLFITEISRVLKAGGMVLIQSSPSDQDPNNSIQRKLLLGGFVDVQASAASSQDSEHSVTIKAKKVSWSMGSSFPLKKATKGLPKIQIDDDSELIDEDSLLTEDDLKKPELPVVGDCEVGATRKACKNCTCGRAEAEEKVEKLNLTSEQINNPQSACGNCGLGDAFRCGTCPYRGLPAFKPGEKEIDFGAPVVLGQEIDFASVMTSLPDRGVSSSSSDPLCEGNIAPCSSSSEQKEDCSLKQSKTSILSCVFNSPFNIFEAHQDSSANKSPKSSSGSYDWLRVLRRIVCSGSMWRFLGTSKVLTSSDVWFLGKCYKLSSEESSSDSDSESGHATFLEDFSSRIWITYRKGFDAISDSKYTSDVNWGCMVRSSQMLVAQALIFHHLGRSWRRPSQKPYNPEYIGILHMFGDSEACAFSIHNLLQAGNSYGLAAGSWVGPYAMCRAWQTLVRTNREQHEVVDGNESFPMALYVVSGDEDGERGGAPVVCIDVAAQLCCDFNKGQSTWSPILLLVPLVLGLDKINPRYIPLLKETFTFPQSLGILGGKPGTSTYIAGVQDDRALYLDPHEVQMSATVIIWLFLQYPFYAWNPFCYGSYSGVFSTSQAVDIAADNIEADTSSYHCSTVRDLALDLIDPSLAIGFYCRDKDDFDDFCSRATELVDKANGAPLFTVVQSVQPSKQMYNQDDVLGISGDGNINVEDLDASGTDAGGVGVTYGMRGTNMPPPADVARFLSRDTIFDRVRLLDADPRALRAFAGTGLAVDVTVPNADVPRLAASRASARRWVRASVAPYAEATNVSRVLVGDEVISQANRTLLLSLVPAMRNLHAALAAVLPPSPRRREIIKVSTPHSLGILAASTPPSAGRFHDGYDTAVVKPLLGFLRATGAPFMVNAYPFYGGLTNDTLDYALFRVNDGVTDDATGLLYANMLDAQLDAVHSAMRRLGFGDVDVVVSGTGWPSAGEYWEVGAGADLARNYNKNAIRHLGSGVGTPLMPNRTFELSIFSLFDENLKPGPVSERNFGLYHADMTPVYDAGILTAPQEIVGTKVTPAPAPALAPAADGRRRWCVPKPAADEVALQVNIDFVCGQGGIDCGAIRAGGSCYDPNNVQAHAAFAMNLYFQSNGQHEFDCDFGQTGVITTVDPSYKSCKFT

SEQ ID NO: 106225 - protein, 162 aa, Oryza sativa
  unsure (1)..(162): unsure at all Xaa locations
  Clone ID: PAT_MRT4530_1068C.1.pep
MSDSEEHHFESKADAGASKTYPQQAGTIRKNGHIVIKNRPCKVVEVSTSKTGKHGHAKCHFVGIDIFNGKKLEDIVPSSHNCDVPHVDRTDYQLIDISEDGFVSLLTESGNIXDDLRLPTDDTLTNQIKNXFGEEGKGMILTVMSAMGEEQICAVKEIGAKN

SEQ ID NO: 106226 - protein, 29 aa, Oryza sativa
  Clone ID: PAT_MRT4530_10690C.1.pep
THTHATTRPGRYLWGSEATMRTTMSLDGV

SEQ ID NO: 106227 - protein, 264 aa, Oryza sativa
  Clone ID: PAT_MRT4530_10691C.1.pep
MASTIMAPTSRVLAAKTPFLGHPRPSNAPVRDAMMMTRASMGAMEGAAVDEVVRRLLEGGRGGRQVQLSEAEIRQLCVEAKRVLLSQPNLLGIHAPVKICGDIHGQFVDLLRLFDLGGYPPTSTYLFLGDYVDRGKQSLETICLLLAYKVKYPDKIFLLRGNHEDAKINRVYGFYDESLIDDKILCMHGGLSPELNSLDQIKDIERPTEIPDYGLLCDLVWSDPSPDSEGWGESDRGVSCTFGADKLVEFLEKNDLDLICRAHQ

SEQ ID NO: 106228 - protein, 474 aa, Oryza sativa
  Clone ID: PAT_MRT4530_10692C.1.pep
MTSLPGRGVSPSSSDPLCEGNAAPSSSSSSGQDLKQLKNSILSCVFSSPFSIFEAHQDSSANRSLKPHSGSYAWSRFLRRIACTGSMWRFLGASKALTSSDVWFLGKCYKLSSEELSNSSDCESGNAAFLEDFSSRIWITYRKGFDAISDSKYTSDVNWGCMVRSSQMLVAQALIFHHLGRSWRKPSQKPYSPEYIGILHMFGDSEACAFSIHNLLQAGKSYGLAAGSWVGPYAMCRAWQTLVCTNREHHEAVDGNGNFPMALYVVSGDEDGERGGAPVVCIDVAAQLCCDFNKNQSTWSPILLLVPLVLGLDKLNPRYIPLLKETLTFPQSLGILGGKPGTSTYIAGVQDDRALYLDPHEVQLAVDIAADNLEAGTSSYHCSTVRDLALDLIDPSLAIGFYCRDKDDFDDFCSRASELVDKANGAPLFTVVQSVQPSKQMYNEESSSGDGMDSINVEGLDGSGETGEEEWQIL

SEQ ID NO: 106229 - protein, 325 aa, Oryza sativa
  Clone ID: PAT_MRT4530_10693C.1.pep
MMMTRASMGAMEGAAVDEVVRRLVEGGRGGRQVQLSEAEIRQLCVEAKRVLLSQPNLLRIHAPVKICGDIHGQFVDLLRLFDLGGYPPTSTYLFLGDYVDRGKQSLETICLLLAYKVKYPDKIFLLRGNHEDAKINRVYGFYDECKRRFNVRLWKIFCDCFNCLPMAALIDDKILCMHGGLSPELNSLDQIKDIERPTEIPDYGLLCDLVWSDPSPDSEGWGESDRGVSCTFGADKLVEFLEKNDLDLICRAHQVVEDGYEFFAQRRLVTIFSAPNYCGEFDNAGALLSIDESLMCSFQILKPNDTGAPHSRKPTSNKTPKTGNA

SEQ ID NO: 106230 - protein, 101 aa, Oryza sativa
  unsure (1)..(101): unsure at all Xaa locations
  Clone ID: PAT_MRT4530_10694C.1.pep
RPSCPRGGEVFEXXXPYLPPFLIDPSAGGGYEWCRLFFFVRLNYFRRGPVSLPVKIIYLVWSFLTWAPFPGLRKLFFGPLRKTFFPISVLQHELVQRSGFP

SEQ ID NO: 106231 - protein, 32 aa, Oryza sativa
  Clone ID: PAT_MRT4530_10695C.1.pep
MFRRVTQQFTAMFRRKAFLHWYTGEGMDCIPD

SEQ ID NO: 106232 - protein, 942 aa, Oryza sativa
  Clone ID: PAT_MRT4530_10696C.1.pep
MEQKPSPPPPPRSDEEEDGLMGCGMGGTGDIAGGDLDLMEEFLLATPGFDLSEFWHPGAASPFSPLFDIGSSVTTLTTPAPAAGEDDRDEAEMPSRGGGGLEVSPAHRGWTFQTAPQEVAVEPTVKERLRRALERIASQSQSQAQRGDGELLVQVWVPTRIGDRQVLTTCGQPFWLDRRNQRLANYRTVSMKYQFSADESARADLGLPGRVFVGRVPEWTPDVRYFSTEEYPRVQHAQYFDIRGSVALPVFEPRSRACLGVVELVMTTQKVNYSAEIENICNALKEVDLRSSDVSSDPRSKVVDASYRAIIPEIMDVLRAVCDTHNLPLAQTWIPCICQAKRGSRHSDESYKHCVSTVDEACYVRDCSVLGFHQACSEHHLFRGEGVVGRAFGTNEPCFSPDITTYSKTQYPLSHHAKLFGLRAAVAIQLRSVKTGSLDFVLEFFLPMKCINTEEQRAMLNSLSNTIQQVCYTLRVVKPKELVNDGPFEISQPTRPEFYAKSVHEDLDELCSGINVPGRTTSLEASEEVSSWIASLVDAQNKGGKGEIDVDLPFGFSKQDDEGFSVTAGWHTSPVMAPDGSMFSGFKRHEDYDVKENTCSSDPSNSNSDKAVEKRRTKTEKTVSLQDLRKHFAGSLKEAAKNLGVCPTTLKRICRQHGINRWPSRKIKKVGHSLKKLQMVIDSVHGPEGTVQLSSLYENFTKTTWSERELQGDVHFPASEQNFQLEPSVPDRPCEGRFTSHTSGSNSISPSCSQSSNSSLGCSSVPKTQQQHGSAPQLAVKEEISMDENQCSTLIKSASHAEAELQMFVEERPTMLFRSQSQVLLSEHKPIENMSNVQKARSDSLKIKAIYGEERCIFRLQPSWGFQRLKEEIVKRFGISQDTHVDLKYLDDESEWVLLTCDADLLECIDVYKSSSNQTVRILVNPSIQPLLNASFGQTGLS

SEQ ID NO: 106233 - protein, 155 aa, Oryza sativa
  Clone ID: PAT_MRT4530_10697C.1.pep
ATRPEELENLKHELQWEGSKVAVLSKEEKMLLEARMGFAHARPIMSNEEYDALKRSLPGSSVYTLPREGPVCTLGKPGERGQKQGEAQTDYTKMLMLTVPTALIDGGTLIGADLLAGAPLMHLPGTVGVVVWCGLILPSAYVLAASFANLLFKDA

SEQ ID NO: 106234 - protein, 39 aa, Oryza sativa
  Clone ID: PAT_MRT4530_10698C.1.pep
GAEILLVYYGYRVYPQAHGYTIVPFHPRVFQGRGGIPVL

SEQ ID NO: 106235 - protein, 98 aa, Oryza sativa
  unsure (1)..(98): unsure at all Xaa locations
  Clone ID: PAT_MRT4530_10699C.1.pep
MRVLVIAASGQNGYALVPMIARGGMLGADQPVILHMLDIPPATESVNGLTMELVDAAFPLXKGIDRTTDVAEARTGVNETIMCRGFPRKEGMERKDVI

SEQ ID NO: 106236 - protein, 434 aa, Oryza sativa
  Clone ID: PAT_MRT4530_1069C.1.pep
MVGARAGRVPAAAAAAAAVLIVAACVFSSLAGAAAAAEVVGGAAQGNTERISGSAGDVLEDNPVGRLKVFVYDLPSKYNKRIVAKDPRCLNHMFAAEIFMHRFLLSSAVRTLNPEQADWFYAPVYTTCDLTHAGLPLPFKSPRMMRSAIQFLSRKWPFWNRTDGADHFFVVPHDFGACFHYQEEKAIERGILPLLRRATLVQTFGQKNHVCLKEGSITIPPYAPPQKMQAHLIPPDTPRSIFVYFRGLFYDNGNDPEGGYYARGARASLWENFKNNPLFDISTEHPATYYEDMQRSVFCLCPLGWAPWSPRLVEAVVFGCIPVIIADDIVLPFADAIPWDEIGVFVDEEDVPRLDSILTSIPIDDILRKQRLLANPSMKQAMLFPQPAQPRDAFHQILNGLARKLPHPDSVYLKPGEKHLNWTAGPVADLKPWK

SEQ ID NO: 106237 - protein, 639 aa, Oryza sativa
  Clone ID: PAT_MRT4530_106C.1.pep
MAHRAGCLSMLLTAAVVLLALAPRGAAYPWQVCGTTGNFTANSTYQANLDAVAAALPRNISSSPDLFATAMVGAVPEQVSALALCRGDANATECSGCLATAFQDVQNMCAYDKDAAIYYDPCILYYSNVPFLSSVDNAASTSRVNLQNVTSDPGRFNGMVAALVNATADYAAHNSTRRYASGEAVLDRESEFPKVYSWAQCTPDLTPAQCGDCLAAIIAKLPRLFTNRIGGRVLGVRCSYRYEVNPFLNGLVMVHLTAPPIPTASPPAAAAAAAGEGESKHASFFSFCLLYNSAESENISSVESMLIDISTLRAATGCFAERNKLGEGGFGAVYKGTLPDGDEIAVKRLSKSSAQGVGELKNELALVAKLQHKNLVRLVGVCLEQEERLLVYEFVPNRSLDQILFDADKRQQLDWGKRYKIINGIARGLQYLHEDSQLKVVHRDLKASNILLDMNMNPKISDFGLARLFGRDQTQGVTNLVIGTYGYMSPEYAMRGNYSLKSDVFSFGVMVLEIVTGKKNNDCYNSLQSEDLLTLVWEQWTARAVSEAVDPVMGGGFSWSDVMRCIHIGLLCVQENPADRPVMSSVVMMLGSDTVSLRAPSKPAFCARRNGGTGGAGASSGGTSSGTSVTDTSLTDIIP

SEQ ID NO: 106238 - protein, 203 aa, Oryza sativa
  unsure (1)..(203): unsure at all Xaa locations
  Clone ID: PAT_MRT4530_10700C.1.pep
FSSAGSRPEGDECRRLAEEEVLRGDWRRLAGKEAAAVGEELDVGSGSHRLDPVGAVLCQERVAARPDVEPGGLVGEVELDAHGVGLLPVSVEEEEHLITAASSATLQTHRPPRFAPSASFPPAGCGGGGGGGGACSSGEPPHHGRGGQHRVVVVPTRRAEAACLLASSPREEKRREEKSXERERRRRKGEWRGGEREDDDVAY

SEQ ID NO: 106239 - protein, 162 aa, Oryza sativa
  Clone ID: PAT_MRT4530_10701C.1.pep
SSPATAGAVVFPGADVVPSCRWSRVLPHPRWPPKSTAAPDEVEVFPNRGLTRQRLNTLNRSNILHLRRREHEGEVGAPGAATSERQFAVAAALVAQIPERKWSLSYRRKRGVASHSFDYVDDDSQNNYPLDFLNTITPNGLPPHELKVKVNCHAILLRNLDP

SEQ ID NO: 106240 - protein, 195 aa, Oryza sativa
  unsure (1)..(195): unsure at all Xaa locations
  Clone ID: PAT_MRT4530_10702C.1.pep
MARKCGNCCADKSQRVKKGTQLWRRLVNAESHFRGPAGGNAVQCAPLVWTISAAVNPXPPDPPAPTPPXPPLTPIEALAPRSHVAQPRAPQPPPPPPPASPPPPPPPPPXPPPPPPPPPPPPPPPPPPPPPPPPHPPPPXPPPPRAPHPPPPPPPPPARRAAPPPPPPAAPPPPLPPPPPPPRPLSPPPPPSPPP

SEQ ID NO: 106241 - protein, 57 aa, Oryza sativa
  Clone ID: PAT_MRT4530_10703C.1.pep
IASGRTPKKKKKKKKKKKKKKKKKKKKKKTKKKKKKKKHKRGAAQGGAKANYPGQAR

SEQ ID NO: 106242 - protein, 1094 aa, Oryza sativa
  unsure (1)..(1094): unsure at all Xaa locations
  Clone ID: PAT_MRT4530_10704C.1.pep
PANNVNPAYSTRFGAGNQGGGNGSTGGGNGNSRNRRRRGGGGSGSGNNGGNTGASAIIKNLISVRHFVVDNWCSVEFDPFGFTVKDLHTRTVIAKYNSSGPLYALHHALPAPPSSSPPAAYTATTTSGTLWHRRLGHLGLDALARLSTIILVSKDGLSGLCHACQLGRHIRLPYTTSFTRASANFELLYCDLWISPVVSVSGYKYYLVILDDCSHFVXTFPLRFKSDMFTTLSHFFAYVKTQFSTNICSIQCDNGREFDNISARTFFLTNGVTMRMSCPHMSPQNGKAERILRSINNIVRSLLFQASLPGTFXVEALHTATYLINRHPTKTLQHHTPLFALYGVHPSYAHLRVFGCKCYPHLSAIAPHKLSPRSTMCIFLGYPHPRRGEGRPGPSTNRVIISHHVVFDEHSFAYANISSPSSADELDFLEDFLTPSPSLSSVADDLRPAFSARRDRLPPRRRLLRLRRTAVDPVHPSPSPPTAGTPSTPSTRAVPPSSSAPAAFFVVTFAAVPTRPRSVRVQIAPPPPSTTAPLVINDHTMTTSGKAGLRKPVQRLNLHASMLSPVPHTYRAALADPYWQTAMEEEFTALTANRTWDLVPRPSSANVVTGKWIFKHKFQFDGTLDRYKARWVLRGFIQRPGIDFDETFSPVVKPATVRTVLSLAVSHDWPIHQLDVKNAFLHGTLQETVYCIQPPGFVDPTRLDMVCRLNKSLYGLKQAPRAWYSRFATFLLSIGFTEAKSDTSLFVLHRDSGTIYLLLYIDDIVLTTSSAQLLQWTISSLQSEFSMKDLGALLVLXHHFLGVTVARRDTGLFLHQRQYSLDILERAGMTDCKPCATPVDTCAKLSSTNGPLVADPTDYRSLAGALQYLTFTRPDISYAVQQVCLHMHDPREVYLTALKRILRYVRGTIDLGLHIQRSQATDLVVYSDADWTGCPNTRKSTSGYAVFLGDNLVSWSSKRQNTVSRSSAEAEYRAVANAVAKASWLRQLLHELHSPPSKANLVYCDNVSAVYLSSNPVQHQRTKHVKIDLHFVRDKVALGVVQVLHVPTSSQYADIFTKGLPSLVFIEFRSSLNVRSIDVATAGGVRQYGLDMHG

SEQ ID NO: 106243 - protein, 931 aa, Oryza sativa
  unsure (1)..(931): unsure at all Xaa locations
  Clone ID: PAT_MRT4530_10705C.1.pep
MNPTQPVVIHDRHCVGLLPASHIAAGNTMRICARVSESFGARKYILDAKRWCIIGKNMESLEPEDGDGHQSDATDDDLPPRICTGKAYQAEIPNLATEDERRQYMSNTTDSCMALGYDCPIPIMWTLPSEFNKKEEEIQKQHSSETKAIENSRDGDSQTTSICPTSNNTSGQCSTSQDPHPELPDQIVSDSHQAHDDKLAPCSTQEGLNFTDKAMADQGEIEQFIPVPNSSTSIWSDQEAELLLLGLYIFGKNLHVLSRFVGSKTVGDVLSYYYGKFYKGEAYKRWSACRKAKIRRCILGERIFIGWRRQELISRLKSKIPKEAHDLLHEMFKSFNDGQTSLMDFVFHLKSVVGIEAFVEAVAIGKGKDDLTGFVLDPSKPNQVLSVQPGMPAGKDCSSLASGDIIEFLTGDFRRSKTRSNDLFGEAVWPRLLARGWHSEKPNDVSTTKNCLVYSLXPGIQRFSRSELTKGTHYFDSASDVLKKVVADPVRLELEVDGMGNGVNAEKNGFDTAMKLNQDVPFDGYHELPKFTIIDTSLVQGEEPSQVRELRNLPADANISFGPLRHTHNMVSDSSSDEHDTDDRSSDYKEGYAGVTADENGTEMVSSKNADNESQVDSFRNMAATSCSVFPVNGHSSNGNGDTIGATSFFPQKTKIEKRKYLSPVTKRRRLTSCSNDQTSRRSFSFSKGPGLEKEKVKLPSTSSKPTAIDVGGSFQSKSLASCSGKEKPCQQIKDASNSHANDRSNEKMNVARPKEKPSGHKVDTLASVHSKTAVEDTKPAKGVAQSSDLVANQVKLETPQDDKTVTIAHAPSSDNHGSILKNKETTSSSNTEIAHDAPEATRGGPANPQPDLQASSQAMNPRRQGTRVRPPTARALEAVAFGLLGSGKRKADPTGSSRPRQRARKSTKEAASVSTSSDTEKSSMHSGARQ

SEQ ID NO: 106244 - protein, 50 aa, Oryza sativa
  Clone ID: PAT_MRT4530_10706C.1.pep
NPFFILTSENSCTTFMAFSFSSVECFFNENSVKCCYENILNAVNYVLRRN

SEQ ID NO: 106245 - protein, 101 aa, Oryza sativa
  Clone ID: PAT_MRT4530_10707C.1.pep
YKSSSPKEHEQSKNKIQLLYRSTNRYHSPLRSKIGSTCKQQSTKWFWIRTANQFFAALGEPLARPQKQPLIQIIISKNKILQLIFHRSSLPPIGKSPDPGV

SEQ ID NO: 106246 - protein, 215 aa, Oryza sativa
  Clone ID: PAT_MRT4530_10708C.1.pep
MRGGLVASARLLPRPLVVVSMDDPDVLTEKKDINENMLGGKKVKIIFVLGGPGSGKGTQCSNIVEHFGFIHLSAGELLRAEINSGSENGTMIDTIITEGKIVPSEITIKLLQEAIIKGGNDKYIIDGFPRNEENRVVFESVISISPEFVLFFDCSEEEMERRLLGRNQGRSDDNIETIRKRLKVFVESSLPVIEYYESKGMVKKGQNLKFTVHME

SEQ ID NO: 106247 - protein, 556 aa, Oryza sativa
  Clone ID: PAT_MRT4530_10709C.1.pep
MHHFAPTTVRVPRRRRRIRGEDGGAQRSGVRVEASHAGVVRSGWLEGCCRDCEGKQKGHRHTVLIVMHSPLSCTMEVFLLGAVILGLMLMKKLTGLTGLIVIHGKDLSDGLRVIATDEDTNVMVSVVRKHKRVDQAGPGQQPDGDEQQESDGDEQQEPDGDEQQELFDSDYDLSDGDDDLLEDAVNLDMPKVRGNKKAKRSHLKAIEIRVPTAVDDDADTEDDALDLPESDGEGEERMRFNSWNQEDMNNPAFSVGLVFPSVESVRKAITEYSVRNRVEIKLPRNDKKRVRAHCTDGCPWNLYASWDSRVNSFVVKTYYGKHKCQKEWVLRRCTSRWLADKYIDSFRANEKMSVTSFGRVIQKDWNLTPSRSKVARARRLIMKVIHGDEIKQYDYLWDYAQEIRRSNPGSSLYLNLAGNLFSTCFIALDACKRGFLAGCRPLICIDGCHIKTKFGGKLLTAVGMDPNDCIFPIAMAVVEVESFVSWEWLLETLKSELGIDNTYPWTIMTNKQKGLIPAVKKVFPDTEHRFCVRHLYSNFQEKFKGEIRHLNARFVS

SEQ ID NO: 106248 - protein, 162 aa, Oryza sativa
  unsure (1)..(162): unsure at all Xaa locations
  Clone ID: PAT_MRT4530_1070C.1.pep
MAPTVMASSATSXAPFQGLKSTAGLPVSRRSTNSGFGNVXNGGRIKCXXVWXIXGXKKFETLSYLPPLXVXDLLXXIXXLLXSXWVPCLQFXXVGFXYRENHRSPXXYXXRXWTXXXLPXFGCTDXTXVLXXLQEAXKXYPXAFVRIIXFHNXRXVXLXNFI

SEQ ID NO: 106249 - protein, 613 aa, Oryza sativa
  Clone ID: PAT_MRT4530_10710C.1.pep
MAMLALPPAGHTRHTGCNARQDPVSMDRRLLRAARGGHREWLEAVLLGAAPAPNHVTVHVAAAGEPQPPTAAALLLDVATTPQGDSALHVVAASGDSEAFLSCARTIYRSAMALLDRANARGDTPLHCAARAGNAAMVRCLLDMAMEEDEERGGARFRVADVLEKQNGRRETALHDAVRLGDERLVGHLMAVHPRLARLPGGDGMSPLYQAISLGHDRIAELLHQQGGDELSYSGPAGQTALHAAVLRGAEMTEKIMQWNAGLSGEADASGSTALHFAASADGPKIDIENSSLLRWLLLPCPFQCRRTPTELLLETDPSLACQPDGDGDYPIHVAASAGNLRLVALLLDKCPECAGLRDARGRTFLHVAVDRRRQEVVGFASDVDGRANALSGGNIRRDHFLQRHVPKLDESAESKKMTESAQVLGVGSVLVATVAFAVAFSPPGGYVAAGAPALAGRYAFDAFMYAVALAFTCSMLATLSLMYAGTAAVEMNVRHRYFKNSVWWMRLSMRSLLVAFALGVYLVLAPVSRATAAGVCALAAGTMLFRNRELVLMVSCAHVVRRRMGIRVVLRIGAPIGIDLLISNIVYLIIFGAPFCTPLCVLILFWRVAPTE

SEQ ID NO: 106250 - protein, 87 aa, Oryza sativa
  Clone ID: PAT_MRT4530_10711C.1.pep
MGVPGHGEHNLLATNARLVTDVRLLMDVSRMDFVPIPIVVSTLVENHPKRIQPKEFAPGVDLRVARVPGSVEGGDRERREMGDLTFT

SEQ ID NO: 106251 - protein, 109 aa, Oryza sativa
  Clone ID: PAT_MRT4530_10712C.1.pep
MRPAPSNYTTTHGKSAHPQQNETPDQENDASAVVQPSPRTNIGTEYSDENMSPTIATSEVRNETPSNVSIPSTIVTGTPANVTNLSAIELRRKRDREVYASLSAVVVHS

SEQ ID NO: 106252 - protein, 95 aa, Oryza sativa
  Clone ID: PAT_MRT4530_10713C.1.pep
MPRTTSSSGGGRSAALVGQELGIGVAQSRDVSQREGQAATMAEEATVATWVCRHRGRYSAEEGANEGTTVVLAVVTGYCIEEEMDVGCNRTHSPC

SEQ ID NO: 106253 - protein, 53 aa, Oryza sativa
  Clone ID: PAT_MRT4530_10714C.1.pep
TLPRPSSSIFSTRATYGWLSESPPHQHASPTCWCRNGVGVDVPLALLVLPWRG

SEQ ID NO: 106254 - protein, 948 aa, Oryza sativa
  Clone ID: PAT_MRT4530_10715C.1.pep
MDYEPVLKCLKKLPGVAVQDIPYKTRNVIKNLPKFFAESCASDKEVDGLLMKLPQHLRDALLPFQLEGVKFGLRRHGRCLIADEMGLGKTLQHFSLLSKILQCTNVEIISNYLFQLLQSPCVSILHLISLMIAAMIYDIFCVHHLNGFKIPEIYLTVCFLLGDNRPFDIYHQINMLWPHLLGSNKFDFANKYCLLHTVQGCNGRTYQDFSKGARLTELNVLLSQTLMIRRLKEHLLNELPPKRRQIIWLKLNASDIKTAISCIKGVNTSDEIPTIASPDNSNDSEEVNMEEGFKISKIGLSAPYKHCAHFLVFPFHLPTADGCKKSPRNLTTQEIGIVKIPGFSEWFLNHFIMKEPADNGSLDSQSNCQKTIIFAHHLKVLDGVQVFVTEQRIKYVRIDGSTSPRERKDAVDSFRLNPEVMVAIIGITAGGVGLDFSSAQNVVFVELPKSASELLQNTLDESHWLHLNQSLFRVSSLMNGKKDAIREIEVLPWSVTIDKIFLLSKVDQVYHLEESSKSEGKSQLGFLPLENHNADCGHGPGENVESDDMSIENFPGLNDMNFESDFFSIRTIPLHFEDDSLHTVMQNCPSPTAHEEIAFDSSSISQASVICPSMSSAKSVKVSQHTGRIHLYICVPGHDSRPRPLFENFLPEEVESPLCSDNTMKTSNRLLKRDPAFCNTFKAFVKEWLALRPIEQKRLLGKPLQLPLSLELCYLKDTNNHSTKGLLKGGSKRRVTPWCDISNPLPENAEWRKVVLHNGTSREREYTQGWTVHDEPLCKLCQGPCNGRLAKSPEYFEDLFCGLPCFEVFRSRTSGRFARQALFEIEHGICSKCKLDCHELVKNIRPLCKKKREEYIRNVAPNIASRLKLLDKLVHEPNEGNAWHADHIVPVYKGGGHLCTAKGAKRLTKKAKELLKNTVNNQQKDEASEAAEEDDKSLLVVVPGSAYS

SEQ ID NO: 106255 - protein, 48 aa, Oryza sativa
  Clone ID: PAT_MRT4530_10716C.1.pep
IYRCQLRNSSRSKVCSPFQLVLTENAHKNTGLSHSILVFVKDSSTYHV

SEQ ID NO: 106256 - protein, 223 aa, Oryza sativa
  Clone ID: PAT_MRT4530_10717C.1.pep
MEEGFKISKIGLSAPYKHCAHFLVFPFHLPTADGCKKSPRNLTTQEIGIVKIPGFSEWFLNHFIMKEPADNGSLDSQSNCQKTIIFAHHLKVLDGVQVFVTEQRIKYVRIDGSTSPRERKDAVDSFRLNPEVMVAIIGITAGGVGLDFSSAQNVVFVELPKSASELLQAEDRAHRRGQTNAVNIYIFCARNTLDESHWLHLNQSLFRVSSLMNGKKDAIREIE

SEQ ID NO: 106257 - protein, 65 aa, Oryza sativa
  Clone ID: PAT_MRT4530_10718C.1.pep
RWILRPPSSPTASPISSPPPPHATRSPPSSPSWQPPSRRRRPVQRRRSSRRRRGRPSCSLRRRNR

SEQ ID NO: 106258 - protein, 108 aa, Oryza sativa
  Clone ID: PAT_MRT4530_10719C.1.pep
ALSVQHKHIHYKNCAQKRIHNRARARAYVRTYSVRFCTYITCTYRYTSTQHAACTYPANSGGAAARAHDCAAPFLSPPSPVVSRYTACSPPWLPAPMATTRPSPPTRP

SEQ ID NO: 106259 - protein, 79 aa, Oryza sativa
  Clone ID: PAT_MRT4530_1071C.1.pep
FFFFFFLGHQRVAIHKSGHEGFTTCTARELGGHNTWKEKLRRDACGVHSETRGGEIFPGDAEITPLARGPVISESFFPS

SEQ ID NO: 106260 - protein, 180 aa, Oryza sativa
  unsure (1)..(180): unsure at all Xaa locations
  Clone ID: PAT_MRT4530_10720C.1.pep
MDNPEAEPDDAVLFVGVSLVLGIASRHLLRGTRVPYTVALLVLGVALGSLEFGTKHGMGKLGAGIRIWANINPDLLLAVFLPALLFESSFSMEIHQIKKCMAQMVLLAXPGVLISTFFLGSALKLTFPYNWNWKTSLLLGGLLSATDPVAXVVALLKELGASKKXLSTIIXGESLMNDGT

SEQ ID NO: 106261 - protein, 47 aa, Oryza sativa
  Clone ID: PAT_MRT4530_10721C.1.pep
SLYDTLSLNELEKKTWSNVLTQSIKCFREIQHLRNTNCNTNNHFMKH

SEQ ID NO: 106262 - protein, 58 aa, Oryza sativa
  unsure (1)..(58): unsure at all Xaa locations
  Clone ID: PAT_MRT4530_10722C.1.pep
FFGNDPXKKEKSPGDFATDCGGANPRAAQLTVKRTPRQDVKDTPTLVNEKMLTYAKHS

SEQ ID NO: 106263 - protein, 153 aa, Oryza sativa
  Clone ID: PAT_MRT4530_10723C.1.pep
MDDLSARPLLDSVVISATGEIERNRERFSARSLVAWQVGAQAGKVELNTFADDVRSAFSIRRADIQFTKFHPEDFFITCSNQSDRDGILRQPRLATVSGRVYLFRPWDESLHGTEARFRFRARVCIEGLPMHGRTDEAAAKVIGRMCSIHYIE

SEQ ID NO: 106264 - protein, 76 aa, Oryza sativa
  Clone ID: PAT_MRT4530_10724C.1.pep
MAESSRNSHTTPLCCSQEKIMGMSATGSRCSAAAAAGGNQWNAIAVASTLRSRRAHWPMLWGRRMMEILILVGTCS

SEQ ID NO: 106265 - protein, 114 aa, Oryza sativa
  Clone ID: PAT_MRT4530_10725C.1.pep
MATAKKHKATTSFSMELPLRLHLPPELAIGASPKNQLLFKPHAAAAAVERRLISRPDLGSWKAGSVEAGRCRDAKGRFGFTAVFTVILISPKVIPAHGEVGIVVKARMCNPEKA

SEQ ID NO: 106266 - protein, 208 aa, Oryza sativa
  Clone ID: PAT_MRT4530_10726C.1.pep
MAKGAASASGGGGAAPEAQQQLSGGGDTPRRRRPTRSRSDPLLIVCRCFNVVTAATAALCVAVNVLSAVQSFRTGLDIFGGIFRCYAVVISLFVGVVETEWGFIMKFCKILEYWPARGMLQIFVAVMTKAYPNVERGDLILLEDIASYLLLACGLIYIISGVLCIGVLKRSRQQKATSREQAVKDLEELEKRREELEALLLAQRSETV

SEQ ID NO: 106267 - protein, 50 aa, Oryza sativa
  Clone ID: PAT_MRT4530_10727C.1.pep
HDLFNVVFSCSYVIIIIDLVKGSIWIVIILVASHKGSTSLRGSIVYSFAM

SEQ ID NO: 106268 - protein, 650 aa, Oryza sativa
  Clone ID: PAT_MRT4530_10728C.1.pep
MAGKGDGPAIGIDLGTTYSCVGVWQHDRVEIIANDQGNRTTPSYVAFTDSERLIGDAAKNQVAMNPINTVFDAKRLIGRRFSDTSVQSDAKLWPFKVLPGPGDKPMIGVQYKGEEKQFSAEEISSMVLNKMKETAEAYLGSTVKNAVVTVPAYFNDSQRQATKDAGVISGLNVMRIINEPTAAAIAYGLDKKSSSVGEKNVLIFDLGGGTFDVSLLTIEEGIFEVKATAGDTHLGGEDFDNRMVNHFVQEFKRKNKKDITGNPRALRRLRTACERAKRTLSSTAQTTIEIDSLYEGIDFYTTITRARFEELNMDLFRKCMEPVEKCLRDAKMDKSTVHDVVLVGGSTRIPRVQQLLQDFFNGKELCKSINPDEAVAYGAAVQAAILTGEGNEKVQDLLLLDVTPLSQGLETAGGVMTVLIPRNTTIPTKKEQVFSTYSDNQPGVLIQVYEGERTRTKDNNLLGKFELSGIPPAPRGVPQITVCFDIDANGILNVSAEDKTTGQKNKITITNDKGRLSKEDIEKMVQEAEKYKAEDEEHKKKVDAKNSLENYAYNMRNTIKDDKIASKLPEADKKKIEDAIDGAISWLDSNQLAEAEEFEDKMKELEGVCNPIIAKMYQGAGADMAGGMDEDAPAAAGGSSGPGPKIEEVD

SEQ ID NO: 106269 - protein, 231 aa, Oryza sativa
  unsure (1)..(231): unsure at all Xaa locations
  Clone ID: PAT_MRT4530_10729C.1.pep
MDWTGLGLRGGGVESRKPSVDEQFARFVKVIQKIHINVPLLDAMQVPTYVRYLKDILNKKRPLPTIEVVKLTEQCSNVILDKLPEKKKDPGCPTITSLCDLGASISVIPKDVFDKLNFTVLTPTPMRLQLADSSVRYPARIAEDVPVKIWDFFIPVDFVVLDMNTEKETPLILGRPFLSTAEANIDVGMGSIRFHINGKEEKFEFQPRTEQCSMVWIXYGPNPQNIQVVEV

SEQ ID NO: 106270 - protein, 366 aa, Oryza sativa
  Clone ID: PAT_MRT4530_1072C.1.pep
MAAPVRSVLPVVLLGCGGVGRHLLRHIVSCRPLHANQGVAIRVLGVADSSSLLVADDLHSNGFDDALLADLCAAKSAGSPLSSLLSRGQCQLFNNTEARRKVIDTASVLGKTTGLVLVDCSATYDTVGMLKDAVDRGCCVVLANKKPLTCAYEDFEKLVSNFRRMRFESTVGAGLPVIASVTRIIASGDPVSRIVGSLSGTLGYVMSELEDGKRFSEVVKTAKSLGYTEPDPRDDLSGMDVARKVESLYPSEFGPDAMSTKDFLESGLVQLDKSIEERVKAASLKGNVLRYVCKIESTGCQVGLEELPKNSALGRLRGSDNVVEIYSRCYESAPLVIQGAGAGNDTTAAGVLADILDLQDLFHKTA

SEQ ID NO: 106271 - protein, 37 aa, Oryza sativa
  Clone ID: PAT_MRT4530_10730C.1.pep
FRRPRVALPTPELCTTGNFRSYRSSFTARLCRAPHRR

SEQ ID NO: 106272 - protein, 181 aa, Oryza sativa
  Clone ID: PAT_MRT4530_10731C.1.pep
MAIPTKEEVEQNEEDNTFSRLQLLAQQRHAMEEFWRRSQEQIEASAGNHEHILPIDCVKNVIRPKNDAMMLSADTPTFVTKLCELFVQELTLRAWVCANSHNRDIILGTDIAEAITTTESYHFLGNVLRSHKALGSTAPDIDTSARKHIKLDQMTSLYHPTQEMQASRLAGYPPHVPIYPP

SEQ ID NO: 106273 - protein, 219 aa, Oryza sativa
  Clone ID: PAT_MRT4530_10732C.1.pep
VACRLSPRAAAPPLPHAASHLPAGRHPIERRTPLAGRVGESQRELCRCGVGERPRYGESQRARFSQSSRLGFSLVSGLMGFGVLLFRELFGGDEERRHAGLFWKAECRAGLHMDGASPGMYGKIEKNHKSKDNKKKSKIHHRSLNLYRCVILVPKLANRPFSSSNLFDCVIPVPKLADHSFRRDESAISDLAGHGFEVEGYPVVDYESDRQTAMSTTVR

SEQ ID NO: 106274 - protein, 62 aa, Oryza sativa
  Clone ID: PAT_MRT4530_10733C.1.pep
LGKAAAAGSGRGRATVVAHACPRCGPRLRLPPESVPTELCAVAPPAPGAFSLAVLPAPLKRS

SEQ ID NO: 106275 - protein, 263 aa, Oryza sativa
  unsure (1)..(263): unsure at all Xaa locations
  Clone ID: PAT_MRT4530_10734C.1.pep
FTDQNSLQLCLEKFQLGKAFLXDHALDDGPWKMRRLHKWYMDASKKGLTNLTIRSPPDCFAGDGYFXLDFADLHTIYRRDKMDVNFVGAWCLMXYMDAEKTNQSIGYLDPTRICQAQHTVTQSPNSKQLKDKTPEEIEYKKGLHKQKLITVAQYIGXSFLRFQNKRVILAAYNFNDHYICFIIYPKHGSVTVLDPLDYHHKTYKQFLTILQYVYNYYKKKGGEQIQTREKLLCHKQPRDMVLCRDYACEFLRVNGRYKVNAED

SEQ ID NO: 106276 - protein, 53 aa, Oryza sativa
  Clone ID: PAT_MRT4530_10735C.1.pep
NKELNYLREFRILGKVVAGKNFPKYANLMKNLLQNLYVELSLDIRSFEIENNM

SEQ ID NO: 106277 - protein, 50 aa, Oryza sativa
  Clone ID: PAT_MRT4530_10736C.1.pep
GTFRVSPGVRWVRRLFRPNSVIIVNYVTSMFPVFSDLSYFGSFPSVECVA

SEQ ID NO: 106278 - protein, 616 aa, Oryza sativa
  Clone ID: PAT_MRT4530_10737C.1.pep
KYICIALNADDHGEGGTFAMYSLLCQHANIGILPSKKIYTEEENLISNQPVVAGRPGRLRRFIESSIIARRLLLLTAILGMCMLIGDGILTPAISVLSAIDGLRGPFPSVSKPAVEGLSAAILVGLFLLQKYGTSKVSFMFSPIMAAWTFATPVIGVYSIWRYYPGIFKAMSPHYIVRFFMTNQTRGWQLLGGTVLCITGAEAMFADLGHFSKRSIQIAFMSSIYPSLVLTYAGQTAYLINNVDDFSDGFYKFVPRPVYWPMFITATRAAAWASQSLISATFSVIKQSVVLDYFPRVKVVHTSKDKEGEVYSPENNYMLMLLCVGVILRFRESKDIGNAFGVVVILVMLITTILLTLVMLIIWGTHVVLVALYLVPFLLLEATYVSAVCTKILRGGWVPFAVSVALAAVMFGWYYGRQRKTEYEAANKVTLERLGELLSGPGLRRVPGLCFFYSNRQDGGWLTPVLAHYIRNMRSLHEVTVFLTLRYLLVAKVDGKDRVQAVRRLGPAGVYGCTIQYGYADAIDFEEDDISGQVVGALRERVVDGEEEGERVEAARAAGVVHVRGKMRFHVGKDTRLFDRVLLGFYELLHGACRSALPALGIPLQQRVEIGMLYKA

SEQ ID NO: 106279 - protein, 360 aa, Oryza sativa
  unsure (1)..(360): unsure at all Xaa locations
  Clone ID: PAT_MRT4530_10738C.1.pep
NKRRIIIPISVGFARRIYNSVSGAFAIRGYNVESLIVVLKNDKTLFTIVVXGNEKIHKMVVEQLNKQXKFKQVXDLSKEPXIEIELMRLKLNXYIYRAKVVDLSDHTLTIEVTGDPGKIVAVQRNLSKFGIKEIARTGKIALRREKMGESAPFWRFSAASYPDLEVAMPSKSHVNTAMKTANQNSEESSQGDVYPVESYENFTTNQILDAHWGVMADGDSLAVGPAEKEGTSRITTVVPGTDESIAKLVHQLYKLIDVYEVQDLTHLPFAARELMIIKIAVNTTARRAILDIADIFRAKTVDVSDHTVTLQLTGDLDKMVALQRMLEPYGICEVARTGRVALRRESGVDSKYLRGFSLPL

SEQ ID NO: 106280 - protein, 205 aa, Oryza sativa
  unsure (1)..(205): unsure at all Xaa locations
  Clone ID: PAT_MRT4530_10739C.1.pep
SFKLNVEPDKRPEVMGLVDIFRAKVVDLSDHTLTIEVTGDPGKIVAVQRNLSKFGIKEIARTGKIALRREKMGESAPFWRFSAASYPDLEVAMPSKSHVNTGMKTANQNSEESSQGDVYPVESYENFTTNQILDAHWGVMADGDPTGLCSHSLSILVNDFPGVLNVVTGVFSRRGYNIQKSAVGPAEKEGTSRITTCXPGTDESI

SEQ ID NO: 106281 - protein, 93 aa, Oryza sativa
  unsure (1)..(93): unsure at all Xaa locations
  Clone ID: PAT_MRT4530_1073C.1.pep
SSFALAXLPWSAXASXCSCVFLCVSSRSFFAFSASSXPLSFSVXXGGVAGFLFGLCGSCSPXXXXXXGXKLRKGSPRGERLEQNSELAYVCIK

SEQ ID NO: 106282 - protein, 64 aa, Oryza sativa
  Clone ID: PAT_MRT4530_10740C.1.pep
EKFFSVLNMTWGLGADIDIESEKYRWMGSARFDFYALVRIMNLRKYYGSIQYVPAPRYEAYGDV

SEQ ID NO: 106283 - protein, 101 aa, Oryza sativa
  Clone ID: PAT_MRT4530_10741C.1.pep
GELGTGPPLEFFFFFFALGLNCNLQLISHYIPSLLHMHGRSLYFSLKQQPCIYFFALLNKLVNWQNLTKLLEQGKIKEKVRITPQQPRQYELPIRTSKPDI

SEQ ID NO: 106284 - protein, 114 aa, Oryza sativa
  unsure (1)..(114): unsure at all Xaa locations
  Clone ID: PAT_MRT4530_10742C.1.pep
SRWHQHRLLHLLYHLRLQANWSIPDCQQQPIQQPPPRQQVVQPIQQTPPRQQVVQPVQQTPPIQRVVQPIQQTPLRXQVVQPIQQQGSMNASAGFATPGGQPVQHAQGTPQQRP

SEQ ID NO: 106285 - protein, 97 aa, Oryza sativa
  unsure (1)..(97): unsure at all Xaa locations
  Clone ID: PAT_MRT4530_10743C.1.pep
VYAARVAGSSSLPQPLLSAAFKRCATDTFRVGGPCGYGVCYLYLRRSGXDGWTPQWVRVYEPPSDTPSPFYYGDPLPNAVWXGFNRCPRLAASAGGQ

SEQ ID NO: 106286 - protein, 115 aa, Oryza sativa
  Clone ID: PAT_MRT4530_10744C.1.pep
ACHLSVSSDHLRRQELYNYWIPRAARNTARRPAALCRLLALDSLPRPAPISASPPPPRPAAASAALRTDAKMLPLHGIATATDGVVNRSLPACLGYHHKGKTHSMSNLNFQLPRP

SEQ ID NO: 106287 - protein, 89 aa, Oryza sativa
  unsure (1)..(89): unsure at all Xaa locations
  Clone ID: PAT_MRT4530_10745C.1.pep
KRIQNGGTEVGEAKAGTSLXTLAMAFAATKFGDACLRTMRGDAGVGEWSYGAFAVTELAVLATKGKVRRAXTQEGLPFGPLNDFDKTCL

SEQ ID NO: 106288 - protein, 156 aa, Oryza sativa
  Clone ID: PAT_MRT4530_10746C.1.pep
MGFVELLRSSSSSSNGYGWIGAQQPSTSSPILAVCWLIVVVVVEARVRRRLLLSFGDVQARGGAAYRSANPSRWLRRRPTGMRPAGSDRTGSGFVAGARGAVVAEHGGRGAGGESKSPPSSSMAANMAPAPSAAAVAWGAALLLPRRRRRQPACPD

SEQ ID NO: 106289 - protein, 69 aa, Oryza sativa
  unsure (1)..(69): unsure at all Xaa locations
  Clone ID: PAT_MRT4530_10747C.1.pep
MRITNGLAMVSLVLSSCDLLRLCSDRERXLGXREFATVVYLVSLFAXPDGPATTXGDDDDGQGASAGGP

SEQ ID NO: 106290 - protein, 35 aa, Oryza sativa
  unsure (1)..(35): unsure at all Xaa locations
  Clone ID: PAT_MRT4530_10748C.1.pep
XVYGATTDSTHRDAHIKDIHFRPSTASQKVISLIT

SEQ ID NO: 106291 - protein, 131 aa, Oryza sativa
  unsure (1)..(131): unsure at all Xaa locations
  Clone ID: PAT_MRT4530_10749C.1.pep
VSISPNRXLVKYVASPALRKLWMNENHGVALDFKGLARGXNRTTSFHGENRTLHALLLHFLSIIMSSVLLSAHGGDNIGQGNNRRHSGLDRQSGGGVVVALLWSPARGTCLFLVPVSKGKRRCSRWMMMEG

SEQ ID NO: 106292 - protein, 251 aa, Oryza sativa
  Clone ID: PAT_MRT4530_1074C.1.pep
RHEARAPHSPLPAMAAVGVVLPAGAARRGRRLPPTSPRRRVPPTPYGRVYLPPRRTSAPGSAAAAEDGGATAAPEDAAAAAAVAEAVEGDPEAGTDVAGGAATSTRPPYSLISADNVQKAMRGLAITECDHYGRLGITRSASTDEVKAAYEKKCEDPDGKGLEEEEINKEHDLLKESFTILWTEEERRLYDWSLARSGKPERYVWPFEVDPMELAPDPPKEPEDEFPTKLVGYFFLAWFILSVALSVTLNR

SEQ ID NO: 106293 - protein, 60 aa, Oryza sativa
  Clone ID: PAT_MRT4530_10750C.1.pep
MLELYFPLARAQKAENPRDELRNARTLFSFELKKRKIRVTRNARTRFPFELKKRKIRVTR

SEQ ID NO: 106294 - protein, 120 aa, Oryza sativa
  Clone ID: PAT_MRT4530_10751C.1.pep
MGKRWIPLEANPDVMNQFMWGLGVAEGEAQFCDVYGLDDELLAMVPQPVLAVLFLYPLTSLDDDEEESGAAATSTAGDKDLSKRVYFTKQTVGNACGTVGVIHAIGNAASKLKLVEGSYF

SEQ ID NO: 106295 - protein, 293 aa, Oryza sativa
  Clone ID: PAT_MRT4530_10752C.1.pep
MGKRWIPLEANPDVMNQFMWGLGVAEGEAQFCDVYGLDDELLAMVPQPVLAVLFLYPLTSLVFVDLRGVERVMNAASWGDQDDDEEESGAAATSTAGDKDCTITVLEILLVESTIVEFAELDVLVLRLHQCAFSLLLTIQNTWDLSKRVYFTKQTVGNACGTVGVIHAIGNAASKLKLVEGSYFDRFYKQTVDMDPVQRAAFLEEDDEMEDAHSVAASAGDTDANVEVNEHFVCFSCVDGELYELDGRKSQPICHGPSSPDTLLQDAAKVIKARIASNPDSMNFNVMALSKVV

SEQ ID NO: 106296 - protein, 60 aa, Oryza sativa
  Clone ID: PAT_MRT4530_10753C.1.pep
LFRVVIFLQLSPYSFFIPSSNMAHFKPNCKTSRYRSRISGLTPGSDFSDYSLRTFFYSIQ

SEQ ID NO: 106297 - protein, 223 aa, Oryza sativa
  unsure (1)..(223): unsure at all Xaa locations
  Clone ID: PAT_MRT4530_10754C.1.pep
MPSPYTRSQLSEKLRRLKNKFRGMSARVARGLDPARLAPHDRDVLHLCSRLWDPXNAATSPFAAAGDASSGNKRRRAAPRAGPLMPPDPSGDSNSHDYNGGXGHFGYHGDVAIAADGSLDGIVKVQPETLPALPSIGDIAVHSENGNGKAVVPRSNEHHMANAVLDIFEECLREVKANGITYGANVNGGSELARRWRAQRIDELDVLSRRLRLLVEDAATAGR

SEQ ID NO: 106298 - protein, 375 aa, Oryza sativa
  Clone ID: PAT_MRT4530_10755C.1.pep
MASDQTLPVPVSVELPPAAPNPPDPTAPLLPHADDPSAPPAAAAAARKLPVKRRSPPPRPSSPSSSDPASSDPAAKQQPQQPPPPFKFQRIWSESDELRFLQGLLGCGAQGLVFPRDLNVFYDRFSESMPSPYTRSQLSEKLRRLKNKFRGMSARVARGLDPARLAPHDRDVLHLCSRLWDPANAATSPFAAAGDASSGNKRRRAAPRAGPLMPPDPSGDSNSHDYNGGISAGAPGAFGDGHGGEEMMYLEQESGHFGYHGDVAIAADGSLDGIVKVQPETLPALPSIGDIAVHSENGNGKAVVPRSNEHHMANAVLDIFEECLREVKANGITYGANVNGGSELARRWRAQRIDELDVLSRRLRLLVEDAAAAGR

SEQ ID NO: 106299 - protein, 82 aa, Oryza sativa
  unsure (1)..(82): unsure at all Xaa locations
  Clone ID: PAT_MRT4530_10756C.1.pep
MLAADXXXSWVWSQIKAEARRXDAXAXPGLASFLYATVLSXMCLPRSISFHLANKLCSSXXLXXSSTRPGFLHATRALPPTS

SEQ ID NO: 106300 - protein, 134 aa, Oryza sativa
  Clone ID: PAT_MRT4530_10757C.1.pep
VLLSQQQSQQVIVMCPGCIIAAHRDHSDDITIRRQHHRRSLQVVLSIHQDPAPLKPLWCTRYGEATGSLAISSAQQQHGATACEGEGSPGKHIMALCSQSIASHAASENVKAHLPSVGVIPRTARRNMRERQAE

SEQ ID NO: 106301 - protein, 76 aa, Oryza sativa
  Clone ID: PAT_MRT4530_10758C.1.pep
MLPQLFLPGAGNWDTYGSSNFEGKVADCTHSGIADRVALERVLVLGEQPMNLCSICKLHTSFLKGSRLHLVLVALI

SEQ ID NO: 106302 - protein, 146 aa, Oryza sativa
  unsure (1)..(146): unsure at all Xaa locations
  Clone ID: PAT_MRT4530_10759C.1.pep
MAILSRSSCRTLARSPKYLFLPPCNANFLQMVXFFLCKLCKFVVFSILSQPDSKLNPGKSSVLDSVVGMDFLLSDSGMFVGADGKTRYMVLMEKIVWSHLMGNIFHVLCRSMLLEKSQLISVRLFPEPGWLDKELPLLASLVLRIS

SEQ ID NO: 106303 - protein, 99 aa, Oryza sativa
  Clone ID: PAT_MRT4530_1075C.1.pep
VKAASLKGNVLRYVCKIESTGCQVGLEELPKNSALGRLRGSDNVVKTKEPTSVSRVEIYSRCYESAPLVIQGAGAGNDTTAAGVLADILDLQDLFHKTA

SEQ ID NO: 106304 - protein, 66 aa, Oryza sativa
  Clone ID: PAT_MRT4530_10760C.1.pep
MASTGDGAPGAGGNGGAPGDNTNGGNSASQSSGGTFTGGTGTFPTGRVRTVAAAAKHPSSEEDAHA

SEQ ID NO: 106305 - protein, 43 aa, Oryza sativa
  Clone ID: PAT_MRT4530_10761C.1.pep
AFHHIYLHVPDRFACFYRCPMRLSRGQSPLASIRRSHPFCSSM

SEQ ID NO: 106306 - protein, 42 aa, Oryza sativa
  unsure (1)..(42): unsure at all Xaa locations
  Clone ID: PAT_MRT4530_10762C.1.pep
XNYIPFCLENKRDTVTIFIKPIYALAXGKGGLQLGKKSNYSV

SEQ ID NO: 106307 - protein, 119 aa, Oryza sativa
  unsure (1)..(119): unsure at all Xaa locations
  Clone ID: PAT_MRT4530_10763C.1.pep
MVGCEHMVLRVVLMTIKDRFTSFCCETLTVPTTSQRGQRLYLLYSMVHCGAPIXEVAEISPRESLGSPCLVYKRVIMIQERCPVVDCVVRGVLSQLLSEVPGRGPKNLIATFSRCRTSK

SEQ ID NO: 106308 - protein, 88 aa, Oryza sativa
  Clone ID: PAT_MRT4530_10764C.1.pep
ERCNHTEDCRKMFIMGPPSLTSFSPAHHFNSPQCNHTSIKWCQIKIWLTPKMQHHKLWWSCAMEILITLSFTTWTIIFTPHQFTNVET

SEQ ID NO: 106309 - protein, 87 aa, Oryza sativa
  unsure (1)..(87): unsure at all Xaa locations
  Clone ID: PAT_MRT4530_10765C.1.pep
MVGCEHMVLMVVLMTIKDRFTIFGCETLTVPTTSQRGQRLYLLYSVVHCGAPDXEVAEISPRGSLGSPCLVXYKRVIMIQERCTAFN

SEQ ID NO: 106310 - protein, 87 aa, Oryza sativa
  Clone ID: PAT_MRT4530_10766C.1.pep
YGFLERRGWVVTQGPGHVSSHAQLMTSRLLRHSSLQDQQWRMHLSPSTHEISQDYPGLSAKAYHTRVHITIQVGQRAVRAPDTPIIR

SEQ ID NO: 106311 - protein, 58 aa, Oryza sativa
  Clone ID: PAT_MRT4530_10767C.1.pep
KGDSSSRKREYASSFIIHILQVLSSDEQLARQWLSIDLAYYFIIRQLILQDLLRGSVP

SEQ ID NO: 106312 - protein, 235 aa, Oryza sativa
  Clone ID: PAT_MRT4530_10768C.1.pep
SPPYKQGMDSPATPVDFSPLLSLAHYNESRYTKDKAVAHAGLWLARAHPNSITPTLAWMRRLEESYATSPAVAHAGLWADVSTEGGAAPTSGAHRSATREKEEGAPARGPTGQRLGRKRGGDTRLGLAQGRPTGRGDGNGARANGLPATATGGEGDGAKGDAKAAALAAARKGRERAAIKAAAGSARHKADRPVMATTRAHARALPTTATDGGDGGAKAAPKGGDAKATTNGRRR

SEQ ID NO: 106313 - protein, 81 aa, Oryza sativa
  Clone ID: PAT_MRT4530_10769C.1.pep
FDSLAKSKAGTTGSADTARIAEGLKSLCASMDLAVFFTFMVARRKEVDALRAELPDALKHCVNPARFTMVDKQAVRCPTVP

SEQ ID NO: 106314 - protein, 117 aa, Oryza sativa
  unsure (1)..(117): unsure at all Xaa locations
  Clone ID: PAT_MRT4530_1076C.1.pep
HASGSVLPVVLLGCGGVGRHLLRDMVCCRPLHANQGVAIRVLGVADSSSLLVADDHHSNGFDDALLADLCAAKSAGSPLSSLLARGQCQLFNNTEARRKVXPLXXVLGKTTGLVLVD

SEQ ID NO: 106315 - protein, 111 aa, Oryza sativa
  unsure (1)..(111): unsure at all Xaa locations
  Clone ID: PAT_MRT4530_10770C.1.pep
MVGCEHMVLRVVLMTIKDRFASYYCETLIVPTTSQRGQRLYLLYSMVHCRAPDXEVAEISPRGSLGSPCLXVFEGVIMIQERCTVVGCVMRGVMSQLLSEVPCHSVRPEAA

SEQ ID NO: 106316 - protein, 105 aa, Oryza sativa
  unsure (1)..(105): unsure at all Xaa locations
  Clone ID: PAT_MRT4530_10771C.1.pep
MVGCEHMVLRVVLMTIKDRFASYCCETLTVPTTSQRGQRLYLLYSMIHCGAPDXEVAEISPRGSLGSPCLVXYKGVIMIQERCAVVDCVVQGVLSQLLSEVPWWY

SEQ ID NO: 106317 - protein, 415 aa, Oryza sativa
  Clone ID: PAT_MRT4530_10772C.1.pep
MAAAVAGGGEEGEELLLLSAVEAGSFGGGGDGGGAGAAAEKSWRLNFDGFRPPEVQQERRPPRGLHHHCLGVLSQGPEDVVAEYYQQQVEMLEGFNEMDTLTDRGFLPGMSKEEREKVARSETLAIRLSNIANMVLFAAKVYASVRSGSLAIIASTLDSLLDLLSGFILWFTAFSMQTPNPYRYPIGKKRMQPLGILVFASVMATLGLQIILESVRSLLSDGDEFSLTKEQEKWVVDIMLAVTLVKLALVLYCRTFTNEIVKAYAQDHFFDVITNMIGLVAALLATYIEGWIDPVGAIILAIYTIRTWSMTVLENVHSLVGQSASPEYLQKLTYLCWNHHKAVRHIDTVRAYTFGSHYFVEVDIVLPSSMPLQEAHDIGEALQEKLERLPEIERAFVHLDYEFTHRPEHALSHEK

SEQ ID NO: 106318 - protein, 259 aa, Oryza sativa
  unsure (1)..(259): unsure at all Xaa locations
  Clone ID: PAT_MRT4530_10773C.1.pep
MDSPATPVGLSLPLLSLVLRNEPCYTKAAHGNERPRSIXPKRTAKIDRIHRGSRMDDDDDVSDDVTTGGGSGVHARRRTTARRHERRAPARRERRGELTGDQRRSGGDLRRRRRGRSGGGLRRRRRGERGRRXLGDHDGGLPERRRRLEWRRRTAGRTAATAALGYTALGLYRRREAKARVATGARRRRRRPTATGDVKEQLGFGGERSIRIELESTDFQTELAIDSKRKKVEKIPKIISPLLISSETERGSGPHLSAG

SEQ ID NO: 106319 - protein, 269 aa, Oryza sativa
  Clone ID: PAT_MRT4530_10774C.1.pep
MAAWFKLGGSAVRAMGALRGSPPAMGIGETDVGVQASVFTGGWLLGSSISSWQTLKVAEQQIDALAREQEEYLNKFEAKWVEELNRLKLEMMNELEESEERLNREIDVLKMMARIAMEEKEMRMAMEEEAASPGPLQGESGDLDNCNCSGCYNIKYYEDAIEEISDMIQMKNPNAFDPRIIVSVQDATAADPQSSTSAISDPKNTSDAMPGNEQRKHAKGCSCRKSKCSKLYCECFKIRSVRSIRLEALKNLILLFTRVNGFVLPVFFI

SEQ ID NO: 106320 - protein, 111 aa, Oryza sativa
  unsure (1)..(111): unsure at all Xaa locations
  Clone ID: PAT_MRT4530_10775C.1.pep
MVGCEHMVLMVVLMTIKDRFTSFGCETLTVPTTSQRGQRLYLLYSMVHCGAPDXEVAEISPRGSLGSPCLVYKGVIMIQEWCAVVDCVVRGVLSQLLSEVPPEREGVRIPV

SEQ ID NO: 106321 - protein, 54 aa, Oryza sativa
  Clone ID: PAT_MRT4530_10776C.1.pep
HLYLFPNTYLVFYQCRILLKWSIMAQDFKKKKDDRSTALKHPSACDGAARARQT

SEQ ID NO: 106322 - protein, 111 aa, Oryza sativa
  Clone ID: PAT_MRT4530_10777C.1.pep
ETGGSFWWTWNNGPAFLFGGAHIFKPALDNPKGKGCTGKFRNFGGKTGEEKEMFFHRNGGKLPKNLIQIIPKGKNLCSNLIGRMGKWDPSITGGGAKGWDFAIKRSPVKTN

SEQ ID NO: 106323 - protein, 139 aa, Oryza sativa
  Clone ID: PAT_MRT4530_10778C.1.pep
KTTKSNQLTHTLWISFLPHSACCATHRGRCPQWPTIHRRRRRCSPGRPPSPTNHSFNHCRAPADESPPPTMQRRLRIEAAARSRRRFAAATADAAPPLHPEKSRPLSPTNHHRHRSSAADAGRSRRIAKGSRFGPPSLA

SEQ ID NO: 106324 - protein, 302 aa, Oryza sativa
  Clone ID: PAT_MRT4530_10779C.1.pep
MPPLNPRVVGCGERTLVLSHGYGGSQAIWDRVLPHLAETNKVVLFDWDFSGGGGDGEKAAAEEEEEYTFEGFADELVALMEEMGVSGAVYVGHSMAGMIGCIASINRPGLFTHLVLVGASPRYINSDDYEGGFDEPEIDAMLATISSDFLSWAKGFVPLIVGAAADNPSAAETLARTFFAMDPRVADALARMIFLGDNRGVLGRVAAPCTLVHASGDPAAPPCVGRYMEGRIGRAALVTVDSAGHFPQLVAPDEMLRILDAVLAEEEEAAAKGGGVAIVMEERGSLAAVGEVEVKGDIDVAT

SEQ ID NO: 106325 - protein, 1443 aa, Oryza sativa
  Clone ID: PAT_MRT4530_1077C.1.pep
MASLRREGSMWRSGGDVFSRSSSRFQDEDDDEEALRWAALERLPTYDRVRRGILAVSSEDGGAGGEKVEVDVGRLGARESRALIERLVRAADDDHERFLLKLRERMDRVGIDYPTIEVRFENLEVEADVHVGNRGLPTLLNSVTNTVEAIGNALHILPNKKQPMTVLHDVSGIIKPRRMTLLLGPPGSGKTTLLLALAGKLDKDLKVSGKVTYNGHGMHEFVPERTAAYISQHDLHIGEMTVRETLAFSARCQGVGTRYEMLTELARREKAANIKPDHDIDIYMKASAMGGQESSVVTDYILKILGLDICADTVVGNEMLRGISGGQRKRVTTGEMLVGPARALFMDEISTGLDSSTTYQIVNSLRQTIHILGGTAVISLLQPAPETYNLFDDIILLSDGQVVYQGPREHVLEFFEFMGFRCPARKGVADFLQEVTSRKDQGQYWCRRDRPYRFVPVKQFADAFRSFHVGRSIQNELSEPFDRTRSHPAALATSKYGVSRKELLKATIDRELLLMKRNAFMYIFKAVNLTLMALIVMTTFFRTSMRHDRDYGMIYLGALYFALDTVMFNGFAELAMTVMKLPVFFKQRDLLFFPAWAYTIPSWILQIPITFLEVGVYVFITYYVIGFDPSVSRFFKQYLLLLALNQMSSALFRFIAGIGRDMVVSHTFGPLSLLAFAALGGFILARPDVKKWWIWGYWISPLSYAQNAISTNEFLGHSWSQILPGENVTLGVSVLKSRGIFTEAKWYWIGLGALLGYTLLFNLLYTVALSVLSPFTDSHASMSEDALKEKHANLTGEVVEGQKDTKSRKQELELSHIADQNSGINSADSSASRKGMVLPFAPLSISFNDVRYSVDMPEAMKAQGITEDRLLLLKGVSGSFRPGVLTALMGVSGAGKTTLMDVLAGRKTGGYIEGDIRISGYPKKQETFARISGYCEQNDIHSPHVTVYESLVFSAWLRLPSEVDSEARKMFIEEVMDLVELTSLRGALVGLPGVSGLSTEQRKRLTIAVELVANPSIIFMDEPTSGLDARAAAIVMRTVRNTVNTGRTVVCTIHQPSIDIFEAFDELFLMKRGGEEIYVGPVGQNSSKLIEYFEGIDGVSRIKDGYNPATWMLEVTSSAQEEMLGVDFSEIYRQSELYQRNKELIEELSTPPPGSTDLNFPTQYSRSFITQCLACLWKQNWSYWRNPSYTAVRLLFTIVIALMFGTMFWNLGTRTKKQQDLFNAMGSMYAAVLYIGVQNSGSVQPVVVVERTVFYRERAAGMYSAFPYAFGQVAIELPYIMVQTLIYGVLVYSMIGFEWTVAKFLWYLFFMYFTLLYFTFYGMMAVGLTPNESIAAIISSAFYNVWNLFSGYLIPRPKIPVWWRWYCWICPVAWTLYGLVASQFGDIQHVLEGDTRTVAQFVTDYFGFHHNFLWVVAVVHVVFAVTFAFLFSFAIMKFNFQRR

SEQ ID NO: 106326 - protein, 30 aa, Oryza sativa
  Clone ID: PAT_MRT4530_10780C.1.pep
LLRVGASARLFYLTEFGRQGCVYFVATDPS

SEQ ID NO: 106327 - protein, 148 aa, Oryza sativa
  Clone ID: PAT_MRT4530_10781C.1.pep
MGHVESDSSGLDSIILNYNIISMTYLLHVNGLDSLLKLYIYFLRVELQEGTDDTVTWRWSSNGTYSANSAYKIQFVGSIQDNRSDFFWKAKTENKCKFFGWLMIHRKILTADKLLLRGWDNSRICPLCGVEPETATHLLMDCTFTKQV

SEQ ID NO: 106328 - protein, 286 aa, Oryza sativa
  unsure (1)..(286): unsure at all Xaa locations
  Clone ID: PAT_MRT4530_10782C.1.pep
GKRDLLRQRXLGFAVDRAHGGGSRERTAEIDXSKTDGRDRLVHDRLTADGPDDVSGDVTTGGGLGLQTRRRTTARRRERRAPGRRAXRGELTDDQNDGGRATDGDGVEEKAAAXSDGEGADEDGDVTTTTTAXSRATATHGWSGGDXGGARLHGXARALPTARDEGEGGDGGXKAAAKAHGDRRREGKXIRVRERETNPIRDRIREFPKRFRRCFQKGKGRVDHRDPFPSINFTGNGKGRRAPPVSGERARGRAAAGRLGPGXEREKVFGRLSAQSQKRLLKHFPI

SEQ ID NO: 106329 - protein, 86 aa, Oryza sativa
  unsure (1)..(86): unsure at all Xaa locations
  Clone ID: PAT_MRT4530_10783C.1.pep
SDWGVTSSGRHHANPGEGGPDPAIGAPDPPPPPHLAAVAATDHAGGELRHLRPLRXGGRRHEEKKASPPPSLPAAGFAAGGLHRRP

SEQ ID NO: 106330 - protein, 384 aa, Oryza sativa
  Clone ID: PAT_MRT4530_10784C.1.pep
MALALRPPRFQPLPAPIPASTASTTALAARPSSSAHAIICAAAASPFTEATSSSRYRRDAWSYAASDGDSSSSSAAAAAAAASSGRRDDEIALQLPELRRLLEALRASRGRGAEGEGGGGGPGRVALVGTGPGDPELLTLKAVRAIEAADLVLYDRLVSNDVLDLVGEGARLLYVGKTAGYHSRTQEEIHELLLSFAEAGANVVRLKGGDPLVFGRGGEEMDFLQQQGIRVEVIPGITSASGIAAELGIPLTHRGVATSVRFLTGHSRNGGPDPLYVAENAADPDTTLVVYMGLSTLPSLAPKLMKHGLPPDTPAVAVERGTTPQQRMVFAMLKDFVNEVKSEDLVSPTLIIIGKVVALSPFWIDSSKQGAQSIENLYAAETKR

SEQ ID NO: 106331 - protein, 948 aa, Oryza sativa
  Clone ID: PAT_MRT4530_10785C.1.pep
MSDADGFGCEHRRPSKRRRDGPDHALLPVSREVLMGHPDDPAAAAAAVGAESSSASSYLGVVAAAASASASAAGGFSCGAHFFVRATDSRTVSMHAAWGDTVGAVLAHLADRGYGRDLRLVYAGRQLAPETALADLRLPPDSTLHLLSRLRSTPYPDAWQLASYIASTAAAAKSDPAHTSSAANINELVKEFILCAHRANMRQRHDRDSPLFDAQPTGDHAAQYLEIFRQAGAPFALVRLYAANPSSASHHHAENAIKCFLTMDPSALPPDVLPVMAPVLLEFCGLLSFSVGKRDELYISSRSMLATVLSLPSGLPPCIKSPSKLIEQVLPFAEEIVGVVMDELASLDMTVSSKNLEDLSNFFKVLRQQALRWVPNGGPLPKNLYNSERGHNDTWVWKLHEMSMNLLNRVDECLKRLEMDLSLSSENRGVNISQSRWVARSHMLVMLTQLDFISMIYEDLAHNLRLVLLAHRDPLNALVRCSKRNEHLHWLVKHKDLLCFESRRNLVLMMLPEGKDEYGELHEMLIDRQHLLDESFEYIIQARPSELRSGLFMEFKNEEATGPGVLREWFCMVCQALFSPQQVLFSPCPSDRQRFFLNGTSAVDPLHLKYFIFSGRIIGLALMHRVQVGITLDRTLFLHLAGRSIKLEDISAADPVMYASCKRILEMDAAVVDGLELTFSRDVHELGSRRTIELCSGGKDLHVNIRNRELYIDLLIKSTFVDSISVQLTHFVRGFSDILVDPELQKVFFEFLDLEDFDGMLGGSNKTINLEDWKLHTQYNGYKEKDRQIIWFWKAVESLSIEQQRQLLFFWTSVKYLPSDGFGGLASKLYIYKVSESADRLPSSHTCFYRLCLPAYPSLKVTRNQLQKITQEHASIFHILSGEVWWEHLHRAMLTSSGSQLRLKPCHKVPAGSRNFLGISQKPVSQQLTSDMDHTLPEHMDSNDVFGI

SEQ ID NO: 106332 - protein, 130 aa, Oryza sativa
  Clone ID: PAT_MRT4530_10786C.1.pep
DTGGRPTVVRNTAVTHNRSRDGRHREALSLAWEMERHAGGLLDLPAYRVLVNLCVAMRDHERGVRYLARMKDAGFVPTGDMYGGLNGGYAAEGRMGRCRRLIRETELAGVKLERRLLSRLYEMGVEQYQL

SEQ ID NO: 106333 - protein, 97 aa, Oryza sativa
  Clone ID: PAT_MRT4530_10787C.1.pep
LQAPKLTFKKPIGSICISGHKFIGCPIPCGVLITRLMDINHVMSTNIEYISSNDTTIAGSRNGHAPIFLWYALKRIGYNGLCKTVENCLKNAQYLAL

SEQ ID NO: 106334 - protein, 167 aa, Oryza sativa
  Clone ID: PAT_MRT4530_10788C.1.pep
MVLIEDHHEGDILTVLLLLISTRDHEYRWVSLGTLKRTHRPPSWPRPPSAPPAPAMVVRDGRERPLVTPPKSHGERIPGLRAWEGDGRLRWTPRAGAGRWPSDGGRCVGTQSSAGGCRCRGRQASAGERRAATDTVGGHLASAAKAADARGFPPSRPAPASRVSSSP

SEQ ID NO: 106335 - protein, 577 aa, Oryza sativa
  Clone ID: PAT_MRT4530_10789C.1.pep
MDGQRRVVHSCPERTVPVRRTTRRDVLRSSSAIRFGMKQPCAAGIVRRDSTSDGHELMDPVYLVLRFRGRDKLRDLRCTFSFLLLENPQISLAIHATTQTDLPPSLGQRPAPARGVHLRRPSPSQALKPGIRSPCDLGGVTRGRSLPSRTTIAGAGGAEGGRGQDGGRKIQFFSLDQLERLLSWQRNNLVTTRPRKVMRIVINSWSRFMPHYIPDDVMFNILSWLPSKSLIRFKSVCKAWHAMISSPCFTDAHLECSKRNPSILMVPGAYEKQEDGENIAFMMVLYKYHGGKTMELVHMQNFPLGIGVWTRPVHCNGLLLIPTMNLEMMICNPSTRQIVFLPKVSGNICTGTRAGFGFDPHSNKYKVARSFYQRDSETQELVCKFEVLTLGTNAWRQTEDPPYPIDALTPVHVKGAIYWIVCSSLCPDPPNAFLRFCLTDEKFSLFPCPPSNVKSVRFTEVEGELCCACFFSETLALEIWNCSGGQNLEWTRRYVIQIPPDVVMKYPVERPPLIVFREKMLLLAFKKVYRYDIETCRIVELASKVSDFTCYEPYLEKEARDLHLFNYAESLVPIREF

SEQ ID NO: 106336 - protein, 60 aa, Oryza sativa
  unsure (1)..(60): unsure at all Xaa locations
  Clone ID: PAT_MRT4530_1078C.1.pep
LNPMSCNKSYCRNRLTLSDSHSANPDRGRFGLXPILALFSERSPSWIPLRFYLHLRYLNY

SEQ ID NO: 106337 - protein, 50 aa, Oryza sativa
  Clone ID: PAT_MRT4530_10790C.1.pep
LPQQQQSPGSRRLRMERANGVKRRGSRSHDAWAVCRIQPPYVSWSFNDVY

SEQ ID NO: 106338 - protein, 77 aa, Oryza sativa
  Clone ID: PAT_MRT4530_10791C.1.pep
VGFPVDHACAHAYDSLLSFPAGTQRRPANHSSPAKGAAARAQEDAQGLPLMLTTPLPIKIVQLLSIPLLSTILYVTK

SEQ ID NO: 106339 - protein, 42 aa, Oryza sativa
  Clone ID: PAT_MRT4530_10792C.1.pep
AVAFDQGELSQCGCSRGHGVKHVLFGDAHFPQILGSVGFISL

SEQ ID NO: 106340 - protein, 53 aa, Oryza sativa
  Clone ID: PAT_MRT4530_10793C.1.pep
SPNSLVVSPLAGIWVKLECFSLLTHLLAMGASPGCQVPPSTHSLPLAESWNQF

SEQ ID NO: 106341 - protein, 78 aa, Oryza sativa
  unsure (1)..(78): unsure at all Xaa locations
  Clone ID: PAT_MRT4530_10794C.1.pep
GRXXQSCFALFCLFASSYQMSLWKHPAAAETXRWWRRWSSCSXAXGGWCLXRWARPXXRRASRGXGRRSXRSGRGSRR

SEQ ID NO: 106342 - protein, 210 aa, Oryza sativa
  Clone ID: PAT_MRT4530_10795C.1.pep
MRAINAGCWIVRRVYGWCVADAGLQRSGKSCRLRWVNYLHPGLKRGRMSPEEERMVVQLHAKLGNRWSRIAKSIPGRTDNEIKNYWRTHLRKLKLKQQKQQQSDDHHNDNDDDDDRNSSSSSSSSNSNSNLQQQPQPEDESSASGSLQAQHHEDQHQLFLHPLWNDDIIVDVDCWSSSTNVVAPPPMPASPLWDIDDAFFCSDYSLPLWG

SEQ ID NO: 106343 - protein, 87 aa, Oryza sativa
  Clone ID: PAT_MRT4530_10796C.1.pep
PKVGEQAHPEDKESLTSAVDKTVSWIDENQTAAKDEYESHRRNSKASQNPIMMKIYGGEGGAPGAGGPAPGAAGAGGDDGPTVEEVD

SEQ ID NO: 106344 - protein, 102 aa, Oryza sativa
  Clone ID: PAT_MRT4530_10797C.1.pep
THNISLVYRDLSTIRHKLSKCGSPMFCVYQLVYPGTGTGCTGTVLWPPDPQGSGAPHRVIHVSRKSYVEEELRLLRRPLCLLLCPLGVDLCVILSIHKSLAN

SEQ ID NO: 106345 - protein, 80 aa, Oryza sativa
  Clone ID: PAT_MRT4530_10798C.1.pep
WPFSVGRRLVLFPVVVFSLLRGLCAPLSPPSVFLPPLAFGRPPVVRPPPRCCGGVAASSSRAPLGPGAPCCWRKRCTVAA

SEQ ID NO: 106346 - protein, 104 aa, Oryza sativa
  Clone ID: PAT_MRT4530_10799C.1.pep
MAPINNGIASAIPSATLAALDLNDYNCVMDVNARSLVTLDLDDRVIALDLNISSSTRTMEVVGGFGPSAYSTSKAAIVGMPAPPPGRSIPPVACSGHIQGRDRG

SEQ ID NO: 106347 - protein, 120 aa, Oryza sativa
  Clone ID: PAT_MRT4530_1079C.1.pep
MAAVPWVAAAVRRSMQEAAAGAGAVSYAQAQQGSPAAPGPRSTARSVETLVVIVAAIVLVAVLAGVVARACGGRHVAPSGDRDVEGWVERRCRSCLDSGLPPPPATAQQPQGSSKASDAK

SEQ ID NO: 106348 - protein, 529 aa, Oryza sativa
  Clone ID: PAT_MRT4530_107C.1.pep
MAAVLPLLAAALLVLFSGLHPAASTAAAGGEAATVVVKAAAAVSRTDDNFVCATLDWWPRDKCNYGMCPWYNASIINLDVNNTILNNAVKAFNSLRIRLGGSLQDQVTYKVGSNYGDCRSFQRDDGGLFGFTDGCLEMNRWDELNVFFKRTNTTVTFGLNALKGRRKAAGGKDTLYSGDWDARNALDLMRYTAGKGYRVESWELGNELSGSGVAARVAAAQYGRDVAVLRKAVERVYGGGGEVPKVLAPGGFYDGAWFSEMLRVSGRGAVDGVTHHIYNLGSGKDRDLARKMQDPGYLDQVEKTFRDMAATVRGSGPWSSPWVGESGGAYNSGGKGVSDRYVNGFWYLDQLGMSAAHGTRVYCRQALVGGNYCLLNTTTFVPNPDYYGALLWHRLMGPVVLKAATTAGGGGSPYLRSYAHCSREKPGVTVLLINLSNATAFDVSVAGGALGAAPCGGRREEYHLSPLGGDIRSQVVLLNGEALALGPGGEIPELRPAVVGDGCAAPLRVAARGIAFVRFTEFKAPACAA

SEQ ID NO: 106349 - protein, 96 aa, Oryza sativa
  unsure (1)..(96): unsure at all Xaa locations
  Clone ID: PAT_MRT4530_10800C.1.pep
RSGVRATAPGDLLCRLNDDRNVRALFERALSLVSPEESIEGGKRFAQFEQTYGDLSSMLKGEQKKKGALSRTYXDALSVLENTLYDAGSRYTYMDL

SEQ ID NO: 106350 - protein, 104 aa, Oryza sativa
  Clone ID: PAT_MRT4530_10801C.1.pep
RWEGTEEERWRPGWRWRRRRPGSRLLLGWKKTKADEGGARAGINDLPNELYDVAWDIMLIDGSSGWNPTSSGQMLSIASPAAARRRSATSWSARTADATQALDG

SEQ ID NO: 106351 - protein, 65 aa, Oryza sativa
  Clone ID: PAT_MRT4530_10802C.1.pep
MSTTTHPDREDLSDLEGCHHLYTHLTPTVLKLRVRVRSEVKNSIHRTGIGGIEFASNSCQQTPHT

SEQ ID NO: 106352 - protein, 94 aa, Oryza sativa
  Clone ID: PAT_MRT4530_10803C.1.pep
PDAFRAQGARCPPDLPAPLVPPLQPTAVTGVFASAGVCPRRRAPRFSLWLSRRARRVLCCDERHELHQYRRLLHDGGGGGGGYPRGRPSRGGIR

SEQ ID NO: 106353 - protein, 41 aa, Oryza sativa
  Clone ID: PAT_MRT4530_10804C.1.pep
AEIIWIIKWTDKDGNEVGCDCEFVTETLSLSIYASPETPNG

SEQ ID NO: 106354 - protein, 39 aa, Oryza sativa
  Clone ID: PAT_MRT4530_10805C.1.pep
QNLFLAMSSQKKARIGKRPKRGFGVLMFVQKKPAMYHPC

SEQ ID NO: 106355 - protein, 61 aa, Oryza sativa
  Clone ID: PAT_MRT4530_10806C.1.pep
RLCQFHTVMCSRGNIMTVYEPNECQSFPCWPCMVAYFDIYHTEMPVSFLIFRLCLGRLLSH

SEQ ID NO: 106356 - protein, 64 aa, Oryza sativa
  Clone ID: PAT_MRT4530_10808C.1.pep
EAVKSSSCLTCTVRLDICYLLTLGLEEAEDRRCVHREHEVLYSGRHLEQRHLADQHSAGAHQRL

SEQ ID NO: 106357 - protein, 104 aa, Oryza sativa
  Clone ID: PAT_MRT4530_10809C.1.pep
YTEVYGTELRQYSSIPRKTPILPIQASRFQICRQHTKSWSTSPRLAGANQSHLLRHINIVQAIVARRLQSPAVCVISTLIRNLAHSSSYYWLFRPWPIPQIDGI

SEQ ID NO: 106358 - protein, 93 aa, Oryza sativa
  Clone ID: PAT_MRT4530_1080C.1.pep
MSNTLLRIYPSELKIPFELKRQNSGILELTNKTDHHVAFKVKTTNPRKYSVRPTTGIVLPRGSCGITISMQPLKEIPTDYNCKDKFLIQSAVV

SEQ ID NO: 106359 - protein, 146 aa, Oryza sativa
  Clone ID: PAT_MRT4530_10810C.1.pep
MAAAMAAAVAARLPPAAARRARLEATTPSSPFAVAAPRRVMAPTRRPRLGTRLVVVSAQSNFSRVVQTAWKVGRDAVEAGTTLVPGSVPRPVARIGVTFVALSIALFLLTSVVSTAFFVSAMMGLIYLGFLAMNPKEGSRVDEGAN

SEQ ID NO: 106360 - protein, 84 aa, Oryza sativa
  Clone ID: PAT_MRT4530_10811C.1.pep
MAMAMGLLAKNPKIPKEIALHLIGPSKVKKETIKNIISLTIAEYVQKEDLDASKNLKVLQTYEELEAAFEPGKEFCFDATFHLQ

SEQ ID NO: 106361 - protein, 159 aa, Oryza sativa
  Clone ID: PAT_MRT4530_10812C.1.pep
MGNLSQERRRRDLIRWSMQITCSLADRGSEVGCSRNRPRNSVVLLLPGCFGAVRRRADRGGEAFWSRLDRGFRGITGLIDVYASLFGFCRGDRSTGHGRCWVRSFSGKPINVRRSLTSKDLEAVKQTHLGITGSMSKEERERTFNLRSILPGLRWWLNK

SEQ ID NO: 106362 - protein, 48 aa, Oryza sativa
  Clone ID: PAT_MRT4530_10813C.1.pep
KNTFFKRVDQKNFPLGKRAINLKKWQERHPHLKNARAHNKNIGVKIFG

SEQ ID NO: 106363 - protein, 101 aa, Oryza sativa
  unsure (1)..(101): unsure at all Xaa locations
  Clone ID: PAT_MRT4530_10814C.1.pep
LPRGGGGHHSSLRPPAPQLRAPVLPSSVRRRSRRSLPPRGPPXPPXPSPXXLXPSPLLVXXPPFLXXXXXXPPDPPLHRATAIPPMPPPPPSSAXVEPPPP

SEQ ID NO: 106364 - protein, 109 aa, Oryza sativa
  Clone ID: PAT_MRT4530_10815C.1.pep
MASSSNVNNGVSVLFLFAVLLIAASQLAAGTNSFLYGACKTIAGGSELLSVTFCIDALSSDNRSSNISSYKEFAVIAVDLLTANATSTKSEIDGKLRNGSGDAAATRCL

SEQ ID NO: 106365 - protein, 87 aa, Oryza sativa
  unsure (1)..(87): unsure at all Xaa locations
  Clone ID: PAT_MRT4530_10816C.1.pep
GRPLLHQAALIEHRLPSQTNTSLFCTLCPHSCDPGKNFPVGYPSXIAPGQACLTSKFFGDRLPKKKLQLVGMSILLILLGPRPGCHI

SEQ ID NO: 106366 - protein, 145 aa, Oryza sativa
  unsure (1)..(145): unsure at all Xaa locations
  Clone ID: PAT_MRT4530_10817C.1.pep
FPNDLCNNCKRPGHFARDCPNVALCHACGLPGHIAAECSSKDLCWNCKEPGHMANSCPNEGICRNCGKSGHIARECSAPPMLPGEMRLCSNCYKPGHLAAECTNEKACNNXRKSGHLARNCPNEPVCXLCNVSGHLARECPKSDA

SEQ ID NO: 106367 - protein, 247 aa, Oryza sativa
  Clone ID: PAT_MRT4530_10818C.1.pep
MSSRSPPPKDRRIRTERTSYRDAPYRRDSRRGPSRFPNDLCNNCKRPGHFARDCPNVALCHACGLPGHIAAECSSKDLCWNCKEPGHMANSCPNEGICRNCGKSGHIARECSAPPMLPGEMRLCSNCYKPGHLAAECTNEKACNNCRKSGHLARNCPNEPVCNLCNVSGHLARECPKSDAINERGGPPPFRGGYSDVVCRACNQVGHMSRDCMAGAFMICHNCGGRGHMAYECPSGRLMDRFPPRRF

SEQ ID NO: 106368 - protein, 150 aa, Oryza sativa
  unsure (1)..(150): unsure at all Xaa locations
  Clone ID: PAT_MRT4530_10819C.1.pep
MKNIFIFGVLAIGASCATPQFDVLCQNIXRTYKVQKSILLHQQGLKRYNEXIGTKDSIPCEQPYCNKPALQLLNTQXLQHIKLQTHQCDYQDTKAVQPISHXQLHHSAASNLYIDRNLSQAQALAAVNLTSTYGMYSWCYTAPDSITTTR

SEQ ID NO: 106369 - protein, 37 aa, Oryza sativa
  Clone ID: PAT_MRT4530_1081C.1.pep
AKVTKLVELGFDRAFLIQALKLFNGNDEQAAGFLFGG

SEQ ID NO: 106370 - protein, 238 aa, Oryza sativa
  Clone ID: PAT_MRT4530_10820C.1.pep
MEVRRRAVASESGRRRRQAYGEQRRQSGRRQLATGRLLALLPEAKGRRWSEEGERKATVSGRALGDGRRRGASSSASGRGRGGRRVPGVLRHTPTHAPVPSVFGDGRRRQEQWDGGNGVVEARSKTRLIGMGRDLSLGFIGWGRRFGGGTDIGRLRVQGWRAGAVKNAAGAHGRQRRSSSGGKKEKGRVERRGSTMPFWGGREGWERELWLHVLDASAQRWGQAAGRHGRLRGAGCQG

SEQ ID NO: 106371 - protein, 567 aa, Oryza sativa
  Clone ID: PAT_MRT4530_10821C.1.pep
MLVMMLRKLLLNTFVYPMPVGIWDEQCQLVYKTIMAVLHALNPILRPRTLGHNSGTRRDIFGSSPGGGDAGRHVLFRSEESMAVSCQQNEIRLGHSSSGERVLHPFARGGAGGGAPFAHGEEHIAIDIDLLLQATPNIFSAREASPTPVTPDDRVVVAQTLQTILASILPLCAASRPLFKDGPEYAKVVTFGFLGTIVLVAYAGVFAKAANSKAALRLVVSAAIAAMTFAVASQLSGIGYIVTASLTGAIMAAFIMLAGMTVYLRRLGRKRTTVVAEVEKSNVSGYCGQWPQRRQIDATSAEDELRVEYWNRIATAAEEGDGNGAMDEGSGDAGHNGRGWRMQLTATSVMADKSDSRGGHGSGGASESGETGTGDGSGRGGRGWPPRAWMARRTWATAAEDEDGGEHERGRTQTRMERWQPWRDDCRRRRWPRKTAMAAAREDEDDSIHDREWGAGRRQPRPRARVRATAAASEDSDDGSHDHGQGAWENNTFGRGYPPCAALSDSFSRSPPPRRRPSGFGRSGGRHREGGREGAASASASDVRRRPRRRRATSLPPPLLPFSCFEG

SEQ ID NO: 106372 - protein, 81 aa, Oryza sativa
  unsure (1)..(81): unsure at all Xaa locations
  Clone ID: PAT_MRT4530_10822C.1.pep
LHVAIXPHPSPTPPLLAPXAPPIDLERKPPPLPPPPTSPPSQPDPPPPXXLLPXRSHXPSERDGDSSSDPPSRSRRDRGGG

SEQ ID NO: 106373 - protein, 87 aa, Oryza sativa
  Clone ID: PAT_MRT4530_10823C.1.pep
LQEKGYVPNPITFLSLLYGFCSVGEAVNWRTILPNEFQQEEFEIIFRYKFFFDQYATESVCCEVSRVLQHLAECKSLQRVEQKFANS

SEQ ID NO: 106374 - protein, 228 aa, Oryza sativa
  Clone ID: PAT_MRT4530_10824C.1.pep
MDGHVRRLLNRVSIALAAVATAALLQLFRHSSSSCFVGSPAYSSLSLAPFPRTSCDAASRRVVDPNLRLAKLRSSPRWRRRSAALSTSVFPRLRRLRLLRRSSRVLCVAAGAGQAVDALHVAGVGDATGVDLVDFPPLVRRADPHNLPFFDGVFDVVLSDEPMALTGALFPSRFVAEAERTVRWGGAIALAIERHIDLSTVASLFKKSRVAAAWNATLDGSAATMSFE

SEQ ID NO: 106375 - protein, 163 aa, Oryza sativa
  Clone ID: PAT_MRT4530_10825C.1.pep
MRGTTTPSIGRATLESVIVAGPAKTGLGFYPPPTACLPAADAPLLHHHQSSISAWTPLHRCPSPVSLRTIPAFAAGHGSTCRAGLRYLQRFLVPSRPSPSAGPPCATRRLKPSRRTRHSADSVPSQHPASSIPAVVSSFRQRHCMGMATVTVASSHPPTKLLP

SEQ ID NO: 106376 - protein, 147 aa, Oryza sativa
  Clone ID: PAT_MRT4530_10826C.1.pep
MSFSSWNLTEATSAIHDITVNGYSATKSGGENDFPSRRLTVGGYEWEIRYYPKVFITHGDYRIAFRLVFLGPAGARGVNASFSCRLMDHRSTWTEARWRDASGNQHDCRAETGSRKFHLARESSDWVKLIKQDDLERSPAILACDSE

SEQ ID NO: 106377 - protein, 1495 aa, Oryza sativa
  Clone ID: PAT_MRT4530_10827C.1.pep
MERGETAAREEGVPQATASLLHNELSSGIEVQAQERVGQQRLSGQTNDLLLSFLLLLFDRIDPDAVFRVCVQFGQFTAKLVDGTCVHVPRKCLEWVVDYQQCTLESLEKDLAARVTWGKCQQVVMSGYDMTTGEETPFKDNMDVVHALFVRKSDKKLFLYADVEDKHDQLVTNSSVSEVNELFMDEVVTARHGDESNNLPDIDWDGLEIAQIPQEQVHHQVIDWDGLEIAPILEADVGSSVPLMGEDDMYAFVGLRAEDERAEQARLQAENQRDSAPNPAADVAQGDLNLNEAEIDVNDVVPGEAGVFYDRDDPPMEVGSLYISMVEFRSAVRQHAIKGQFELGTEKIDTERFRGYCTAEGCPWAIVARLQPDGKSVRVTLNRFPHHCTSTARVKTKMSSYKWVAEKAIPFLKKDPNMGATKLQDELQTTHKVTVGYSTVYAGMQKSIEQIFGTWEESFAFLFNFKAEIELKMPGNVVEIDVQEDGDGIYFHRFFCSFKPCIDGFIMGCRPYLSIDSTALNGKWNGQLASATSIDGHNWMFPVAFGFFQSETTDNWTWFMQQLNKAVGNLPTLAISSDACKGLENAVKNVFQRAEHRECFWHLMQNFIKKFQGPVFGNMYPAARSYMPERFYHYMNKIYEANSDVKPYLETYHKLLWMRSKFSEEIKCDFITNNLAESWNKWIKDMKHLPIVELADGIRSKTMNLLARRRKIGEKLDGVMLSIVVCQLNAMTRELGHLKVVQGDRDQAEVTEITAEHQIIRHAVNLVNHTCTCREWQVSGKPCPHALALIISYRNPNMADYLDPCYSVERYKLAYAGVILPLPDKSQWPKVNIGFKLLPPLTKREVGRQRKNQIVGCLDKGKARSKGKWQVQCKRCLAMGHRSTSPKCPLNGTKKKPSRAKKGRPLSEANCAASTSIEGTPKRQKATLLNLGCSQYNATPTAAFLAALNSTFGELRANLSSGGGGEGGGFATAAEPRAAAPAFAMAQCRPYVTRGDCVACFDAAATLLRAACGAANGGRAILDGCVVRYESAAFFDQATLPGNTQVCNGSAVAGGGFADAARGLVGDLVAAVPRALGLAAAAAGAGVYAAAQCVVTVGEGGCAQCLEVAVRNIDGCPPNSDGRAVDAGCFMRYSDKPFFPANATVDLAPYLRSGKSDRKGAIIGGILGGVAFLFLLGLLAFLWTWRSRKLLKPRRGDILGATELQGPTSFYYQDLKVATNNFCEESKLGEGGFGDVFKGLLKNGKTVAVKRLTVMETSRAKADFESEVKLISNVHHRNLVRLLGCSSKGSECLLVYEYMANGSLDKFLFGDKRGTLNWKQRFNIIVGMARGLGYLHQEFHVCIIHRDIKSSNVLLDDEFQPKIADFGLARLLPDDHSHLSTKFAGTLGYTAPEYAIHGQLSEKVDTYSFGVVVLEIISGRKLNDARLDPDSQYLLEWAWKLYENNNLIELVDKSLDPKEYNPEEVKKIIQIALLCTQSAVASRPTMSEQQVDVYL

SEQ ID NO: 106378 - protein, 598 aa, Oryza sativa
  Clone ID: PAT_MRT4530_10828C.1.pep
MDTLKKFSLSTSDARGPDKLSIGSTKRVDGTDDTDEIVVDGFDEISRRLGSEYSGFARYISFQCHTSRSQWRSRWFYLELKELEPVLVIPEVQPEHSENWTSKPPLTPSLQAFVNAVSDLREQGLTGYEVIKDFVSGRIQPLQARAHPVFDYTGAEDITRISSRDLPANIVAQRVKEVLISPSSTVDETPAPRCGKSAVYKAAAINVLPLTDVIGPLVNHQASASLKDKDADEVANIPSVPAIAGGSGTQRKPWARSSAPAGSRQKSSGSEVAPVVTESAGPAVAPVAASSPELTTWSDMMAECRRLLENTSREVAAQMDRAVARATASDGKVARLEIELEVANDDLQKMKEIVASNKMQHQGLEKKMNDLQDHLFSLRDSLRKSFIGLHQLALACGVMSSIPTHLDETSLTLALSELAGEMEVIPSRHTAKVSKEISNGIHTGRVTSSPSFILHSCVDSEDVQQCGCPDVAMIDLPSLGDMPAPDVVTDAVVLGGVGAASGPFSPGIVGLPRENSDLEGVIAERDKRIASWRTKFEVTELGLSLVVVKKDKAVEALRGREVWMNSYLKSCCNAMADIYHQLRVDRADPEENTTGYLF

SEQ ID NO: 106379 - protein, 36 aa, Oryza sativa
  unsure (1)..(36): unsure at all Xaa locations
  Clone ID: PAT_MRT4530_10829C.1.pep
EEDCLHLIHYSKIVTHLVYXXLIXHSXYCXXPXXVN

SEQ ID NO: 106380 - protein, 433 aa, Oryza sativa
  Clone ID: PAT_MRT4530_1082C.1.pep
MAPASTSPPAKAQVTTAPAKSPLVGGLADLDAAVSLRLHALFLPVPRLLLKALEVAGDGRIWLPVPISLLLISTTTSSKVSPLLVGLVAGLVLDILFVGAAKLIVRRPRPAYNAADMYVAVAADHWSFPSGHSSRAFLVAAFLAAGGFPREALFLWAASTSASRVLLGRHYVLDVVAGACLGVFEAWLSSLLLRAILPIKQCGKQAGGWPRCSEIEQQAGTVILVRVARRVRRFDAESDRDIEPKRKEQVKTTNPRKYSVRPTTGIVLPRGSCGITISMQPPKEIPTDYNCKDKFLIQSVVVEDGTTQKDIHSDMFSKEAGKVVEEFKLRVVYIPANPPSPVPEEEEDEIDSLDSDVDHEVQMPSTFDAASRKGYTSGSQASHDEVIIFKHCSLAEYSLELTIELDIKDHKPMGVSQLCLCLLSLRSSSSLDT

SEQ ID NO: 106381 - protein, 537 aa, Oryza sativa
  Clone ID: PAT_MRT4530_10830C.1.pep
MEVFRGVEFAALRLWPCGSFLHADEDGRSVYHGSVRDGDAWLPNAVWAVEELVAGASHTRYVLLRGAYGRYLGAGAPDARDRDQERCACPLPSCPLPCCSLQAAQRDRDDAEPDDIMWRPIGCSGTDIAGSVVLLQDRSGRYLRGNQGFLSRHHGVSVDVNIGNEMTLRWEVVRVRVPTRPERPIVPHLPCWPLLNREIQFVTVDDADNFGFGSVRFTGRSVDLLREDLMRRIGYDDFTMCVRAGRHGRLTPLFIDLPHSRETLCIVLIRPNTPVNDRLLTSILKAEDDATKAAAVELQHRQELLWEREEALRVRTETALRRWEGRLQGRERATRVREDASLQRWMEGLGRRELALTQREERVSGMEATHRAATSRDKPSAPLLKKEDNIWEKRQMSLSISLLTPLALLFSVRPLIPAEYDHYILMAFIAIWGLGSLAFQFGLFGSNSGEKSFSRFVFISFTALVLYTLHLEMMEAKGYSAAPLSPLADVSNVTLFPVVLDDQTWTVIFWIYFVLVLSGHLYAWATAYITGSDKDLE

SEQ ID NO: 106382 - protein, 269 aa, Oryza sativa
  Clone ID: PAT_MRT4530_10831C.1.pep
MAGYTEILDTNHHEHKVCLVRKDEPFICSGCKELGFELRYACHTAGCNHQYHRSCTLQPLNTRVPAPFYKHDFFFFKSLLKYDLYFYIFVHILNKVRGYVYYCPDKKVSLHPCCADLPRVITTETVQLKLERKITKKCGMCHERNQGSFSNPWAYASSEKMIQLHVACVRKALVSQFESRLYGVQKPKMLLPPPPAAGASAASSTSSSTAIVECNSFPVLEVDKYRRKSAGFLDTFRRIVRAVMAMVSAVITGNHLEIYMAFIEFFKPN

SEQ ID NO: 106383 - protein, 67 aa, Oryza sativa
  Clone ID: PAT_MRT4530_10832C.1.pep
ALLAMHFPASLDALFTISNLLAEYPSSRGSINDSSHVEVGTKPGLYSRWPRAILRRYGEIQLEVSHR

SEQ ID NO: 106384 - protein, 84 aa, Oryza sativa
  Clone ID: PAT_MRT4530_10833C.1.pep
STDINSEPSSLGLHGPDEYKPDHCLNNVFMTACNWKSLAGDASEAHENIHLYADQKETSCAFCWCNTGSSPTITLVQSSILSVK

SEQ ID NO: 106385 - protein, 87 aa, Oryza sativa
  Clone ID: PAT_MRT4530_10834C.1.pep
MAIRKNRRVKTELNDNTWLSSFRQITDVETLHELVQLGSLLTQITLIETGEDNIVWTRNAAGALLKTLIIYSEDVISQIRSGNQSQR

SEQ ID NO: 106386 - protein, 191 aa, Oryza sativa
  Clone ID: PAT_MRT4530_10835C.1.pep
MGTPQDRAPTPYENDKALHFLRHHLCATLKNEYMGLRSPLTLWTALKKRFEKLKYTILPQAEQASYKEYDEMIDIMQVSGSHDEVLHKNFVFQPPGKSVGLEVNARSCKGGKGKKEAKPARNDKPYGQQDQTCYKNAKASAEAHMVEAHSTATPSTTTPLDALAAAASTTNEEAVTQEQIFVELNTLVDSI

SEQ ID NO: 106387 - protein, 517 aa, Oryza sativa
  unsure (1)..(517): unsure at all Xaa locations
  Clone ID: PAT_MRT4530_10836C.1.pep
MGSLGCSAAIDELLLAHGIGRRGPLTRSVLADEVQSSSRGWGRWVRAARPERRVRAGGDECPRRQRGKSDSFFVHFDGSRRRVQEGTQRLAAHAGRTDKLLPARWTNDGACMDRLTDATLDGRSDMEAVLDKERQPEFYMETTRTTRIDFDEMGSRDGFSNNKLLDDFGYREIXTTGIRPRRNRNRRHHRAEPQLSVFCHDAVAKIPAVSLPAXEQLNTRVGCGXEHLIIENVLDKCRVVTPNLPTKTDDLSHSTGYGWVIXEKVVAIFRTXNFHWCSRDNSTRWFSNQXIVAISRTXNFHLCSRDNSTRXVLEPWSSXGYTWFSTSGVAILPLALLLVVELRLQLVLDQKCSDTPTTFISSDRVKAXTWFSTSGVAIXLPLHPLLVVELXLLHGPRPMWSSWGYNWFSTSXCSDPPITSTPTKLILGTXYRQVFYPEIPHHXRHLELKPILMSLYAILTRPLRNLRELRLGTPRADKALSDHAETNDYTLRFLDHSRTVGGSRQGIWNEKMVYPPR

SEQ ID NO: 106388 - protein, 306 aa, Oryza sativa
  Clone ID: PAT_MRT4530_10837C.1.pep
MARKKIVLDRIANDATRRATFKKRRRGLLKKASELATLCDVDACLVVYGEGDAEPEVWPSTEVAMNVLRQFRALPEMEQCKKMMNQEDFLRLRIGKLKEQLRKMDRDNHERETLILLHDALQGRLGTYESLSVEQLTSVDCLASARLKVITDRLVEIRAPNEDGQVLVPPPPPPPPALPAPPPPPAPMLPLAPPPTHVTPAMPLSSMPPPAFHGMNHHHHQNHFINHGGNDQNAWLMNVARNGGDLGALVYSAFASSSSSNTGGAGTSAAGAAAPGPDMMDLANPDMPGFGCPWDDDSAGPSFPPM

SEQ ID NO: 106389 - protein, 940 aa, Oryza sativa
  Clone ID: PAT_MRT4530_10838C.1.pep
MDVNDLISRLAEFQSHTNFDSNLKRLWVVVTWLVLWAAAAVHPGEQPLSRIAVERMVLAVNESAHVRASPLVLGLKGETNEWVEVEFFNPNPSNTDWVGVFSPADFSSAICEAYGVPQYYPMLCTAPIKYQYANFNNNGYSKSGKGKLKLQLINQREDFSFALFSGGLENAEADGSNEFNDFQPGSLNTTYQIIRDLKNIDMVVHIGDICYANGYLSQWDQFTAQIEPIASTVPYMIGMGNHERDWPGTGSFYGNLDSGGECGVPAQTVFYTPAENRAKLWYATDYGMFRFCIANTEEDWRPGTEQYKFIEQCLSSVDRQKQPWLIFLAHRVLGYSSCTFYEEEGTFEEPMGRESLQELWQKYKVDLAFYGHVHNYERTCPVYQNKCVVSGSDHYSGPFTATTHVVVGGAGAGTSDSEFTTSNIKWSYYRDFDYGFVKLTALNHSSLLFEYQKRSDRNMLWVVATWLIVCAAAHPGEQPLSRIAVERTVLAVNESAHVKASPWVLGLKGQNSEWVEVEFFHPSPSNDDWIGVFSPANFSAAICEPENKRQRPPVLCTAPIKYQFANFNNDGYNKSGKGYLKLQLINQREDFSFALFSGGLLKPKLIAVSNKVAFANPKAPVYPRLAQGKSWNEAEADGSNEFNDFQPGSLNTTYQIIRDLENIDMVAYTGDICYINGYLSQWDQFTAQIEPIASTVPYMIGSGNHERDWPGTGSFYGNLDSGGECGVPAQTVFYTPAENHYGMFRFCIAHTEEDWRPGTEQYKFIEQCLSSVDRQKQPWLIFLAHRVLGYSSCSYYEEQGTFGEPMGRDTIEELLQKYRVDLAFYGHVHSYERTCPVYQGQCVVNASDHYNGPFKATTHVVVGGGGASLSEFTTSKIKWSHYTDFDFGFVKLTAFNHSSMLFEYKKSRDGNVYDHFTISRDYRDILACSVDNCPRTTLAT

SEQ ID NO: 106390 - protein, 68 aa, Oryza sativa
  Clone ID: PAT_MRT4530_10839C.1.pep
IGPGASLPPPVNPPLVFFFFFLPPPGFPPLLISSSHKKKKKKKKKKKKKKKPKPKKKKKKKKKKKKKK

SEQ ID NO: 106391 - protein, 183 aa, Oryza sativa
  unsure (1)..(183): unsure at all Xaa locations
  Clone ID: PAT_MRT4530_1083C.1.pep
EISGRRGVLRRAAISDLSRRDAIPPQLRPPLLPRRRPPPVQXRTLLELLGVVADRRGALPIAVGVSSRDELDLVCADVASLPFVSLSPLYSDQAESERASVLDKFRQATIQWNHTKAAAADIADSPKTESSLEVSIEIFQEAYFRHGIVINMVVGGEVATLKALEETSGLLIAEMPIHVSEIL

SEQ ID NO: 106392 - protein, 727 aa, Oryza sativa
  Clone ID: PAT_MRT4530_10840C.1.pep
MPHDLGSLHRQMLSQGEPILRFPCQIQRHWSTTCRSLILLLSLHDFCRVPLPPLEDATGRWWICSLPESEAQYNHIFCVTHMGDWYDKLSQSFRDTAKEVLAKADIDPNVRCFTRRQMKRITNNYSTTLGRGGFSVVYKGMLDDGHSVAVKQYNWRTQKKEFTKEVIIQSQCSHRNIVRLLGCCVEADAPMLVTEFVPNGNLSELLHGNIGQLPVSLETRFQIALDVAEAVVYMHYSQNHPILHGDIKPSNILLGDKYVAKLCDFGISRLLCMDNDEYTGFVIGSMGYMDPVYRETGRLSPKCDVYSFGVVLLELITRSKGIDDQNRSLARVFAHSSIDERYKLFDNEIVTNENVDFIQEMANLALDCLKSEIEDRPQMKEVLEHLYSLKRKMLEQERKIAELMEERRIAELTERRTVAFREIKAILQDIGFERLVTKEKIDSIVGNPKQVSTSEAFSGKSSVLIQRAIGKICMGHLKNIRFIVIKMSVEADEIWKEMFLYEMIKQSRIEHCNVAKLFGCCLDHVDAPVLVYKSTLEDPLAHLHSLNVVHGDVRTANVVLDVYSKSKLEMPGITAFMAKIAGYGTQRLLSLDKAKHEIFLTENIHYKDPHFLKTGLMAKEYDVYGFGVVLVELFAQNMVQMHDVNMVLKELDGIPARCHHLKEIKKLASWCLASKVTERPAMDKVVRCLRAVLTNLQNLHDPCNCKSMYNKSAMQSEQITSAKSASS

SEQ ID NO: 106393 - protein, 414 aa, Oryza sativa
  Clone ID: PAT_MRT4530_10841C.1.pep
MGRLAIRPNRSRLTWLRENKNTHPISVTNAVSRVLAAHPGPFHRVDLSCSIMEAHLPELDRWLQLLAAKAVEELVFVNRPWPINLRLPATLFSCTYLRRLYIGVWRFPNTAGLPQCSTAFPHLLELGLCCVLMEDRDLESIISRSPVLEILTVVLSQNVVRLRFVSHSLRCVQLGFSCVADLAAVDAPCLDRLLLSDIWATEGRKFSTRIKIGLAQGLRSLGYLEPGRHLLQIGTTTIKARTRATPSTMVPSVRILALKVYFGTLNEAQMLCSFLQCFPNVETLHLKSDKADELNNATGEHKAMFWKGAGEIECIKSHVKKMVFDEFQGKQSELAFIKFVMERAQVLQKIDIISTNASCTTLEKNKLVLKALDSVKPASKNCQVVYSTHALLEEGGSWSFQRASDLSRSDPFEF

SEQ ID NO: 106394 - protein, 237 aa, Oryza sativa
  Clone ID: PAT_MRT4530_10842C.1.pep
MACHQRSASVPSSPCSNDTTIEQQLQTLNTVVSSPSATIDTMCDGLRKLGDIYNSIEELICTPSNQVSLCQKLQRKLVEEELGRSLVLLDLCNAMQESFMELRMSVQEMMLAIKRGEDASAQVKAYIRLAKKARKQFKKVSKKTASDKMDCRVVKLLAEAREITVSLLESTSCFLSKKIETPKWSLVSATFQKSKVMCEEEQLQELELTIKDLESGAELLFRRLIQGRVSLLNTLSS

SEQ ID NO: 106395 - protein, 153 aa, Oryza sativa
  Clone ID: PAT_MRT4530_10843C.1.pep
MALPTIEFVNDRDVMVSNNTQVNFSLLVPQPNQQLDGFSRFGLVLANLRDAELKVQPLTLAIQNIKISFTYTDELSWRLVHGLPESVRGWSTRCNAALEEMLNLGGLSSKAKAWEKRVKKLNISNNGVYPAASAKKHRSSEMLRTLSLGVARC

SEQ ID NO: 106396 - protein, 111 aa, Oryza sativa
  unsure (1)..(111): unsure at all Xaa locations
  Clone ID: PAT_MRT4530_10844C.1.pep
HPKPYPLPPAPSPSPSLAPPPPPPLAPPSSPSPSPXPPPPLAPPPPPSSSSSLSPPLXPPPSPPSSSPSPXPPRPPPPPTSPXASRRRRRRPPPPPSPAPQSLAAAARSFR

SEQ ID NO: 106397 - protein, 336 aa, Oryza sativa
  Clone ID: PAT_MRT4530_10845C.1.pep
MALPYTTHCSTLFPLIFLKVTRLRNNEGFCIGYHYCHTITDAFGMAQLLDTIYRLARGDGDPLTNPPVWERERLVVAPSASPRITHYEHPAYEPLPISSSAAAAQDDVVRMTPREQMVTRYFYLGPTEMAAMRGHVRSSATVFELVTAALWRCRTAALEYAAKQRVRVLVMSSARWSWKRDPPLPRGFYGNMLVPQIAEATVGELCGLPLAHAVELVRRRKFAVTDEYMRSMLDMLARRSRPFFNLDWTFVVADAGGLGRSMGEAATATVGRWERVGGGITAAGQVIAASLYSCYERCRRGAGEEAAVVSMCLPAPAMERFAREITVCSSSVMSAI

SEQ ID NO: 106398 - protein, 63 aa, Oryza sativa
  unsure (1)..(63): unsure at all Xaa locations
  Clone ID: PAT_MRT4530_10846C.1.pep
AAVNPIPAFXLDDAIQNTLWRKFXRSITSATTTSTXGKRNSHLXDTAKQLRALKVRYICNSRR

SEQ ID NO: 106399 - protein, 215 aa, Oryza sativa
  Clone ID: PAT_MRT4530_10847C.1.pep
MSARGQGEAAPVSGEDEAAGSGCGRGRRQRGRSRGGCEGACGVRRGARPPSVRMVTEGRGSCGRAHQRRGRRCHGHSPTPTHLLPVLSTLADASSSSRRSPNYSPLYAPHAWHQTQTHRELLSHRRRRRIHASRRELLRHQLQRSLRRISQTDDASPRPPDADLRPVSGNGDGPSARPHREAGHSLACTVHVGVSLARRPRPLPAALSSSLAGAA

SEQ ID NO: 106400 - protein, 276 aa, Oryza sativa
  Clone ID: PAT_MRT4530_10848C.1.pep
MAGRTRVEVKQKKRKEFQDFKKKIRRQLNKLNNKYVHTNVREFSLRLTAAKKSGTSHLINHIAESCPAIDGDARINFLATIKKQTREGFVFVPKRSRELMVRFFIHAEVPFKKIEDPYFLEWVESMQPTFKVVGRQTLRDDAFNLYERMREDLHAEIHNLDSHDGMKIIKPTIHKLQEDVEDDSESFDVLDWWKRHAQKFPVLSSMARDFLAIPLSTVSSESAFSCGGRILGDTRSLLTPEMLEALICAKDWLIKANDPLINIPGAEGGEVKKMER

SEQ ID NO: 106401 - protein, 418 aa, Oryza sativa
  Clone ID: PAT_MRT4530_10849C.1.pep
MARPKRTKPPPPSRKAETAAAAAQRPSSSSSSPSPSLPEALLLATVCMVGLPVEVQVRDGSAYAGVLHTASVEGAYGVVLKKARKIANGNDNANIPLGAFVDSLVIHPDDLVQVIAKDFSLHTKDVCRTPVCDTVAASAYVKPQTSHVNVFPLKEVKKCSTPGEETNISIGRSSPDVKISPPATVAKTATPSKTIAKESKLNPCARVFSPSFASSRPVLAAAPSVNPIYISNSVAGVPTGLPVFETNSVPGGSSLSSKAVHYNNLAAANYAISPQYTQSTMGHNVSRLDPARIGTPYHPMQVGPAYISPSPQPVTGGKFNHVVYVHPFSQDVMHGAPVMPQGWSLPAPLKSHQASLQKFQETLQAQPLYMYPTYHGNWEPAIGGTKPCTACAAIPGRSSHHGTCCKQHGSRQIHVNLS

SEQ ID NO: 106402 - protein, 238 aa, Oryza sativa
  Clone ID: PAT_MRT4530_1084C.1.pep
MPPISRLDPRYHRARGLHELNRLMSLRREQRRLQIETYQFLAQCAKRKESPCQQDNSQCVKRMRYSGPDLPEDIWHHIHSLLPLQDAARAACVSQAFLRFWRCHPNLIFSWKTMGLNKVPHKKGGIVRDYNNKVDRIMKNHSGGIKTFSLELHPFSNANTYYHLNSWLEIAITSGIKELTLVLTSNEEKYNFPCSLLSNESGDSIQSLRLVHCSFCPTVGLVSLRSLTRLHLSCHVPN

SEQ ID NO: 106403 - protein, 687 aa, Oryza sativa
  Clone ID: PAT_MRT4530_10850C.1.pep
MVGPTWAPHVSLIPSFLSPLHPHPLPAGERGGQPAAPSATSRATAALHLRTAAFLSLPPPALAGPPPPSSSPCAASAAALGGDRFGCSLDGWKWIEEFNGLDWLGWRWKRFGLDWFLVSDFWIQIGFSPWISLDALDSPVKQKKRKVRAPPGAGEDVLLWRSGRVANLPKKPKYHDEFQDFKKKIRRQLNKLNNKYVHTNVREFSLRLTATKKSGTSHLINHIAESCPAIDGDARINFLATIKKQTGEGFVFVPKRSRELMVRFFIHAEVPFKKIEDPYFLEWVESMQPTFKVVGRQTLRDDAFNLYERMREDLHAELHNLDSHDGMKIIKPIIHKLRELLKHLDSSVSRMQDFNSMANSKNLPSKLSFSFDTPTRWNSTYKMIVEGLMYISVLDSYANLHGEVAPTELEWQKVESICAFLKAFEEATLSVSADRKPTAHRFLPLVLQIRHALNDPDWQTSDILKVLAAAMLSKFVKYWDSGFNSALVIATMLDPRRKGDYLNFFYEKTSNSVTEIVKKVGSAEDWLKDYYEKYEGFVRRNDEHMLSHSCEGSNSVGSPVLGKRKLEEEFALYKSRRRTARQTKSEFAIYLEEDVEEDSESFDVLDWWKRHAQKFPVLSSMARDFLAIPLSTVSSESAFSCGGRILGDTRSSLTPEMLEALICAKDWLIKANDPLINIPGAEGGNLS

SEQ ID NO: 106404 - protein, 109 aa, Oryza sativa
  unsure (1)..(109): unsure at all Xaa locations
  Clone ID: PAT_MRT4530_10851C.1.pep
TLNSIQEISPSCVNLHLCLHPSLPHSITLQLQLHQESIHPFSLPIISQEKKEEKNCRLSPLIATLPCVVSGFFAYKSSXSSSSSLPKSSRFSCCIALWRGEEEERLGST

SEQ ID NO: 106405 - protein, 919 aa, Oryza sativa
  Clone ID: PAT_MRT4530_10852C.1.pep
MAGTLLQPVALGTTFAGRVSGQRWKSHGTRRPPSMLAMSLSRPVKMAAFVGLRSVHSFSVTPVTNFRSTVASYRSRRGRRARFVTRSMFERFTEKAIKVIMLAQEEARRLGHNFVGTEQILLGLIGEGTGIAAKVLKSMGINLKDARVEVEKIIGRGNGFVAVEIPFTPRAKRVLELSLEEARQLGHNYIGSEHLLLGLLREGEGVAARVLESLGADPSNIRTQVIRMIGETTEAVGAGVGGGSSGNKMPTLEEYGTNLTKLAEEGKLDPVVGRQPQIERVVQILGRRTKNNPCLIGEPGVGKTAIAEGLAQRISTGDVPETIEGKKVITLDMGLLVAGTKYRGEFEERLKKLMEEIKQSDEIILFIDEVHTLIGAGAAEGAIDAANILKPALARGELQCIGATTLDEYRKHIEKDPALERRFQPVRVPEPTVDETIEILRGLRERYEIHHKLRYTDDALISAAKLSYQYISDRFLPDKAIDLIDEAGSRVRLRHAQVPEEARELDKELKQITKDKNEAVRSQDFEKAGELRDREMELKAQITALIDKSKEMSKAETESGETGPLVNEADIQHIVSSWTGIPVEKVSSDESDKLLKMEETLHQRVIGQDEAVKAISRSIRRARVGLKNPNRPIASFIFAGPTGVGKSELAKALAAYYFGSEEAMIRLDMSEFMERHTVSKLIGSPPGYVGYTEGGQLTEAVRRRPYTVVLFDEIEKAHPDVFNMMLQILEDGRLTDSKGRTVDFKNTLLIMTSNVGSSVIEKGGRKIGFDLDYDEKDSSYSRIKSLVVEEMKQYFRPEFLNRLDEMIVFRQLTKLEVKEIAEIMLKEVFDRLKAKDIDLQVTEKFKERIVDEGFNPSYGARPLRRAIMRLLEDSLAEKMLAGEVKEGDSAIVDVDSEGKVIVLNGQSGLPELSTPAVTV

SEQ ID NO: 106406 - protein, 67 aa, Oryza sativa
  unsure (1)..(67): unsure at all Xaa locations
  Clone ID: PAT_MRT4530_10853C.1.pep
MATIDTIVAHIMDEQGDIKIKFSMCWNPIXPHATLLTSNGCQICIRPPFSAHEYLMESSRSPLSNGS

SEQ ID NO: 106407 - protein, 194 aa, Oryza sativa
  unsure (1)..(194): unsure at all Xaa locations
  Clone ID: PAT_MRT4530_10854C.1.pep
GTRLRTNIDNPHSSDILNPHGGRITRANSQNFPILNIIQMSATXRIVLXQNNALAYCLNWTVXRHTPVMYGDRLAQGRIPGVWITRGRXVFDGELHQXSQILLIPQXNFAVVCEGSXREGFAWVITSRPNHKCWSIVKIAXGKASILRCSTPLTCVAXNAYRLSXREDSRXVKFNRGDEMAVFAXRRGPHSQYA

SEQ ID NO: 106408 - protein, 143 aa, Oryza sativa
  unsure (1)..(143): unsure at all Xaa locations
  Clone ID: PAT_MRT4530_10855C.1.pep
TRIVLXNNRLLTPHWTVYAHXVMYVTSCHKGASXVDHRGRSVFDGELHQQQILLIPQNFAVVVKARREGFAWVSFKTNHNAVDSQIAGKASILRALPVDLVANAYRLSREDSRHVKFNRGDEMAVFAPRRGPQQYAEWQINEK

SEQ ID NO: 106409 - protein, 187 aa, Oryza sativa
  unsure (1)..(187): unsure at all Xaa locations
  Clone ID: PAT_MRT4530_10856C.1.pep
PYPQSSEHINPHGGXRITRANTQNFPILNIIQMSATRIVLQIMPLLTPHWTVNAHTXVMYVTAXGQGRIQVVDHXRGRSVFDGELHQQQILLIPQNFAXVVVKARREGFAWVSFKTNHNAVDSQIAXGKASILRALPVDVVANGLXRFPREDSRRVKFNRGDEMAVXFAPRRGPQQYAECQINREVN

SEQ ID NO: 106410 - protein, 156 aa, Oryza sativa
  unsure (1)..(156): unsure at all Xaa locations
  Clone ID: PAT_MRT4530_10857C.1.pep
PEFPMRNVSESPQIVLQNKPAYSHWTXNAHTVMYVTAGTRAHPVVDHRGXRSVFDGELHQXQILLIPQXNFQCVKARREGFAWVSFKTNHXNAVDSQIAGKPSIXRAYPLTGPNAYRLSXREDSRRVKFNXSGDEMPVFAPRRGPXQYAEWQINEK

SEQ ID NO: 106411 - protein, 613 aa, Oryza sativa
  Clone ID: PAT_MRT4530_10858C.1.pep
MAAVAPGAGDQATDMMQKLSLESKKEGATPDATKKPAGMPYGSASAGDAQNAASPVDRSITPLLQEAVNANILYQTNGYGPSAYYYPTGYDGSANEWDSRYAAHDGTEMPPQSVYGDMYGYGYAPYGPYPSGSPVPTVGHDGQSYGAQHYQYPGQYYQQPAPTNASHGVNAVNSQSEMPSVAAHQARVPVESAKASANGTANGMANTNSSSLARKQTHQNVSVLNNGSYGGGTLQGGPSANNYGHSGLHSPVQWYDGPVYSNGHQRSNTNSTSYGSNSYSAKNQSQRPTANLMGMHAQIPSSGMGLTSPSYHTRMYPDNRLYGQYGQYGNALKTGLGFGSNMYNSRNNGRWGIVDSKYKPRGRASFGFGSENQDGFTELNRGPRSGGFKHQKQFGPSVTIAVKGQALPSVGKQENSAIPDKGQFNQEGFPVTYKDAKFFVIKSYSEDDVHKSIKYNVWASTPNGNKKLDAGYREAQEKSSECPVFLFFSVNTSGQFVGVAEMVGPVDFEKTVDYWQQDKWNGCFPIKWHVVKDVPNNILKHITLDNNDNKPVTNSRDTQEGSLDNASHEKEKNAIDGKSTAQKQALSKEGTPIVGEMLNASKSAVESSVTNGN

SEQ ID NO: 106412 - protein, 73 aa, Oryza sativa
  unsure (1)..(73): unsure at all Xaa locations
  Clone ID: PAT_MRT4530_10859C.1.pep
MASETETFAFQXEINQLLXLXINTFYSNKEIFLRELIXNXSDALDKIRFESLXDKSKLDAQPELFXHIVPDKG

SEQ ID NO: 106413 - protein, 63 aa, Oryza sativa
  unsure (1)..(63): unsure at all Xaa locations
  Clone ID: PAT_MRT4530_1085C.1.pep
SIPIQGAGKGQISTTXNFPILSLVQXSAVFXPLFLIALLSXFWSLXAXRVVCFSXGRARVSVV

SEQ ID NO: 106414 - protein, 229 aa, Oryza sativa
  Clone ID: PAT_MRT4530_10860C.1.pep
MALLLPLIVICIVSGVTADANADAPMTRTHVASLPGFDGALPSRLETGYVTVDEVNGGELFYYLIESEGDLGSDPVLLWLTGGDRCSVLSALFFEIGPMKLVIEPYNGGLPRLRYHPYSWTKVANILFVDSPMGAGFSFSRDPNGYDVSEWFDGHPEYLANPFYVGGDSMAGRFVPFITEKISEDIEAAVRPTLNLKMILEHCKGEDYDKPKNLICRQAMARFNENAEF

SEQ ID NO: 106415 - protein, 133 aa, Oryza sativa
  Clone ID: PAT_MRT4530_10861C.1.pep
MGADDDRRRRRQAAKDDEIGRRRAECWAASPPRRSTSWACGHDGEEVTIKELKPVEPLPWTGAEISDVFQRVLLPLQPCRIRDGAIRASSASTSGGQRPDKLPAAPSRSYPTRGRNDGTVVGSTGSGSGRSPH

SEQ ID NO: 106416 - protein, 125 aa, Oryza sativa
  Clone ID: PAT_MRT4530_10862C.1.pep
FFFFFFLAHRHHTRAGLHRLGSTPQSSACIQFPSQPTISKPPASPHFHTIIQVPSLFFLLSHSSSSIPVGPVIIFSQVPGYIFTTGASTTIHHVLVSIKLRGTVFIIFTIGAHFWRCGSVLPALQ

SEQ ID NO: 106417 - protein, 39 aa, Oryza sativa
  Clone ID: PAT_MRT4530_10863C.1.pep
PDKELHAKGCPGGSTMTESGKLMTVIRVLKKNLDLSKTK

SEQ ID NO: 106418 - protein, 119 aa, Oryza sativa
  unsure (1)..(119): unsure at all Xaa locations
  Clone ID: PAT_MRT4530_10864C.1.pep
MAMWRSCLHMPHLNYLPKDRLRKXKGGGGTAYQRRRQWRRRTVAATAAVHGDCDGGGECGTAKARRGAAASWRRRGGSMRRRGGVEAAAWASRATGPVAWWLGTDLRGGTDCRSARCFP

SEQ ID NO: 106419 - protein, 311 aa, Oryza sativa
  Clone ID: PAT_MRT4530_10865C.1.pep
MVSWKDIYLVLEATVPLYVAMILAYLSIKWWKLFTPEQCSGINKFVAKFSIPLLSFQVISTTDPYDMNIKLIYSDILQKSLALLGFAAISKACCAEKFDWLITGFSLSTLPNTLIVGIPLLKGMYGEQAGKLLSQIVVLQSLIWYTLLLFLFELRAANGMATTTSSETTGLIWALVGFRWHIRLPLIVSNSIRMLSDGGLGMAMFSLGLFTALQTKIIACGAKRMLLALAIRFFLGPALMGMSSYAIGMRGVLLKIAIVQAALPQGIVPFVFAKEYNVQADILSTAIIVGMMVAVPVALAYYFAMIIPAIK

SEQ ID NO: 106420 - protein, 390 aa, Oryza sativa
  unsure (1)..(390): unsure at all Xaa locations
  Clone ID: PAT_MRT4530_10866C.1.pep
FFTDAYDLFYISLVTKLLGRIYYTDDSKNTLGALPPNVSAAVTGVALCGTLAGQLFFKWLGNKLGRKSVYGFTLILMVVCSVASGLSFGSSAKGVVSTLCFFRFXLGFGIGGDYPLSATIMLEYANKKTRGXFITAVFAMQKSGILFGAIVALAVSAKFRHTYPAPSYSNNHAASLVPQADYVWRIILMFGTVPAALTYYWRIKMPKTARYTALIARNAKQTTADMSKVLHTQIEESANRAETVAVGDESWGLFSRQFLRRHSLHLLATTNTWFLLNIAFYXKNLFQKNIFSKVGWIPPAKTMNALEELYRITRAQTLIALCGTIPGYWFTIAFIRIINRFWIQIMGFAIMTAFMLGLAISYHHXTTPGHHTGFIVMYGFTFFFANLGPN

SEQ ID NO: 106421 - protein, 92 aa, Oryza sativa
  unsure (1)..(92): unsure at all Xaa locations
  Clone ID: PAT_MRT4530_10867C.1.pep
SSSSSSCSSSPSPPLRRRNRRRVGWLNAGDXDLKRTARRAVGGRRRLPAAGSGGFGGGGDGDSAGMGRKPARGGGGKRRQRGGRREGIYTDA

SEQ ID NO: 106422 - protein, 57 aa, Oryza sativa
  unsure (1)..(57): unsure at all Xaa locations
  Clone ID: PAT_MRT4530_10868C.1.pep
MRPNHTIRIINRKSGATNAGHPMAEVFRGCRRGDIERAAASLPAFCNPDIXNGVXGX

SEQ ID NO: 106423 - protein, 1222 aa, Oryza sativa
  unsure (1)..(1222): unsure at all Xaa locations
  Clone ID: PAT_MRT4530_10869C.1.pep
MGCRRVLVPDDPHEVHAGVHEPHAELLQPARAGTSETRDRDNLVSELHPGEATLHIPATAASGGDGEGKVLIEIQELLAALNRAQGETQAAVVKLDQGVSHWRPQMESVGELHQQLDLVNKLNQTSSTTSSPRVPLTDEERKAPLLPTPPIPSQAAAAAEGGSKMASGRLQVHEHRGRALGVATTLGPTPVKGTYESPSTSLKNFEQFEFGNGDCDGDQFGRQYNHRVPKLDFPKFDGSDPVDWRMRCEHYFDVNNTFPGLWVRIATIYFSGRAVSWLRSSKAHVRFPIWENFCVAVSAKFDRDKHETLIRQMDSIKQLGSVWEYYEKFDELMNQLLAYDPDLNMRYLTHRFTEGLLREIMNAVLIQQPKDLETTLAIASLQEEVIMESATVSASNLKKSDSGLQFRPNPAYKSALPLPLPPNRGLSGGSMMRTEERKVANNSKIGNSSDKISVLKLXRRAQGLCYICAEKWSPTHKXVSVDGTEAVDSQGLMAISVQALHGSESVGCMRMLGYIQGKEAIDGVFPLTAKTMVKVANGSILSCLAYVPNCEWITQGWVFCTNFKVLNLGSYDMILGMDWLMHHSPMQVDWVKKTLTISWKNQSVTLQGIVSEIEQCARLSSQQFQKLKDRQAISHLIQLCAVSETSEQESIPSVVQQVLSQFAHVFEDPSGLPPSRMFDHAIPLLPGAMPVNVRPYRYTPAQKDEIEMQVKEMLTKGIIQPSSSPFSSPVLLVKKKDGTWRFCADYRHINAITIKNKYPLPIIDELLDELSGAQWFTKLDLRAGYHQIRMQSVDEHKTAFKTHHGHFEFRVMPFGLTSAPATFQSCMNSILSPLLRRFVLVFVDDILIYSKTLPEHVKHLQIVLQILTTHQLKVKKSKCSFAQQRLAYLGHIMSPNGVSTDEDKIQAVSNWPTPTSVKELRGFLGLAGYYQKFVRHYGLLSKPLTNLLRKGQLYIWTAETEQAFQALKHALITAPVLSMPDFNEPFIVETDASDKGIGAKGTENGAADALSRCPSADKVFELTAISSVIPNWIQEVVDGYMSDPEASSKVQQKILANLHTAPVGGHSVCEFLFYLSASKVRTCQIPWNVTTITCSRTCLVLAKVGEVAYKLALPATSLIHPVIHVSQLKKALAPSESLYPSLPRIQSRDDPHVVTWENAQELRLRFPQSEAWGQASSQGGGNVTAASSLKLDSNQTAAAQPVRRSKREAQPSIRFPKSVWTQ

SEQ ID NO: 106424 - protein, 98 aa, Oryza sativa
  Clone ID: PAT_MRT4530_1086C.1.pep
DPDINWPIHAREFTNRSRLPVLLLGVLLTPCGGNKNSRTRCLILTIHRTAVRTTLRKRYFVCVMCSGPCEPYTPPLHQHQKEATLDCRRTSFLSLAGP

SEQ ID NO: 106425 - protein, 165 aa, Oryza sativa
  unsure (1)..(165): unsure at all Xaa locations
  Clone ID: PAT_MRT4530_10870C.1.pep
PGEKIFWGRGPLNFFWNSNXGPGGQNMVFIGLRTPTRGGQDPPFSFKRAFCFWFTNVPQVFFQGFGPPFGAIKGGFRSNAKNPGPVNPRVIFFKNFSPHLGFVPGGPLFFWFPCPHFAGFLVQVFFFTKVFPIKPFGVWVKRGKPPKKIKKNPQKKKKKRKIYFK

SEQ ID NO: 106426 - protein, 153 aa, Oryza sativa
  unsure (1)..(153): unsure at all Xaa locations
  Clone ID: PAT_MRT4530_10871C.1.pep
KCSIYLLLQIFLAFRKVHSVSVMVTDKXIYLLSYDLXNIRVWYTFTYTGCIYTHSRNPLQNMXIIYTSQVISKVLLEVLHRDQDDSRYKRDPXGKGCKASNLIANTPTIVYEAGIHGAKSPGDLVEYINYDLIIILTYPNTLIIRYTSIIHRQ

SEQ ID NO: 106427 - protein, 88 aa, Oryza sativa
  Clone ID: PAT_MRT4530_10872C.1.pep
RRKRLRHAHAMASTSDSDEATSPAKRSFTTAAAGDREGDSGGPRLDGGGLGLGFLFSFFFCFFFFLHADGLSARTRKLVFTCGRATRT

SEQ ID NO: 106428 - protein, 94 aa, Oryza sativa
  Clone ID: PAT_MRT4530_10873C.1.pep
SCNVLRYLKRDSTMKHPHAGFVAVWLTPWLVACLPAGNGLMCWIEMEPIVGSVCLPGITPWPISAWGYCCVASITCINQCGGIYVGDGTTMIDL

SEQ ID NO: 106429 - protein, 268 aa, Oryza sativa
  Clone ID: PAT_MRT4530_10874C.1.pep
MDKRFACFSSALESNISLNSLTLLNLRGNNLNKGDIEDLCKILVKMPNLRDLDISDNPIMDEGIRLLICFISRTLRKEKSLSRLRAENCDLTNIGVTELLECLSSVSEPLNLLSIADNHLGSSVAVALAKFLGSGVRELNIEDIGFGPLGFQILEEALPADVALSHINVSKNRGGIRAARFVSRLIKQAPGLVSVNAGSNLLPPESMEVICDVLKQKNTCNLERLDLMGNMHLSDAAFPAALEFRKHGKQILIVPSQPGACAPYDDDP

SEQ ID NO: 106430 - protein, 69 aa, Oryza sativa
  unsure (1)..(69): unsure at all Xaa locations
  Clone ID: PAT_MRT4530_10875C.1.pep
MIHQPLEQIDPDQGNRTSPSYDAXTDSQSLIRHAERNQGRLSRIYIVSDAKGLIGRGFSDTCGQSEHKL

SEQ ID NO: 106431 - protein, 151 aa, Oryza sativa
  Clone ID: PAT_MRT4530_10876C.1.pep
MTACRPVVGHGRPTVAEGDLAAMHIVVDLAMDFFSPTVMESLMLEDKAMRLEILEVSNEECRREEEARGIEKAATASCLPQLLERVARGGDNHCYNGQWTCLFPVDLHNHYRRLCMLGLERLVAWWLCLGPDLLQRYIIDATGAVSRSHPT

SEQ ID NO: 106432 - protein, 259 aa, Oryza sativa
  Clone ID: PAT_MRT4530_10877C.1.pep
MDDYAREMMELKTLVTRTLEKKGVLAKIRAELRASVFEAIEEEDRVVENDDGGNPALLGSCNDRAKQLHASPSGRLLTALVSEYLEWAQLSHTMKVYLPECNLPKDFWKNELKDFSNKSGAEGSRSAESGPMLLDVLEGYLKYENLSQTRMAGTGRRIINSESDPALNAEHRNTRRPPSSSSVTGLPPMGRPMPSSQMSDRRGGSSASNARKDEYNWRYDADDISEEVLRASSALENVQLDRKARNLTTSWRHPGDGAE

SEQ ID NO: 106433 - protein, 130 aa, Oryza sativa
  Clone ID: PAT_MRT4530_10878C.1.pep
RGRVGGRVGGRVGGVTLSEEQLKYCQRKVKEAGLEDHMTFLLCDYRQIPTVRKYDRIISCEMIEGVGHEYMDDFFGCCESLLAQDGLFVLQFISIPEERYEEYRRSSDFIKEYISSRVLQDQCLFRVCGD

SEQ ID NO: 106434 - protein, 202 aa, Oryza sativa
  unsure (1)..(202): unsure at all Xaa locations
  Clone ID: PAT_MRT4530_10879C.1.pep
GRRRGSIPRTSVEKKTAAEVVAMLDLQRHPDGGFFLETFRDPSISLPKSALPPRYKVDRSGSNAIYFLLPAGEIAKLHRIPXAETWHYYMGEPLTVFEVHDDGQIKMTVVGPDLRHGQKPQYTVPPNVWFGAFLTCDIESFTEDGSVFVKTPGRDPELHYSFVGVTCAPAFQFEDNEMATRETMKTLAPKAEAFINYLVPSD

SEQ ID NO: 106435 - protein, 87 aa, Oryza sativa
  unsure (1)..(87): unsure at all Xaa locations
  Clone ID: PAT_MRT4530_1087C.1.pep
GKSTSXMFIFFLIHNTFNXXIILFFNTHTQHHFHTFSTHSFHTSAHHCHQHSPXNGTMSIVWLAGQSHFIFVHHHISPSHHCQHIAL

SEQ ID NO: 106436 - protein, 241 aa, Oryza sativa
  Clone ID: PAT_MRT4530_10880C.1.pep
MAMASSSSASAAAARGGSLVEEWSGRVKALEAGFRKWMAEQPTHIEAAVTTAVGAVQGAALGGLMGTLTADGGSPFPTPPPPPPNANPQAMASFKQAQALAGGPLVQARNFAVMTGANAGISCVMRRIRGGEDIQGSMAAAFGSGALFSIVSGMGTPNPVANAITTGAAFAIFQGGFFMIGQKFSKPQSEDLYYSRARSMLQKLGLEKYEKNFKKGLLTDQTLPLLTDRQVIVFVCNQHHF

SEQ ID NO: 106437 - protein, 55 aa, Oryza sativa
  Clone ID: PAT_MRT4530_10881C.1.pep
RNRIVRTIVKVVYFGVNKMHSIYYQCIVVHVHYMTGTTTLVVLLVITESLSSNLV

SEQ ID NO: 106438 - protein, 41 aa, Oryza sativa
  Clone ID: PAT_MRT4530_10882C.1.pep
LKLASDFDQLHPSDNRLAVSHSLMALGNSARDSSSVLGTQH

SEQ ID NO: 106439 - protein, 100 aa, Oryza sativa
  Clone ID: PAT_MRT4530_10883C.1.pep
MARHRVPTSRSTACLHLQRVPTAAVATGQQNESISACTTAQRCHRAAQNQDHGARRCHALPRTGPHGTMRVMRRARIIGDMLEPGLSAPCWYQLFTVAGD

SEQ ID NO: 106440 - protein, 140 aa, Oryza sativa
  Clone ID: PAT_MRT4530_10884C.1.pep
MTVATSAERRRANEKRPAAAASQLRYERPPRESPPLPTSATCRRGRWWWRAWQARRDPHAVPATEEAERGLAIRRGLGAGGMGDEQFGPPSRSQPATVSPARLTALALVRRGDASLFLFAVMQCSDRRVVLLWIIAAFGY

SEQ ID NO: 106441 - protein, 152 aa, Oryza sativa
  unsure (1)..(152): unsure at all Xaa locations
  Clone ID: PAT_MRT4530_10885C.1.pep
SLGLFNKYNEIPSVMAMKIVSCFLAVILIWEIPGVFELLWSPFTFLLGYKDPEPSKANLPLLHEWHFRSGLDRYIWIIGMIYAYFHPNVERWMEKLEESETKVRLSIKGTIISISLVAGYLWYEYIYKLDKITYNKYHPYTSWIPIXCYISL

SEQ ID NO: 106442 - protein, 297 aa, Oryza sativa
  Clone ID: PAT_MRT4530_10886C.1.pep
MEGAAVEDSAAAAPVVMDCVPDTPTQHPNPKALAPWVSNGTCPQKSARLYRAQTQATQTKSLRRSTEENFDVSPEEMRSVIEIIADTGKFWHDWSFLKRLLSLQLKQVLAEYSEGQVVSQEDGQLQNSFSGETYSELVIWLNDALLRFEEGPPFTLQRLCEILLDPKGTYTKLPKLALALEKNLLVTSTMTKCTDPYPAAHVSNLEATVMTENTSAVEVEPERLPEHPAAVPNGNVGGDADAEMADAEVEEPSNSHDVEMQEDKPDQISNVNPGATSDAAVTAETVDASEKSSDPQT

SEQ ID NO: 106443 - protein, 541 aa, Oryza sativa
  Clone ID: PAT_MRT4530_10887C.1.pep
MEVFGPVTAGQVSFLLGLFPVLIAWIYSEVLEYRKSSSMKVHSDSNLENGTVKEDDKTVLLEGGLSKSPSTKFRINSTKANLIRFITMDESFLLENRAVLRAMAEFGIVLVYFYICDRTNIFPESKKSYNRDLFLFLYILLIIASALTSLKKHHDKSAFSGKSILYLNRHQTEEWKGWMQVLFLMYHYFAATEIYNAIRVFIAAYVWMTGFGNFSYYYIKKDFSLARFAQMMWRLNFFVAFCCIVLDNDYMLYYICPMHTLFTLMVYGSLGLFNKYNEIPSVMAMKIVSCFLAVILIWEIPGVFELLWSPFTFLLGYKDPEPSKANLPLLHEWHFRSGLDRYIWIIGMIYAYFHPNSLCPSALLHHCLCRMQFIMLWFQVERWMEKLEESETKVRLSIKGTIISISLVAGYLWYEYIYKLDKITYNKYHPYTSWIPITWLGKITLETYISQIHIWLRSNMPNGQPKWLLSFIPGYPLLNFMLATAIYLLISYRVFELTGVLKSAFIPSRDNNRLYQNFVAGIAISVCLYFLSIVLLKIPIV

SEQ ID NO: 106444 - protein, 294 aa, Oryza sativa
  Clone ID: PAT_MRT4530_10888C.1.pep
MGSIVIEGWTASEIEEARSLITSPNNGGEGGDGEGNKQKHCGHIVMELHEWFPWKTIGQVIGLYMKLNAGKPMVMHSLNKSDANNSIGEVDHVSALANGNPVRLEEHRPMLNNEEVQPKEGLVIKEKEAGVSKIHTNSQHVTPSIKRRVIWTEEEHRLFMVGLRVFGRGDWKNISKHLVTTRTAAQVSSHAQKFFLKMEARGEAVPPPAKRRRRRITGDQQAAAAEHAAALRRRMPVPPPPFNPFLLPSLVAPVMHRLLPPGSQAAGAAASGSGGQGASLPQMPWINGANGMGR

SEQ ID NO: 106445 - protein, 105 aa, Oryza sativa
  Clone ID: PAT_MRT4530_10889C.1.pep
MVRTGTMFREEQRSSAVGIPCEKVTRVRILGGQLRSTVGIGTRLREELRSRRSRIPGDEVGYEMIACMCAWCMHVRDLDWEEQQRLGWMACPTPSRKWQAHGFRR

SEQ ID NO: 106446 - protein, 68 aa, Oryza sativa
  Clone ID: PAT_MRT4530_1088C.1.pep
SRTAKSRRARRAGHRNSGVALSHPPATSSGGPAAQPIRAGRLAAGAGRHLHVHRHLPGVGVGCAGGVL

SEQ ID NO: 106447 - protein, 74 aa, Oryza sativa
  Clone ID: PAT_MRT4530_10890C.1.pep
MPWNNFEKTLLGPNGTQANVFWAGFCTPQRFYLQEIYQKINGPTKFAKQWSLWGKPSCFLFQGKPLNGSVKPTF

SEQ ID NO: 106448 - protein, 146 aa, Oryza sativa
  unsure (1)..(146): unsure at all Xaa locations
  Clone ID: PAT_MRT4530_10891C.1.pep
MVRTGTMFREEQRSSAVGIPCEKVTRVRILGGQLRSTVGIGTRLREELRSRRSRIPGDEVGYEMVYGGWTPCERDLRNGLHEIRDLDWEEQQRLGWMAXRPRAGNGRRTGRLRLCSSSICVSPGSGGREVIRPAATGLRRDFHRFE

SEQ ID NO: 106449 - protein, 359 aa, Oryza sativa
  Clone ID: PAT_MRT4530_10892C.1.pep
MSSAAMKLAVVAALISAAAVGARACLDVGFYDTTCPTAETLIQQVVAAAFRNDSGVAPAMIRMHFHDCFVRGCDGSVLIDTVPGSTTRAEKDAAPNNPSLRFFDVIDRAKSAVEAACPGVVSCADVVAFMARDGVVLSGGLGYQVPAGRRDGRTSLEDDALNFLPPPTSTAADLVANFTAKNLTAEDMVVLSGAHTIGVSHCDSFTNRIYNFPNTTDGIDPSLSKAYAFLLKGICPPNSNQTFPTTTTFMDILTPTKFDNRYYVGLTNNLGLFQSDAALLTDAALKATVNSFVRSEATFRLKFARAMIKMGQIGVLSGTQGEIRLNCRVVNPVNVTATAADDHHLTSSSSSSSDEVAAS

SEQ ID NO: 106450 - protein, 118 aa, Oryza sativa
  Clone ID: PAT_MRT4530_10893C.1.pep
EFSRSLHLRGTDYGGSSPIHHIQGMRTARPDGRCSSSASSGDLLAKTEPIKDSAWEGCVQLLSCVPKLTVTLSRLRQTMLEQSDGDEWAYGPNEKAIITRGQEPLDAQATAIGSPTSL

SEQ ID NO: 106451 - protein, 152 aa, Oryza sativa
  Clone ID: PAT_MRT4530_10894C.1.pep
GPPPGHCSFALNFCKHRPVFSRPDLFPGLGPTLKGWPLPSQVFPFGPTPQTRLGWFFFFPPPPVFPPPRKDPFPPFLLPACCLNFSTKESQSLFLKGGPPPPPFLTLGYFMVFSPQFFSFFPPRFFFFHFPPFNLNKVFFSPLIRGLPPLGL

SEQ ID NO: 106452 - protein, 159 aa, Oryza sativa
  unsure (1)..(159): unsure at all Xaa locations
  Clone ID: PAT_MRT4530_10895C.1.pep
SISLYFQFCHHFVFFALVEVTVGECEGGDDGKFTDEIYHGGSFVSYGSSRAYIDEKVNXFNHCDAKSWYAIXIDDFQAMLGYDRXANLKAYWLLRGKILXDGLRVISTQSDFQVTASVVDMVKQFVLYXDQDDTIAGVYWEDVVAHPVSQLPKVEFLKM

SEQ ID NO: 106453 - protein, 64 aa, Oryza sativa
  Clone ID: PAT_MRT4530_10896C.1.pep
MAGSAVLRPSDGNVVFRRNACILDTSDGRTLHPKLQIQWLVLGSKGGNGNPVHGLEGPHRLPMS

SEQ ID NO: 106454 - protein, 453 aa, Oryza sativa
  Clone ID: PAT_MRT4530_10897C.1.pep
MAYPPLSSAAFAGTECTAWRASGCGDGDGDAAAEALARGLTLLVRLADPPAVSALAIRPADGVFLNAASVDVADGNLVILSAAFYGFPRRYYLIYDVAEASLAITPHLPRFCKPSFTLKPLPVRRRRRPRVGEAVVVDDGDDHRNYVLVLVAINFNKDDIICLWPPDPSWSSSSSLPWQRKETRFPVEMNRPWEQYGFSADSVFTLNGIAYWVDLALGVLYCKTSDLLLSDRDVVVEFSFIDLPPGYRADRNLFRPKMFRTLGYVGGSIKFVSVDGYHKREETYFNTEDEEEEEDGDDCIIEPVAAAERKITMWSLIPGGNLGWKKDAEFSVGDLWMWEEFQSIGLPRQQPINPILDPQEDGNPRIETKRWDYRPCQTPQLGLRSHSSCNFRPGPLLKVEHSVVPIFPDHPSYQCRKVDAGVVFDPGVPAGVAGVPPDVVGFAGDDTGTPAAV

SEQ ID NO: 106455 - protein, 240 aa, Oryza sativa
  Clone ID: PAT_MRT4530_10898C.1.pep
MFRYITKESQGPSGDQTLDSDVANEPNDSETEIETTVVEPNDILAQLGPKRDLSIQKGPKDRLSRGFSALFYTRNLSNGDEYDRDWLVYSKELDSVLCFYCKSFTKGREYRYRKGQLTNEGFNDWLHLSSRLREHETSPDHVLNMTNWYELRNRLQKDQTIDKSAQRQLKKEKDHWRKVLFRILAIVKFLAKHNLLAFRGSNSKLYEDSNGNFLGMVETLAKFDPVIQEHIRRITNEETH

SEQ ID NO: 106456 - protein, 753 aa, Oryza sativa
  Clone ID: PAT_MRT4530_10899C.1.pep
MTPTMKSVIRKKRIEDLTQSQRGAMFRYITKESQGPSGDQTLDSDVANEPNDGETEIETTVDDVLSESTHEQVENHGDGDNVDDSSVHIDLDSSDTAFQPEIFDPRCWDSLDAKQLDILAQLGPKRDLSIQKGPKDRLFRRSALLYTRILSNREKYDRDWLVYSKELDRVFCFCCKLFTKGREHRYQRLQKDQTIDKAAQRQLEKEKDHWRKVLLRILVIVKFLAKHNLAFRGSNSKLYEDSNGNFLGMVEMLAEFDSVIQEHIRRITNEETHVHFLGPRIQNELIHLLACDVKKWHILKDNMTGLILKSVSTTRWESRVESVKAIRFQCAKIREALLQVSESDNEPLTSSEAKGLANNELGEYEFLVAIVIWYEVLYAVNLVSKSLQGKDMLIDVAVEKVQGLISFFKGYRETGFLNALKMSKEIALEMNIGTTFHKKREIKRKRHFDENRGEESVASQTAEDSFRINYFIHVIDQAISSLTRRFEQYQGYQKIFGFLFTSDTLLSKDSNDLKSSCDRLEAALKKDGKFDIDATELHVELIFLQSFISQEKLGPVEILKFLKRHDCFPNATIAYRILLTIPVTIASAEWSFSKLKLLKSYLRSTMSQERLNGLAIIALEGGMLGRINIKLSLKILFQETLKECRFSSEYYAQFLSFFMTSHMAPKFDGTALTEGVAKSGMTFSGLDGRDAASKWSDQGGKGERVPASLEVDDTSLPRWRGGDKAAVTLVSSSLRLTTTGSSTACFYIPLPAH

SEQ ID NO: 106457 - protein, 418 aa, Oryza sativa
  Clone ID: PAT_MRT4530_1089C.1.pep
MEAAVDGRWTRVRTLGRGASGAVVSLAADDRSGALFAVKSAAAAAAAEQLVREGRILSGLRSPHVLPCLGFRAEAGGECQLFLEFAPGGSLADVVARSGGRLDECAIRAYAADVARGLAYLHGMSLVHGDVKGRNVVVGADGRAKIADFGCARTVGSDRPIGGTPAFMAPEVARGEEQEPAADVWALGCTVIEMATGRAPWSDMEDILSAVRRIGYTDAVPEVPEWLSAEAKDFLARCFARNPRERWTSSQLLEHPFLASAGCSVKTGEAAPQWVSPKSTLDVAFWESDTDDEEDDMPASPAERIKALACPCSALPDWDSDEGWIQVLNESSEACDTAVAKVEAEGKGRVLIEALETINESSGGDAECVDPEGTVRLITVASIGQQEVFCLGLINDPLVFSVNKSELTKSLFPQIVSF

SEQ ID NO: 106458 - protein, 111 aa, Oryza sativa
  unsure (1)..(111): unsure at all Xaa locations
  Clone ID: PAT_MRT4530_108C.1.pep
SLDDVVKVCQFLDDDEEKIYPLLNEVDLGAFTNCSSALGTLKPSRTVLRLFIDLEMWLMMMMTMELHKLFFGPLTDDXLMKALHKLFFGPSLIDDDHDDKLRHGDDEPTRK

SEQ ID NO: 106459 - protein, 83 aa, Oryza sativa
  Clone ID: PAT_MRT4530_10900C.1.pep
LRKQLLVIPTRLVTSSKDTGNNNNTIRHSNILIMINEQKHSSIFSWITDHCSLPPTIIDSLQDSSYTSSSSSSSSVTSCWISA

SEQ ID NO: 106460 - protein, 49 aa, Oryza sativa
  Clone ID: PAT_MRT4530_10901C.1.pep
MTRLPQEGPRKSVVGPTAARHVCATGAQPVHSTGDYGQIKNATESNSSA

SEQ ID NO: 106461 - protein, 54 aa, Oryza sativa
  Clone ID: PAT_MRT4530_10902C.1.pep
RRTYNFCNSLSLRCIPDVDNFVTPGSPTFPTTNYLTTCEPRTTTDCKTALVCCL

SEQ ID NO: 106462 - protein, 606 aa, Oryza sativa
  Clone ID: PAT_MRT4530_10903C.1.pep
MIAAIRATTAVLKATSPTTPMASPPLAPTKCLTECPNNNITWVAANSNHIGEMLAPTAAWELGDRKDMDQAPYIATKDLPKVTPTKCSTLCSSFDNKPDLTVAVVVTCATSVKSLMELVATDSTTSGTHIDTPDSTKAMPTNCLMFGMMVNTGTIQTGVVFPLFLDKLDIVTVLTLHWAGLKPWPPPHEDDLTYILVNQREVELWRTILVDHNKEGLLMIIELYVLDLNDCCLSWSHLILASVLVVELSSTRQCGYEIISFKSNHVDKLKLFGMSINVLEQCEHLEGDLIRLIIKEKLMPWNSGMGICLCCLLVIQLPVGKLKWNVSVISLFHLLITKVNEFPRGITTGGKSTLWTSSECTCVGLHRRYPVLLPFWISRAEKWVMRHIGMTILVPESWQQASYKVLYGAEKLLNLNAEDKSYTRVKSFEEGASSVQYKVCPFGLVPASVVLDDVAYTTSGTTWHYKCLTDKMRMPRAEVNHKPMWTRYLSKQGCHSLQHTKMLSLNVGKKINTLLLLYVTQERFKGIEKLSARGARGYILLAWDKPNLKKRGLSCIVGLIMSFVDYSPIQPNKAQLERQQSSTNKVLGSHRTEQASAASATAAAAS

SEQ ID NO: 106463 - protein, 214 aa, Oryza sativa
  Clone ID: PAT_MRT4530_10904C.1.pep
MPSQSSPQTLNGKLKLNTSTTILLFIVFLFTLCIISCEARHDHLRISDKYSSKKSSLVPKDVAGDDVVGSKQPIDQSVGKEVTLNAKMELAASSGSSSGSLNKRFEGTKVRSVARERSVLGAETNREQVGSKPATTAYTAETLAAMDYPVAHTAPAVHNRITKYGGMSESKHEFAMCMPFAEGGFRYQLHMLDLFPALVSSQRTCLGKFSRNIS

SEQ ID NO: 106464 - protein, 56 aa, Oryza sativa
  Clone ID: PAT_MRT4530_10905C.1.pep
MAAASPESRPPRSLFDLPADFFDSSSLLGSHPSSAPSAPLNSSRCRNSASTSSLIS

SEQ ID NO: 106465 - protein, 153 aa, Oryza sativa
  unsure (1)..(153): unsure at all Xaa locations
  Clone ID: PAT_MRT4530_10906C.1.pep
AATKIILVIALLGIDACNDYAQSDVXVQDHCTDXMHSTALLQEHVLTPYTEFAREXYQCLDGSAYIATKLRASSRNHPQCGRQLRAGWGSRCYYQDMNIVHAIAQXLQLHQFEDLYXDRNLHSSXQALLRYNVPCIDWLXPNDYGVRTTITTL

SEQ ID NO: 106466 - protein, 97 aa, Oryza sativa
  Clone ID: PAT_MRT4530_10907C.1.pep
MGITSHWVVAEDIVADRSEREQYTRMRSLERPIRGASAGGVGFGASSVSFSAVSSSAVSVRLRCGMVPAAWLGFGVEVVGGVLGKAALLYGKLGVRR

SEQ ID NO: 106467 - protein, 129 aa, Oryza sativa
  Clone ID: PAT_MRT4530_10908C.1.pep
MQNSHLLVALFLPFCLPWFSCLSGRLSTAAMRKIRLTGSEPSLKRRGFFRYRRLPVEAQSLSTAADDKSLRLHGGQLRNYSSTSMSNESLVPNHNIGLLGRIQQLIDSHQSRRCRTAAFDVLRKVLKHA

SEQ ID NO: 106468 - protein, 485 aa, Oryza sativa
  Clone ID: PAT_MRT4530_10909C.1.pep
MGFAYRIASASEYLAITGYGIADVKLAKKAWVAPGQRCTRFDISPVNYTFEVQAMSAEKLPFILPAVFTIGPRADDDDCLLRYAKLISPHDKLSHHVNELVKGVIEGETRVLAASMTMEEIFQGTKSFKQAVFENVQLELNQFGLIIYNANVKQLVDVAGHEYFSYLGQKTQQEAVNQAKVDVAEARMKGEVGAKERDGMTRQNAAKVDAETKVYTVKRQGEGAKEEARVKAEVKVFENEREAEVAEANADLAMKKAGWQRQAMVAEVEAAKAVAIREAELQVEVERTNASRQTEKLKAEHLSKAVVDYEMKVQEANWELYNRQKAAEALLYEQEKQAEARRASADAAFFARQREAEAELYAKQKEAEGLVAMGDAQSAYLSAMLGALGGSYAALRDYLMVSSGVYQEMARINADAIRGLEPKISVWSNGAGAGGEVGEGGGAMKEVAGVYKMLPPLLTTVHEQTGMLPPAWMGTLTGGAPSSTS

SEQ ID NO: 106469 - protein, 217 aa, Oryza sativa
  Clone ID: PAT_MRT4530_1090C.1.pep
MSAVAVAALTNDLLREVFLLCSPPLQTSSAPLSPAGRLFLCTARDATFLHRFSCLHGPLLDPRSPPLMLGLVDSAFLGWRLLPLLLPPGGPSRTGVAVVAAIYRARAAADTRGGAASEAESTQRRTCPICNAVVALLDTREFDEATTLLVSTGHDGGGAVQLCKKGCDHACDARLPEMLVACNSAVKRLCNVATDITRMIACFINIIDQTSVWVTIA

SEQ ID NO: 106470 - protein, 616 aa, Oryza sativa
  unsure (1)..(616): unsure at all Xaa locations
  Clone ID: PAT_MRT4530_10910C.1.pep
MEQPLFELCAPRDEFYEPPSSSEPILTPSYEIRIEFISMVREKSFSGLGQENPFHHLQEFEKLCSCLKIRDMKQETVRWKLFPFSLHERAKQWYTSTVGCFXPXWGTPPXQAIVXXPPXLTRITTLHVEILSFQQINKESIGAAWFRFTNLVQSGPTLSIPNYVLLQHFHAGLGRESAFHLDITAGGTFMHKTPSEGKEILDRILEITSFIEQHSEPLQKVSVSKQEEPSIAKSESNPSTPSVSAKVSSLEPSAPKNEEFQTSGCALDFRGDLHNDHENSLTDIPPDDAPIEEAMAVLLHESPESIVELQSKEPPSQPPIEPEPCPSGHQNVVLDICQETTLFLHDASLEKEKLQAMDKLETSTLEDENSTNEHENFSFKIPXDSCLHKESLEFYPISITSLCENHNHLSGLISNMFRRLVVDAFVYHKYCKSRMCLXLILXRDVSMVELVTINKALPGDTPDYLVVALTTAGADRGDLRAKPLRANATEEGREGEGYKAKGKRSWGKMAAEEGAEPSVPIAEDGGAPSASAPVPSLPPSAPAASGQVPNTADMAKQSRWQGHSRPGRRSFWQANYWCPKPPRRSRLRPRLRLLLYKSTMTLKHRLKPTWKPCDKT

SEQ ID NO: 106471 - protein, 692 aa, Oryza sativa
  Clone ID: PAT_MRT4530_10911C.1.pep
MPPKKVTKEKVAKRKDSEAGGEMPAEEGVEPSASVVEAGVAPSASAPAPQPPSLAPTASMGPVSNTVDAARAAVAARVLQTRAEILSTSQLVAPQPASSQPASTSTASTTAQVNFNLEAQAKADMEAMRQNMARLQDMLGQMQEQQQAYEAARQAKAASAPILQYSAGYIPPQVYPQASIQVLPPQVMQAPACFAGQPSAATICPTLHVQAQVRPVAAQVHPPQPAQTSQALAEGASALQARFQAFLQQLNQLHNTSSTTPSVRPEGNASQGATSWLPSNQPGPGALLWSQGPQFDPNTATQVPTIRPQATASGFRTNQAPNQVAMAWTQPMFDPSMAAHQAPPFGAGQPNPMAQPHAQDMTSPFATPYPQPNWPSQQGAVNKAGGEKGLPLSWGIKNHPIPPQFKFPPVPRYSGETDPKEFLYIYESAFEAAYGDENTKAKINKESIGAAWSRFTNLVLSGPTLSIPDYVLLQHFHTGLDRESAFYLDITAGGLFMHKTPVEGKEILNRISENTSFVRRYVESHPEAFVSGREEPSFAKPELEPSTSSGLTKESSLEPSPDSKEIQAPNCAPRFRDDPHSDYGKTLMGILPDNTLIEEDDLRFIQKDSGETLEFHSKEPLSQPPIEPEPCPSGHQNVILDICQETTLFLHDASLEKENLQAMDKLETSTLEDENSTNEHESFSFKFPQESC

SEQ ID NO: 106472 - protein, 123 aa, Oryza sativa
  Clone ID: PAT_MRT4530_10912C.1.pep
MLSSLSAWLVNPRRNPLARLHMNAVASRLRKYGLRYDDLYDPYHDLDIKEALARLPREVVDARNQRLKRAMDLSMKHQYLPADAQAKQTPFRGYLSDMLALVKKESAEREALGALPLYQRTIP

SEQ ID NO: 106473 - protein, 90 aa, Oryza sativa
  unsure (1)..(90): unsure at all Xaa locations
  Clone ID: PAT_MRT4530_10913C.1.pep
LEGEGCPRRHVALPRGGIGPKXGGGHSLPEIGRRRLPPNTTWPSPEEGRARGRAAATPWPRLEREGCPRRHVALPRGGIGPEVRRRPPPP

SEQ ID NO: 106474 - protein, 145 aa, Oryza sativa
  Clone ID: PAT_MRT4530_10914C.1.pep
MLSSLSAWLVNPRRNPLARLHMNAVASRLRKYGLRYDDLYDPYHDLDIKEALARLPREVVDARNQRLKRAMDLSMKHQYLPADAQVEQDFAIILGSFGSVPHSVCMYAKQTPFRGYLSDMLALVKKESAEREALGALPLYQRTIP

SEQ ID NO: 106475 - protein, 67 aa, Oryza sativa
  Clone ID: PAT_MRT4530_10915C.1.pep
MEATQEEDCHSYCGSSSSVLCEDGSDDAAASRTPLPFDLNMPPPEEELDMAAVADQMGIRYDTLLRL

SEQ ID NO: 106476 - protein, 767 aa, Oryza sativa
  unsure (1)..(767): unsure at all Xaa locations
  Clone ID: PAT_MRT4530_10916C.1.pep
MAGFADALRSDKCTSVHFMRWQIKVTLWLMAMKCFXVSNGKPEGVLTTEKQKEFEEATTLFVGCLFNVLGDRLVYVYMHMTDTKELLDAMNTKFGATDASNDMYVMEQFLDYRMVDNHSVVEXAHEIHTMAKELELLKCVLPDKFVAGCIIVKLSPSWRCFSTALKHKRQEYSVEGLIASLDVEEKVREKDAASKGDGGQSSANVVHKXQNKYKEKYKPQQSTNFKKRKRXNSSPNQDERTSFVCELHCHLEVSTTQGMMAPVGQSSKSANVTIDNTGDRSRYGNLPTVFLVDRXTNWWIDTGANAHVCADISQFSSYQITQDSTVLMGNRSHASVHGVGMVHLKFTXGKIMQLKNMQHVPTINRNLVSGSRLYRYGFKLVFESIKVVVSKNGYFIGKGYECRGLFRFSLSNFCNKSVNHICGSVDDEANVWHSHLCHINFDLMSQLSSIRLIPKFSIVKGSNCHSCVQSKQLCKPHKAIEERNLASLELLYSDIFETNGVLTKGGKQYFMTLINDATRFCYLYLLKMKDXALDYIXIYKAEVENQLDRKIKRLRSDHGGXFFSNEFDLFCEEYSIIHERTDHYSSESNGTAKRKNHTLTDLVNAKLDTAGLPKAWWGEVLLTSNHVLNRVPNRNKEKTPCGIWIRKKPSLSYLRTWGCLAKINVSTTKKHKLRPKTVDYVFLGYAYNNIAYRFLIVKFEEPVMHVGTIMETRHATFFERFFPMKDTHSTSSQSSEIIHSSITPPEQIEHTNELVTXEDYSEAPQRS

SEQ ID NO: 106477 - protein, 554 aa, Oryza sativa
  Clone ID: PAT_MRT4530_10917C.1.pep
MSTRSAFLAAGVAIAAAIFLLRPASDLSRDLGEAVADMILANATIYTADPAMPFAEAMAELKGRHTMELNLSGNVVLPGFIDSHVHFIDGGLQLARVPLRGVTSKDDFINRVKEAVKDKHPGQWIFGGGWNNDFWGGDYPTAAWLDDISPDNPVWLSRMDGHMGIANSLAMRMAGINKNTNNPVGGTIMRTTEGEPTGLLVDAAMKLVFDVISEVSIHERRDALLRASRHALMRGVTTVVDVGSYFPGKSEKQVWQDFTDIYEWAHSVETMIMRVCLFFPMPTWSRVYDLIHEKGRMLSQWIHLGGVKAFLDGSLGSSSALFYEHYKDDPRSYGLQLVDMDYLLNTTLELDKSGLQIAIHAIGDKANDMLLDMYEKVVDLNGMKDHRFRIEHAQHLAPGAAKRFGKHGIIASVQPDHILDDANSAGKKIGIERAERSSYSFRSLLDGGAHLAFGSDWPVSDINPLQAIRTAVSRKPVGWEVPWIPAERLSLDDSLKAHTISAAYACFLDHVLGSLSEGKYADFVILPSTSWNEFGSDITDHVLATYVNGKQAYP

SEQ ID NO: 106478 - protein, 586 aa, Oryza sativa
  Clone ID: PAT_MRT4530_10918C.1.pep
MGLLSSLRPHRRGALSGGGGGGGGQWQWSFLDAVWAVFLLAVVIFLALVFTPRRGEPLSASSSALAGATVPPCAASEVDLLPCEDPRRSSRLSREMNYYRERHCPARGEAPVCLVPPPRGYRVPVPWPESLHKIWHDNMPYGKIAERKGHQGWMKQEGSYFIFPGGGTMFPDGAEQYIEKLAQYVPLKSGLLRTGLDMGCGVASFGGFLLKENILTLSFAPRDSHKSQIQFALERGIPAFLLMLGTRRLPFPAQSFDFVHCSRCLIPFMAYNGSYLIEVDRLLRPGGYLIISGPPVQWKKQEKEWAELQEMALAFCYKLITVDGNTAIWKKPTEASCLPNQNGFNIDLCSTDDDPDQAWYFKLKKCVSKVSLADEIAVGSILKWPDRLSKPSARASLMDNGANLFELDTQKWVKRVSFYKKSLGVKLGTAKIRNVMDMNAYLGGLAAAAVSDPVWVMNVVPAQKPLTLGVIYDRGLIGVYHDWCEPFSTYPRTYDLIHADRINSLIRDPISGKSRCDLFDVMLEMDRILRPEGIAVVRDSPDVIDKAAQVAQSIRWTVQVHDSEPESGGTEKILVATKTFWKLPLT

SEQ ID NO: 106479 - protein, 110 aa, Oryza sativa
  unsure (1)..(110): unsure at all Xaa locations
  Clone ID: PAT_MRT4530_10919C.1.pep
KGLIRIKKESVDGDTRKPDIESTGVRWSKDLRNTTSSTQKTKIILVIVLIQLIWDYMMETTYYKGKXAELDDTDEIVIEQAVVDGLTMRFDALGPPGGXPFYIAGQLVSK

SEQ ID NO: 106480 - protein, 326 aa, Oryza sativa
  Clone ID: PAT_MRT4530_1091C.1.pep
MEKKQRPGREKRVDREGYGNPHARLINDVDEACNHPGDVSGDVAKAFDSAVARDEHLRQPRIACMVAPLLAQLHSSASVVPGADQQRRRLVELAGVQQRHHRVADGAGTPLRTFCFASSTTARVRCCPRAVNGSDDSDSGPRRPCKSISAMLAGAHDDVGGEAAASAAKQEAKGNGDGDGEAAPLLRRPQLRSDYSTHRPPPGGRSRGRSRHPRKAESTSPSISGGDRGSRSGPWRQLKRWRKVASRAVQRKSLPAGERGADEVCSGGEHRRKTSRRRSLVSAATATADMPFPSSLPTPLRRSHPGKRMGGPEEGEGEGEETKKRG

SEQ ID NO: 106481 - protein, 147 aa, Oryza sativa
  Clone ID: PAT_MRT4530_10920C.1.pep
CHLSRQVEKPTPCLIWSLVKLVSNQTSPQFVPPPPSPPPPLPPPPPPPPPPPQPPPPPPPPPPPPPPPPPPPPPPPPPPPPPPPPPPPPPPPPPPPPPPPPPPPPPPPPLPPPPPPPPPPPPPPPPPPPPPPPPPPPPPPHPCLLAS

SEQ ID NO: 106482 - protein, 82 aa, Oryza sativa
  Clone ID: PAT_MRT4530_10921C.1.pep
MHREAVHATNYRDNHPSTYRRTAHAITPYRREGTNWVNHSSAFDNSLRNQKNKFASLSRLTLEQEFQELGYIALVEFQLGGK

SEQ ID NO: 106483 - protein, 163 aa, Oryza sativa
  Clone ID: PAT_MRT4530_10922C.1.pep
MVGCAGSAQPGGGKGGTMCNRRKETLAQSEKIGYALEQSENLVTKSVPGPRQFLVISEATEGVKWAGQKRFFSMERNANGFKLMESARLAVKKIKALGNARIEIDPRNEFYVVAVATAISLWLMSRQYRSLGDPTFPGGSMKKLQAWKRVSKLNSGKSNNADE

SEQ ID NO: 106484 - protein, 439 aa, Oryza sativa
  Clone ID: PAT_MRT4530_10923C.1.pep
MGAARGGVRRVRREALVACMTCPLCKGLLREATAITECLHTFCKECIMEKIDDEEVDHCPVCNIDLGCDPEEKLRPDHNVQDIRNKVFPLKVKKVGAPKAPTVTLPVKRKQRSLSSLVVDTPRVAVQTGLTGRRTKTARRTAVSHVNSPGNNGTIKLANKSEGRDHKTQKISAAQSAKMTKTGNKKKNNTDVDVTIQSSSEDRKDDHTIDKEDLKKPLNSLVDTANRTKFFRSGPKGQAAKEDKIKNSIKLLAEDDTEDKLVVTGRKVMPCSNKLKVKEENNRSPSQSASSKDKTTSDYELRKGQHADSQQGQIGSTRTGALHDGITRPVWFLLVPSPDQKQDPRLPQLPTYYVRIKDGSLQTSLIQRYIMNKLDLASEDEVEITCHGEAISPSTTLQGLLELWLKSSPVEQVQASLGAQAKEFVMELGYRRPQRPPSS

SEQ ID NO: 106485 - protein, 118 aa, Oryza sativa
  Clone ID: PAT_MRT4530_10924C.1.pep
MRLAEEAGLASPLDELLPPVDFCCAYGSTLLHARSGAASMIDYILGIPDPLQWHSENLERNPAHYSGWMARLGPGAVRTTLDGWLASAPTLIGVGVYFNPFVEWRDKRIKYAGGLMMS

SEQ ID NO: 106486 - protein, 100 aa, Oryza sativa
  Clone ID: PAT_MRT4530_10925C.1.pep
LFVFPKVGAGLPVIASVTHIIASGDPVCLLWFSHIVGSLSGTLGYVMSELEDGKRFSEVVKTARSLGYTEPGQKKNFIHLWHYKINVYSVFIRYLSLQLS

SEQ ID NO: 106487 - protein, 173 aa, Oryza sativa
  Clone ID: PAT_MRT4530_10926C.1.pep
MRLAEEAGLASPLDELLPPVDFCCAYGSTLLHARSGAASMIDYILGIPDPLQWHSENLERNPAHYSGWMARLGPGAITRLADSIGVGVYFNPFVEWRDKVGAGLPVIASVTHIIASGDPVCLLWFSHIVGSLSGTLGYVMSELEDGKRFSEVVKTASFPEFSDACDKFTYSAI

SEQ ID NO: 106488 - protein, 444 aa, Oryza sativa
  unsure (1)..(444): unsure at all Xaa locations
  Clone ID: PAT_MRT4530_10927C.1.pep
SRKLFGQVRKFPVLQNIVLDVFGKVRKLLMLQKDDSIICVLPGLVTTFSSXFTFSSHQNFTTHTNFGSGEVDRLGGGRTFYDDPGVAYTIDRPIVGWDEKRAEWLRAHPELAGGGGERVLMVSGSQPEPCGSPAGDSLLTRLLKNKLDYCRLNGVQLLYNTALLRPSMDRYWAKIPVVRAAMVAHPEAEWVWWVDSDAVLTDMDFRLPLSRYRDHNFVAHGWPHLVYESRSWTSLNAGVFLIRNCQWSLDFMDAWAAMGPDSPEYQHWGAVLTSTFKDKVFNESDDQSALVYMLLQSGSPWRDKVYLESDYYFEGYWLEIAGRLGNITERYEAMERGAAPLRRRHAEAEHASYAAARDAALAGAGLAESGVSGWRRPFVTHFTGCQPCSGHRNEHYTGKSCDEGIRRALSFADDQVLRAYGFRHAGPLSDAVSPLPFDHPTQTA

SEQ ID NO: 106489 - protein, 476 aa, Oryza sativa
  unsure (1)..(476): unsure at all Xaa locations
  Clone ID: PAT_MRT4530_10928C.1.pep
MTTTTTTTNHSAKSILLLALLLVPHLAAASSGDALISQRRRLLDYHGGGGGHGGGDVYVDPSYTFPNARLRDAYVAMQAWKRAVLSDPHNVTGTWIGPDVCAYEGVFCAAARDDPHLVVVASVDLNHADMAGHLPDELGLLADLAVLHANSNRFCGAVPSTLERLHLLHELDLSNNRLVGAFPDVVLRLPSLRYLDLRFNDFEGPVPAELFDRPLDAIFLNSNRLRFRIPDNVGNSPASVLVLANNDFGGCLPASVANMSGTLDEIILMNTGLKSCIPPELGMLTGLAVLDVSHNSLMGAIPGELARLENIEQLDLGHNRLTGDVPEGICHLPHLQNFTYSYNFITGEPPXCKKFVLPSPPPPPPSPPPPSPPPPSPSPPPPSPPPPSPPPPSPSPPPPSPPPPSPPPPSPSPPPPSPPPPSPPPPSPVYYSSPPPPYYEVSPEDRYLSPPPPPAYHEAPPPPYYEVSPEDRTSSE

SEQ ID NO: 106490 - protein, 161 aa, Oryza sativa
  Clone ID: PAT_MRT4530_10929C.1.pep
GYCFIAANATRGPPSSLTAARWPGELLPRPPASISRRSSGHFFTSSTPRSSRPREPPNAAGGGGGAGQPARRAPPAGGLLLRVRLNPPPRALRRGLHDRLHPRHPRPAPVALRELGEESRALLRMDGSPRPRRCTHYSGWMARLGPDAVCVHSSPLNWLLL

SEQ ID NO: 106491 - protein, 514 aa, Oryza sativa
  unsure (1)..(514): unsure at all Xaa locations
  Clone ID: PAT_MRT4530_1092C.1.pep
MDLEKSSSNSASMKKLQDDGALPGRGTMQREAGGTESEPILGRMVVVEDYVSCGFLPPPSEFLLLVLNFYGLSLLHLNPNSIAFLSIFSHLCKAYIRVVPFLDLFHFYYELRWMESNRXVSGCVRFRLRDGLKSRYIPFXCPTSRSKWXEWFYLQIENSDPVLVIPKDKPEKILEWTAKPALTCSLQSFIDIIDDLRKRGLSGYEVAADFAGLDNDTALPLTDAIRPLVDHQAATSLKEGIAKEASDAVATTTSGSNVLLRARDSPEGDEPTDLGASPPPQRKQRLVTVGEKMVRAKAAHSGADAASTVSPAATSTEVVAATKDQEAAPPCDPEYLCQCRYVDVENVQQRGQPDTPYWKTKLEVAELERTIVEANKDQAVETLRGHEVWFNSYLKSCCTAMSEVCIELRVPRGDPKESATGYISRMKGACAQLEGIGKRIDEALKQECRRASRYTRGHVLACIRDHRPQLHLEFLREGFSRSRRTSAEIDGLAQSMAPLAEKVFCSMDWRWPSW

SEQ ID NO: 106492 - protein, 864 aa, Oryza sativa
  unsure (1)..(864): unsure at all Xaa locations
  Clone ID: PAT_MRT4530_10930C.1.pep
MAQDAGDAVLPASRITAERHLSLIRKIMLEDAAVRAGETRPRYPERSAHLLSFAMVGLIPPFSRFFHEVLDFYEIHALHLAPNAVMTLAIFAHLFEMFVGVRPTMRLFQFFFVPQLLQCAVVGGCYFQPRPGVAGQYIESHLRKXSRGAWEYTGHNDPXRTHVGKRWDWGEEDAKTVVRRVLGLDTVEQTLIPDGILPLCSDHDRDNILAVMSVVGAGRGRSRRGTVGGGSGGDGVGSSGTTAGSSRTGGSGGGGGSRAPGRKNKLLRKIGQTEPCRGSFIEPPKWTFRRPPRSGIPSQGVSASDPSQGSKAERPERPGSGRSGAAEPSQHPDGAQGPHAGSGSESTMTEXEGGGGATRRGRQRQWCPSRGQSRGPEPYSVVPGADRDLFFPDSCEHGAAPAEGLNAQVQSLADERAALEAECAQLVTDRARVDKGRRAVDDMLEVGRKMRQAELAEIQAREETLDSVMRETEEERQAALIVSSALDEALGDIRLQYETYGEDLARRVEDTRGVLDAAAAQERRASMVDASLRARAVALEAERKALDERTRSAQEFEATIRRQIEVLDRNQRKQEGRSREHAQRAQELEERARALEERARVLDQRETTLAAHEAMAAKAESSLRLREEATAERNWTTLAAEALVARRVEELRLREEAWRERDATLAEREAEVNRREVAARQLGEQLTKREEAVAGREAIHLESNCAEHAAMAARASELEAWEKELASHGQPGDAELVSQLTAAQGTLADLGRPVQDQAGEIAAPLLTNDIGPGQLSDAIERLECVGRRVGISVRRDKKLPPTQPALALTGLGSVRPPSARSALWSALRLDGMTADLERLKEEVGEAVKSSSASLARAAVELVLA

SEQ ID NO: 106493 - protein, 509 aa, Oryza sativa
  unsure (1)..(509): unsure at all Xaa locations
  Clone ID: PAT_MRT4530_10931C.1.pep
MTTTTTTTNHSAKSILLLALLLVPHLAAASSGDALISQRRRLLDYHGGGGGHGGGDVYVDSEAPAFPNARLRAAYVAMQAWKRAAVLSDPTNLTATWVGPDVCAYDGVFCAAAARYAPRCGGIAVVASAALNDADLAGHLRDPPALXLADLAVLHANSNRFCGAVPSTLERLHLLHELDLSNNRLVGAFPDVVLRLPSLRYLDLRFNDFEGPVPAELFDRPLDAIFLNSNRLRFRIPDNVGNSPASVLVLANNDFGGCLPASSTSAATTPGDPIPGSAAGLASVPPLHGTGNRFEGPVPATICSMGTLTNCTYGDNYFSSRPRWPARTAGGAVGTSSPGAPPQNSTSSYNLITGPPVCCRTALDERRTSTTGRPGGGAGGAAHRSPLPHHMPPRRXQFQNTHHVNCDAFRCKKFVLPSPPPPAPSPPPTSXPPPSPSPPPPSPPTPSSPPPCPXPTPPSTPTADTSPPSTSTTPTSSPTTSPPPPSTVYYSSPTPPYYEVSPEDRTSSE

SEQ ID NO: 106494 - protein, 403 aa, Oryza sativa
  unsure (1)..(403): unsure at all Xaa locations
  Clone ID: PAT_MRT4530_10932C.1.pep
MAGLLASLAIRKALEKLSSYLAASLSASSSSPTSGRARQEKDHEDLRMLERTMRRIHATLHDAEQHWNIREESTKLRLKELKDLAYYAEDVVDAYEMNRQKVEALKAFAGAASHKRKYQQESEGLFCDSHTVAITDELAIKTRKLIERFDEIKYYSDNFTLSENDGEIRLTPDISGLQTSSVVFENSIVGRVKDKNNIVEKLLSKRGDNLASPVSVMAIVGMEGLGKTTLAQLVYNHPEVCKYFDVHAWVCVSEQFDINNITQSIIVAVTKEKCDLSELPNLHERLVEEIKQKKVLLVLDDVWNERRDCWDLLCMPMNTTKLCMIVVTTRSEKVAKLVQTMSNFYNLECLSFDESWLLFRQVALTVNQENAPPNLVEIGKAIVRKCKGXLPLAIKRIGSMLRY

SEQ ID NO: 106495 - protein, 108 aa, Oryza sativa
  Clone ID: PAT_MRT4530_10933C.1.pep
RPRVRPRVRPRIRLNIFYCLWAHKNGRCTGEAFGGSPSAMQAEPALHRSRANTGRTYVDVCRCERQEYYRATAAEVNQGGFFDSTCQDSPPDARSKKPAEDTSIMDYT

SEQ ID NO: 106496 - protein, 51 aa, Oryza sativa
  Clone ID: PAT_MRT4530_10934C.1.pep
AAPAARRAAPAAPPGTPAAWRPPAPRRPPPRRGRAPPRPAGGGGARRRRRP

SEQ ID NO: 106497 - protein, 66 aa, Oryza sativa
  Clone ID: PAT_MRT4530_10935C.1.pep
LCKMQIRESRPKVTLVARMAASVANYDYIVDWEFQMDGLVRIKVGLSGILMVKGTQYSHMNQVHQN

SEQ ID NO: 106498 - protein, 227 aa, Oryza sativa
  unsure (1)..(227): unsure at all Xaa locations
  Clone ID: PAT_MRT4530_10936C.1.pep
FPSTHASEQMQEVEEEISHQLNSPRKEWRVKITIVKIDNAGTSSSINMVFILPAEYKVSTSDEEVVEVSMAXLVLSPQQAIFEKPEETKHQHLRPLYIKGFVNGKPLSKMLVDGRVPVNLMPYTTYRKLEKTPEDLSKTNIVLKDFGGNXSDAKGVLNVELTVGSKTIPTIFXIDGKXSYSLLLGRYWIHANCCIPSTMHQSLIQWQGDQVEIVQANSYLRSVCCCR

SEQ ID NO: 106499 - protein, 125 aa, Oryza sativa
  unsure (1)..(125): unsure at all Xaa locations
  Clone ID: PAT_MRT4530_10937C.1.pep
RTQIEGGKRKFYPSQRMKKKGAKIPNLPTAGCRRHRAGVRRCRRAREDLPPPPAVADASGQYSAAAGRSRCRRGETMGEGRRGKATRRRRTPPWASARTGEGACAGAAYERHSSARTRGSSREXR

SEQ ID NO: 106500 - protein, 42 aa, Oryza sativa
  unsure (1)..(42): unsure at all Xaa locations
  Clone ID: PAT_MRT4530_10938C.1.pep
MGLTFTKXFSRLFAKKEMRILMVGLDEADKTTIXYKLKLDEI

SEQ ID NO: 106501 - protein, 679 aa, Oryza sativa
  Clone ID: PAT_MRT4530_10939C.1.pep
MRGQASHLLVVRANLGNLSSLFDEYAANGGYRVTSRSTAWRGGWHGQAGGKDGQFTLYTPTCVNFSMAAPTLQPGAVPLCKAVPLKGSVTVTDVQAGSNTCHVWDQGHFALVLGGAGNGGVVAEAGVEAGALRGGARRGRHGAPGASPGGGAEHPAAQVEGGGDGAAGVRGGGARRRCPSPPPVLPTAGTDGGGGGAVPPRQPHPAPKLPTAASAVASLQDNSDRGDWQLSTPPLRPAFSTHRHPWLRALPCRPPLRHPWPRQALRAARRQEEKERDKGERGGGRKILCCRPIRFPRLYLLRIRIRIPFPLQTKNEIQSFDLDEQDQSPPLSQAMDAAAAAMVLLDRSVRFIDEVADVMKERGISHLDGDAAISAACAGITDWEERKASEERAIEAESLHYRAERDAAAEAVIRRRKAGGGGVTKMSFLSPGDLFERDGDILEGIDPDPPVVADVPGVSSLVFRLSSARTPADFERATYVAGADHNVVVVGAGHGHRFYLVYDAWANSLSTKSTEARHHRYGGARLPEERRSMCSGGDGVIRFVSIDDGEHPNDLTLTTWSLTMAPELKQWKQEAALVDKPFLVPIRKKKPHHRDRVPAVRRLAGLRPGRLGSIAARRLGARRLSKDGFSTSAAFSIGDLVYSDELIKKTPPQQLPPLKAPTSPVHSIVDDEVVLSGRG

SEQ ID NO: 106502 - protein, 51 aa, Oryza sativa
  Clone ID: PAT_MRT4530_1093C.1.pep
TSDDVCRWFGDDDVGIRWWFVLFSKAAEKDTDQCCRRRDSKDGYPDAWAVE

SEQ ID NO: 106503 - protein, 66 aa, Oryza sativa
  unsure (1)..(66): unsure at all Xaa locations
  Clone ID: PAT_MRT4530_10940C.1.pep
RXHPLXRIXXQLXXQCERXSXEEEGGGNLGXTKTAGNGEXKRGIAARFLLLSRSSPPRGSGWLVAT

SEQ ID NO: 106504 - protein, 56 aa, Oryza sativa
  unsure (1)..(56): unsure at all Xaa locations
  Clone ID: PAT_MRT4530_10941C.1.pep
MKMLVKLWDHLAAGPRPETGLEKLTGAATTRPLXSSTKMATARRAALRSSARRLCR

SEQ ID NO: 106505 - protein, 90 aa, Oryza sativa
  Clone ID: PAT_MRT4530_10942C.1.pep
MKMTQGDIHLQAAGALDGEASIAGPATTGECAWMATRSCAALTALVQRLVRCGRASQFDPATDKIYKQQINKPIGCQADGAIPADADTSR

SEQ ID NO: 106506 - protein, 66 aa, Oryza sativa
  unsure (1)..(66): unsure at all Xaa locations
  Clone ID: PAT_MRT4530_10943C.1.pep
MATMPSTSAYFSXLCLLLHRDRRSSKRARLPGPAQRLRDGRTFLLERVSHQGLRSALQVDVLTMLV

SEQ ID NO: 106507 - protein, 100 aa, Oryza sativa
  Clone ID: PAT_MRT4530_10944C.1.pep
RFLLLLFQSNWRGIKENWGDYHATVNLECSQLIAIKACCWSSVLPYQLVPQIWGLGFNSEEAFSFGYDANFGRLLLQLGPILSLPLWSLDMTGLVVTYYQ

SEQ ID NO: 106508 - protein, 432 aa, Oryza sativa
  Clone ID: PAT_MRT4530_10945C.1.pep
MVSTRGAAANAPGRRGRPPKAAEEAARSPVLSSPVVAADAAEGYERERAERIRENMERMQKLGILDLATRFNQSAGGLAGSGSGRGRGRRKAAVTPGSVGVGRMIKPASPSPARRSLSSILLDMRIFGSIIRYISIMIVWEIIVRLKNVEPVSYCEIRTKKDKDDNEGGNSVLIEAGSKEEVYTEEDEKLLGPCVEPWTLFVDGYGKDGKRIYDQVRGQTCHQCRQKTLGHHTSCCKCQIVQGQFCGDCLYMRYGENVLEAKKNPDWICPVCRGICNCSICRTKKGWFPTGAAYRKVVSLGYKSVAHYLIATQRASPAGSADSNKVAATKSEASSESDQAPVAKEDQEDAEMSGKAIQKVEADHQVNNPPDDSDNDDSRSESVVTSDSQDCQVNLDIGCATPSKPTGPKKRKWIERSPDCVASRLRSRSNKS

SEQ ID NO: 106509 - protein, 125 aa, Oryza sativa
  Clone ID: PAT_MRT4530_10946C.1.pep
EIPKPYSPLSRAARLSRRRRRQPHRPPPPPSRSPPPSPRGRRSVLLLDIHHLRRPPAPSPSPPTAAVLQEVTIACDLLEAAAVGGAARRRSGAGRSTEQRRGRPELCPRRPIGDGAECFGAAGIH

SEQ ID NO: 106510 - protein, 154 aa, Oryza sativa
  Clone ID: PAT_MRT4530_10947C.1.pep
MIQRLCRSKSPLHLIFDRDYDVRPLHDHEAGTATSTPRPPVATAGGGGGGGCAAATAASAATSPPPACGARGTAAVAERAHTLTLLVRVLRRRRHEPPTIFGRRGAPPCFSKERVAPPSWQLPLPHHGSSNCYCRFDVTAATSGCSDDDDNGEE

SEQ ID NO: 106511 - protein, 102 aa, Oryza sativa
  Clone ID: PAT_MRT4530_10948C.1.pep
TRIGCYPLLSYPPPPPAHYRSASSTFDPSSPPPCRSPQMTSPPLPPTHALPPPPTSEAEPPTCRHAVLSAAVPPSSLLDVERTRGALWQRRASTMPSLLPGV

SEQ ID NO: 106512 - protein, 495 aa, Oryza sativa
  unsure (1)..(495): unsure at all Xaa locations
  Clone ID: PAT_MRT4530_10949C.1.pep
FHNIPIEFIHCRSLSYNFIFKKKTMALPIVLXIRYWVKLFSKRESTPCHLLRSSSLRSAARHRGRRHGTRRAPPPPRHRQLSLPLAPGSDYTLSLSVGPPSTASSVSLFLDTGSDLVWFPCAPFTCMLCEGKATPGGNHSSPLPPPIDSRRISCASPLCSAAHSSAPTSDLCAAARCPLDAIETDSCASHACPPLYYAYGDGSLVANLRRGRVGLAASMAVENFTFACAHTALAEPVGVAGFGRGPLSLPAQLAPSLSGRFSYCLVAHSFRADRLIRSSPLILGRSTDAAAIGASETDFVYTPLLHNPKHPYFYSVALEAVSVGGKRIQAQPELGDVDRDGNGGMVVDSGTTFTMLPSDTFARVADEFARAMAAARFTRAEGAEAQTGLAPCYHYSPSDRAVPPVALHFRGNATVALPRRNYFMGFKSEEGRSVGCLMLMNVGGNNDDGEDGGGPAGTLGNFQQQGFEVVYDVDAGRVGFARRRCTDLWDTLSRR

SEQ ID NO: 106513 - protein, 251 aa, Oryza sativa
  Clone ID: PAT_MRT4530_1094C.1.pep
MRPKMGSGFVSPASLCMVPWPGRAPSSCSFFMDTVFEEDFSRSIAAGGSPENRMKEEFYSDKTGSLPYREGSDISEFYLEINGPAGRGEQGGAWGGRLSGEVRRAARRRGEGYGDGGAGEVGWSCQPSFRDEWIWSGFGHVRTPRSRLSAAAAASPATHLAAATAGGASLLRDSPGGAEREAALAVPVGRGIRRVGRVGREGRRVGRGVGRWGADGEGRWEGGWPPGGGLEQEGRGSAGFDDVGGEETWER

SEQ ID NO: 106514 - protein, 178 aa, Oryza sativa
  Clone ID: PAT_MRT4530_10950C.1.pep
MNSPRNLSKSPRTSSSFSQPKVFDPLQIFSGVEHPALSSSSPSVSRAPPLVVSLFSAIRCVSDQAIAPPLSPRCKEAARGRNQAEELPITRSPSSSSSPAAGSPLRFLVLGTTVGWSYRRRHTDFCRRRNILHAVIAIQASPAHSASAISPSFAVTAAAKVAGRLRSVSAAAVPLLSQ

SEQ ID NO: 106515 - protein, 102 aa, Oryza sativa
  Clone ID: PAT_MRT4530_10951C.1.pep
WLSFWGREPACFLSGGGSGISPWGESLFLGRGALYSGVTVWGSGTRGGPETGGWAGTAPDLMVVSPPKKKRQSQIKKKNNKKKQVKCWQKKKKKKRGRLFRR

SEQ ID NO: 106516 - protein, 72 aa, Oryza sativa
  Clone ID: PAT_MRT4530_10952C.1.pep
NGGDHFSFHPVLGRGHRQDLSSFLLSPQLQFNAMFQLTPRCGTMWAGLLWIALVAGLHLVDIKYLSWFEVVK

SEQ ID NO: 106517 - protein, 81 aa, Oryza sativa
  Clone ID: PAT_MRT4530_10953C.1.pep
PTRPIALGCWVLLIFGPRVSRAYGQTTFLLMYILGGVCGNLTSYLHTSELTVCGTDTSWGNNLWTTFRLFNLPKCAGRQCC

SEQ ID NO: 106518 - protein, 930 aa, Oryza sativa
  Clone ID: PAT_MRT4530_10954C.1.pep
MAGSESVPLPDSRGARRHTTPTTRTVRELSSRPAPPPPPIMSEREGPPSSGPAAAVAPPPLAAEPGARGGGDGGGGGRKRKGAAAGAGAAAARKPRKDYGTNQAYVFYGHSRDFQYVGVEDLPKCAHVIAELPPQSQSMSLMDVQIWIIKLFRLHPETQDLSIKGFYSDYCPSVLIPEWYFGYWITYDCLRDESWASFAKKVRGRRNGMEMFVLYVDSSEIKHSSSLIKAIPDDYSQLETAVLPDGKSLSSFFPLNCTSKRLTEDLTMTTTEIAAYLAQYYGDQYSRAGAWRAKMKALELRYGTFYDSHNYAPRLLKDIKHKHPYSFVDIKDTEVADCKDFRVLHRIFWAFDQCRRSFMHCRPVICIKGTPLCGKYQGVLMTALAFDANDYCIPVAFAVVEGESKESWLWFLRNVNHSVVNGRSNVCLIHDYKRELLDAVEDLQDSPEEAYPWRGIQSRWCVEHLAESFFAHFGDRKLVMLFKKLCQQSRPCKFGKIWKELDELTLKYTQEKESGASGEIQQESVEHGETEFVAQRPHIHLDSVGEEVERNCSGGTESKITRFSEWIGPKPMEKWSLLYDKNDARYGIMGTSIADLYKDNHVMKGIRCLPLSGLLDLTYRRMAECYDTRSAAAKKSTGNPLINFPECIQDEMKAKLQKAETHHVTCINSGNKNAFFEEGHGIFKVQSKNKYVIVELTQRETQTHKHPKVRTVISGNTIHNTLVREPVIRKAHCSCNKLKLLRKPCSHVIAVCCQVGVSPDTYMSPYYTLAYLADTWRGKFDASEALGEHYTLGDFCRDPCYSTLMLGNPPTWIPDKRMECGLPAFLTSDGTQNGVDEEEQQCSIESVSSAADNQGTENRSSRETDQQNAPNTDNADISCYLDARLFIGSDEGVKARYWINPDKKVLEILHAESRSKQEMALLLCQNLITI

SEQ ID NO: 106519 - protein, 89 aa, Oryza sativa
  unsure (1)..(89): unsure at all Xaa locations
  Clone ID: PAT_MRT4530_10955C.1.pep
SERAGXXTQPLNWTTPXAALHLSXRXAAXLLGPDAGLDAQXALLEVVAAVVRGGGRLSGRRRGSGLQPXRRRRHRRTPRGEGXXXXHVR

SEQ ID NO: 106520 - protein, 483 aa, Oryza sativa
  Clone ID: PAT_MRT4530_10956C.1.pep
MATTPLASSSFRCLLLLLARRAYDCCTKQLAPSAVKLQAGTYLMAGVIKWKMMSCEQSGRRSAEIARECLSLTPNRYKCHSYQHIGYLGDSAEGFICRPLKSKLRSKVGLHVAAKVHNKDDEGSCSSRISDEDNETLSNASRKMEVNHLGALRCYFSKLNTEDAQKPYSFHQTNKQRTGPLSTNIEEANMATDYGDFRNTLESFEINFNRRKKGTKGYLNTAVEDYTNYLIFDEKNFLDMQQDDQTSSFCLTNLLAAINIAVLLFEIASPVRNSDIENLSLPLMYGAKINDLILSGEWWRLLTPMCLHSGFLHIALGCWVLLIFGPRVSRAYGQTTFLLMYILGGVCGNLTSYLHTSELTVCGTGPVFALIGAWLVYQSQNKDAIDKNVSETMFSQAVVATTLSFLLSSFGRFDNWTHLGATICGLLFGYLTCPSVQVDNAAKKGQKAVVLVRRQASPWKSIAIFVISIIVLALFAFAYGTQA

SEQ ID NO: 106521 - protein, 107 aa, Oryza sativa
  Clone ID: PAT_MRT4530_10957C.1.pep
MEPPPERREGGRPQKNMATQWQDAILGITMDGGERAGVQQQVLRLQRHPALIQGSSSSRGGPSHSSRGQGTVSGFNSWQWRNAYKVFDEMEGIDSWGRNTALSNGLS

SEQ ID NO: 106522 - protein, 148 aa, Oryza sativa
  Clone ID: PAT_MRT4530_10958C.1.pep
FPNKFKLNADTLACRQVSQTHLQHRLLIGRTNSHHDSISLLFGLLVFSLDHLSLLDDAFHSDRIIDGNHPPHTEMRISGDGIVYLQGSFERVSVCLGGFDLGEVVLDVDEVSVAHDWQQELFVVLEEGVAEKGCGLEGVCLRRSVHNE

SEQ ID NO: 106523 - protein, 496 aa, Oryza sativa
  unsure (1)..(496): unsure at all Xaa locations
  Clone ID: PAT_MRT4530_10959C.1.pep
MDLNMTNLWFHGKEHIAASPFPQVATSMNFTCLGSSKTIEASKKMFQQSNQSLSIPDDGCRLVLGLGPTPNLHYADNESSGGNRDKESANLFSQHFAIADHGLKLGISRGGTRNFQATTMIEKYSHQNRNGIVFPLTDEGSTSAKRKPGGYVLPLLFAPRSDDICPNGTPPVTDIQHVETVDDDDDDHITSLNQQKVRISPEPSATTDCSFAATSDMIFSSTSTEQRSHQRHPKKCRFNGCSKGARGATGLCISHGGGQRCQKPGCNKGAESRTANCKSHGGGKRCQELGCTKSAEGKTEFCIAHGGGRRCGTLGCTKAARGRSGFCIKHGGGKRCRVEGCSRSAEGQFGLCISHGGGRRCQYPNCSKGAQGGTMFCKSHGGGKRCIFEGCTKGAEGNTLLCKGHGGGKRCLFEGGGVCPKSVHGGTSFCVAHGGGKRCSVPGCTKSARGRTDCCVRHGGGKRCKVDGCDKSAXQGSTDFCKAHGGGKRCALEHRL

SEQ ID NO: 106524 - protein, 250 aa, Oryza sativa
  Clone ID: PAT_MRT4530_1095C.1.pep
MALVKAAHSGADAASSAPPVATSTEVMASTKDQEAAPCSPIARLVPVRPLSADTLTWGQLQAKMECILQAGARGVGREIEEASAAASSANHCADQLACDLAESREDLQKMKELVAGNETYVEVEDVQQCGQPDTSVVIPALTLEPHVPEVEIDQSPSVETNMNVLADRDRRIQYWKTKLEVAELERTIVEAKKDQAMETLRGREVWFNSYLKGCCTAMAEVCRELRVPRGDPMESAAGYISWMKGAYAQL

SEQ ID NO: 106525 - protein, 637 aa, Oryza sativa
  Clone ID: PAT_MRT4530_10960C.1.pep
MDLNMTNLWFHGKEHIAASPFPQVATSMNFTCLGSSKTIETSKKMFQQSDQSLSIPDDGCRLVLGLGPTPNLHYADNESSGGNRDKESANLFSQHFAIADHGLMLGISRGGTRNFQATTMIEKYSHQNRNGIVFPLTDEGSTSAKRKPGGYVLPLLFAPRSDDICPNGTPPVTDIQHVETVDDCDDDHITSLNQQKVQISPEPSATTDCSFAATSDMIFSSTSTEQRSHQRHPKKCRFNGCSKGARGATGLCISHGGGQRCQKPGCNKGAESRTAYCKSHGGGKRCQELGCTKSAEGKTEFCIAHGGGRRCGTPGCTKAARGRSGFCIKHGGGKRCRVEGCSRSAEGQFGLCISHGGGRRCQYPNCSKGAQGGTMFCKSHGGGKRCIFEGCTKGAEGNTLLCKGHGGGKRCLFEGGGVCPKSVHGGTSFCVAHGGGKRCSVPGCTKSARGRTDCCVRHGGGKRCKVDGCDKSAQGSTDFCKAHGGGKRCAWSTGCERFARGRSGLCAAHGTLMASKQVPESEHSRGMIRNSLFSKMVSASSMTAGASMDHAISSSLPGASSDRGESLEEMRNGKLLIPHQVLVPGSMRPSSSHGKGQEDGGSQEQQCFGFVVPEGRVHGGGLMSMLGAGGNLDDPKD

SEQ ID NO: 106526 - protein, 363 aa, Oryza sativa
  unsure (1)..(363): unsure at all Xaa locations
  Clone ID: PAT_MRT4530_10961C.1.pep
VHAILAYKHVNFGCGMGKHPFRYIGILMHHNFTRDYQTRIWXAIKDIFQKKLSSWKGNFLSIGGRLILINXVLSSLAIFMISFXEAPKGTLKNLGNYWSRFFCSTSSPKQGHRLAKWSVLCRPKECGGSQNINLEVQKKYLLSXKLINEEGLWHDLLRRKYVSKKNITEVEKRRVGSHFGQGSWRLRNPFCHWDPRRLGXGSQVRFWEDYWCGDRPFNLLYSSLYSLARKRNTIVAXLSTTPLKDWYKLVSRVCAFNLSEQDDLFKWKVQKNGIFTVNSMYKVLMYRDIIQXIIWKPRFPLNIKTFLWYMGEDVMLTKDILVKRKXKGITDXCLCNANETIQHLFFECHDRHGWSHQGSRRAK

SEQ ID NO: 106527 - protein, 58 aa, Oryza sativa
  Clone ID: PAT_MRT4530_10962C.1.pep
MDQSFVDMDMLCYHSEPAPSFAMTLLSNIRRCRSPHQARGATRPGGSSSASLSAASAT

SEQ ID NO: 106528 - protein, 355 aa, Oryza sativa
  Clone ID: PAT_MRT4530_10963C.1.pep
MIMEAIVALKERTGSSSQAIGKHIHANHGANLPPNFRKHGRGTGRPPPPQNRKQSAASRDHFLRVVVEGRVSEGRAAMATEEVVPEVPVTEVEAAAAEEAVEETTAAEEKAAKPAKEKKKAGRPPKEKKEAKPAKEKKVKEAKAKKPRVAAAHPPYAEMIMEAIVALKERTGSSSQAIGKHIHANHGANLPPNFRKLLSGNLKKLTAAGKLAKVKNSFKLSSTRPAAPAAADAKPKAAPATKPKVKTTKAAKPAAKAKAPATTKAAKPATKTKIKVAAAPAAKPKASPKAKAKTATSPVKPRGRPAKSAKTSAKDSPAKKAAPVAAKKKAAATKKKASVAAAPAARKGAARKSMK

SEQ ID NO: 106529 - protein, 96 aa, Oryza sativa
  unsure (1)..(96): unsure at all Xaa locations
  Clone ID: PAT_MRT4530_10964C.1.pep
MLQCSPPRGLCHRLLPKLCYHSEPAPSFAMTLLSNIRRCRSPHQARGGQLSLHSIMGRTXRVMNHQSRRGDTSYVLPSSNAPRRLEFRILKRGLRN

SEQ ID NO: 106530 - protein, 140 aa, Oryza sativa
  Clone ID: PAT_MRT4530_10965C.1.pep
MTKTSDPLLNPPAPASNRGNGGVRRVPWASLIGFVALAINFALCIYRAEGDRGAIAFVTFAYLNLLLLFWCIRQFDQAPHGSAARGRIRAAVWILATSLTAVFTWKVAALMPLPVAAVAWVMAAATVVGGFYGFFIHEDK

SEQ ID NO: 106531 - protein, 121 aa, Oryza sativa
  unsure (1)..(121): unsure at all Xaa locations
  Clone ID: PAT_MRT4530_10966C.1.pep
MARGEEIQYISQRGNTSQGLTNYGVNKTIEAEDGDVYDCINMNRQPGFNHPLLKDHTIQLKPSSLLMEMDVENPFISSISEAQLPSYXECPIGTIPVLRNKKQDYLNSEYQCSQHQSTKKD

SEQ ID NO: 106532 - protein, 123 aa, Oryza sativa
  Clone ID: PAT_MRT4530_10967C.1.pep
IGNRYDNSLAQGMSELMLGTQAGRSMAEGDESSGFTIDAASKGNVGRFINHSCSPNLYAQNVLYDHEDSRIPHVMFFAQDNIPPLQELCYDYNYALDQVRDSKGNIKQKPCFCGAAVCRRRLY

SEQ ID NO: 106533 - protein, 46 aa, Oryza sativa
  Clone ID: PAT_MRT4530_10968C.1.pep
GGEVINNHRGRPKKHINSRRDSKNAPYKSTPTRNSPYSTNIRNFRT

SEQ ID NO: 106534 - protein, 113 aa, Oryza sativa
  Clone ID: PAT_MRT4530_10969C.1.pep
KRAVGAPPFIWVWSPLWAPRLFPFFFRLVFFLEFFAGYHFSPGTPFALFSPSFFLPPFLGNLFPSRVRAGISGGAPGSRKKKKKKKKKKKKKKKKKKKKKKKKKKNKKKKKKK

SEQ ID NO: 106535 - protein, 312 aa, Oryza sativa
  Clone ID: PAT_MRT4530_1096C.1.pep
MDLEKSSSNTASMKKLQDDGALPGRGTMQREARVALHPLQCPTSRSKWQTRWFYLQIENLDPVLVIPEDQPEKIPEWTAKPALTPSLQSFIDIIDDLRKRGLSGYEVAADFVGRRIQPLQARAHPAFDYSGPDDVTRVSPRGLDSDTVGRRIGQIMISCHAQKFPNRIPSRMCNKIPVQDQPGYTNDNVDIQIHREHHSTGILDGKDEAYSSENPSSGPNSNSGHGRRGADMRDPPVSGTGRTEEASARGPTGQRHGEGGLPWTGTTQTLSEREETGVPAANLDGEGAAEVDLDPANPTATTERCGGDPSGG

SEQ ID NO: 106536 - protein, 279 aa, Oryza sativa
  unsure (1)..(279): unsure at all Xaa locations
  Clone ID: PAT_MRT4530_10970C.1.pep
EXXFLGXEPPXPQRIFFXKAPPTQTWGLTVFPPXIXFXXKGXNFCFGGGFLNNPXLXIIALXKRGPAFKRNCXXWAXNLPXKXLEAQKRNXSPEKKEQXXXPPLFGVPPLSPLXPPXYWGSLGIPSPFPQNFSXSPLXMFXYGNFGFSXPNPFWKPFSLFXKKWGGKKKKKNPPXFXXFCXLXXPFFSPQKKXKIXPXWFPXKKKKKKKKKXPKGGGGPPVXPPXSPPXXXLKFPFFXXXSPXGXPSLFFXXXXXFXTXGXKKXPXXXFXPXXFXIPPP

SEQ ID NO: 106537 - protein, 63 aa, Oryza sativa
  Clone ID: PAT_MRT4530_10971C.1.pep
MALVDGGGVATAIFKQCEGETIEEVGAAVQTKEQQDSRQLGRNFDMGPKPSKSGFHKFSKKHS

SEQ ID NO: 106538 - protein, 39 aa, Oryza sativa
  Clone ID: PAT_MRT4530_10973C.1.pep
ATVRGASHMVPFAQPDRALGLFQSFALGRRLPEYTPHPL

SEQ ID NO: 106539 - protein, 175 aa, Oryza sativa
  Clone ID: PAT_MRT4530_10974C.1.pep
MAKLSCLLIVSFAVVAALAATDDDAAAAAEGITVAEASSDPENKCVYTIYVRTGTIWKGGTDSVIGVTLLGADGSGVRIRDLERWGGLMGDGHDYYERGNLDIFSGRGPCMRQAPCRMNLTSDGTRPAPRLQLFTVEQWLATDASPYRLYAVVDNCNKAKDAAAADADEPRVTVL

SEQ ID NO: 106540 - protein, 90 aa, Oryza sativa
  Clone ID: PAT_MRT4530_10975C.1.pep
ACGRGPCMRQAPCRMNLTSDGTGPHHGWYCNYLEATVTGPHLGCAQQLFTVEQWLATDASPYRLYAVVDNCNKAKDAAAADADEPRVTVL

SEQ ID NO: 106541 - protein, 94 aa, Oryza sativa
  unsure (1)..(94): unsure at all Xaa locations
  Clone ID: PAT_MRT4530_10976C.1.pep
PPRHLDGGTWYTVSTLDLRPPVHATGGELVSWEFDLHLYKSTSHSNGWITKRLCLKEFVRDKAIPLPKSVDRLYHETGXETIAVGGEAGTVAFM

SEQ ID NO: 106542 - protein, 299 aa, Oryza sativa
  Clone ID: PAT_MRT4530_10977C.1.pep
MRKAAAAVAPSTTTGYGSGEARRSSGGRRSRGGKGKSLRGKETVLMAEMVASTVVQEVLGGAVSYLSSNREKVSERHNLEKLEMAHAQLEHALERSSKLPITDVSLLRQRRMFKRAYEECSEVVEKCKVRILEVAEEQGKKLKRAAQECDDTLRKCRQRILEQEEAEQECHVPVPEFREQGTIVKGKPSLKKCPHMKVDLVYTPHGSSQDLLPEIKSSVIEVMKATMNTRSTQRTIRGSRKAKLLQQQGHKTQHRTNAISDFLNLWSAHAPVQLQGSILDWIQKEKEAQLAPPLLRLKF

SEQ ID NO: 106543 - protein, 139 aa, Oryza sativa
  Clone ID: PAT_MRT4530_10978C.1.pep
MARPTAQLFGPAQEWHDTTVVGPYQPDPIVGMCIIKRTALRPSRLPFSYSGRRAFPLLRLTPPLLLLLQPLRLPSYYGCRSIFPIGGAACLLDGGILRRGVVGELPSSSQNGVARRGGDAEPPSCGVEQRGRRAAARMA

SEQ ID NO: 106544 - protein, 101 aa, Oryza sativa
  unsure (1)..(101): unsure at all Xaa locations
  Clone ID: PAT_MRT4530_10979C.1.pep
GDGFPATSGGNGGVDGLLLTAANPVEATASESDDGRRRTTRLETKPRQXPTGSRRRQPSGGIWRKTTSGRGSSHPCEAKGGDGAGRGRPXGGATWLERRPA

SEQ ID NO: 106545 - protein, 161 aa, Oryza sativa
  unsure (1)..(161): unsure at all Xaa locations
  Clone ID: PAT_MRT4530_1097C.1.pep
MDLEKSSSNTVSMKKLQDDGALPGHGTMQREAGDTKPXTHLGPMGIWIRRVPTSGWPEVALHPLXQCPSSRSKWRTRWFYLQIENSDPALVIPEDQPEKIPEGVIKFLGSAFARFLLAATTTSCNATRHCILFDNALHCDIFFLYINFQHVDRRRHQRRMD

SEQ ID NO: 106546 - protein, 83 aa, Oryza sativa
  Clone ID: PAT_MRT4530_10980C.1.pep
LHRYLVVGSDEVDREGGVGVDAADLGGGEDDVAWELYGEEGLDVGLLGEVELGVSEDDHVDEAEGDEVVEDGRGEKRATVESA

SEQ ID NO: 106547 - protein, 46 aa, Oryza sativa
  Clone ID: PAT_MRT4530_10981C.1.pep
KLHSLQRQFYLEFLVCASQCIYKSSLPIIIYCHTATVAQQMHVTLG

SEQ ID NO: 106548 - protein, 655 aa, Oryza sativa
  Clone ID: PAT_MRT4530_10982C.1.pep
MEEAVRVDLDKLPIKRLHAIDEAGNEHYPPDTSSEEQRLSAIRRIDFSWVIDKDAKKPKKDTAQQQQQQAWPWQGMMESLQQAQQELSVVIDLISTVEANDAVAVAGMLKPKSLPTETLVDTAVSAATKLQRVRHLSRYFKQSAKTMEQQFQKESRFYGSLIRLQQNWKVKRQRFGGSGPGSEGFMFDLIDTSQLDTAAMPRLSSLPLIPIDQDSSGTLSVQVPQKSCRFLSLNFRGDSANGVENYGHKLKDGISSITSSETDNDDVNKSIKHAHSILRNIHKSIFEEQVFDMVIRETFVQSQGINVTGMREDFLQLAIGQECSLCLSLAHSGDGSDSEMVDHEDHANSEDASNLVLVTMNGKLDPLRKDVTGFPNPRSLEIYLLQLFHENILRKVREKSLNIGRYQSPAQVAGDDYGLLGHFCLTVAHRIFSNKVLVELESVVSRVPYLHLRSLPTWHSRTSSWSLCLKVPQPILAADRIAKPSDNHELKYKSRSQFNTKVIVKDSQISLMGEGSPSIAGSLTGKPSDGYLVNSYNCDLEDLPTMLLQQVASQVIHWLHEEALVLGMNVTRDFLCLYFDLEQGETLGLVANVDPDDTCGCISWYLTIDHPTEDGKMSADSQEFEKRRFLGYVSLEVLYSTLMDLINLCNAGAHH

SEQ ID NO: 106549 - protein, 131 aa, Oryza sativa
  Clone ID: PAT_MRT4530_10983C.1.pep
MAEKTLREFVAPSADNVPVGPAINIGDTDFDLKSSLITTVQQSPFCGKPNEDASTHLQQFLEICTTYTVKGVSPDAVRLRLFSFSLLGKAKQWFYVNRATVNTWDRCSTAFLLKFFPMGKTNDLRGRISSF

SEQ ID NO: 106550 - protein, 136 aa, Oryza sativa
  unsure (1)..(136): unsure at all Xaa locations
  Clone ID: PAT_MRT4530_10984C.1.pep
TEYNKALGRDVFTYEFYXVFWNVIRPNLVDLFNNFYSGNLPLXYSLNFGIFILLPKRKQALKIQQYRPIYLLNVSFKIFTKVNTNRISVVAQKHCWPSSAAWSPGRNQMPTRVSKTEISTQMKKKTETNNITLLSF

SEQ ID NO: 106551 - protein, 76 aa, Oryza sativa
  Clone ID: PAT_MRT4530_10985C.1.pep
MALRRHTHRCVRVLAPRASRTGWYWVEVEPSSWMARLGVVEWSFNKICLQRTNFIHLQLIIGSDASELVEEANSCR

SEQ ID NO: 106552 - protein, 92 aa, Oryza sativa
  Clone ID: PAT_MRT4530_10986C.1.pep
SFNLSINHSCNGTRESYSFSFCLLFEGRGGGPSTSLPWREQRQGHIHHHSSIHAWWTCPPPPADTSVPCVNAESQSDSHSKYSRREGEGERI

SEQ ID NO: 106553 - protein, 109 aa, Oryza sativa
  Clone ID: PAT_MRT4530_10987C.1.pep
MDSLDDGSPCPLERRRFRRRWAEKVKLTGRGGGYLSYAMVTGERVLMAGGRLPPLEETLRSPLYTVHLLQEFTDAAGVASFSLLFCGLWHRQIDEINPSLLGCHGQRDR

SEQ ID NO: 106554 - protein, 49 aa, Oryza sativa
  Clone ID: PAT_MRT4530_10988C.1.pep
FFLPPGQLSPSRTTAIVTLIRLFVFVRMRKACQSPRPLAAPLWACIARD

SEQ ID NO: 106555 - protein, 121 aa, Oryza sativa
  Clone ID: PAT_MRT4530_10989C.1.pep
RNKLFTSCMEHIQQQAKMLRWIGYGVLLNNLRVIVSDDGDRREDDRREEGGAADGDPDRARRQKHGREGGPAHRGPHLLPLAARLDPAAMYGRRRRRGGGLSSGVVDGVTAIRWMTASASN

SEQ ID NO: 106556 - protein, 445 aa, Oryza sativa
  unsure (1)..(445): unsure at all Xaa locations
  Clone ID: PAT_MRT4530_1098C.1.pep
RGGGPRERGREGEGEKERDSMSLLLLILTIDPILQVLDKATEDGTLSCLSGRQARMRTSLYADDIAIFVXQPNGMFSSLAQTLEVFGESTGLQIHLRKSQVAPIHCFXINLNNIMTNFLATQGDFLITYLGLPLSLTKLGKAHHQPLIGKAAYTLPPXQGKLLNHAGRTTXVKTVLMAQAIYHLTSIKLPKAMFQALDKIKRKLLWAGSVNLSGAPRGXCKINWXRPKDLSGLGALDLQRFARALXLRWLWFELVALDKPLVQHAGALQXCNEKYYKAMFNAAMEIRVSTXNKTIFLNDKWLNGQIPWSIAPNIYASQEGRTYQLTXAISNNNWVGDLLSMHYATAQHFQQFVKLRMQIQTIDLLPNTEDCIKWRFTEHGQYSSKSAYMIQFKGAIKIXFKNIIWDTWAPSKCKFFAXLIIQNIVWMADRLQARQWPNQWFCPLC

SEQ ID NO: 106557 - protein, 41 aa, Oryza sativa
  Clone ID: PAT_MRT4530_10990C.1.pep
MPSSVLLRSPSNRASLDPLDGGGRQAVGDGSAPPAECVGPN

SEQ ID NO: 106558 - protein, 137 aa, Oryza sativa
  Clone ID: PAT_MRT4530_10991C.1.pep
MAWPTVRSARPRASHAQEKTAWAQATFDLLAVAASSPEGEKWRCVWKGDPTEMSETRVRELRAVVRPYLEEIESGFFEEDSEERRSPEAQDASFPWLLHRPQDTDATGPCANGSRRVSAEEMIRMPPSRIEVTREGG

SEQ ID NO: 106559 - protein, 228 aa, Oryza sativa
  Clone ID: PAT_MRT4530_10992C.1.pep
MEKVTNPLFEKRPKQFGIGGALPPKKDLHRFVKWPKVVRIQRQRRILKQRLKVPPALNQFTRTLDKNLATNLFKMLLKYRPEDKAAKKERLLKRAQAEAEGKTVEAKKPIVVKYGLNHVTYLIEQSKAQLVVIAHDVDPIELVVWLPALCRKMEIVHKKTASVLCLTTVKNEDKLEFSKILEAIKANFNDKFDEVRKKWGGGVMGSKSQAKTKAREKLLAKEAAQRMT

SEQ ID NO: 106560 - protein, 258 aa, Oryza sativa
  Clone ID: PAT_MRT4530_10993C.1.pep
MAPKRGGRAPVPAKKKTEKVTNPLFEKRPKQFGIGGALPPKKDLHRFVKWPKVVRIQRQRRILKQRLKVPPALNQFTRTLDKNLATNLFKMLLKYRPEDKAAKKERLLKRAQAEAEGKTVEAKKPIVVKYGLNHVTYLIEQSKAQLVVIAHDVDPIELVVWLPALCRKMEVPYCIVKGKARLGSIVHKKTASVLCLTTVKNEDKLEFSKILEAIKANFNDKFDEVRKKWGGGVMGSKSQAKTKAREKLLAKEAAQRMT

SEQ ID NO: 106561 - protein, 258 aa, Oryza sativa; identical to SEQ ID NO: 106560
  Clone ID: PAT_MRT4530_10994C.1.pep

SEQ ID NO: 106562 - protein, 84 aa, Oryza sativa
  unsure (1)..(84): unsure at all Xaa locations
  Clone ID: PAT_MRT4530_10995C.1.pep
FFFKNRPXAXAVRTRYGDRLFPIISAPPDTTIKPFCASVTNQHFNFTRASAANPIQRCCCGCHQHKHHLMVHPQHLHTSNEAAS

SEQ ID NO: 106563 - protein, 108 aa, Oryza sativa
  Clone ID: PAT_MRT4530_10996C.1.pep
CTGCHSLSVVSRLLLVNRGRLTIVGVSAMFMITSDSVLEKGVLIVIALVLGLVVGLSVHQSGSHDRGNRARSSRSRCGGRPVDVGSKCPPLTAAAVAANRIGDERRRS

SEQ ID NO: 106564 - protein, 84 aa, Oryza sativa
  Clone ID: PAT_MRT4530_10997C.1.pep
NNCYIHHHHHHHQPEDLSCYLSTIFTSLNSAGSHNQKKSLSHFHQQLCRNSKITASALHLPREWHCLGRIFICDSRNQDMVTGN

SEQ ID NO: 106565 - protein, 154 aa, Oryza sativa
  Clone ID: PAT_MRT4530_10998C.1.pep
RLGTSLPVLVASSPCAAEAILRTHDDVFASRPRTVLADIIFYGSRDIGFAPYGEDWRQARKLVNTHLLSVNKVQSLWLAREEEVKIVMEKISKAAFAREAVDIGQILCSFTNDLACRVVSRKLVGDDRQKKLLQELVNKTIKLLSIFNGEEYFS

SEQ ID NO: 106566 - protein, 69 aa, Oryza sativa
  Clone ID: PAT_MRT4530_10999C.1.pep
MILDGGDVTRNEIGIITPYNAQVKKIYEKFQQSNIKNIEIKSVDAFQGREKEVIIFSSVVTKGTGQFLK

SEQ ID NO: 106567 - protein, 159 aa, Oryza sativa
  Clone ID: PAT_MRT4530_1099C.1.pep
MRGPPVSGTGRREEASARGPTGQRHGEGGLPWTGTTRVIHRRSTGPTARIALGPIGRTAAAAAPGLGSASKPIGRPGASGGADGGNDPKRRRARAAATHGEMGKERRGDASPRGLNPPEREETGVPAANLDGGGAAEVDLDPANPTATTARCGGDPSGG

SEQ ID NO: 106568 - protein, 541 aa, Oryza sativa
  unsure (1)..(541): unsure at all Xaa locations
  Clone ID: PAT_MRT4530_109C.1.pep
MAHRKPTKAGSTGEDPGNLGVGWSCFLGKSLVKEADLADFISSGILAEGQADCGGEAVVPSPGNSFEPTAELFAILFTACATTKDVNTPVGPRKTVFSCVNFMLRPERSDAWPVLASMAKWERNWMQKWFYINNPYPAEDIKANWLRFRRLAVSIVAKPNVEIDGTLESRLILLRKVVRQLSTRDLFRMLEDAEAEASKMVWGLTTAEFAHLLSRQLDGRDAAEVDADEEEDDDREAESEEDDGSHGYTPSPAQPKSGAGSHVSSIHPQNVVGAKTLLAISSSTAKPGSIARKKKKKGGVVQVAPGFSVSEGSDGTPTLPAQRFGFSYLGPCGALKCEKVRLGEAGWVPASTAEXEEDLRHKEDERHVVXDNLKKSNAENKSLTGENKSLHADLEAANKRDAERDRQLAMAEEKIKSLEARLVSAEAATATQAPVTESAKQAGYTLRLALNNLGAHGEGAPSDDGTAFDFSELTQEAAGLVVEVASAYGDCCAHVSAGFVLSLLHAHGCDHIGDFPDLVKEDWPDNSQCSGAALRAFRMGL

SEQ ID NO: 106569 - protein, 65 aa, Oryza sativa
  Clone ID: PAT_MRT4530_10C.1.pep
DIVKNLRPKISTPFSSFKLDRNPRYRNAGNFMRLSDFLDFTKDKDLSGIMISVEHAAFVAEELGF

SEQ ID NO: 106570 - protein, 539 aa, Oryza sativa
  Clone ID: PAT_MRT4530_11000C.1.pep
MAARTWLWLLLSPLILLLLHYALALLTARRARKNPLPPSPPALPFIGHLHLIGALPHVSLCCLATKHAPDLMFLRLGTSLPVLVASSPCAAEAILRTHDDVFASRPRTVLADIIFYGSRDIGFAPYGEDWRQARKLVNTHLLSVNKVQSLWLAREEESNLKQLDVDQSQNDLVKIVMEKISKAAFAREAVDIGQILCSFTNDLACRVVSRKLVGDDRQKKLLQELVNKTIKLLSIFNVEEYFSILARIGVIGKVMCARAERLKKKWDMLLKKLIADHESKCDSYLVCGRNKDDFVDILLSVRKEYGLTEEHVKAILEGHLKFDLHQIINQQDVFIAGTQSSARVIEFTFAELMRKPHMLKKVQDEVRACIPNGQAIVSEVQVNNMTYLRAVVKEVLRLHPVAPLLATHVSMADCNINGYMIPSGMRVLVNAWAIGRDERFWYDPEKFMPERFVESVNGSATASVNFWVNNYQYLPFGSGRRMCLGMNFAMAVIEITLANLLWKFDWALPAHAMEVDMSEEFGLSVRLKEKLLLVPKQHV

SEQ ID NO: 106571 - protein, 71 aa, Oryza sativa
  Clone ID: PAT_MRT4530_11001C.1.pep
FIKATFHYQVLSTRGASGLQKYLSPLQGWGCAQFFTWSISNKQSTQACPFTRVSKKANWLLIYITQATGAD

SEQ ID NO: 106572 - protein, 46 aa, Oryza sativa
  unsure (1)..(46): unsure at all Xaa locations
  Clone ID: PAT_MRT4530_11002C.1.pep
VFPSSRTEDMKWVQSSLPRVXNVDIPNWTGGVCYWLGYLRSPTTGH

SEQ ID NO: 106573 - protein, 71 aa, Oryza sativa
  Clone ID: PAT_MRT4530_11003C.1.pep
MRAKSIVATQNRKGYKDVTQGDRVVTGSGNASHRRWRRLSSMGKGHYQNCRRRHLLEYGIDQEKSWEGRRE

SEQ ID NO: 106574 - protein, 106 aa, Oryza sativa
  unsure (1)..(106): unsure at all Xaa locations
  Clone ID: PAT_MRT4530_11004C.1.pep
GAAAWRRGCGLARLRRHCQRDVVASGGRIEVRVGIVGAAESCSAATTSAAASATRRPAARXRRRRRQRXRRARSNGEIRRRRRCGDALWSGGEGEAERDQSGKKLL

SEQ ID NO: 106575 - protein, 55 aa, Oryza sativa
  Clone ID: PAT_MRT4530_11005C.1.pep
LEPLARSAQGEGSDDSAVVVGDTAWRQRRLEVWLQRRRLGRKEARRCGTAGGCVG

SEQ ID NO: 106576 - protein, 111 aa, Oryza sativa
  Clone ID: PAT_MRT4530_11006C.1.pep
MAGSHLHLSSNSPANSTVSRNHLLLGYNSLTTLPPPLPATILPTDIAPTTSADHLHLQLQKLASPNSIEPSGTRKVTTRLLTPLTSGLLPRAASNLLLLLLRRRRSPTQAF

SEQ ID NO: 106577 - protein, 65 aa, Oryza sativa
  unsure (1)..(65): unsure at all Xaa locations
  Clone ID: PAT_MRT4530_11007C.1.pep
PLKYSIYIYTETFQIQHIPTALQXTNHIHYTYYKEEQVSYISYFTNPRGGLNQLHNFNSLTPTEI

SEQ ID NO: 106578 - protein, 524 aa, Oryza sativa
  Clone ID: PAT_MRT4530_11008C.1.pep
MPVASVVLLLHLLSMAAAATAALAMDPAERETLLLVMEAVSSDREWRSVGPDPCGSPWPGLECKPVPAAGNVSSAAARLHVTRLDFGVAPNPTCKDGAAFPHLAFASLPHLQSLFLVDCFKNPAATTAFVLPPSANLSSSSLQQLSIRANPSLSGVMPPQLSSIRSLQVLTISQNGLIRGEIPQGIGELTSLVHLDLSYNSLTGTIPSRIGELRSLVGLDLSYNSFSGSIPGQLGDLAMLQKLDLSSNNLTGGVPATITGLTSLTFLALSNNGLSGHLPAGLSDLLDLQYLIMENNPMGVPLPSELGDIARLQELRLANSGYSGSIPETLGRLASLTTLSLENNNLTGRIPAGLSRLKRMYHLNLSKNGLDGVVPFDGAFLRRLGRNLDLSGNPGLCVDGRAVLQADVGVGVCRRAGDGGDIASVSAATDVLSVGTLFRRDGQLWLAGGRCLMVTGCDLCVADLAINPAAPAICKQFSGTLQPELCPAFHCLPLYNPMSVMPLIALSKGTRCSGQVIMYSSVDV

SEQ ID NO: 106579 - protein, 102 aa, Oryza sativa
  Clone ID: PAT_MRT4530_11009C.1.pep
YRDGFTCQYCSSVDNLTIDHVIPTARGGKWEWENLVTACSRCNSRKGQKTVEQANMKLLKVPKAPKEFDILAVPLTKAAFRTLKRSQGLPEEWLQYLARPSP

SEQ ID NO: 106580 - protein, 180 aa, Oryza sativa
  unsure (1)..(180): unsure at all Xaa locations
  Clone ID: PAT_MRT4530_1100C.1.pep
MDLEKSSSNTVSMKKLQDDGALPGHGTMQREAGDTKPEPILGXMVVVEDYVSCGLLPPPSEFLLLVLNFYGLSLLHLKPNSIAFLGIFPRLCKAYIXGVVPFLDLFRFYYELRWMESNRVSGYVGFRLRDGLKSRYIPFQCPSSRSKWRTRWFYLQIENSDPAPPHLCIRFCRPSPSCIR

SEQ ID NO: 106581 - protein, 126 aa, Oryza sativa
  Clone ID: PAT_MRT4530_11010C.1.pep
MVVEHFQGSGASDGGWIAKIAALLVGEDPSQSYALICGNCHMHNGLARKEDYPHITYYCPHCHALNTSKQSLGQHSGSNSGRSTPVAPADGISASSSVVESEVSNMTTIQELKNEENTEKQEVQAS

SEQ ID NO: 106582 - protein, 275 aa, Oryza sativa
  Clone ID: PAT_MRT4530_11011C.1.pep
MAKRLFHSCRSPSVADAVVTSTTTLLATDHPPFFPGSCPRRVPRRRPQQPPPGACAAGYAADDLTPARGTPAYRWLKSSQWHVIEAAGITDDDHTPRLKIDARSRLRRSRRRLHRRADPVSGSSGDSGWFTSDEDSYANSCGVGVGGGEAETLVTSTTTESSSGASGNCGGSGEVDGVVVAGSFAVVKRSDDPRADFRRSMAEMVVGRAIYDADGLERLLRCFLALNHQRHRRDIVAAFGDVWEAVFSNPTSSQRRIVTSDSAICKAAATVSNRR

SEQ ID NO: 106583 - protein, 1063 aa, Oryza sativa
  unsure (1)..(1063): unsure at all Xaa locations
  Clone ID: PAT_MRT4530_11012C.1.pep
MAVAPPLPPAPARQLRRWKGSSPRPPPWLSSPFRRTRYLSRPAFAAGGRQDYSPSSGMGVSKTGAFRLGLYGNLNVQSSVQEWVDETKRLFFLRTTNSVRNNITNGTTPLRVGNLRHDPSEDIRSSNYPSLYNQRERGPSNSIVNRHVDTDLAKHRVMYQSAHAVPAPFSVVNNDIKPLNMLDGSKEEIPWHDSVTMESSLPKVSKSEKTWWLIKLSQTKRSTNALQGKVTPNFPDKASLSTESKNARKLLATIYDKVLVVDNVESARSVVKLLTTKYKGFIHACDTEVANIDVKEETPVGHGEVICFSICSGNSDGEADFGNGKTCIWVDVLDGGRDVLMEFAPFFEDPFIKKVWHNYSFDIHVIENCGIKVAGFHADTMHLARLWDSSRRTDGGYSLEGLTNDYRVMDAVLKDIPKTGKVSMKTIFGRKKVRKDGSEGKTISIEPVEKLQREDRELWICYSSLDSMSTLKLYESLKNKLEAKEWIFDDCPRGTMYDFYEEYWRPFGALLVKMETEGVLVDRAYLSEIEKAAVTERELAADKFRKWASKHCPDAKYMNVNSDNQIRQLFFGGIENRNKRGETWPHSITFIVPSDEGIATEGKKTPKSRTIKLFTIVEDLKIDMSRTIKLSTVGGDVLRSLAGGKKTTKIGRLNVREDVDEGQEFDEDGSSLELPEQDIEDXSPYGTAYEAFGGGKKGREACHAIAALCEVFSIDKLISGFIVPLQGDRISCXEGRIHCSLNINTETGRLSARTPNLQNQPVLEKDRYKIRHAFVAAPGNTLIVADYGQLELRILAHLTNCKSMLEAFKAGGDFHSRTAMNMYQHVRDAVEEKKVLLEWHPQPGQDKPPVPLLKDAFGAERRKAKMLNFSIAYGKTAVGLSWDWKVSVREARDTLKLWYRDRKEVSAWQKKQKAFALEKCEVYTLLGRSRQFPNMTHAGPGQKGHVERAAINAPVQGSAADVAMCAMLEIERNARLKELGWRLLLQVSYLRATFCVLSEYFILIPRMNLYXHDEVILEGPTESAEEAKAIVVECMSKPFYGTNILKVDLAVDAKYAKSWYAAK

SEQ ID NO: 106584 - protein, 1091 aa, Oryza sativa
  unsure (1)..(1091): unsure at all Xaa locations
  Clone ID: PAT_MRT4530_11013C.1.pep
MAVAPPLPPAPARLLRRWQGSSPWLSSSFGRTRYFSRPAFAAGGRQDYSPSSGMGVSKTGAFRLGLHGNLNVQSSVQEWVDETKRLFFLRTTNNVRNNITNGTTPLRVGNLRHDPSEDIRSSNYPSLYNQRERGPSNSIVNRHVDTDLAKHRVMYQSAHAVPAPFSVANNDIKPLNLLDGSKEEIPWHDSVTVESSLPKVSKSEXLWWLIKLSQTKRSTNALQGKXTLNIPDKASLSTESKNARKLLATIYDKVLVVDNVESARSVVKLLTTKYKGFIHACDTEVANIDVKEETPVGHGEVICFSIYSGNSDGEADFGNGKTCIWVDVLDGGRDVLMEFAPFFEDPSIKKICEARNKCRSMESQICTQVYQVWHNYSFDSHVIENCGIKVAGFHADTMHLARLWDSSRRADGGYSLEGLTNDHRIMNAVLKDIHKTGKVSMKTIFGRKNVRKNGSEGKTISIEPVKKLQREDRELWICYSSLDSMSTLKLYESLKNKLEAKEWIFDGCPRGTMYDFYEEYWRPFGALLVKMETEGMFVDRAYLSEIEKTAVVERKLAADKFRKWASKHCPDAKYMNVNSDNQIRQLFFGGIKNRNKPGETWPQSKAFKVPNDESIATEGKKIPKSRTIKLFTIVEDLKLFTTEGKKTTKTGWLKVRGDVLWSLAGKIPTDHIYKIDDDGQEFDEDGSSVELPEQDIEDTSPYGTAYEAFGGGKKGREACHAIAALCEVFSIDKLISGFIVPLQGDHISCKEGRIHCSLNINTETGRLSARTPSLQNQPALEKDRYKIRQAFVAAPGNTLIVADYGQLELRILAHLTNCKSMLEAFKAGGDFHSRTAMNMYQHVRDAVEEKKVLLEWHPQPGQDKPPVPLLKDAFGAERRKAKMLNFSIAYGKTAVGLSQDWNVEVREARDTLKLWHRDRKEISAWQKKQKALAFEKCEVYTLLGRSRQFPNMTHAGPGQKSHVERAAINAPVQGSAADVAMCAMLEIERNARLKELGWRLLLQVYDNNTPTFTKGKYFILIPRMNLYIVLKCYVCICQVHDEVILEGPTESAEEAKAIVVECMSKPFYGTNILKVDLAVDAKYAKSWYAAK

SEQ ID NO: 106585 - protein, 1157 aa, Oryza sativa
  unsure (1)..(1157): unsure at all Xaa locations
  Clone ID: PAT_MRT4530_11014C.1.pep
MAVAPPLPPAPARQLRRWKGSSPRPPPWLSSPFRRTRYLSRPAFAAGGRQDYSPSSGMGVSKTGAFRLGLYGNLNVQSSVQEWVDETKRLFFLRTTNSVRNNITNGTTPLRVGNLRHDPSEDIRSSNYPSLYNQRERGPSNSIVNRHVDTDLAKHRVMYQSAHAVPAPFSVVNNDIKPLNMLDGSKEEIPWHDSVTMESSLPKVSKSEKTXWWLIKLSQTKRSTNALQGXVTPNFPDKASLSTESKNARKLLATIYDKVLVVDNVESARSVVKLLTTKYKGFIHACDTEVANIDVKEETPVGHGEVICFSICSGNSDGEADFGNGKTCIWVDVLDGGRDVLMEFAPFFEDPFIKKVWHNYSFDIHVIENCGIKVAGFHADTMHLARLWDSSRRTDGGYSLEGLTNDYRVMDAVLKDIPKTGKVSMKTIFGRKKVRKDGSEGKTISIEPVEKLQREDRELWICYSSLDSMSTLKLYESLKNKLEAKEWIFDDCPRGTMYDFYEEYWRPFGALLVKMETEGVLVDRAYLSEIEKAAVTERELAADKFRKWASKHCPDAKYMNVNSDNQIRQLFFGGIENRNKRGETWPQSKTFKVPNDEGIATEGKKTPKSRTIKLFTIVEDLKLFTTEGKKTTKTGWLKVRGEVLWSLAGKIPTDHIYKIDDDGQEFDEDGSSVELPEQDIEDTSPYGTAYEAFGGGKKGREACHAIAALCEVFSIDKLISGFIVPLQGDRISCKEGRIHCSLNINTETGRLSARTPNLQNQPALEKDRYKIRHAFVAAPGNTLIVADYGQLELRILAHLTNCKSMLEAFKAGGDFHSRTAMNMYQHVRDAVEKKKVLLEWHPQPGQDKPPVPLLKDAFGAERRKAKMLNFSIAYGKTAVGLSWDWKVSVREARDTLKLWYRDRKEVSAWQKKQKAFALEKCEVYTLLGRSRQFPNMTHAGPGQKGHVERAAINAPVQGSAADVAMCAMLEIERNARLKELGWRLLLQVYDNNTPTFTKEKYFILIPRMNLYIVLKCYVCICQVHDEVILEGPTESAEEAKAIVVECMSKPFYGTNILKVDLAVDAKYAKSWPSIAVGRTACRGVTVPVSHIYSRNHFFFVFLSILFVTMDKAGHTRVSQTAGAEVTAPQRRLPRYLHYRIPAVRPVTAVTARLPAVW

SEQ ID NO: 106586 - protein, 460 aa, Oryza sativa
  Clone ID: PAT_MRT4530_11015C.1.pep
MTHVGVAHNPGDGAGSAHRLPLAPRRPTALPGPAHEPVFPAFALIVGRDRRTRREDRDQGRPGGRTEQPAPAAGLASSRRSMPRSRGSELPQRASPRAPLHLKTTACSDANGAHHRTVVDRSSPKLADRHSPRSPLHEKKRAGTRVAELETKLGKVQDELKKLREQLATAEAAKKDAQVALEEAKKRVGTKGSPASAAAASPRSPSPVAVETPKKTEQQLKVTEPPAEEESSINSPATDVFEVVRTESGDKENQSAAGAEDGEEVSCGIKAALAEKELEEEETKKMIEEESIDATAIDSGEKENPEVAELKAKLMAKDMEVAILTADNAELKKQVGEAAEAAKKAEEEAAAKASLVEQDLKERAAREARMGEQLRASEAARETLEAEMRRLRVQTEQWRKAAEAAAAVIGGDAHFVGHNGNGWGSPATMPDDCDDEGFGGKRKGAGIRMLGDLWKKKGSK

SEQ ID NO: 106587 - protein, 366 aa, Oryza sativa
  Clone ID: PAT_MRT4530_11016C.1.pep
MEGEVVAASPFFEWLKPPPRPASSSSWSSSFSSSSSMASRDQETVVPGEDGGGEIQEDHKSGMTCLPLLSMLEEGNSKRHEHPVKEEIMSSAHAAGVVEPGVELNIGLPVTGSSAQEVTMEEDDEEEDDDDVGEEEMDEWKPMHGGCKVEGDEEQYGEAVASVEGSSSITAVGDMFGGVGAESGVAMSSRYWIPTPAQILVGPVQFICHVCNKTFNRYNNMQMHMWGHGREYRKGPESLKGTQTLAMLKLPCYCCAAGCKNNVAHPRARPLKDFRTLQTHYKRKHGAKPFRCRRCAKPFAVKGDWRTHEKNCGKRWFCACGSDFKHKRSLNDHVRSFGAHHLPVAESAAAAATTPADKDRIISFQR

SEQ ID NO: 106588 - protein, 208 aa, Oryza sativa
  unsure (1)..(208): unsure at all Xaa locations
  Clone ID: PAT_MRT4530_11017C.1.pep
PLAAAGHLRPRRAAASVIAVGRRHHREVHGSEEKLGHPSFSVAGHRSSPSTCKPSRRXVPLVAGRHPSSIVALEGTNGFVSSSSTLCQTVKWREVHGGRWGVHASGCRGGDYDPGMVHCAAGIELDFAEPREVAALTGDGQGDGARRLEQQPKIAHYSLKHMPVIISRVRGKPAQLAHNKADVRVVAGVVDLLVEGSGLPPTRSWPDG

SEQ ID NO: 106589 - protein, 54 aa, Oryza sativa
  unsure (1)..(54): unsure at all Xaa locations
  Clone ID: PAT_MRT4530_11018C.1.pep
GGLGWDLILIKNKSYSDPPQSINRXGSTQSKVMQGILSSCICATIHSDSLNRHX

SEQ ID NO: 106590 - protein, 102 aa, Oryza sativa
  unsure (1)..(102): unsure at all Xaa locations
  Clone ID: PAT_MRT4530_11019C.1.pep
YDILQEQDARHGRRSCARRGRAAAATTKKKECNDGDKAALLAIKXSLGDPYHFASWTPDNLCCEWYDVTCDXTTDRVVGLSVFQDGNLTGTIPDGVDGLPTS

SEQ ID NO: 106591 - protein, 66 aa, Oryza sativa
  Clone ID: PAT_MRT4530_1101C.1.pep
FFFFFYSNKNNLDCFMHLERLNNFCQVKALMLYVWLISHTKHMKPNLNSSITKIGMVKSWVLPKFS

SEQ ID NO: 106592 - protein, 61 aa, Oryza sativa
  Clone ID: PAT_MRT4530_11020C.1.pep
SPHIIHRSIVPYICITSTSETSSSSCSFSGRLGSARLPFSARARQQKITFPFFQVTLINLP

SEQ ID NO: 106593 - protein, 35 aa, Oryza sativa
  Clone ID: PAT_MRT4530_11021C.1.pep
FVDAGKSLLRVTKDFHRLLQGPPPGLIEQSLLRLR

SEQ ID NO: 106594 - protein, 186 aa, Oryza sativa
  Clone ID: PAT_MRT4530_11022C.1.pep
MAEEENPWKPLFWWRVDAINQRVRVVREDLAAVEQQLASRVDKLSVASCAGDKLLMEASRALGLAVCYMEAARLLARHRGGLIAQGRIPSRHGRVHDDDLAVRRALFYLRLAKARAEEACDALDRCRGHLGAVKMLLRRREAPAGVADHVDGERASAVGDLEAARQLMVDTDAFISAALGDRSDVD

SEQ ID NO: 106595 - protein, 72 aa, Oryza sativa
  Clone ID: PAT_MRT4530_11023C.1.pep
MARSQYVLQKHIFRPRNKRVGSAATTRASNDETAGRRYGSSHACISISMDQTDANWESGWWCGVRVLVHDST

SEQ ID NO: 106596 - protein, 49 aa, Oryza sativa
  Clone ID: PAT_MRT4530_11024C.1.pep
LSVHSLVISGTASLPQLLHVGRSSLARLAGGFSIGGGDDVGHGDARSAA

SEQ ID NO: 106597 - protein, 69 aa, Oryza sativa
  Clone ID: PAT_MRT4530_11025C.1.pep
QTTGYRAGWWVTLGSKPIWVVTHPCLNANQVYHWSTPLAIACYSLELSTWHRLLSPWSQQCDPFALFMG

SEQ ID NO: 106598 - protein, 58 aa, Oryza sativa
  Clone ID: PAT_MRT4530_11026C.1.pep
DIRISWNSLARNLVSSRIRFPMALSKKNIYIMGGVINCGKRTRDNLCHLFEKVSVKKK

SEQ ID NO: 106599 - protein, 192 aa, Oryza sativa
  Clone ID: PAT_MRT4530_11028C.1.pep
MSDSEEHHFESKADAGASKTYPQQAGTIRKNGYIVIKNRPCKDQILVRFTNFGQGHVVVMGELVYSCYELYSDKVVEVSTSKTGKHGHAKCHFVAIDIFTAKKLEDIVPSSHNCDVPHVNRTEYQLIDISEDGFVSLLTENGNTKDDLRLPTDDNLLSQIKDGFGEGKDLVVTVMSAMGEEQICALKDIGPK

SEQ ID NO: 106600 - protein, 164 aa, Oryza sativa
  Clone ID: PAT_MRT4530_11029C.1.pep
GGRGWCRGGGCLAVPAMVVAAAPVKRECTTERRVSTSIRQTNSPSISRQATGSGGHDLAAIRSSKPLFIGAAGEVDAIAQSAKVELVPTVEPLVHYNAKMVIPACGRTTVAPSTAKQSTATCSPPSDPTTLMAASGSTGKVTTAMTAAKQRSSQAEPRAEFLSP

SEQ ID NO: 106601 - protein, 704 aa, Oryza sativa
  Clone ID: PAT_MRT4530_1102C.1.pep
MDLEKSSSNTTSMKKLQDDGALPGHGTMQREAGRTEPEPILGRMVVVEDYVSCGFLPPPSKFLLLVLNFYGLSLLHLNPNFIAFLSIFSHLCEAYIGVEPFLDLFHFYYELRWMESNRVSGCVGFRLRDGLKSRYIPFQCPSSRSKWRTRWFYLQIENSDPVLVIPEDQSEKIPEWTAKPALAPSLQSFIDIIDDLRERGLSGYEVATDFIGLDSDTVQRRVIQIMISGPSEVGNIPVPLCDKGSAERAAAINALPLTDVIGPLVDHQAVTSLKEGAAKEALDAAAATTSGSNVPKRGREFSCVLGTHRKATDPADSGASPPPPRRQRLVTIGEKEEKNLRRMARAKDAHNGADAASSVSPVATSTGAVVATKDQEAAPHSPIASLVTAQPLSADALTWGELQAEMERILQAGARGAREDLQKMKELVASNETQWRRLEHQMSELKDHLTDIRGSLRTSFTGLHQLARECGVVISIPAHPDEWSLTSSLTKLAKVMEAIPSRHAARISEETSNGIYTGACQVLACIRLAHPDLNLKEALDRGATDNARKACDSEYLLYCRYVDVEDVQQCGQPDTPVVVPALTPEPHVPEVEVDQVPSTGANMAMTSLDFENALADRDRRMQYWKTKFEVAELERAVVEAKKDQGIEALRVHEVWFNSYLKSCCTAMAVLSFSEDAWEIDSLAQSMAPLAEKVFYSMDWRWPYW

SEQ ID NO: 106602 - protein, 161 aa, Oryza sativa
  unsure (1)..(161): unsure at all Xaa locations
  Clone ID: PAT_MRT4530_11030C.1.pep
FFFFFFLEEGXSNIYWVRTICIYLHLTPPKSYSTTRQTVGSPEHHNQYSIPRYVPRNQXTPTPLVSNFSLWDIFSGRAQQNTQGDNSLPXCVHHVILPHHLNSYTQVSQSVQLTLACAVSLIICQHPNPLSKHSTIXQYPLDCCGVCTLWTFLALVTLRVL

SEQ ID NO: 106603 - protein, 183 aa, Oryza sativa
  unsure (1)..(183): unsure at all Xaa locations
  Clone ID: PAT_MRT4530_11031C.1.pep
CYRHWVHPRPPPTPPPPPEGEERRRREXRRYRICPPPLLMDPPADAANAATTVGSTAGLGERGRREPPPLDPPAEAAAAGGSATGGRLEGXREPPPPPSDSPATAVNPRHRGREARRRGGGSEEARQDKGSGRRRGKRDRSEGAAAAARGERGKGTAAAARGREEGGRRNRRHRFSPRAGIPA

SEQ ID NO: 106604 - protein, 642 aa, Oryza sativa
  unsure (1)..(642): unsure at all Xaa locations
  Clone ID: PAT_MRT4530_11032C.1.pep
MAPRKPTKAGSTGEDLGGLGNGWSCFLGRSLVKEADLAELVSSGALXRAKGHVGAKPLSLRLAMGEWLSSPXYFTAGLRLPCDDFLSSVLATYEVRLPQLSPSAFPKLAVFAWMCRTCGFAPTAELFAVLFTACATTKDVQTPAGLKKSVFRCVNFMLRPERSDAWERNWMQKWFYIANPYPAEDVKANWLHFQRSTVSIIAKLNVEGTAESDDEEEEEDDGEAGSKDDGSHGYTTSPTQAKPGAGSHVSPAHPQDNAVVNTLLAISSTAAKPGAAARRKKKKGKVVQVGRGFSDSEGSDGTPTSPILRRAPPRGRRMSPPPASDAEAATSKSASAPAAVANVSGVKRVEAVPSPTRQRERKAPMVEMTVSDAYLTSPHFVPADFTTRPEITPFVGGVCHVITPSDGLGLFTELNKFGESCAAVESLFVRGLVAHLSAKKSALERLDGYRLCLRKTEEDLRHKENERRVVADTLRKVNAENKALTGENISLRSDLEAANKRDAERDRQLAAAEEKIRCLEARLVSAEAATATLVPATESAKQAYYTLKLALNDLGARAEGAPSDDGTTFDFSEWTQEAADSVVDVACAYEDCCARVSAGFVLSLLHAHSCDHVEDFPDWVKEDWPEKSECSGAALRAFRKGF

SEQ ID NO: 106605 - protein, 115 aa, Oryza sativa
  Clone ID: PAT_MRT4530_11033C.1.pep
LKAQGVYAQLVPTLALYGISVYYAAYSVGMGPVPWVIMSEIFSIEIKAIAGSLVTLVSWIGSFAISYSFNFLMDWNSAGTFFLFSAASLVTVLFVARLVPETKGKALEEIQESFT

SEQ ID NO: 106606 - protein, 83 aa, Oryza sativa
  Clone ID: PAT_MRT4530_11034C.1.pep
QKNNRGISIRNPRGAGCRNGKTGVTQIGGRFLKAFEIQESEKGLLQKRMTGHDKKNGNERGTRKAAKRLRGYPFIPRGNFSRG

SEQ ID NO: 106607 - protein, 544 aa, Oryza sativa
  Clone ID: PAT_MRT4530_11035C.1.pep
MMAAAFPLSTAAPPSPPLVLRRSAAAAYSPSSPFELYRNHRRPARRVHCAASASAAARRRDACCALRPPAAARGGAAAAQGQAGAAPHGGAGEGSLWMVFLATAVAVCGSFEFGTCVGYSAPAQAGIVNDFGLSNSEYGVFGSVLTIGAMIGALTSGRLADSLGRKTTMGLAAIIGIVGWFTIYFANVPVFISEIAPKDLRGGLASSNQLFICSGCSAAYIIGALLSWRSLVLVGLVPCAFLLVGLLFIPESPRWLANTGRVKEFNASLQKLRGENADISEEAAGIREYIESLRSLPEARVQDLFQRKNLFAVIVGVGLMVFQQLGGINALGFYTSYIFSSAGFSGKLGTTLIGIFQVGFMSFLSMKIPLTLFGALLMDRSGRRALLLVSASGTFLGCFLTGLSFYFKAQGVYAQLVPTLALYGISVYYAAYSVGMGPVPWVIMSEVGKRNTVKLILYSYYAPVFLEIFSIEIKAIAGSLVTLVSWIGSFAISYSFNFLMDWNSAGTFFLFSAASLVTVLFVARTIMAREHNNMTIASRHDLER

SEQ ID NO: 106608 - protein, 126 aa, Oryza sativa
  Clone ID: PAT_MRT4530_11036C.1.pep
MHRSVVRGFHPGPFALSVARTGTSDQRRDTSLRSVASCERTHGMRIGRLHGLIIITVFVVEDAYLAVAQIDRKSKHKSIEILSRYRSLSPSSTDHQPSTTVRGLAASALRSPRPGGGGSALPVAQR

SEQ ID NO: 106609 - protein, 97 aa, Oryza sativa
  unsure (1)..(97): unsure at all Xaa locations
  Clone ID: PAT_MRT4530_11037C.1.pep
WPNKYIIPSSTSTQQLVQHMHHQHQLTSLRFPQCQVHFSAISXHSIIACQISIPFSHPHHAHVGNAHTYTXHIVKRREYYIIGHPCSTGTKQPYILW

SEQ ID NO: 106610 - protein, 235 aa, Oryza sativa
  Clone ID: PAT_MRT4530_11038C.1.pep
MAGGGDELKLLATWFSPFASRVKFVFHLKGLSYENIEEDLKNKSELLLKSNPAIKKVPVLLHNGKPLCESMVIVEYLDETFAAVGPSVVPADPYERAVARFWVSYIDNKLVAPWFQVFRGKSMEEKAEGLKQIFVAAAVLEVAFRECSKGRPFFGGDAAGIVDVALGSQLGWLRASQALSGIKLFDPAKTPLLPAWAERFLALDAAKASMPESGRLLAYAKMRQAESDAANAAAC

SEQ ID NO: 106611 - protein, 155 aa, Oryza sativa
  Clone ID: PAT_MRT4530_11039C.1.pep
MENEKSDTAAKRVSACGWPGRMREKLFKIGNDEDIPATLDVNTGDGVRHTLHKENEDDVNQVDGLRLSNNDPAYHGPITCSRTRKIQQEVNSLFTQLNPNFSENFILPKCSNFVLLRCMPEDIITMSRRMGYIENDKGYAEEESAHTQPAAVYAN

SEQ ID NO: 106612 - protein, 70 aa, Oryza sativa
  Clone ID: PAT_MRT4530_1103C.1.pep
MQDWAPVVVGVVLFVVLSPGLLIELPGTHRWVDFGSLRVTGKSAVVHTIVFFVLFAIVVVACKLHIYTGA

SEQ ID NO: 106613 - protein, 262 aa, Oryza sativa
  unsure (1)..(262): unsure at all Xaa locations
  Clone ID: PAT_MRT4530_11040C.1.pep
RPPHDEAWVRRRRTGAAETTXDDGGERRGNDFGGDPWTKARHGRHKAXRRGAKDEDDDGAAAAHGDEATRAADSSCTETRTAWNTPLRCRRWWCSGVMSRRGGAADRRDVGDEEDGEAGTGDGVPAKQRSSRRRGRRCDVDRGDSDVDRRTGDEQEPAGDGEVLDTDEEATPASFRRGGGDAGDEDGEAEPREVVATSAGAKARRQRRLEAEQWRQHHCCRQGRTSGGFRAKRRRRRWRGGCCDAEGGDGAADRRAGEAVGA

SEQ ID NO: 106614 - protein, 458 aa, Oryza sativa
  unsure (1)..(458): unsure at all Xaa locations
  Clone ID: PAT_MRT4530_11041C.1.pep
RYPSSPDFVHLHPCTFVYDQTEPQTMPYQLDMWKYGSALQQRPELNPYSTRGTTNKTXHAPRAQPKTVLGVLKRGGEREQPSEPLATTTNHASGTSGTTEAMRSTQAKLQAYKETITIHKKKTGYTETVHGSTEADPVCQPRRVADKRTPLDTMRAAHVETTRLPSGHTNTVTTRTHERLPTPVHGRDTADTRLDDAEPRTKTMTGLQQHTRRNAGDERDRXRRDECHDDEDDDRDRRXGDEGSRQXLHGDEDGVEHAAAMPTMVVQRGDEPARRSGXRRDVGDEEDGEAGTGDGVPAKQRSSRRRGRRCDVDRGDSGGHSGELQARRRXDAGXGRRSGAEGGGGDVGRCKGEAAKAAGGGAVAATPLXAGRDAPPGVSARNEGDAGGGEAAATPREETARPTGARARRXRGGCCDAEGGSRARERXERRQKIENEFYFGINLSGRDKYSFGKLMHAS

SEQ ID NO: 106615 - protein, 100 aa, Oryza sativa
  unsure (1)..(100): unsure at all Xaa locations
  Clone ID: PAT_MRT4530_11042C.1.pep
KKNRHLIFVHVISNKIFNPWLNLXVIHEIFFTATLXDMDKSHTFIFMLILVSKLSLYMWFALYIFPHLTSPVEPNSAEVVKRDDHRAVTLALCCWSCLSP

SEQ ID NO: 106616 - protein, 242 aa, Oryza sativa
  unsure (1)..(242): unsure at all Xaa locations
  Clone ID: PAT_MRT4530_11043C.1.pep
TAHVKPKGPRQTGYTETVHGSTEADPVCQPRRVADKRTPLDTMRAAHVETTRLPSGHTNTVTTRTHERLPTPVHGYRGRQPHNGHGXRHRKDEDGSXKERSLPPHDEAWVRRRRTGAAETXRDDGGERRGNDFGGDPWTKARHGRHKAXRRGAKDEDDDGAAAAHXRNAGDERDRLDGGTNATTMRTTTGTGDEATRAADSSCTETKTAWNTPLRCRRWWCSGVMSRRRGAADQGTSATRRM

SEQ ID NO: 106617 - protein, 246 aa, Oryza sativa
  unsure (1)..(246): unsure at all Xaa locations
  Clone ID: PAT_MRT4530_11044C.1.pep
RCVPAGNGGVAATAPPPTACAASPLHRPTSPPPPSPLRRRPHLRHHLLLARSSPEWPPHRRPVPPRLWPTAIRRPCAGRRRRLLLRYRSGVFHVVLGIASPSAEPAGIRRRLLAGSHRRPLVVPGRRGVRPSVEPIVFTARVSSRLLQPRRRLRPRLRVVKRCAGRVSPSSKDCRXSRSLPFRLHRPRAVSAVPIRHRCSHASSRGVVRXVRVVTVFVCPLGSRMVSTCAARVVSGGVRLMATRLG

SEQ ID NO: 106618 - protein, 46 aa, Oryza sativa
  Clone ID: PAT_MRT4530_11045C.1.pep
FAMHGQGRMILAHLCNEPKGLKTGICMFLVSPCRNCKCPHSKDQCW

SEQ ID NO: 106619 - protein, 185 aa, Oryza sativa
  Clone ID: PAT_MRT4530_11046C.1.pep
MIGNPAWRESPCSYAFVSEKGWYNFSRQDFGRAGSKGLFVESDGAKSVPTVLDWAIRGNGSCPSTAGEVAPACISAHSECANVTNGEGYLCNCSTGYAGNPYVIGGCININECKQNPCRDGTCYDLEGGYKCKCGFNRVKDKNDDNICKQILSKSDIVVIAIICAVAILSIVLIFLRMEHEKEEA

SEQ ID NO: 106620 - protein, 67 aa, Oryza sativa
  Clone ID: PAT_MRT4530_11047C.1.pep
MSISKIAAPLDGFLGGKWRGGRGDAQGVEQAKDAAMWAQGEGNKAGVREMDVQISFVGLDIGLVDIF

SEQ ID NO: 106621 - protein, 70 aa, Oryza sativa
  unsure (1)..(70): unsure at all Xaa locations
  Clone ID: PAT_MRT4530_11048C.1.pep
TCSIRSGLDGRLTLSKKGLLXDCQAIYVPADDLTDPAPATTFAHLDATTVLSRQSSEVGIYPAVDPMDYT

SEQ ID NO: 106622 - protein, 169 aa, Oryza sativa
  Clone ID: PAT_MRT4530_11049C.1.pep
GMGDGSGGLGPTLLPIVRYWQRGRWTTSVSFISSLWHGGTKSGKLLTIPSCCSLAFVYSCCGRCLLGCYYGYDHALLCLLLRTGGPTGGKGRSDQQVTCGQTGGGDRERQAISAVRPEFDLGQTDVHQAVRPAHTPRSDHDLSNLRLGGKKEIGGGSLKYISIRRDSIP

SEQ ID NO: 106623 - protein, 86 aa, Oryza sativa
  Clone ID: PAT_MRT4530_1104C.1.pep
MGAAVEGGIGPRAVMRGEAKGADDRGVAEEQRVHVQGADAGVVEEIDGRERLPAAVRCSGQRRGVDHLVDMEAGYDVVKDIEGERP

SEQ ID NO: 106624 - protein, 115 aa, Oryza sativa
  Clone ID: PAT_MRT4530_11050C.1.pep
MAFQVWPLGVEVAVTARTSQSSPTERHRGPQESAMRAQIPRGRSSFWERLFGATALLRLHCFLCITMSGENGITMSGENGRNIDTNVNPNTNTVSRYGQNNPRGCVWIMGYKEWN

SEQ ID NO: 106625 - protein, 65 aa, Oryza sativa
  Clone ID: PAT_MRT4530_11051C.1.pep
MGRSIHEEARRLGHRGLLSGGGAQIHVSSFEAGEETSEEGDGDGGDEAQGVEAVPKLAEAGRRRR

SEQ ID NO: 106626 - protein, 41 aa, Oryza sativa
  Clone ID: PAT_MRT4530_11052C.1.pep
MERRFDIGGFNNGGKQGARGGAEQGAAGGAYFADGALGCWC

SEQ ID NO: 106627 - protein, 328 aa, Oryza sativa
  Clone ID: PAT_MRT4530_11053C.1.pep
MAGHVFMIRQESAPPAPPWWFLSLVFLGAAYVATVTLRLLAYLAFSLHRQPKDLRSRYGAWAVITGPTSGMGRAMALELARRGLNLVLVGRDPANLEEISNTVRSLHGVETKTVVFDLSLVATPHGDEPLRQLRETVEGLDVGVLMNNAGVGEPAMAYLHEADVEAWVRMMRVNLWAVTEVTAAVLPGMVERGRGAVVNIGSASSQAIPSFPLCTIYSATKRHVHATNTRVGIMAVRLYRYVAHFSRSLHLEYASEGIHVQCQAPFFVATRMVENLAEARRLSPFTPPGAEDDVVSANQSVGGAGAVVTAGSSFLALRLAFMNNNSGQ

SEQ ID NO: 106628 - protein, 833 aa, Oryza sativa
  Clone ID: PAT_MRT4530_11054C.1.pep
MESLTVRPAIEVKAPGPGARRRPSSMRRAYVGLTGVTGHRYYKRKSPSHGEDVAPSQPSHRHNAATFNRRDVPEDINWEVEIQFDPGKRKRIEDYHPNQKEMVRRKYLDNGPCQPRPDDLPVTNIGGRDRKFNPEWYDEFGSWLEYSESKDKVYCFYCFLFRDPNKKSAGYDAFVTSGWSSWNKKHRLKEHVGDIDSVHNQAMRDCDALLKKEQHIDVSLNNQSNAEKIAYYTRLNGSIDVTRILLKLGMPFRGHDESEESLNKGNFKEFHAYTAEQNPALHKVAGKNAPGNSQYTSSKIQNDIIRCFAKEVLRYILEEVGNDVFCLLVDESRDVSYKEQMAVVLRYVGKCGSVKERLVGLVHVKETTSMYLKSAIDDLFAEHKLSLKQVRGQGYDGASNMRGEFNGLQSLIMRENSSAYYIHCFAHQLQLVVVAIVKKHKGIGNFFDMISLLLNVVGGSSKRRDMIRDINAEHVHDALECGLLITGSGLNQEISLQRPGDTRWSSHYKTLKSLVQLFPTTVKVLEYVEENDRDDKNSRQAAGLLVYFQLFQFVFYLQLMLNILAITNTFSVTLQRKDQDIVNAVNCVKSTRNHLDEFRRSGWESILAEVHNFCEKYDISELEMEDAYINPKRPRQKTGITNKHHFEVDCFNEIVDWLLQELDNRFNEKTSQLLICAAALSPRQSFHDFNLEHLMSLAKLYPKDFDDGELMDLRHHLSLYIADVRGDDRFANIETICQLSQKMVDTRKHICYPLVYRLLKLALVLPVATATVERCFSAMKIVKTYLRNRISDEHLSDCVICYVEKQELMKVTNSAVIHRFETLKARLHDVFTK

SEQ ID NO: 106629 - protein, 71 aa, Oryza sativa
  Clone ID: PAT_MRT4530_11055C.1.pep
HGVMPCTPLYLEHTEGQWLQDKMNVTTSLNSTAPSCTTLSSAPRPGDLLRKTANTTLCGRRQIITDTNRRH

SEQ ID NO: 106630 - protein, 105 aa, Oryza sativa
  unsure (1)..(105): unsure at all Xaa locations
  Clone ID: PAT_MRT4530_11057C.1.pep
LGERCQPGXGYPMYSLPRCRAVVKRQCVGHGAPGGAVDEQLRQDCCRLFVAVDDRWCRCGALXXLGGGVFWELGAAGVGHPVGWVFPGCLLWALLLAVARLPVFC

SEQ ID NO: 106631 - protein, 198 aa, Oryza sativa
  unsure (1)..(198): unsure at all Xaa locations
  Clone ID: PAT_MRT4530_11058C.1.pep
FILTWHTMKTIWEMGPWEELKKNVLPCFLPISRVVSLRREVLNFSMTXKESISVAXAQFYLLTLASPDLCLSDHVAEEYFHSSLDTESTMYFDICAQRSFAHKMTTEDTELDRILDNISFFHCDSIQEIEPTPDEHSTVESEPSTSIHQDSTVEFSFEPPETKEEEIQPLELSFXFEGDLXEDYGNTSNYSMQKRPPQ

SEQ ID NO: 106632 - protein, 96 aa, Oryza sativa
  Clone ID: PAT_MRT4530_11059C.1.pep
TSVSPTTTGSPLTVPPVAPTSPMSRARPPRLPPPPLTRPPLPVPLPSLMLPPLLPLPTPSLVLNPAPRRPALPPAPALPLAPLQRYPRLATPPLLS

SEQ ID NO: 106633 - protein, 656 aa, Oryza sativa
  unsure (1)..(656): unsure at all Xaa locations
  Clone ID: PAT_MRT4530_1105C.1.pep
RSYRTTVPSPVAGPCRGRLELRWMESIRVSGCVGFRLRDGLKSRYIPFXCPTSRSKWQTRWFYLQIENLDPVLVIPEDQPEKIPEWTAKPALTPSLQSFIDIIDDLRKRGLSGYEVAADFVGLDSDTVGRRVGQIMISALSEADDIPVSLCDKGSAERTAVINALPLTDAIGPLVDHQAATSLKEGVAKEASDAVAATTSGSNPHGEEKNLHKMVRAKAAHSGADAASSASPVATSTEVVAATKDQERRRLEHRMSELEGHLTAIRASLQTLFTGLHQLAGECGVTTSIPAHPDEWSLTSSLAELAKAMEAIPSSHAARXTSNGIYTGXACHVPTCMRLAHPDLNLKEALDRGVANNAPRDPEYLCHCRYVDVEDVQQYGQPDTPVVVPALMLEPHVPKAEVNQSPSAETKMAMTSLDFENALANRDRQIQYWKTKLEVAELERAIVEAKKDQAMETLRGHEVWFNSYLKSCCTAMAEVCRELRVPREDPEESAAGYISWMKGACAQLEGIGKRIDEALKQECRRASRYAWGHVLACIRDHRLQLHLEFLHKGFSRSRRTSTEIDGLVQSMAPLAEKVFSSMDWRWPSCFCIVFEQLVATQELGEWGPPVVCGLDIGNDVFLLCSPQADVGDNRATIIACLFHRWLYQDVQKKCQA

SEQ ID NO: 106634 - protein, 50 aa, Oryza sativa
  Clone ID: PAT_MRT4530_11060C.1.pep
VLKSLPPPQFVFNILTNFVIPPNYLSLTSLKPSTLPILGTWLGPTPFTYW

SEQ ID NO: 106635 - protein, 111 aa, Oryza sativa
  Clone ID: PAT_MRT4530_11061C.1.pep
MASNHIRTCSEGFVKYDRHLEKEFKKGANPLWRWRRIASAEESTKQKESNMNYRDKELLTNGEFNTTIAHGNATSLIQTFMANLSACSPRRRRFTNDHSSAWTKENAQRSL

SEQ ID NO: 106636 - protein, 128 aa, Oryza sativa
  Clone ID: PAT_MRT4530_11062C.1.pep
MDEVDGDSMRHTMGDCVRMESGVKLRRSPNLRRLEFKLERDKFVSYTGMFPSGLGLLAQVGFVALGYLPRVITPASIRQPDRWLTNGQTDGYRAVRPAAATGAGGSIGGQTGRSILLRPAARAWSDQG

SEQ ID NO: 106637 - protein, 419 aa, Oryza sativa
  Clone ID: PAT_MRT4530_11063C.1.pep
MDGKELLSPSELSYYAHQQHQHQHQQHQQQHRMLGGGGGGGGHSASPLAGMHGGPSVIRPMPNMGMSPTAILQSIGPGPLAGMQFQMDAAPPPPPLMHNSMASVSASAGAGSPTVPPSATPMEPVKRKRGRPRKYGPDGTMKVSTAAAAQHQQQMLSAPPRMGSVSGADMVGGGSGMDDSAQKKRRGRPPGTGKKQQLSSPVKLSGGNAFSGSAGTSFTPHIITASPSEDVAGKIVAFANHSSRAVCVLSATGSVSRVVLRHPADGAMSRVHASSHYKNPAIYEGLYEILSMSGCYNLMNEGQSDGLSVTLCSPERHIIGGVLGGALVAASTVQVVLGSFVQGGSKPKSKKAGKQQQQQAAAAAFSSDSLTGGGQDASPSSGHNQNLTPPPPVTTTGGWPSSGIFDTRSSNIDINSSRG

SEQ ID NO: 106638 - protein, 144 aa, Oryza sativa
  Clone ID: PAT_MRT4530_11064C.1.pep
MAGGKGGAVAALVVVALLCVMSGGCVESRRVARMGLDIGLGSGQGIGLGIGLGLGVRAGTGGVSASGSGSGSGSVAGAGSTSGSRSGSVSIGGASSSAGSSAGSYAGSGSGYGEGGGYGRGSGNGSGLEFGEGYGYGSGSGGNP

SEQ ID NO: 106639 - protein, 176 aa, Oryza sativa
  unsure (1)..(176): unsure at all Xaa locations
  Clone ID: PAT_MRT4530_11065C.1.pep
MAGGKGGAVAALVVVALLCVMSGGCVESRRVARMGLDIGLGSGQGIGLGIGLGLGVRAGTGGVSASGSGSGSGSVAGAGSTSGSRSGSVSIGGASSSAGSSAGSYAGSGGSGAGSSAGSRAGSGGGXGYGYGGGSGSGSGSGYGEGGGYGRGSGNGKGLXQLPPGYGYGSGSGGNP

SEQ ID NO: 106640 - protein, 89 aa, Oryza sativa
  unsure (1)..(89): unsure at all Xaa locations
  Clone ID: PAT_MRT4530_11066C.1.pep
INIXSAELXYIVFFYTWSQHHIXQSIYHSYIKSERDHLKQKQKHSTASKIKRRCTFILHTQHPKKHLLIIYEPLNNPLYYDYCFNCHQT

SEQ ID NO: 106641 - protein, 287 aa, Oryza sativa
  Clone ID: PAT_MRT4530_11067C.1.pep
MPPPSPPLFLSLPSPPPPPLPHLLPSHRPAAALTLAPALSSRRVSSVCPVASQRHSDYFDPRAPPPPPPRDGYGGPAYSPPAAQGGQQNGRVFSTYSIYKGKAAMSLDPRPPQFVPLDVGRGGAAACELRDCESGAYKVVKEGFVLLQFAPAVATRQYDWTRKQVFSLSVWEMGSLLTLGPTDSCEFFHDPFKGRSDEGKVRKVLKVEPTPDGNSRFFNLSVQNRLLNIDENIYIPITKGEFAVIVSTFNYIIPHLMGWSTFTNSIKPEDSRAYTRPQSGPEYEWRR

SEQ ID NO: 106642 - protein, 74 aa, Oryza sativa
  Clone ID: PAT_MRT4530_11068C.1.pep
MALPHNPHRTSARESDGLECRLTPLPLPLLPHLLETVDTHQQVVFVAAMKTLTLCALIEEVQHFPVIEALVTFG

SEQ ID NO: 106643 - protein, 87 aa, Oryza sativa
  Clone ID: PAT_MRT4530_11069C.1.pep
DTLACDINLTCQLWHRFVQHSWQACCGPPNVGSGCIHTTMLEGVHPYTYLLCPEYKRSRDIETAKSWPCLNLLAAAGCSLDHNTKRS

SEQ ID NO: 106644 - protein, 61 aa, Oryza sativa
  unsure (1)..(61): unsure at all Xaa locations
  Clone ID: PAT_MRT4530_1106C.1.pep
TSVSIIHICMPCKLISHLLNHHHGVVHIQKKKXTAQIITKCIXRSXTTNIMIQEKXAXINP

SEQ ID NO: 106645 - protein, 122 aa, Oryza sativa
  Clone ID: PAT_MRT4530_11070C.1.pep
MPSIQHPLTVLDHRITKKEQATWEDLEDLKTRFPGLPAWGQAGFQGVGIVRNTPSNAKVAVQKDTEEEIRPDESEEQEEEAEAPVESDGAKQGGGEQDLVAKRRSSRPIKPNPRYQVSQWVA

SEQ ID NO: 106646 - protein, 341 aa, Oryza sativa
  Clone ID: PAT_MRT4530_11071C.1.pep
MVRPPCCDKDGVKKGPWTPEEDLVLVSYVQEHGPGNWRAVPTRTGLMRCSKSCRLRWTNYLRPGIKRGNFTDQEEKLIVHLQALLGNRWAAIASYLPERTDNDIKNYWNTHLKRKLQGGGAGGDGDGGAAGDAVSPKPAAQRPASSSKGQWERRLQTDIDMARRALREALTSLDDVKPPHQPDAANAAAGGGGATTGAAASAGADSPAASSTSGASQCSPSSAGYVLTTENISRMLDGWARKKGGGGGRRAAGSGPATPGATESASGSSEASEVSYGGTALSAAAAPASAFEYETKPTVTAAAAADAGDETQLSAIESWLFADADGIESGSLLDAAMDYTF

SEQ ID NO: 106647 - protein, 82 aa, Oryza sativa
  Clone ID: PAT_MRT4530_11072C.1.pep
PLQTSQHLVMAPATASQPEPVLSAAGARAWRSCLALPLGVSCASARWAHGARRWRAQLKHKHASDVVGYLGLQNKKKKKNIH

SEQ ID NO: 106648 - protein, 427 aa, Oryza sativa
  Clone ID: PAT_MRT4530_11073C.1.pep
MATLPQMAATKERQEAANPTTTTRTLVESVTNWIRVYSDGSVDRLGPPEAAAFMVLVPPYDDPRDGVTVHDVATDHGVDVRLYLTTTAPARRRPVLVHFHGGGFCLSHAAWSLCHRFYARLTVDLDVAGIVSVVLPLAPEHRLPAAIDAGHAALLWLRDVASGGSDTIAHPAVERLCGAADFSRVFLIGDSAGGVLVHNVAARAGEAGAEALDPIRLAGGVQLHPGFILPEKSPSELENPPTPFMTQETVDKFVVLALPPTKDTEKFICRADVYGSEPSDLAGKFAPVPRCEKGGRLFFTSCKRHKGSSTRKERTAGDGTWVRQNSKGVKNKAGVKVGETQNFRFKKDGSYTDWLMEEHHCCRQQAVAGDEEPVICRMYVSPRAPPDSAARQESAAFVQQQPAPQVSEPPCDKKKRDDVAEEAPAAA

SEQ ID NO: 106649 - protein, 59 aa, Oryza sativa
  Clone ID: PAT_MRT4530_11074C.1.pep
MTRLNCRFGARSKIYKGGGERTTAGDTSRAADIFASYYYSRTRFQGLLTICHSYGSKEE

SEQ ID NO: 106650 - protein, 514 aa, Oryza sativa
  Clone ID: PAT_MRT4530_11075C.1.pep
PAHGVRDAGGVRDQRVGRLVRPLRRAPRPAGSHRVHGARPPVRGPAGGGDRRRRRQGPWRPRPRVPVDERRRGGVCLSHAAWSLYHRFYARLAVELDVAGIVSVVLPLAPEHRLPAAIDAGHAALLWLRDVACGTSDTIAHHAVERLRDAADFSRVFLIGDSAGGVLVHNVAARAGEAGAEALDPIRLAGGVLLHPGFILPEKSPSELENPPTPFMTQETVDKFVMLALPVGTTSRDHPYTSPAAAVTAAEGAQLPPMLVMVAEEDMLRDAQVEYGEAMARAGKAVETVLNKFPAQCIRVFVSPIRLRNFDLMEKHVEKMLSLGFRFNPSAEDLITFYLPRLIAGKPMKDTEKFICRADVYGSEPSDLAGKFAPVPRCEKGGRFFFTSCKRHKGSSTKKERTAGAGTWVRQNSKEVKNKAGVKVGETQNFRFKKDGSYTDWLMEEHHCCRQQAVAGDEEPVICRMYVSPRAPPDSAARQESAAFVQQQPAPQVSEPPCDKKKRDDVAEEAPAAA

SEQ ID NO: 106651 - protein, 98 aa, Oryza sativa
  Clone ID: PAT_MRT4530_11076C.1.pep
SFDYICLARKSLRNVSSHSNECSFGSEFIIPKLRRHYVSCGRGAYHAIYHGSGGTYITPVISVTGSFYLLDGRISSFLQCIARCSLSIALPFPSCYVL

SEQ ID NO: 106652 - protein, 1014 aa, Oryza sativa
  unsure (1)..(1014): unsure at all Xaa locations
  Clone ID: PAT_MRT4530_11077C.1.pep
MEPRDQCVAPHHPPARQQRALLPPPSPRLALPAPPATPTMISVEGHPIKPLLQSEMEERRRLGLCYNCNEKFGRGHNKVCQRLFLLDMANDSDDESQGAGDDDTEPHISLHAIAGIRLSATTQLRITIGDITLLALLDSGSTNNFISEEAATCTSMKLHQRASMKVIVANGEQVPYLGVLRQASFIINGDNFTADLFVLPLAGYDVVLGTNWLASLGPILWDFSSRTMSFWPRDRQVRWQGVAGPEATTLHTASAGDNLLEALLTVFADVFTEPQGLPLPRSRDHNIILTPGAQPAAVRPYRYPATHKDELERQCKAMMEQGLICRSSSAFSSPVLLVKKADATWRFCVDYRALNAITIKDAFPIPVVDELLDKLHGAKFFTKLDLRSGYHQVRMNPADIAKTAFCMHDGLYEFLHRLYVKRSKCAFGVSSISYLGHVITVAGVAMDLAKVQAVRDWPQPQSVLAVRGFXGLAGYYRKFVXNYGTIAAPLTALLKKEGFLWSDDATSAFQALKTAVTSAAVLILPDFSKPFVVECDASSHGFGAVLIQDKHPVAYFSKPVAPRHRSLTAYERELIGLVHAIRHWRPYLWRRRFLHHWVGKLLGFDFTVEYKPGAMNTVADALSRRNTEDSALLAISTPRFDYIERLRQAQATDPALVAIRDEITADTRLPPWSPIDGMVAFDSHIYIPPSSPMLAEPLTAIHDDGHEGVQHTIHRIRHDFHIPNIRRVVQDYVRACATCQQYKSEHLHPTGLLMPLPVPIAIWADVALDFVEALPRVSGKSVILTSMVSDRDPVFTSTFWRELMRLMGTKLHMTTAFHPQSDGESEAANRVIIMYLRCFTGDRPRQWLRWLPWAEYVYNTAYQTSLRDTPFRVVYGRDPPTIRSYEPGETRVAAVARNMEERDDFLADVRYRLEQAVQKAFYNWHHRAVSYEVGDWVWLRLCHRAPASLPQITKGKLKPRFFGPYHVIELINNLAVRLALPARARLHDVFHVGLLKKFVGTLPDAPPPLPAIHN

SEQ ID NO: 106653 - protein, 311 aa, Oryza sativa
  Clone ID: PAT_MRT4530_11078C.1.pep
MARNEEKAQSMLNRFITMKQEEKRKPRERRPYLASECRDLADAERWRSEILREIGAKVAEIQNEGLGEHRLRDLNDEINKLLRERGHWERRIVELGGRDHSRSSNAPLMTDLDGNIVAIPNPSGRGPGYRYFGAAKKLPGVRELFDKPPEVRKRRTRYEIHKRINAGYYGYYDDEDGMLERLEAVAEKRMRNEVITEWHRVERVRREAMKGVVSGEVASAGGRGGEAAREVLFEEVEEEVEEERRLEEEKREREKGEEAGKEFIAHVPLPDEKEIERMVLERKKKELLSKYTSDALQVEQEEAKEMLNVRR

SEQ ID NO: 106654 - protein, 85 aa, Oryza sativa
  unsure (1)..(85): unsure at all Xaa locations
  Clone ID: PAT_MRT4530_11079C.1.pep
NPIRPPETILTSNGSRGFMSTPTXVILDLMKSLPCHLXTHPVLYPNSSRVNRNRQNRTVLLLKPNLGLRSCNILRPSRKCLPPPL

SEQ ID NO: 106655 - protein, 307 aa, Oryza sativa
  Clone ID: PAT_MRT4530_1107C.1.pep
MAQDDSVVSAQWLHEHLGQPDVKVLDASWYMPVEKRDPWQEYQVAHIPGALFFDIDGIVDLTTDLPHMLPSQEAFAAAVSALDIKNHDKVIVYDGKGFFSAPRVWWMFRVYGHNKIWVLDGGLPQWRTSGFVLESSTPGDVVQKTKAANSVVERIYNGQLASDVTFQTEFQPHIFWTLEKVKHNMDAQSHQVVDARSKGRFDGVAPEPREGVRSGHIPGTKCVPFLEMFDDAPMLLPADEIRKKFEQAGISLDRPIVVTCGSGVTACILALGLYRIGKQDIPVYDGSWTEWEALPDHDYPKVTSNGS

SEQ ID NO: 106656 - protein, 82 aa, Oryza sativa
  Clone ID: PAT_MRT4530_11080C.1.pep
MSSTILNRAVSSDKSPTNVTWRHRGLVTYRRRGTGAMLWLVVAAWRGEGGGKYGIAPGEWGLAGVDFSESRDDPDRDPLVNK

SEQ ID NO: 106657 - protein, 78 aa, Oryza sativa
  Clone ID: PAT_MRT4530_11081C.1.pep
PHHLTTSAPISIVQADCGQQAYKLPRQFSGGLTLIQTQASSPKLLLTLPTLPIHYVVSTLTTIVLPTEHLPLLVVFWY

SEQ ID NO: 106658 - protein, 266 aa, Oryza sativa
  Clone ID: PAT_MRT4530_11082C.1.pep
MTPVTYVLQKASTSATRQATATWWYFQLGVEAQYNNGGHDRQDHIPGDGGHAGHPVTDEHLLLPPGGGAAAAVSAAASEEGWRDGGGGEVSAAAEEARRRRRGERGGGGGEAAARQGGGEAAVARRARRRTRRGGGEAGRRQERRRRRRRRGGGEAGRRGIGSEAGRKGGSGGKASAAAEVHAGDGMRTTTDGDDQLAHLGAVELLAAARLREDSGLPVLLDDADDLRAAAAAALPRDRLAVALAAAAAPPLCLAAAAPPPCSPCA

SEQ ID NO: 106659 - protein, 77 aa, Oryza sativa
  Clone ID: PAT_MRT4530_11083C.1.pep
LFLLEFPTEIISRTSQHWFSYYSGEVLNPDNLELIVDDELATRCLVKSVAQVIPHMYHICISEIRFPCILNRLSFAG

SEQ ID NO: 106660 - protein, 319 aa, Oryza sativa
  Clone ID: PAT_MRT4530_11084C.1.pep
MAMAGAGDWPFAADEAYADSSAIFAELGWANGLAVVDAVGELLPPLDPPGELATPPPPPLDLPETPAGSSADGAASSCSTDDADGGKPAAASTEAASKSLTPGKKRARQPRFAFMTKSEIDHLEDGYRWRKYGQKAVKNSPFPRCTNSKCTVKKRVERSSDDPSVVITTYEGQHSHHTVTFPRAAATAAGFSHIHAMAALAAAPFSAHQQLYSNLQPPPPTMPLAATTPASSSSLLQLPLHCNHELQVVASCGGYPSSSSSPPASVLPVDKGLLDDMVPRAMRHDGRAPPPILSSSSLGKAAVVIAKPSPTSSAPPSSP

SEQ ID NO: 106661 - protein, 53 aa, Oryza sativa
  Clone ID: PAT_MRT4530_11085C.1.pep
MDGFSFRVSCTSQAQHAAGLQEVQGERNHSGITENFSAGLAPGKAAAGEPVLE

SEQ ID NO: 106662 - protein, 82 aa, Oryza sativa
  Clone ID: PAT_MRT4530_11086C.1.pep
PSPSPNEVPPLLLHCHNKATGAGVRRQRPRPPEAAAPVPAAEEKDGVRLVHHRRRRRHRHGAAVASAAGVHSGESKVAVRTS

SEQ ID NO: 106663 - protein, 34 aa, Oryza sativa
  Clone ID: PAT_MRT4530_11087C.1.pep
YAGSPICTKPVIRGLSAVLTPVLVYVAAETAWDP

SEQ ID NO: 106664 - protein, 41 aa, Oryza sativa
  unsure (1)..(41): unsure at all Xaa locations
  Clone ID: PAT_MRT4530_11088C.1.pep
QWEGPFLVIGISXPGSLRLATEDGTXLPNPWNIEHLRKFYP

SEQ ID NO: 106665 - protein, 289 aa, Oryza sativa
  unsure (1)..(289): unsure at all Xaa locations
  Clone ID: PAT_MRT4530_11089C.1.pep
MSTAGGGGGGRRVTIRSISCRGVKAFVPFQKPPLYAAVSLAGRREKTSGDPDGGENPDWDAAVFAFDLPAAADGMLQFEVKAQVPLLGSKLVGKLCCLLHDLGISSTEDSQLDSEKSREADGWRASTAAGLCGSGAAAGGERSAADEFAVVPPAGSCVSATHTVYHYEAAVRATPVLVVLLPFVGSERKAKQESELVIAKTGDVIASTYYMRAWERDAGAEADALLEELWNVKAKLELAETKAVAAGALAEKARDAYERDREDMRCTVRXLHRYPHLDLARIVVAQPGD

SEQ ID NO: 106666 - protein, 201 aa, Oryza sativa
  Clone ID: PAT_MRT4530_1108C.1.pep
MGCASSKQFKRPPGVLAVTVNEVEALRELYNKMSYSIIKDGLIHKEEFQLALFRNSRKANLFADRVFDLFDLKRNGVIEFGEFVRSLSVFHPKAPKSEKTAFAFKLYDLRGTGYIEKEELREMVLALLDESDLHLSECAVEAIVDNTFSQADSNGDGRIDPEEWEEFVKANPASLRNMSLPYLQDITMAFPSFVMHSEAHD

SEQ ID NO: 106667 - protein, 373 aa, Oryza sativa
  unsure (1)..(373): unsure at all Xaa locations
  Clone ID: PAT_MRT4530_11090C.1.pep
MSTAGGGGGGRRVTIRSISCRGVKAFVPFQKPPLYAAVSLAGRREKTSGDPDGGENPDWDADVFAFELPDDEDDLAVAGGDGAAAAPRHVSYQVCAPDGKANGKLSFTFAVTGGGAYQQPQLCCLLHDLGISSTEDSQLDSEKLAGWWGAWRSPVWLGVKRAGGRAVAVSRWVRLRASRRLLRLRHPRFLPLRGGGQSDPRPCRASALRRKRAEGEAGRRQRQISAGRRAIAGRLAKGEHGRRRRTGGLLPDSAATARRRVEGGDAAVQGIVTPSQESELVIAKTGDVIASTYYMRAWERDAGAEADALLEELWNVKAKLELAETKAVAAGALSEKARDAYERDREDMRCTVRXLHRYPHLDLARIVVAQPGD

SEQ ID NO: 106668 - protein, 587 aa, Oryza sativa
  Clone ID: PAT_MRT4530_11091C.1.pep
MVNYIYDTLWSRRDKKIDKNAYDWTPIQLAIDEAWAQYVQRGGLRKTGHDTLIHKKDFSVKQQIGDQCGFHVCHNMRLLYREKVKTLAEFEGTITKSLTTSFEEGRQGVRPLPEAAALRRRVARRPPGKTSGDPDGGENPDWDAAVFAFDLPAAADGMLQFEVKAQGAAREQARRQGCPPLADLAVAGGDGAAAAPRHVSYQVCAPDGKANGKLSFTFAVTGGGAYQQPQVDHPTPISSSCCAPPPTSTTTTTSGAPYPPPAMASYPPLPSLSATPSASLYPPPPPSSYPPPPPPPPPPPHVTQSFAPNSSYPPPPPPSQYIAGYPPPPPSNFYPPPPAGYPAPSFPSPTSTYPPPPPPESASSQYPPPLPRSAPCCDRSVDRALPSYMSPPREADGWRASTAAGLCGSGAAAGGERSAADEFAVVPPAGSCVSATHTVYHYEAAVRATPVLVVLLPFVGSERKAKQCRHGGRRVEGGDAAVQGIVTPSQESELVIAKTGDVIASTYYMRAWERDAGAEADALLEELWNVKAKLELAETKAVAAGALAEKARDAYERDREDMRCTVRRAPPLPAPRPGQDRRRATGR

SEQ ID NO: 106669 - protein, 126 aa, Oryza sativa
  Clone ID: PAT_MRT4530_11092C.1.pep
LSLLSTQPWDTTTHSAAASHNQAAAMSTTTSFDGNPVAPSAMAGSYMAPSPWTGSRGHEGGGRSVAHQLPHEVSLDEVHPGPRPRPHRAGGRVRALQGNGPAPAPRIDPGSGSTFDQTSNTMDWSL

SEQ ID NO: 106670 - protein, 343 aa, Oryza sativa
  unsure (1)..(343): unsure at all Xaa locations
  Clone ID: PAT_MRT4530_11093C.1.pep
RLGRYAVESYLEQILSHGFFHADPHPGNIAVDDVNGGRLIFYDFGMMGSISPNIREGLLEAFYGVYEKDPDKVLQSMIQMGVLAPTGDMTAVRRTAQFFLDSFEERLAAQRKEREMSAAAGAATLEELGFKKQLTKEEKXKKKKQRLAAIGEDLLSIAADQPFRFPATFTFVVRAFSVLDGIGKGLDPRFDITEIAKPYAMELLRFNEAGVEVIVKDARRKGSRDFRWERQSRAFYNLFRQPDRVEKLAQIIERLEQGDLKLRVRTLESERAFQRVAAVQKTIGYGVAAGSLVNLATVLYLNSIRLPATIAYSLCAFFGLQVLVGLLKVKKLDQQERLITGTA

SEQ ID NO: 106671 - protein, 116 aa, Oryza sativa
  Clone ID: PAT_MRT4530_11094C.1.pep
MSTAGGGGGGRRVTIRSISCRGVKAFVPFQKPPLYAAVSLAGRREKTSGDPDGGENPDWDAAVFAFDLPAAADGMLQFEVKAQVPLLGSKLVGKVSVPLADLAVAGGDGAAAAPRH

SEQ ID NO: 106672 - protein, 64 aa, Oryza sativa
  Clone ID: PAT_MRT4530_11095C.1.pep
SLTMYRALTLPSVVISARKLLIDIGTFSLALQIFHGSPSPIRHDSLYRQCHKHPFQLRHSLRSC

SEQ ID NO: 106673 - protein, 63 aa, Oryza sativa
  Clone ID: PAT_MRT4530_11096C.1.pep
MGSPCRSLRFAPLSPAFPSAELAGATPQRRRFCCWLIPNPVLEFGQTVNEFGANFCLSDSYSY

SEQ ID NO: 106674 - protein, 189 aa, Oryza sativa
  Clone ID: PAT_MRT4530_11097C.1.pep
MAEEAWRERFRQRVAEVDDLFVEAFELLVDNARIHLEAQMLVGDAAAAERARIQLAQGALEDASGKLASAMSLMVGAKLLVLRGGSHDPLMPYHDIGHLGDEYAAEKNACAKLRGAEREAEEACARIGMCSGHLETISLLLDHENLPGVNDLIENERLDAAVDDLLAAIGKVESGKKMANDARLDVGAN

SEQ ID NO: 106675 - protein, 445 aa, Oryza sativa
  unsure (1)..(445): unsure at all Xaa locations
  Clone ID: PAT_MRT4530_11098C.1.pep
MARRSTRQTRAPNRFGFEEEPVQSEIPDQPVNQADEQEAESDHTVASESVNNARGNQPPPMDLHQILAMQTQILQGMIQNIIAMQQQHTQERQPHMVQDNGRSKLNDFLTSRPPEFSQTTEPIEGDDWIKDVERRLNLVQCTPYEKTLYAAHQLRGPTADWWDNYCANHTDAGTIVWAEFAXVFRSAHILESIIDLKKEEFANIRQGSSGINEYLSRFNRLARYALEDADTDKKKIRRFLKGMDAKLRVKLLAHDFSMFQQMVDKSLLLEDAEXRDARIEETQSNILRDSSKRRFVSKKTNSPAQYYQRVFQYSNGFGSTSRSTMSESSQQTTVINSKSLEGSNSVSCPPPPKRRGHKAGVECFICHEMGHYSWYCPQKVKSKQVQPTASLPSVPGPKSSKSPNSGSVSLTSPPVGQSHLNHVQVETKGKAVPTVMGGCEVVPVT

SEQ ID NO: 106676 - protein, 71 aa, Oryza sativa
  Clone ID: PAT_MRT4530_11099C.1.pep
TYDFDIKGKGKLGDCKTDPRKNLKIQEKNFLTGYTLGQLLFKNFITWALPKKTQKNFRGPTLCSKRAKKKP

SEQ ID NO: 106677 - protein, 256 aa, Oryza sativa
  Clone ID: PAT_MRT4530_1109C.1.pep
MDGGYGSVTIVHDARSPEDVFQDFCGRRSGIVKALTIEVEKFYKQCDPEKENLCLYGLPNGTWAVTLPADEVPPELPEPALGINFARDGMQEKDWLSLIAVHSDSWLLSVAFYFGARFGFDKKARERLFMMTSSLPTVFEVVSGGVNTQSKTANGSSKNKSGSKPPKRPNSDSKPQKQVQAKYEEENGGRGNGGDEDQAETICGACGEAYANGEFWICCDICETWFHGKCVRITPAKAEHIKHYKCPGCSNKRTRE

SEQ ID NO: 106678 - protein, 232 aa, Oryza sativa
  Clone ID: PAT_MRT4530_110C.1.pep
RERRLPPPLFSSPDAPSPAAGRRRRKGEDEDDGEDRRRRYHVNVGDAIRALREELPAAFYREPSFHIYRDDIVFKDPINNFTGIDNYKRIFWALRFTGQIFFKALWIDIISIWQPVEDVIMIRWIVHGIPRVLSDGPGRFEGTSEYKFDKNGKIYEHKGNPPLMTAADMPDSLQRQSSFHPGSSPPPPEPGLFSLDAAVDNGKPPDDGVLPASQEAAAPPLADAGTTASWVG

SEQ ID NO: 106679 - protein, 453 aa, Oryza sativa
  Clone ID: PAT_MRT4530_11100C.1.pep
MARRSTRQIRAPNRFGFEEELVQSEIPDQPVNRTDEQEAESDHTVASGSVNDVARGNQPPPVDLHQILAMQTHIIQGMVQNIIAMQQQHTQERQPHMVQDDGKSKLNDFLGSRPPEFSQTNEPIEADDWIKDMERKLNLVQCTPQEKTLYAAHQLRGPAADWWDNYCATHTDASTIVWTEFAGAFRSAHIPESIIDLKKEEFANIKQGSSCINEYLSRFNRLARYAPEDVDTDKKKIRKFLKGMDAKLRVKLLAHDFPTFQQMVDKSLLLEDAEKEMQEYKRRKVMSLEIQAKEDLCRKTNSPAQYYQKASQHSNGSGSTSRSTMSEPGQQATMINSNSHEGSNSVPCPTPSKRRGYKAGVECFICHEMGHYSWYCPQKVKSKRVQPTTGLPNVSRPKSLKAPNSGSISLTSPPIGQSHLNHVQVETNGKVVNLEQVEGAGEEQVPQARAEPQ

SEQ ID NO: 106680 - protein, 461 aa, Oryza sativa
  Clone ID: PAT_MRT4530_11101C.1.pep
MARRSTRQIRAPNRFGFEEEPVQPEIPDQPVNQADEQEAESDHMAVSGSVNDVSRGNRPPPVDFHQHMAMQTHIIQGMVQNIIAMQQQHTQERQPHMVQDDGQSKLNDFLGSRPPEFSQTNEPIEADDWIKDMERKLNLVQCTPQEKTLYAAHQLRGPAADWWDNYCATHTDASTIVWTEFAGAFRSAHIPESIIDLKKEEFANIKQGSSCINEYLSRFNRLARYAPEDVDTDKKKIRKFLKGMDAKLQVKLLAHDFPTFQQMVDKSLLLEDAEEEMQEYKRRKVMSLEIQAKEGLCRKTNLPAQYYQRASQHSNGSGSTSRSTMSEPGQQATMINSNSHEGSNSVPCPTPSKRRGYKAGVECFICHEMGHYSWDCPQKAKIKCLHKVKTKPVQPTTILPNIPGSKGSKSPNSGSASLTSLPVGQGRLNHVQVETNEKVVNLEQVEGAGEEQVPQARAKPQ

SEQ ID NO: 106681 - protein, 68 aa, Oryza sativa
  unsure (1)..(68): unsure at all Xaa locations
  Clone ID: PAT_MRT4530_11102C.1.pep
PTRPRTRRGATISILLAYKXKRREKRLILRGNHDCALLYMIYGFYDVCYRRSNVRLWKGYTDRDNCVD

SEQ ID NO: 106682 - protein, 259 aa, Oryza sativa
  Clone ID: PAT_MRT4530_11103C.1.pep
MARRSTRQTRAPNRFGFEEEPVQSEIPDQPVNQADEQEAESDHTVASESVNNARGNQPPPMDLHQILAMQTQILQGMIQNIIAMQQQHTQERQPHMVQDNGRSKLNDFLTSRPPEFSQTTEPIEGDDWIKDVERRLNLVQCTPYEKTLYAAHQLRGPTADWWDNYCANHTDAAHILESIIDLKKEEFANIRQGSSGINEYLSRFNRLARYALEDADTDKKKIRRFLKGMDAKLRVKLLAHDFSMFQQMVDKSLLLEDAE

SEQ ID NO: 106683 - protein, 542 aa, Oryza sativa
  Clone ID: PAT_MRT4530_11104C.1.pep
MRYPWVGLGKALSRTSDTGQCLDWTLGVRENEKGSGSRLIKWNGSGKPRSNDLTRETVGSAAAVVVGVRLVRVVGCILGLSELQPKLSQISAALKQMARRSTRQTLAPNRFGVEEELVQSEIPDQPVNQTDEQEAESDHMAASGSVNDVSRGNRPPPVDLHQLMAMQTHILQGVIQNIIAMQQQHTQECQPHMVQDNGRSKLNDFLRSRPPEFSQTTEPIEADDWIKDVERRLNLLRGPAADWWDNYCATHTDASTIVWTEFAGAFRSAHIPESIIDLKKEEFANIKQGSSCINEYLSRFNRLARYAPEDVDTDKKKIRRFLKGMDAKLRVKLLAHDFPTFQQMVDKSLLLEDAEQEMQEYKRRKVMSLEIQAKEGLCRKTNSPAQYYQKASQHSNGSGSTSRSTMSEPGQQATMINSNSHEGSNSVPCPTPSKRRGHKAGVECFICHEMGHYSWDCPQKAKIKCLHKVKTKPVQPTTILPNIPGSKGSKSPNSGSVLLTSPPVGQGRLNHVQVETNGKVVNLEQVEGAGEEQVSQARAEPQ

SEQ ID NO: 106684 - protein, 382 aa, Oryza sativa
  unsure (1)..(382): unsure at all Xaa locations
  Clone ID: PAT_MRT4530_11105C.1.pep
MARRSTRQTRAPNRFGVEEELVQSEIPDQPVNRTDEQEAESDHTVTSGSVNDVARGNQPPPVDLHQILAMQTHIIQGMVQNIIAMQQQHTQERQPHMVQDDDQSKLNDFLGSRPPEFSQTNEPIEADDWIKDVERKLNLVQCTPQEKTLYAAHQLRGPAADWWDNYCATHTDASTIVWTEFAEAFRSAHIPESIIDLKKEEFANIKQGSSCINEYLSRFNRLARYAPEDVDTDKKKIRRFLKGMDAKLRVKLLAHDFPTFQQMVDKSLLLEDAEQEMQEYKRRRVMSLEIRAKEGLCRKTNSPAQYYQKASQHSNGSGSTSRSTMSEPGQQATMINSNSHEGSNSAPCXYTFKRRGHKAGVECFICHEMGHYSWDCPQKAKI

SEQ ID NO: 106685 - protein, 51 aa, Oryza sativa
  Clone ID: PAT_MRT4530_11106C.1.pep
CFLGQWINNLINNVSQCSCTKCPNQSQNREVHFFAKSCEAWLHASLEWGWL

SEQ ID NO: 106686 - protein, 110 aa, Oryza sativa
  Clone ID: PAT_MRT4530_11107C.1.pep
KLVPYAATPFGILSHPSSTARARPASASCPPSLFIGGLSYDTNETALKDAFSQHGHIIQVKVICHPVTGKSKGYGFVKFASEDEAAAALHKMGGEVIDGRNIRVHYANSG

SEQ ID NO: 106687 - protein, 237 aa, Oryza sativa
  Clone ID: PAT_MRT4530_11108C.1.pep
MRKLNFLDISDIPKISVFTPAMSKREISSGFLHVDVLPKFKSLRELTMSRVFSNPILVRLHKCTPPSTNGISSLSEVSSTTKSNKCHKDFLGMNRVLNKSSRNQHQALKQTQINHSLTHMKSEIEDRWRQRKLFFGAATVLSEFPKSADFSKTQQKKRISEIPKIFRKNRKLPEDILTSLPVSEIPKKISDKSENLQNRFWLHGHFRKFRKSLSDNSEISKSKTLLSVIPKTHFRQL

SEQ ID NO: 106688 - protein, 162 aa, Oryza sativa
  unsure (1)..(162): unsure at all Xaa locations
  Clone ID: PAT_MRT4530_1110C.1.pep
PTGRYCLSGSSDSMIRLWDLGQQRCIHSYAVHTDSVWALASTPSFSHVYSGGRDQSVYLTDLSNRESVLLCTNEHPILQLSLQDDMIWVATTDSSVNGWKAEAHEPXKAFQKGSSFLAGNLSFSRARASLEGSAPVPIHXEPSSLXGVPAITQHEILNNRDM

SEQ ID NO: 106689 - protein, 98 aa, Oryza sativa
  Clone ID: PAT_MRT4530_11110C.1.pep
GDGVAQRCGTAPPSSAREIRQSQLESKFMTPDRCGHPPRAGGVRGGEIRRPRRPVHVDGRVPHRPGPADDVPLALAREERPHVAHVDVVPNSCSPGDP

SEQ ID NO: 106690 - protein, 35 aa, Oryza sativa
  Clone ID: PAT_MRT4530_11111C.1.pep
MDGDWCGVLMGGKSGVLEFASACQAASVKNYGTFG

SEQ ID NO: 106691 - protein, 78 aa, Oryza sativa
  unsure (1)..(78): unsure at all Xaa locations
  Clone ID: PAT_MRT4530_11112C.1.pep
MAPTVMASSATSVAPFQGLKSTAGLPVRRRSTNSGFGNVSNGGRIKCMQVXPMGGIKKFETLSYLPQLTGRDFWKQIE

SEQ ID NO: 106692 - protein, 51 aa, Oryza sativa
  Clone ID: PAT_MRT4530_11113C.1.pep
LTQKFMFKSPLTSSSKINFHTSMIINSISCLYHHVLVPATFIINTSLIACT

SEQ ID NO: 106693 - protein, 55 aa, Oryza sativa
  Clone ID: PAT_MRT4530_11114C.1.pep
MCCKAIKFGYGKGFPSHDVGHPQSAIERKRRAWSESEDDEPVQRPVQPSAGENDL

SEQ ID NO: 106694 - protein, 405 aa, Oryza sativa
  Clone ID: PAT_MRT4530_11115C.1.pep
MASYDDGTNLVDDEYDDLDDFIVDNDDDVVLGEEQQDEFEEEEEEQEEEEEEEEPPVGQVEILTLREQLKADIRRKNQAQQGATAGRASCSSSVQPLAKDRFGSFFGPSRPSLARRVIEEGCSSIIKEKQNVPSNKSSVSSASKKQPIPSGQQQKPKFVKEEKRKVDALRQNRDYSCLFSDDADTPQATKEQPDNMPPHPNTKRTIASSAKNGSSLPAMKKIQRVQPSSNGQKMQQTLQSKRPQAMLSQSHGQQSLQSRKPKPSLNGQNFRQKVSAPLAQKHLAPSSRPKPSSAVHNDHGKGKTRRLVKRKSKEDGCDEEEVDYKSIIRGMFNYNPAKFVGRDEDDRDMEANYASIQMEERRSARLARQEDDEELRRIMDEERREKQERKRKKLAQKAVVDASQD

SEQ ID NO: 106695 - protein, 349 aa, Oryza sativa
  unsure (1)..(349): unsure at all Xaa locations
  Clone ID: PAT_MRT4530_11116C.1.pep
LVVDNSVAFLLESVPGEIRDSAFVSPDSIRRHRRVLAMLIPEVNIRRRVLTYVGCGGGGGGGEXYKSDMRKLEELMSKLNPRAQEFVPSSRRAPPAAAAQAAGGLSADAPVFVSAAEYFGGAGAGAGQLQVGGGGGRRRSGFNQGRRRTGGRTRRADREDSVRRTVYVSDIDQQVTEQKLAEVFSNCGQVVDCRICGDPHSVLRFAFIEFADDAGARAALTLGGTMLGYYPVRVLPSKTAILPVNPKFLPRTEDEKEMVSRTVYCTNIDKKVTEEDVKIFFQQLCGKVSRLRLLGDYVHSTCIAFVEFAQAESAILALNYSGMVLGTLPIRVSPSKTPVRPRSPRVMSN

SEQ ID NO: 106696 - protein, 77 aa, Oryza sativa
  Clone ID: PAT_MRT4530_11117C.1.pep
RNPFFFPPTTPLPDPAPMAISGRGQVRGGRRWRRLRRGEALEPLPYALLAARRRARNGIRACNFYVVLGGCRDPPPF

SEQ ID NO: 106697 - protein, 309 aa, Oryza sativa
  Clone ID: PAT_MRT4530_11118C.1.pep
EEEEREYKSDMRKLEELMSKLNPRAQEFVPSSRRAPPAAAAQAAGGLSADAPVFVSAAEYFGGAGAGAGQLQVGGGGGRDSSSDGSSNGGGQPQNRRRRSGFNQGRRRTGGRTRRADREDSVRRTVYVSDIDQQVTEQKLAEVFSNCGQVVDCRICGDPHSVLRFAFIEFADDAGARAALTLGGTMLGYYPVRVLPSKTAILPVNPKFLPRTEDEKEMVSRTVYCTNIDKKVTEEDVKIFFQQLCGKVSRLRLLGDYVHSTCIAFVEFAQAESAILALNYSGMVLGTLPIRVSPSKTPVRPRSPRVMSN

SEQ ID NO: 106698 - protein, 91 aa, Oryza sativa
  unsure (1)..(91): unsure at all Xaa locations
  Clone ID: PAT_MRT4530_11119C.1.pep
MEIQYELNSDRDPNRSPTGLGGPSDGPYIFVRGVTGGCIASPWEYGEENARGGEGRAGAIDYFLYIDARYFARIPSTSXRLLPLRSASSGN

SEQ ID NO: 106699 - protein, 68 aa, Oryza sativa
  Clone ID: PAT_MRT4530_1111C.1.pep
MGGQKREIQPIESNRSPCSCRGPNKLTRRITSQSSIVLAHEAAWHPGMGVNNSRTLQSTAPRTPQGDR

SEQ ID NO: 106700 - protein, 112 aa, Oryza sativa
  Clone ID: PAT_MRT4530_11120C.1.pep
MTTRPSVFSTVVAAIAIAALLSSLLLLQATPAAASARASKKASCDLMQLSPCVSAFSGVGQGSPSSACCSKLKAQGSSCLCLYKDDPKVKRIVSSNRTKRVFTACKVPAPNC

SEQ ID NO: 106701 - protein, 147 aa, Oryza sativa
  unsure (1)..(147): unsure at all Xaa locations
  Clone ID: PAT_MRT4530_11121C.1.pep
RIYEGGQDHFEWRXRPRLNTYRRRIGLTACEIGWRRVGANPDATRGGDEGENNRLGGEWFELSEIALGGGLDESARRRAAISGSGRYPGFVVVKIGXRRRSEGVERLAAPRPTRGVTARGKVGRPGSAREGVEEAKKSTDFEWGVVP

SEQ ID NO: 106702 - protein, 87 aa, Oryza sativa
  Clone ID: PAT_MRT4530_11122C.1.pep
MACREKKVKMGPAVPVAEADRPPMVFPVSKKLHLAVNVALSSWGKKVRIPKPVNIPRWITITVKWGGTETVAFVAPFWGSVTVSGPV

SEQ ID NO: 106703 - protein, 188 aa, Oryza sativa
  unsure (1)..(188): unsure at all Xaa locations
  Clone ID: PAT_MRT4530_11123C.1.pep
SPGCKIKXMFDSYSVMNNWHMXLLVLIFGDYRRSGFGDDWILXGDEKVLLEXGPVRPVRIERSRSMHVVGEDSIWHMMEILCXAYGMRSRIWKESKFGMIGXYVKLVSCTGRFPRWIRTSCTSLIRGFRLPTSCINREGRLYLLGLGGLTGEIPAVRPAVALGGKATSGRLDRXSILVIPMAKARSDR

SEQ ID NO: 106704 - protein, 47 aa, Oryza sativa
  Clone ID: PAT_MRT4530_11124C.1.pep
ATKLSHRRLTQIRATITLLKTSKRASDTCTHTANHELHTIGLTHTRT

SEQ ID NO: 106705 - protein, 202 aa, Oryza sativa
  Clone ID: PAT_MRT4530_11125C.1.pep
MTGTRVAFGVPGLRGRKPFPLRQRTHTHPMSGGVGADEVPRWGPPEDDHMLCFRPKAWTAIQFRLVWAPLQGGERRDSACGIPLNYKRKTLLYEQGLTNHKSVISHLTVTVGHSTVFVVKTDSEGNGDKHRHKTLTDSFRGSLAAANLEQNVSCQAKEARRRVAPEWSYLCIPILAFDCTWSMLLLNRRRPSREQTHRLALP

SEQ ID NO: 106706 - protein, 1790 aa, Oryza sativa
  Clone ID: PAT_MRT4530_11126C.1.pep
MSLLRNRRAAAAAGSGEQTVVQAAYNIIPIQDVVMHGDHPSLQVPEVRAAVEALSHASDFPAPPLARVWDPHRADIFDWLGATFGFQADNVRNQREHLVLLLANAQLRAAPGFPKDHPIDVLHLTVARGIRRKLLKNYTSWCAYLGQKRHFRVPSGGGGGRRTGAATGNDVRMDLLYTALYLLIWGEAANLRFMPECLCYIFHYMALDLHHVVEQSIDIETGRPAMPAVCGEDAFLIRVVTPIYNVLKNEVEASRNGTKPHSAWRNYDDVNEYFWSRRVFKRLRWPLDPSRSFFVEPGKTGRIGKTGFVEQRSFWNVYRSFDRVWVMHILFFQAAMIVAWDGKTPWVSLRFRDIQVRVLSVFITWGGLRFVQAMLDAGTQYSLVSRETKTVAVRMVLKVLVAAGWTITFSVLYKRMWDQRWRDRRWSFAANTRVLNYLEAAAVFVIPQVLAIVLFIIPWIRNFLEKTNWKILYVLTWWFQTRTFVGRGLREGLIDNIKYSIFWVCLLVSKFSFSYFLQIKPMVGPTKVIFKLHDIKRNWFEFMPHTERLAVIILWLPVIIIYLMDIQIWYAVFSSLTGALIGLFSHLGEIRSVEQLRLRFQFFASAMQFNLMPEEHLDTVHGGIRSKFYDAINRLKLRYGFGRPYRKIEANEVEAKRFALVWNEIIQTFREEDIISDKELGLLELPAVVWRIRVVRWPCLLLKNELLLALSQAAELVADDRTHWNKICNNEYRRCAVIEAYDSIRHLLLEIIKERTNEHIIVNQLFLAFDGAMEYGKFTEEYRLTLLPQIHKYVISLVEQLLLKDKDQIKIVRTLQDLYDLAVHDFPKIKKDFEQLRREGLALSRPTESQLLFQDAIKCPDDNDVSFYKQVRRLHTILTSRDSMDDVPKNPEARRRITFFSNSLFMNMPRAPTVQRMMAFSVLTPYYNEDVLYNKDQLRRENEDGISILFYLQKIYEDDWKNFLERMQREGMASDDGIWAGKFQDLRLWASYRGQTLARTVRGMMYYYRALKMLAFLDNASEVEITEGTKQLASFGSVQYENDVYPMNGGLSQRPRRRLERGTSTVSQLFKGQEDGAAIMKYTYVVACQIYGNQKKAKDQRAEDILTLMKKNDALRVAYVDEVHPEIGDTQYYSVLVKFDPVLQREVEIYRIRLPGQLKLGEGKPENQNHAIIFTRGDAVQTIDMNQDNYFEEALKMRNLLEQYDYYHGSQKPTLLGVREHVFTGSVSSLAWFMSAQETSFVTLGQRVLANPLKVRMHYGHPDVFDRLWFLTRGGISKASRVINISEDIFAGFNCTLRGGNVSHHEYIQVGKGRDVGLNQISMFEAKVSSGNGEQTLSRDIYRLGHRLDFFRSLSVFYTTVGFYFNTMMVVLTVYTFVWGRLYLALSGLEAGIQGSANATNNKALGAVLNQQFVIQLGLFTALPMIIENSLEQGFLPAVWDFFTMQMMFSSVFYTFSMGTKSHYYGRTILHGGAKYRATGRGFVVQHKSFAENYRLYARSHFIKAIELGIVLTVYAAHSVIARDTLVYIIMMISSWFLVVSWIMAPFAFNPSGFDWLKTVYDFDDFMNWIWYPGSIFSKAEHSWEVWWFEEQDHLRTTGLWGKILEILLDLRYFFFQYGVVYQLKIANESRSIAVYLLSWICVAVIFGIFVLMSYARDKYAAKQHLYYRVIQSGVIILAVLVLIIFLKFTKFQIIDIFTSLLAFIPTGWGLISIAQVIRPFIESTVVWASVVSVARLYEILLGVFVMAPVAFFSWLPGFQEMQTRVLFNEAFSRGLQISRILAGKKTIAV

SEQ ID NO: 106707 - protein, 61 aa, Oryza sativa
  Clone ID: PAT_MRT4530_11127C.1.pep
KRTLRQNNPRLTGETPLIFFVWVDGNPLALPGREYQLRSIHCLGLTPNCLRNTRQKWHKWR

SEQ ID NO: 106708 - protein, 59 aa, Oryza sativa
  unsure (1)..(59): unsure at all Xaa locations
  Clone ID: PAT_MRT4530_11128C.1.pep
PLSFHREGYTWRGRHITSVYNTSXQVPSPFWAPLTVDTHPHQCRHTAPLIRHNFTRGVP

SEQ ID NO: 106709 - protein, 66 aa, Oryza sativa
  Clone ID: PAT_MRT4530_11129C.1.pep
TTTTTRAGSPWRVRGIQRLPHFPAPPGPNHPIPALPPLLVSTQIRVSTHSSPNQSTKHFRPPACLG

SEQ ID NO: 106710 - protein, 530 aa, Oryza sativa
  Clone ID: PAT_MRT4530_1112C.1.pep
MPIPIAFLFLLPLLLAASSHATASSHATASVVPQPRGFYINCGSEKEEQIGSIKWIQDEGFIAVGNMSAVDKPNILPLLATVRYFPDATARKYCYQLPVVKGSRYLVRTTYFYGGFDGGDVPPVFDQIVDGTRWSAVNTTDNFRRGMSTYFEMVAEAQGKTMSVCLARRADTRSSPFISALELVSLDDSMYNTTDFDKYVMSTVARSRFGAKGEIVSYPDDQYNRYWAPFTDANPTVESHSAITPEEFWNVPPAKALRAGVTTSRGKKLSVQWPPVELPAATYYVALYFQDSRTASPYSWRVFDVAVNGKEFFRELNASAAGVMVYSTMMPLSGKMEIVLTPNETSPVGPLINAGEIYQIVPLGGRTATRDVVAMEELARSIKNPPPDWAGDPCLPRQNSWTGVICSEGSPVRVVSLDLKNHGLSGSLPDSIGNLTGMKNIYFGGNKLTGSIPDLSSMHILEELHFEGNQLSGPISPSLGTLTNLKELYLNNNNLTGQIPESLKNKPELDMRKIQFDDEGRRAKASETVG

SEQ ID NO: 106711 - protein, 463 aa, Oryza sativa
  Clone ID: PAT_MRT4530_11130C.1.pep
MKMRAAVADGDGDDDGAGAPVQVSVDPAAYRDWSALPADLLLTVMESLAIPDLFRAGTACASWYAAYSIARRARIPIRDSAPCLLYSGEGDDDPSKATLYSPSSGDCFRVRLPDPPLRSRNLVGSAHGWLVTADEQSNLHLVNPLNGAQVALPPVTALHHVESFVDEEGNIVYSVDESLGPDDPEANLPEFEELADREVPVEYPAEKLRLFMYHRVILSCSPSVGRECVALLVHRPDGMISFARPGDERWTHINRTTSNGSLKWDTGYTDALYNKNDGLFYLLSFDGSICALDLSGSSPVARNIVKKNTQWDNPSKYIVLAPWGDLLEVWRLRDFDEPDETPECSSAEFEDRSDKWLTEEIMLYKVDIDKQKLVKISSIGDYALFLGFNSVVCLPTENFPMLKPDCAYLSDEFYEEICVKRHNWREIGIWDLKNCKLQSLGDVESLHAWRNWPSPIWITPSLS

SEQ ID NO: 106712 - protein, 80 aa, Oryza sativa
  Clone ID: PAT_MRT4530_11131C.1.pep
MTGSMIFHGLQHMQNNIQTLNDVAGAGISCSVVGAAALPFCGGKVAEASKIDLFEISRHIEEATETGKENLLVVTGYRNF

SEQ ID NO: 106713 - protein, 197 aa, Oryza sativa
  unsure (1)..(197): unsure at all Xaa locations
  Clone ID: PAT_MRT4530_11132C.1.pep
VFPPPRGPTFVFGPPPGVQCPAPPAPEGFAAFSGGADFPWGFPPGLPGPPFPGGPGWALCCLWGPPPQKGPGICFPKGVREAPPPQGSFSVPPSPFGGLGEALPPLPWGFCPPDPYRRAPPPGGPPPPVAPPVXGPPPGPPKKKGPPFPGGGCPPPLGLPPPAPPEGGLGLFFVSGGEVPPSLFAPRVFFFFGRFWP

SEQ ID NO: 106714 - protein, 63 aa, Oryza sativa
  Clone ID: PAT_MRT4530_11133C.1.pep
APRSVEKKIYGEFLVNAHAEDVGAGFNNSNRRLDAIRDHLPEPYEQLGENCRVLESHYREMMD

SEQ ID NO: 106715 - protein, 75 aa, Oryza sativa
  unsure (1)..(75): unsure at all Xaa locations
  Clone ID: PAT_MRT4530_11134C.1.pep
HAXTXLXAFPXQHRXYPPQXGXXSGXGXXPXAYXXXAXPHXXHMGXYHFGXXXGGGSXXAGKLKAXMFXXXKXKS

SEQ ID NO: 106716 - protein, 45 aa, Oryza sativa
  Clone ID: PAT_MRT4530_11135C.1.pep
QLQSDEALLPPYTKFVYFRMKGMPISRYSCHHCIFVLGIHSILKQ

SEQ ID NO: 106717 - protein, 261 aa, Oryza sativa
  Clone ID: PAT_MRT4530_11136C.1.pep
MCVALSTTAGNNCGRHVMRSRCGCMLVAPGAQGIDVNIKEMNAQTNMKNQQHHIFWARGSIIHYSPYKLEAQMQNVVILASRLISMKASQHFEQLEEEMYYHMVMLVGPRSEYRIRWIIRNPVIFSQSSESGCKFSVAHPTIYANWYAIATYGLITIRQFLARMCSIEVGLGRHGESNSTIFLAASSYVPNRAGLNHLLPTCKQQWYGNLQANETMVDSFSDFPLLFPSSCEVVTCITNTDFTGSKRLSAPSTLQIQLYRY

SEQ ID NO: 106718 - protein, 128 aa, Oryza sativa
  Clone ID: PAT_MRT4530_11137C.1.pep
GQDRCPTCQVCFKRGHTAADCWYRFDEDYVADEKLAAAATNSYGATDHITGELEKLTTKEKYNGGEQIHTASGAAKKNLISASQLAADNSAFLELHSKFFSIKDLVTKDILLEGKCRHGLYLIPNSFG

SEQ ID NO: 106719 - protein, 87 aa, Oryza sativa
  unsure (1)..(87): unsure at all Xaa locations
  Clone ID: PAT_MRT4530_11138C.1.pep
MVGCEHMVLKVVLMSINDRFTSYCCETFTVLTTSQNGQRLDTWYSKACCGAPDXEAAKSPWGSLGSPCLWXFFEGVIIIQERCAALS

SEQ ID NO: 106720 - protein, 369 aa, Oryza sativa
  unsure (1)..(369): unsure at all Xaa locations
  Clone ID: PAT_MRT4530_11139C.1.pep
REDFGRWNHGQDRCPTCEVCFKRGHTAADCWYRFDEDYVADEKLAAAATNSYGIDTNWYIDTGATDHITGELEKLTTKEKYNGGEQIHTASGAGMDISHIGHTIVHTPSRNIHLNNVLYFPQAKKNLISASQLAADNSAFLELHSKFFSIKDLVTKDILLEGKCRHGLYLIPNSFGXSTSKQALGTVKLSLSRWHSRLGHPSLPIVKKVISKNNLPCLVESVDQSVCNACQEAKSHQLPYVRSTSVSQFPLELVFSDVWGPAPESVGRNKYYVSFIDDFSXLKYKSQVFEKFKEFQVLVERMFDRKIIAMQTDWGGEYQKLNSXFFAKIGIDHHVSCPHTRQLNGSAERKHWHIVEVGLSLLSYASGIL

SEQ ID NO: 106721 - protein, 568 aa, Oryza sativa
  Clone ID: PAT_MRT4530_1113C.1.pep
MHHQQLKPGEAASLPRHLLEAHVVALVRRCCPGLLALRAAHARLIRLRLPRLTAAFALSKLLASSSSSSSSSCGAAPSYARNLFDQIPEPTAFCYNSLIRALSSAAGAAPAADTVLVYRRMLRAGSPLPNSFTLAFALKACSVVPALGEGRQLHSQAFRRGLEPSPYVQTGLLNLYAKCEEVALARTVFDGMVGDKNLAAWSAMIGGYSRVGMVNEALGLFREMQAADVNPDEVTMVSVISACAKAGALDLGRWVHAFIDRKGITVDLELSTALIDMYAKCGLIERAKGVFDAMAERDTKAWSAMIVGLAIHGLVEVALKLFSRMLELKVRPNNVTFIGVLSACAHSGLVNEGRRYWSTMQELGIKPSMENYGCMVDLFCRSSLLDEAYSFVTGMAIPPNSVIWRTLLVASKNSNRFDIVQSASKKLLELEPCNPENYVLLSNLYASNSQWDRVSYMRKKMKENNVNVVAGCSSIEINGYLHKFVVSDDSHPEIKEIRLLLREIADRVVRAGHKPWTAAVLHDVGEEEKEVALCEHSERHGSWLPALTGNATTMSIVGVYSTARQIFR

SEQ ID NO: 106722 - protein, 76 aa, Oryza sativa
  Clone ID: PAT_MRT4530_11140C.1.pep
GAHGWCGPGVVTQHGTCAGTGRTDVARRGRSWNKLQLLFRKPISKELQGVREAKLHPGRPFHVGIHHRNSHPLALR

SEQ ID NO: 106723 - protein, 939 aa, Oryza sativa
  Clone ID: PAT_MRT4530_11141C.1.pep
MATTAALPFHPTPRRKLPPASAGASLRQLCKDGDLREALRQLAARSARGRAPPPTDHYGWVLDLVAVRRAVSEGRQLHAHAVATGALGDDDAGFLATKLLFMYGKCGRLPDAHRLFDGMPARTVFSWNALIGACLSSGGAGEAVGVYRAMRASEPVAGAAPDGCTLASVLKACGAEGDGRCGSEVHGLAVKSGLDRSTLVANALVGMYAKCGLLDSALRVFEWMRDGRDVASWNSAISGCVQNGMFLEALDLFRRMQSDGFSMNSYTTVGVLQVCAELAQLNHGRELHAALLKCGTEFNIQCNALLVMYARCGWVDSALRVFREIGDKDYISWNSMLSCYVQNRLYAEAIDFFGEMVQNGFNPDHACIVSLLSAVGHLGRLINGREVHAYAVKQRLDSDLQIANTLMDMYIKCYSVECSARVFDRMRIKDHVSWTTIIACYAQSSRYSEAIGKFRTAQKEGIKVDPMMMGSILEACSGLKSISLLKQVHSYAIRNGLLDLILKNRIIDIYGECGEVCYALNIFEMLDKKDIVTWTSMVNCFAENGLLHEAVALFGKMLNAGIQPDSVALVGILGAIAGLSSLTKGKEIHGFLIRGKFPVEGAVVSSLVDMYSGCGSMNYALKVFDEAKCKDVVLWTAMINATGMHGHGKQAIYIFKRMLETGVSPDHVSFLALLYACSHSKLVDEGKFYLDMMVSKYKLQPWQEHYACVVDLLGRSGQTEEAYKFIKSMPLEPKSVVWCALLGACRIHKNHELAMIATDKLLELEPDNPGNYVLVSNVFAEMGKWNNVKEIRTKMTEQGLRKDPACSWIEIGNTVHTFTARDHSHRDSQAIHLKLAEITEKLRREGQYVEDTSFVLHDVSEEEKIDLLHRHSERLAISFGLISTASGTPLRIAKNLRVCGDCHEFTKLVSKLFEREIVVRDANRFHHFSGGTCSCGDFW

SEQ ID NO: 106724 - protein, 204 aa, Oryza sativa
  unsure (1)..(204): unsure at all Xaa locations
  Clone ID: PAT_MRT4530_11142C.1.pep
MVRMAGVDREWSHSMAHVLALDARTWPGGDVPGTSCNFFSGSRFPKNSRVKPGVAAPATAAVSTPSPSPGRVGHTRDFPVAPSRFFPISPNSLVLPIAPAPCNHPPPPFPPLRPPLAATRVAAAPRRRRRRVREAKLHPGRPFHVGIHHRNSHPLALRAPRIPSVGCRXLPWLVVAVRRRLPPRRPPSASSVPSRIPVEWCSRC

SEQ ID NO: 106725 - protein, 517 aa, Oryza sativa
  Clone ID: PAT_MRT4530_11143C.1.pep
MDGNIENPAEDMSGIASNLDNEEQAIPLSDVPEQYKEDPENTYDEETKDSSYEESGIPYNEDQVNINDGNVGHQHEEDQAIPSEEGHAYGGEAQGEQQANAVTDEKKWPGWPGESVFRILVPAQKVGAVIGRKGEFIKKMCEESRARIKVLDGPPGVPDRAVMISAKDEPDAPLPPAVDGLLRVHKRITDGLDGESDQPQRAAGTVGPTRLLVPASQAGSLIGKQGATIKSIQDASKCVLRILESVPPVALSDDRVVEIQGEPLDVHKAVELIASHLRKFLVDRSVLPLFEMQMKVHNAHREQPMPPPQTWGPPPPWGHPSNVPPGGPGYGGNPQFMPPRPQDHYYPPPDVPPVEKQPHYGISSYGRDAPPTGAPPASGNQHPPHGSSQITHSMQVPLSYADAVIGAAGASISYIRRHSGATISIQEGVPGEMTVEISGSASQVQTAQQLIKNFMAEASPQGPPQAPAPPAQPVDTGYSSYPPYGGTSYGSPPGGAGPHNGGSYGGAPPPYPPSYGY

SEQ ID NO: 106726 - protein, 88 aa, Oryza sativa
  Clone ID: PAT_MRT4530_11144C.1.pep
DEITAVHHLLDSSCAMEIKTSRDCIIIMPTQNICEMFSGPPTNRSGNQNQSSVFGTHHPQKNLSSSLLLSLPATPVAATGEVGGGWPT

SEQ ID NO: 106727 - protein, 63 aa, Oryza sativa
  Clone ID: PAT_MRT4530_11145C.1.pep
NPVHEFVSGNNIFSVRCLEPWTGGALRSSFIIAAGVHTGMIIIITNQQGSAVVVPTGNMLSHE

SEQ ID NO: 106728 - protein, 93 aa, Oryza sativa
  Clone ID: PAT_MRT4530_11146C.1.pep
MAQQAEKAAELQDPEIRAELDRRARDDGKTVIKSGTGGKSLDAQERLAEGRKKGGLSRTTESGKERADDDTGAVLIEPDDKMLKEAKKNLGRK

SEQ ID NO: 106729 - protein, 110 aa, Oryza sativa
  Clone ID: PAT_MRT4530_11147C.1.pep
MAQQAEKAAELQDPEIRAELDRRARDDGKTVIKSGTGGKSLDAQERLAEGPCPFYVSSLFCAISFTRRKKGGLSRTTESGKERADDDTGAVLIEPDDKMLKEAKKNLGRK

SEQ ID NO: 106730 - protein, 57 aa, Oryza sativa
  Clone ID: PAT_MRT4530_11148C.1.pep
SCRDQNFVASIAYTSRRVILIRTPAMHACTWIHQGNAHTSTLLYDRATTTHQHAGRV

SEQ ID NO: 106731 - protein, 514 aa, Oryza sativa
  Clone ID: PAT_MRT4530_11149C.1.pep
MPPCVWGSHTPLSLLSPPAAWAGERMEGDQAGGDLTDIVRAGGGAMPGSVVVDLPSTAAEWQLPAEPMLFPPPPSLSSTTDGCGAGGAAGADIFGGGGGDLFSGLVDPFSSDYSSGADFLDAMPDAMAKVGFDTAVGGGCGGGGGGGGGSGGHLLDMSRKPLLPRGMPMAAVGGLAAPRVMPSPLSPRAIRPYPPISAGDMMKLGITAGQAAGCAIDAAVAGMQMSSPRSGGIKRRKNQARKVVCIPAPTAAGGRPSGEVVPSDLWAWRKYGQKPIKGSPYPRGYYRCSSSKGCSARKQVERSRTDPNMLVITYTSEHNHPWPTQRNALAGSTRSHHSKNSGGGGGSGSKGSQNDKSQQQPSVKEEQKDQATTATTTTTSTITTTNSASPVVVKEEEAALAGSSEALELERVMDTTAAGVVDHSELMDHVFSESYKPMIPETGQPDDFFADLAELESDPMSLIFSKEYMEAKPSGGDHAQEKAMAKELDPFDMLDWSTTTNSSAGSSFEQGKRG

SEQ ID NO: 106732 - protein, 213 aa, Oryza sativa
  Clone ID: PAT_MRT4530_1114C.1.pep
PRVRKKDVHTQLEQARKTNKNVSGIAKELRKLHREGINNATNSVTVVAVLFATVAFAAIFTVPGGNDNNGVAIAVHAVSFKIFFIFNAIALFTSLAVVVVQITLVRGETKAERRVVEIINKLMWLASVCTTVAFISSAYIVVGKHFQWAALLVTLIGGVIMAGVLGTMTYYVVRSKRTRSIRKKVKSTRRSGSNSWQQNSEFSDSEIDRIYAI

SEQ ID NO: 106733 - protein, 69 aa, Oryza sativa
  Clone ID: PAT_MRT4530_11150C.1.pep
SFPNHSLPIATYSTNDSTSASAIYTTNTTGSISSGIVSISSSILSQELRRYSHRGFQVEVTSWSRRHRC

SEQ ID NO: 106734 - protein, 157 aa, Oryza sativa
  Clone ID: PAT_MRT4530_11151C.1.pep
MGPTCRGRRGWAAEQASSGGSGGRGRRRPPTGAPAVRVKAGPAVRGGPAAGATAAAAGGGSTGRADERGGSGQSGGTKPKECQPRHRLLPAHSRGAAGGGRSRWAVGGATTGGGRSRWAVGGATTGGGRRGESAAREEANLSGRPAGEEAARAGRWE

SEQ ID NO: 106735 - protein, 92 aa, Oryza sativa
  Clone ID: PAT_MRT4530_11152C.1.pep
MVEAAEMLALAADREELARLDVVVWLCRVRHGGHVGQRGDAVMPIDASTGARSMVEEVGALAADREERVCLDAVARPRRSLAMPDELPVHDT

SEQ ID NO: 106736 - protein, 380 aa, Oryza sativa
  Clone ID: PAT_MRT4530_11153C.1.pep
MADGEDIQPLVCDNGTGMVKAGFAGDDAPRAVFPSIVGRPRHTGVMVGMGQKDAYVGDEAQSKRGILTLKYPIEHGIVSNWDDMEKIWHHTFYNELRVAPEEHPVLLTEAPLNPKANREKMTQIMFESFNVPAMYVAIQAVLSLYASGRTTGIVLDSGDGVSHTVPIYEGYALPHAILRLDLAGRDLTDALMKILTERGYSFTTTAEREIVRDIKEKLAYVALDYEQELNAAAAAKNSSSVEKSYELPDGQVITIGAERFRCPEVLFQPSLVGMEAAGIHETTYNSIMKCDVDIRKDLYGNVVLSGGSTMFPGIADRMSKEITALAPSSMKIKVVAPPERKYSVWIGGSILASLSTFQQMWISKGEYDESGPAIVHRKCF

SEQ ID NO: 106737 - protein, 81 aa, Oryza sativa
  Clone ID: PAT_MRT4530_11154C.1.pep
MGRNGNAAYVRKYWSELDSHVANVGLISRYGQTTNYQPSNDDLGLSQIPTKRKIKRPKVNLFHPDGALEWDTDAASPSVVH

SEQ ID NO: 106738 - protein, 69 aa, Oryza sativa
  Clone ID: PAT_MRT4530_11155C.1.pep
QGDNTKLQKLYSGTSILKLLKSTSCKVTFSHLRKVNDVAEGNKPTIGCHCVGTLGLEAYLGQPMSLVQG

SEQ ID NO: 106739 - protein, 695 aa, Oryza sativa
  unsure (1)..(695): unsure at all Xaa locations
  Clone ID: PAT_MRT4530_11156C.1.pep
MGSVAGDAARLSYPPTRRDNSVVDMYHGVPVADPYRWLEDPESEDSKKYVANQMYPVEAVLTGCVNWVNLRREVTCDFDHTLHEGQFRTGNQXFYLYNSGIEVHRLLYVLDNFDGESEVLLNPNALIKDVTVGNSTYSVIKDGNIMADGLSERDCDWVTIRVMNIADKQTLSDKLSWVKFSSISWTHDGKGFFYGRYPAPREVELDAGTETNINLNHEIYYHVVGSDQSEDILCWKDPEHPKYSFGASVTEDGKYIILGTYEGCDPVNKLYYCEICTLPQGIEGFKETKGMLPFVKLIDNFDAQYHVVANDGDEFTFLTNRNCPKVKLGRXQIKKQEWWTDFLXVLLHVEHDRCVMVGVINYVQDKLEMGSILHXAPVEDRPVQKIALCRNFVGFLFDHFGTKDWSTKNLLGFIWNGPVYEDLXMKVSMRCNLLXIEVKKIFVNSKDGTKIPMFIMSKRDIELDGSHPTLLYGYGGFNISLTPSFSVSRVVLCKNMGFVVCVANIRGGGEYGEEWHKAGARAMKQNCFDDFIACAELLISAGYTSYRQLCIEGGSNGGLLIAACVNQRPDLFGCALAHVGVMDMLRFHKFTIGHAWTTDYGCSDNEEEFHWLIKYSPLHNVRRPWEQSFVNCCQYPAIMLLTADHDDRVVPLHSLKLLATLQYVLCTSIEDTPQIDEVADRYSFMANMLDASWTE

SEQ ID NO: 106740 - protein, 299 aa, Oryza sativa
  unsure (1)..(299): unsure at all Xaa locations
  Clone ID: PAT_MRT4530_11157C.1.pep
KIFREISVPGFDRTNFEVKQIFVNSKDGTKIPMFIMSKRDIELDGSHPTLLYGYGGFNISLTPSFSVSRVVLCKNMGFVVCVANIRGGGEYGEEWHKAGARAMKQNCFDDFIACAELLISAGYTSYRQLCIEGGSNGGLLIAACVNQRPDLFGCALAHVGVMDMLRFHKFTIGHAWXTTDYGCSDNEEEFHWLIKYSPLHNVRRPWEQSFVNCCQYPAIMLLTADHDDRVVPLHSLKLLATLQYVLCTSIEDTPQVNPIIGRIDVKSGHGAGRPTKKMIDEVADRYSFMANMLDASWTE

SEQ ID NO: 106741 - protein, 167 aa, Oryza sativa
  unsure (1)..(167): unsure at all Xaa locations
  Clone ID: PAT_MRT4530_11158C.1.pep
QQPTPLPTRPTHPRPASDEHVVLRRRRRREALPGGVVLVAVVPLLDTGGGAHGECELQLRRRRLLVIVGLLGVLLLGALRVLDRQLDRQHGPRATGRPXSHGPPFLRRRRFASRLRPVRPRAPLPTGPGHRRPPPIRRRARRCRSRCRPHPPRPKQLRTCKAVPSLP

SEQ ID NO: 106742 - protein, 380 aa, Oryza sativa
  Clone ID: PAT_MRT4530_11159C.1.pep
GKVAPRSDDLGGKSGGASDASAAAAAGAGGGGGGQELSTDNVKGIVLALLSSGFIGASFIIKKKGLRRAAVASGIRAGVGGYSYLLEPLWWVGMITMIVGEVANFVAYAFAPAVLVTPLGALSIIVSAVLAHFILNERLHALGVLGCVMCIAGSVVIVIHAPQEQEITSVREIWNMAIQPAFLLYVASVIVVVFVLVFHFSPLYGQSNVLIYTAICSLMGSLSVMSVKALGTSLKLTFEGTNQLVYPETWFFVLIVATCVLTQMNYLNKALDTFNTAIVSPIYYVMFTTLTILASVIMFKDWSGQSLGSITSEICGLIVVLSGTILLHVTKDYERIPQSRSIYAPLSPSLTARLNGDLLKHVEDDRNPDEEKALRRQEMY

SEQ ID NO: 106743 - protein, 83 aa, Oryza sativa
  Clone ID: PAT_MRT4530_1115C.1.pep
MTRFANTPFDMCHSSPVQRFVSKSSVINSCLWVLGSDNFINTGARPQGDHGSIRWMEDQGRPMNFRGPTTVSGGPAPFDPASP

SEQ ID NO: 106744 - protein, 63 aa, Oryza sativa
  Clone ID: PAT_MRT4530_11160C.1.pep
VSHNAIRGGIPAQVANLTNLQTFNVSYNKMCGAVPAMPRFDAYCYQHNKCLCGAPLATACRRR

SEQ ID NO: 106745 - protein, 183 aa, Oryza sativa
  Clone ID: PAT_MRT4530_11161C.1.pep
GSPGPPRPPGGDPKNPSSFLLSKPGSSPSPSPRERETPHLRHGRRRRREEEPEPAQGAGGLPQRPQVGLRDERRAQEGRPRRQVHLGGRRRLRRRGPRPHLPQELHLPLQVRRFRRRRRQQQQQEVRRRRVVGRRPPPPPVSLGRCSSPRNPSCSWNKCVVFIGSGWIDGPWGFVDISSLSIF

SEQ ID NO: 106746 - protein, 82 aa, Oryza sativa
  Clone ID: PAT_MRT4530_11162C.1.pep
QWGIIFWNKFTGGVGEAGDAEGRAAVGEHMGERRPVAGEGERGHRRDGGDGRGGGWHYGELRRRDGASGDGGGGERPPTRRW

SEQ ID NO: 106747 - protein, 298 aa, Oryza sativa
  unsure (1)..(298): unsure at all Xaa locations
  Clone ID: PAT_MRT4530_11163C.1.pep
ARGVVGVQERRRRRGGERRRRRRWLVSAMASSSSDPDKLMSKADKXNKIELHEMECRLEECYLLEMISSPWDAAKHMESAGALAKELGRWNEVSDFYRRASEFYRECGRAQPASDALAKGASFLEDNTPDEAIKMYDEACSILEEDGKEQMAFDLYRAAASLYVKLEKYSDAAATFLRLGSAADKCNAINSQCKGYLSAIIIYLYAHDFQQAQKCYNDCSEVQAFLNSDQNRCAMKLLSAYEEGDAEGIKQAAQSSAIKHLDHVVIRLAKKLPTGDLQTIKKLADDDGEDSLDENDLT

SEQ ID NO: 106748 - protein, 81 aa, Oryza sativa
  Clone ID: PAT_MRT4530_11164C.1.pep
PPALHLAQDQLCRDDLNYLEERRRHEALRAAHYQQSLRRYHQRHVRTRSLQVNDLILRRIQRHRERRMDMVSPCRRNWWCV

SEQ ID NO: 106749 - protein, 43 aa, Oryza sativa
  Clone ID: PAT_MRT4530_11165C.1.pep
MGGEEAYCGCQGFFADAGELRSVLWLLDRVWSAVVAVLCACVE

SEQ ID NO: 106750 - protein, 123 aa, Oryza sativa
  unsure (1)..(123): unsure at all Xaa locations
  Clone ID: PAT_MRT4530_11166C.1.pep
SCAGLHAARTAWVDPRARCVLGGMLDGTGCGFIXYHPLCRGGRWGVHNSRLLPTPAVPKPGGGLAGPGLCVGLHTMDGSHVGDVNRSLGMMGNGPSGSRRDRDSVRRGREEENDSRCRSHNLD

SEQ ID NO: 106751 - protein, 76 aa, Oryza sativa
  Clone ID: PAT_MRT4530_11167C.1.pep
WRSGSISAQRRTDTAHVQRAAHTTTPSRFRSGAKHNRFAERQHGVPRRLQARTTKNTGHPPAYCPPLPDWSAQLQS

SEQ ID NO: 106752 - protein, 548 aa, Oryza sativa
  Clone ID: PAT_MRT4530_11168C.1.pep
MAREDGASRGAGERGASDRGSGERVPRDGRRTGDRRVTWDRRSAGDRHTVEDKRPGGSGGKQQKETKGDNPSQHIAKIPVRRDDRGGYKRHGESIEFLRDWRHKKERTARPDRLPLPKSSKKGLRIEDSPHPELDRTMREKRGKNPVVYERVSSTESSSDDRRRRRRSVVPDMELDAVQLSDSSSSSSSSDGTGKDTIEQATALGGLKATASSDVAPVPIDDVPSVVLAANAPVRSSRVMPTADAASTPGPSTQKHQEETSGNPSDTACQMNELMEKTSRYLAEFGTGGRYLQLNSVSSATDELPTLELPKSTPIERRNARMVEEDLLSIQDCLMEKPLNKEGTIEYIGAATAAWENSYELGRPADLEKLMSYLGALVQHLKGELPVTFEGRTLAAHEGEARSSLAKLESACSDVLLDLDLLKSGREDVAADLQKSKQARATWKKEAEEHELKAKDAREKEHQCLESEEAAAKNRQVYDSTIDGVMQLIKRRDEAKVYLGHLAEERKRLAVAAPPEVAAILSYRRESAPWGSTSKNQNSLHMLLLGLP

SEQ ID NO: 106753 - protein, 96 aa, Oryza sativa
  Clone ID: PAT_MRT4530_11169C.1.pep
LSLTWKDKLATNIFMTTVCVKQMVSTTFFFRKWIKIRPLHPQWMYTAQMVNTTDGHTPVVFVKSDNYVVHISFAVYMYFGCRGQFNPFSKKCCPYI

SEQ ID NO: 106754 - protein, 640 aa, Oryza sativa
  Clone ID: PAT_MRT4530_1116C.1.pep
MAAAAAKAAAAALSTAGVVAFSSERAYADGGAPAFRFPGFSAPPTPPPAAQPPPPTPPAPAPAAEEKRKVRNDHPRTSAAGFDPEALERGAAMLKQIENSPHGKKVFEILKQQEDVRRAENLTKKVEFQKELAAIELEKTRVDYDERKKLEQQRAQVKSQMSRYEDELARKRMQADHEAQRVRNQELVKMQEESAIRQEQMRRAIEEQIQEERRKTDRAKAIVEKEIEQEKILAEANARIKLKKQTEDVERRLLIEGAKAEKEKWVQLINTTFEHIGGGLQTILTDQNKLVVAVGGVTALAAGIYTTREGARVVWGYVDRILGQPSLIRESSRGKYPWSGVFSRAMSTMTSKLNKGSNLGNNGNGFGDVILNPSLQKRVKQLANATANTKLHQAPFRNMLFYGPPGTGKTMAARELARKSGLDYALMTGGDVAPLGSQAVTKIHQLFDWAKKSNRGLLLFIDEADAFLCERNKTYMSEAQRSALNALLFRTGDQSKDIVLALATNRPGDLDSAVADRIDEVLEFPLPGEDERSKLFKLYLDKYIMKAGEKHEKSWLRFFRGQPQKIEVKGVTDDLIREAAAKTEGFSGREIAKLMASVQAAVYGSKECVLTPDLFREVVDYKVAEHQQRRRLAGYEQKNA

SEQ ID NO: 106755 - protein, 63 aa, Oryza sativa
  unsure (1)..(63): unsure at all Xaa locations
  Clone ID: PAT_MRT4530_11170C.1.pep
FQVINIVLAKSXQLQLQQFGDLYFDRDQAQAQHLLAFQVPSIYGIRPRANGAPRSVSTLAGVL

SEQ ID NO: 106756 - protein, 424 aa, Oryza sativa
  unsure (1)..(424): unsure at all Xaa locations
  Clone ID: PAT_MRT4530_11171C.1.pep
TIVSEDIVHSLLHLISNTSPPIQCKLLEIFVMLSSSTTTVLSIISAIRSSGAITNLVQFVESDHQESRAASIKLLCKISFDMDHEIAQVLRSSPTLLGCLVRIVSENDANADEQDAGTSXFWANLPKRDRRLTXELMEQGAFKYIARKVLNICRRGTANNIVDNTMLEGLVKVLARITYILREEPRCVALAREYNLASLFTSLLRLNGLDGVQLLSAKALVNLSVESRYMTGTPNFDEHEQKSGLTWLGKKPPGIPLCRVHSGICSIRDNFCILEGKAVERLVVCLSHQNKKVVEASLAALCTLLGDGVEITEGVSVLYMANAVEPIFEILKGNPTGTLQQRVTWAVERILRAENIAKAASSDRGLSSALVHAFQNGDSRTRRIAEASLKHINKLPTFSQIIDKHPSRRGSSIGSMERYFRSDR

SEQ ID NO: 106757 - protein, 156 aa, Oryza sativa
  unsure (1)..(156): unsure at all Xaa locations
  Clone ID: PAT_MRT4530_11172C.1.pep
MAAEAGSAREARTAEMEAGLAREAWPMEGGRIGTRGASGGGGRLGARGAAGGGGGDLGTRRSCWWMWCGLRRSKAGRRGAPVQGSHMSAEVEGWWXSIGASAVDSQVVSSGSSRSRLAAASLVLAFSRSCVLALSIWEMCNLVPVMAFALLTTKDL

SEQ ID NO: 106758 - protein, 341 aa, Oryza sativa
  Clone ID: PAT_MRT4530_11173C.1.pep
MDLGTSTSTNASLKKLQEDGALPGHGVMEREVGGTEPQPVLGHMVAIKDYILCGFLPPPSEFLLLVLNFYGLSLLHLNPNSIAFLSIFPHLCEAYIGVEPFLDLFRFYYELRWMESNRVSRCVGFRLQDGLSSATVECRVGQLMISGPTTASDIPVPLCEKEATEREAAINALPLTDVIGPLADHQAAASLKESVAREMSDVAAAAATSGSRVPKMRRTFTSVLGSRRKASSPPARAAQDRSGGASRASPAAASTDVVVVSKSREAMPSGPSSGLGPTRGPPADVLTWEELQAEMKRILEAGTRGISCEIKRRRQWQRHRRTSVPTSCNTTWRRLARTSRK

SEQ ID NO: 106759 - protein, 349 aa, Oryza sativa
  Clone ID: PAT_MRT4530_11174C.1.pep
HVGPLHRRPSPASLRAPKTAPHPPAAPPRTEIAFSTVGRTSRAKPASSTGCVSRANPASLHRPCLLRQAGLHLRRLRLSRRASLRCHRLRLSAPSRSPTPPPNAAAPARYSRLLRPRLAVQGRHASSHLSHGGHRRASSHRSHGHHPASTFTAAASLPLSPLLSSAAVASRRHRQRGCCLIALRHHRICSPPLPPSRPWTAAAAVAVAATGAVDLRHRRRPGRTGTSLTLEPSPSPHPSTAARICRLLPAAVAARLAVTRPLDAGRPDPPPGEADPPPVSSQKLYCRLLPVHADERDGVDYKRRQYGGRGKTYIDFACVAWRRQLGFYRDIRTLDQDACTISTPCNRTE

SEQ ID NO: 106760 - protein, 147 aa, Oryza sativa
  unsure (1)..(147): unsure at all Xaa locations
  Clone ID: PAT_MRT4530_11175C.1.pep
MFFTGLKKLKKHQNLIFGHIGVXIGCVRGKNSLRDSCGELLSINANLGTRGCEVFHRNAKVQKATKHDFWTYWSVLGTFVAKNHFVIRAANICQLMPILAHMGAKFFDRNEKVQKAPKQDFWKIWSVLGAFVAKKITSQFARRTFFN

SEQ ID NO: 106761 - protein, 158 aa, Oryza sativa
  unsure (1)..(158): unsure at all Xaa locations
  Clone ID: PAT_MRT4530_11176C.1.pep
GGKMHGGLGRLAEGVGDGCIWPARQRLEDGSETGLAXRGVADGSGGRLGARGADSGDGGRLGARGVADGGRPDWYERRIRWRRPAWRERRCRRWRRRPRYEEELLVDVVRSSALEGWPAGGAGAGVPHVGRGXGWWEHWCISRGFAGGEQRVKTQPGH

SEQ ID NO: 106762 - protein, 226 aa, Oryza sativa
  unsure (1)..(226): unsure at all Xaa locations
  Clone ID: PAT_MRT4530_11177C.1.pep
GGRMYGGLGRLAEGVGDDCIXPARQRLEEGLETGLAQRGATDGSGGRLGARGAGGGDGGRLGARGAADGGRPDWRERRIRWRRPAXRERRGRQWRRPRFEELLMDVTRSSALEGXPVGGAGAGVPHVGRGXGWWEHWCVSRGFAGGEQRVKTQPGHGRTDNDGIPPLEGVVVLSHPSRVVAGRKPSPGSFEPRRMAAVVXPSLLFLNTSFWYPLAEASRSIGASTL

SEQ ID NO: 106763 - protein, 138 aa, Oryza sativa
  unsure (1)..(138): unsure at all Xaa locations
  Clone ID: PAT_MRT4530_11178C.1.pep
LLPPPQPWRPGAIAAAVAPGTTLTSPTTSTSSSPRCTAVATTSLXLWTSVLRPSTRPATLAPLPTPTTTPRTTASTSPTRTPTTTCRRQTTVSDLSTSSSSSRPTPSPATVPFTSRSYPTAPLATDLSPSPTMVFVPG

SEQ ID NO: 106764 - protein, 87 aa, Oryza sativa
  unsure (1)..(87): unsure at all Xaa locations
  Clone ID: PAT_MRT4530_11179C.1.pep
RXKXXXXXXXXXKQSLXXXXXXXXXKXXXXSFXXVXRXEXXXXXXVXXXXXTXTXXXXYXLXXXPVFFVXXXGXXNXXXEXXYXXVX

SEQ ID NO: 106765 - protein, 88 aa, Oryza sativa
  Clone ID: PAT_MRT4530_1117C.1.pep
RWGRRRRRAAASAMMSASVPPGHDGARGQGYAPCFCSRDKVGEMATTSSSEVSKASIVLCILLALGEMAYTSPAVVSVSVMASQNGYQ

SEQ ID NO: 106766 - protein, 67 aa, Oryza sativa
  Clone ID: PAT_MRT4530_11180C.1.pep
MTSVAVAGESEGRGGKGGWRRQRRIGGANRGDSGPEAENGGDPVMVRGWMVSVVAADEFEGRGGEGG

SEQ ID NO: 106767 - protein, 511 aa, Oryza sativa
  Clone ID: PAT_MRT4530_11181C.1.pep
MPQQEVADQIAAAAAERGLQRSGSASRLNAGAPEFVPRVAAPVVPPPPPVIRVFAAAPPPPRAAFFAPPPPHHRPYEYYAPVRGGQFAAAAAAEEQEAEVDPDATEAAEPLVDGFPDEVVHKITKQVEYYFSDINLATTEHLMRFITKDPEGYVPITVIAGFNKIKALVHNNSMLAAALRTSSKLVVSDDGKRVKRLQSFTVSDMQDLQSRIVVAENLPGDPCYQNLMKIFSTVGSVKTIRTCYPQSSNGNSPATNRSAKLDMLFANKLHAFVEYETLEDAEKAILELNDEKNWRNGLRVRLLNTCMTKGAGKGKKGVHEADGNGEEDVSTSNQSNEKQLEEPSQLSDMLPDHLFDDSSNDKEGPRRGRGRGRGGRGRGRGYHQHNNNHFNNQNYHNGQHHNHHANNHHHQGGNRGGAHHVGTPPNQQQTKPEQHPQLPIGATKQPPGPRMPDGTRGFTLGKRKAPPVSTGSVCSRRTLEPFSLSPIGYSAASAGVYRNGWRSLLFGTWFT

SEQ ID NO: 106768 - protein, 180 aa, Oryza sativa
  unsure (1)..(180): unsure at all Xaa locations
  Clone ID: PAT_MRT4530_11182C.1.pep
MLQLRALCNEPRRAPLPRRRDLLHHAQHERHHDGRDEQRDERHGRPLGRARSAVCTRLHGRPAGGSGGGRRGEQGEGKVRRLATGDAGAGRRAGWGGDWRSRGRRRGAVEXGIGGRRRRRSGDGRNSTDGRGHESGGAPWMARGGRRRRRPVRGITVRQRRAVGLAAVGERWRARGLQEL

SEQ ID NO: 106769 - protein, 121 aa, Oryza sativa
  Clone ID: PAT_MRT4530_11183C.1.pep
PRVRPRVRPKPEPKPHPEPEPKPEPKPEPKPHPEPEPKPEPKPEPKPEPKPEPKPEPKPEPKPEPKPEPKPYPEPKPEPKPKPKPEPKPEAPPKKHKPAHIPSATDQGRRSPETEHLLLHD

SEQ ID NO: 106770 - protein, 306 aa, Oryza sativa
  Clone ID: PAT_MRT4530_11184C.1.pep
MEPMGILKCPSSLKLSVAVPGHALNPFSDGGSGSGSGSGSGCNNNNTRELGIHLDLDRPYAREELPQQGGSMEVQKGEERGGVRHNSSNHRRLSRVQSKQLDEFYRVNHTVDSTSHLRSRKLMEHFQKQKKELADRLNLRISQVDAWFRNRRLSHYYVGLTFLLPHMSVSVEDVNPMIPQYKSVSSVEQVQSSSSAPVTVMLLLVIPFRLIFTNLQSKQKSTEMECAYLKECFNKLKEENHRLQLQVEQLRSTSLQLQLQLQLHSERVATAPTGQQAGTSAAARIFTLPLSGYNPSRGTWFSPNAH

SEQ ID NO: 106771 - protein, 293 aa, Oryza sativa
  unsure (1)..(293): unsure at all Xaa locations
  Clone ID: PAT_MRT4530_11185C.1.pep
MARRSPCLAVAMLLLGALAVASAFIDEAAAAGRGLGHGARFMSKQGRVTYEKLPEPEPKPKPKPHPKPTPKPEPKPEPEPKPVPEPEPKPEPKPEPKPEPKPEPKPYPEPKPEPKPEPKPEPEPKPEPKPEPKPEPKPYPEPKPEPKPXPKPEPKAGAQTHAREPEPKPEPKPEPKPEPKPEPKPEPKPEPEPKPEPKPEPKPEPKPYPEPKPDPKPEPKPHPEPKPEPKPQPEPKPEPKPEPKPEPKPEPKPEPKPYPEPKPEPKPKPKPEPKPEAPPKKHKPPHIPPATDQ

SEQ ID NO: 106772 - protein, 355 aa, Oryza sativa
  unsure (1)..(355): unsure at all Xaa locations
  Clone ID: PAT_MRT4530_11186C.1.pep
MARRSPCLAVAMLLLGALAVASAFIDEAAAAGRGLGHGARFMSKQGRXPKPEPKPEPKPEPEPKPEPKPEPKPEPKPYPEPKXEPKPEPKPEPKPEPKPKPEPKPHPEPKPDPKPEPKPHPEPEPKPEPKPEPKPHPEPEPKPEPKPEPKPEPKPEPKPEPKPKPKPEPKPKPEPKPYPEPKPKPEPKPEPKPEPKPEPKPEPKPEPKPEPKPEPKPKPEPKPHPKPEPKPEPKPEPKPEPKPEPKPEPKPEPEPKPEPKPEPKPEPKPYPEPKPDPKPEPKPHPEPKPEPKPQPEPKPEPKPEPKPEPKPEPKPEPKPYPEPKPEPKPKPKPEPKPEAPPKKHKPPHIPPATDQ

SEQ ID NO: 106773 - protein, 92 aa, Oryza sativa
  Clone ID: PAT_MRT4530_11187C.1.pep
DQRVRPKPEPKPHPKTEPKPEPKPEPKPEPEAEPKPEPKPEPKPEPKPEPKPEPKPYPEPKPEPKPKPKPEPKPEAPPKKHKPPHIPPATDQ

SEQ ID NO: 106774 - protein, 154 aa, Oryza sativa
  Clone ID: PAT_MRT4530_11188C.1.pep
MAASDQAPSMLVPTDDEMLQTQAELWRHTLSYLTSMTLRCAVHLGIPTAIHRHGGAASLPDLVTALSLPTAKLPFLRRLMRLLVHSGIFASDDAGTTYRLTPVSFFLVDGAAAAVPVVDGHICQLHLEREMTWIMYHNFTAGLAGCFKEAFPDP

SEQ ID NO: 106775 - protein, 348 aa, Oryza sativa
  unsure (1)..(348): unsure at all Xaa locations
  Clone ID: PAT_MRT4530_11189C.1.pep
PAMARRSPCLAVAMLLLGALAVASAFIDEAAAAGRGLGHGARFMSKQGRVTYEKLPEPEPKPKPKPHPKPTPKPEPKPEPEPKPVPEPEPKPEPKPEPKPEPKPEPKPYPEPKPEPKPEPKPEPEPKPEPKPEPKPEPKPYPEPKPEPKPEPKPEPKPEPKPKPEPKPHPEPKPDPKPEPKPHPEPEPKPEPKPEPKPHPEPEPKPEPKPEPKPEPKPEPKPEPKPKPKPEPKPKPEPKPYPEPKPKPEPKPEPKPEPKPEPKPEPKPEPKPEPKPEPKPKPEPKPHPKPEPKPEPKPEPKPEPKPEPKPEPKPEPGPKPEPKPEPKPEPXPYPEPKPGSQTRNPNHT

SEQ ID NO: 106776 - protein, 710 aa, Oryza sativa
  Clone ID: PAT_MRT4530_1118C.1.pep
MGPTISSTAETIPCPPPTRAPEEAAAMAAAAAEEEEYESDLDDAPLPAVRRRDAASDNYEEEEEEEEEGARPSPPTKAGSDAESDGQGAAEVYDDDDAYEDDEGYEEYGEVYEEFEQGRGVAGGVATGAVAAAGEEAGMGMKGEAEGEASAAAAEGEEGKKGSEPYAVPTAGAFYMHDDRFQEARGHGRQRRMVGDRRLWNAKEDQAWVHDRFDEMNLHDFHNDYTRRRPRGRFRGRGGAPVGKVRGGSRDNFRGNRSQTYYRDGAKNYIYVPKEVVRGRGSKRYQPHWRSTAEISSEHNNKSQNLENTSSNANLGKHQHQASNSQPERGFPMKQSFASNLNSASPPFYPSRPSHQELPVSQRGDGQPSTTTRHFSSPIGMEHVSPTPQYGPLLRGKAFVPSAGHGKLHAEVPIKGMDHPSFHSSTSSSTSQFPIATNQVTGNSAKSPHPIVQQRLVQSFNQSTPKMPGQMFAAQFASSDKLPSSMQSTSTILTEGTEISSPHGSNKSNTRLMAKGQHSDQGEEHASFMYGGAQVLGTTGSLGDQNFHGTPALFPVMQFGGQHPGGTGVPSIGMALPGFVSQQQLGLSNSEMTWLPILAGASGALGATYGSPYITVDGSYYPRTSEHASSSVSLRYPHKCTEAFSSFAEALNDELSQRQHKPRRYVIHTTCNCVSTRSSELLQFYHWFPFIVEYDINNYYVERCKSEKLM

SEQ ID NO: 106777 - protein, 130 aa, Oryza sativa
  Clone ID: PAT_MRT4530_11191C.1.pep
MERTDRIMQSATRRGAFQVGVGVAAGAGEERPWRERERGAAALPATAAADADADAAEVKKNPWRNTREQWQLARDRGTLGCAVQGTQSRLLPVTCVVVVVVRRVDALGRVGSTHAVRSDSFSEVDKKLQQ

SEQ ID NO: 106778 - protein, 314 aa, Oryza sativa
  unsure (1)..(314): unsure at all Xaa locations
  Clone ID: PAT_MRT4530_11192C.1.pep
MRILFSLFFFISLSLLAQPLSLSLKNAPTAEILSYLAEKKMKNIGLSEQIDKNTXLRIENRHFDENGERIVRANQLSKRKEKQVYLSXHLKEDKAIEKKKNGEKAKLNTQTIKGGNAKSSKEIGILTKGKGNGNVLSEXGYLYFDERSKSLIIKDSPDSMKHILALIKNLDKPTEXIAIEARIVTISSQDLQELGVRWGMFSPSDDYHKVASSLETKGLTTANHLNVNFPVNNATSLALQVARINSRVLDLELTALEQENNVEIIASPRLLTTNKKPASIKQGAEIPYVLYNRKDEVKNIEFKEAVLGLQVTPH

SEQ ID NO: 106779 - protein, 135 aa, Oryza sativa
  unsure (1)..(135): unsure at all Xaa locations
  Clone ID: PAT_MRT4530_11193C.1.pep
WIPITPERLRRERQYWKPWLYSSLEFTRICVFCKQQPGQDEKLPGTQPLELDKELFAWNIDLVYGGRSAVLMXGLASQAIYNARSAVLGLLTKTLRPTELTGATVLDPKAVQDYHQRKAQIDPRNYDRLIRLALE

SEQ ID NO: 106780 - protein, 282 aa, Oryza sativa
  Clone ID: PAT_MRT4530_11194C.1.pep
MVSLLFCVSQLYPLTIDDRVTGNHFKSTLATHGRHSWGCATLWSPDACYACAYINICAIFFFYVHCICNKLGVSVSEVEALYELFKKISHSIFKDGLIHKEEFQLALFRNSNKKNLFADRVEQFQMCERLTESSHFKQIFDLFDLKRNGVIDFGEFVRSLNIFHPETPLAEKIALFPLAVAFRLYDLRGTGYIEREELYEMVLAILNESDLLLSDDAVEQIVDQTFKQADLNSDGKIDPDEWKAFASKNPALLKNMTLPYLKDITMAFPSFVLNSGVDDEEL

SEQ ID NO: 106781 - protein, 93 aa, Oryza sativa
  unsure (1)..(93): unsure at all Xaa locations
  Clone ID: PAT_MRT4530_11195C.1.pep
VWFRTSDVITKAEYAAFYRSLTDDWDEHLAAKRFSVEGQLEFKAILLVPKRAPYYTTPATKNQANVELHLXRVCIMDNCEELIPEWLTFVKGI

SEQ ID NO: 106782 - protein, 54 aa, Oryza sativa
  Clone ID: PAT_MRT4530_11196C.1.pep
YMGHNRPLGFIEFTFIPQENLKPAYQVDPSWDGPLVQGGGSQCFALWALLFHQG

SEQ ID NO: 106783 - protein, 137 aa, Oryza sativa
  unsure (1)..(137): unsure at all Xaa locations
  Clone ID: PAT_MRT4530_11197C.1.pep
PPIRSNALACSPSFCARIARNHPSASVASRLALSSPPCSRPLAASSSPSSVAPASPPPLILPDALSVLPHKRRHRRPTAPTPSSSSSPPPSPPHRLPLRPPRRRHRRPTAAPSTPSPSSSPPPSLPHXSPPPATPPP

SEQ ID NO: 106784 - protein, 79 aa, Oryza sativa
  Clone ID: PAT_MRT4530_11198C.1.pep
KWKHLPGKNLEKFHKPGDEFLASMKDLDFASQVGIGHYYHIFYEGCLANFEIGDNGAEATQLYPEVQYTRMDEYLKRYI

SEQ ID NO: 106785 - protein, 128 aa, Oryza sativa
  unsure (1)..(128): unsure at all Xaa locations
  Clone ID: PAT_MRT4530_11199C.1.pep
MLLSYFISSYSIKTFAIGLNEPVIAKLVHEAIQRSLSLLDPTYASKYIPIIVSVSEHQPPTWPSYFMDINVLAFLITAGIISCYMPLSDASSFVVLNLVTAXYFFGVMAPFMLELASDACILSGISFF

SEQ ID NO: 106786 - protein, 159 aa, Oryza sativa
  Clone ID: PAT_MRT4530_1119C.1.pep
MASMMVDEPGNNGFNDNGGGGGHGFDDGRRQRRVRLRLVSSARKRVATTALMTVNEPGGSGFDSGGDGGGNSAGKRAVAAVASMMVGKPDDNNFDGGSDSGGSSKRRWEMGGGDNFDDGQKARRRLASRAGKQLRQWGIDRAKGDFVFLIFLSPLFDKK

SEQ ID NO: 106787 - protein, 110 aa, Oryza sativa
  Clone ID: PAT_MRT4530_111C.1.pep
EIRLKMSVEGYSHAVIPGCALACSRFLDGGVRSEQDVIGGVGQFIVGSGTCMFSAWGVPWCPMSQLGPRLLFVAQNVLLNAPMVGPIYSLARIRLGSVPRDDGRCLELPF

SEQ ID NO: 106788 - protein, 185 aa, Oryza sativa
  unsure (1)..(185): unsure at all Xaa locations
  Clone ID: PAT_MRT4530_11200C.1.pep
MQLMIKNGTLGQQRQLASPHFNARPQIDDISLLVIHYISLPPDQFGQPFIDQFFQGKLDSSLHPSFAQIKDLRVSAHCLINRKGEITQYVNFNDVPWHAGVSSFEGREKCNDYSIGIELEGNNNHAFTEAQYQSFAQLTQAIIAXIPXITIDRIVGHSHIAXPGXKIDPGHILNWGIPIVTHHLP

SEQ ID NO: 106789 - protein, 163 aa, Oryza sativa
  Clone ID: PAT_MRT4530_11201C.1.pep
MGQTHTIWDGLGRSIEMDREGGLRISTGDGGYEHEGVKDTMHGDSKKSELHWLAHGGQPLSVVDGAVVRHATVTGLVLTTKSPPDRERVTELISRFRGATSSGGLLETLHELRDVAAVSEPNRKLLTAVPGTVECWSDRLTIAKIHIYRNYPFSADGVMAGFA

SEQ ID NO: 106790 - protein, 545 aa, Oryza sativa
  unsure (1)..(545): unsure at all Xaa locations
  Clone ID: PAT_MRT4530_11202C.1.pep
ENCLIKPKRCGGLGFRIYRLFNQALLARQAWRLIEFPDILYARVLKAKYFPQGSLIDTTFSCNIFPTWRAIVRGLELLKKGIIWRVGNGKSICVWRDPWIPRDHSRRPISLRGNCWLKWVSDLIDQDGSWNITEINRCFLGIDAEIIPTICLSPHLEEDFLAWHPDKTGRFSVRSAYSLACKLANTEDSSSSSVVGTHKAWDSIXKCKMPQKIKVFAXKAASNCLPTIVNKKVRNLESTDTXIICNQEKGDTAHALCRCPHARNLLSAMFNAGNISLDVEKSRFGNEWLFDMLEQLPAHEHEMFLMTLWRNWHVRNEITHDKAAPPLEVSKRFVESYIAXLFQIKESPLKDVEKGKSVASLSVTGRVRDRASDDHRVPNPVLHXVKPQVGWMKLNVDGSFDAALCKGGIGMVLRDSSGNTIFASCKPLNRCTGALESELRACVEGLNLVLHWTLLPILVETDCMSVVQLLNDGERDRSELANIVHEAKRLLAGTRRILVSKIHRSQNSVSHLLANRAKVDSVSGVWLEGSCNFILRLVREDILRE

SEQ ID NO: 106791 - protein, 345 aa, Oryza sativa
  unsure (1)..(345): unsure at all Xaa locations
  Clone ID: PAT_MRT4530_11203C.1.pep
INFTSLFIYRRGSDLVYLLLYVDNIGLAASTAYLLEWTISYLQXEFSMKDLGHLHHFLGITVHRQPSGLRLHQRXYCIEILERASMSDCKPWMTLVDTSTKLSSTNGVVIADPIDFRSLAGALQSLTLTRPDIAYDVXQVCLHMHDPREPHLSAHKRILRHVRGTLDYGHCIQHYSFADQIAYSDADWAGCPNTXKSTSSYAVFLGNNLISWSSKHQNTVFRSSAEVEYRTVANAVAETSRLRQLSQLCSPPTKATLVYYDNVNAIYLSINLVRHQQTKHVKTNLHFVRERVAVGADCVLHVPTSXTYADIFTXGLPSSVFTKFLVQVCPVCTPAQSGGRRLDLD

SEQ ID NO: 106792 - protein, 54 aa, Oryza sativa
  unsure (1)..(54): unsure at all Xaa locations
  Clone ID: PAT_MRT4530_11204C.1.pep
PHASIQDATDRINKRGHSRDDXTNKLDAELARYKDHSKMTRPGPVQEAIKGHVM

SEQ ID NO: 106793 - protein, 100 aa, Oryza sativa
  unsure (1)..(100): unsure at all Xaa locations
  Clone ID: PAT_MRT4530_11205C.1.pep
PRVRGTPVVPPPPPTAPPRAARRSHRRATLRPLRRRARRVHQGALHHRGGRPLPRAAGATDTAILLAPLVTLRRRRRRVRHXQLSTPPVLLQERHGRGGG

SEQ ID NO: 106794 - protein, 127 aa, Oryza sativa
  Clone ID: PAT_MRT4530_11206C.1.pep
RYGRKCQIEKVYPLQFVYSFNTSLSLLLLLLKNLLPALLIEHHCHVLPVVGEGLDVGGEGGGVVVDAGGGAEGEGAGPGGDQPLRVGVRHPGVAPVRPRPVVVELAHPPHRKTSASLSLFSSSGRRR

SEQ ID NO: 106795 - protein, 266 aa, Oryza sativa
  Clone ID: PAT_MRT4530_11207C.1.pep
MWTSACTYAATLHPCRMRVQIDVYVVDRLAVCVYHASPSPVNRQRRCRRRRSETRLYNPTASENEHIFASGRYNVAASEDPFSLAIDKVNTDALLSTGTSPTTENTKPLKPIRFHGESNTGQSNMYIIDYVNILNDTVTVTSRFDGYHGNRENHTVIVKYTVALKTEKIITYNNHSDRGGNGSIPLRNVDRFEIRSCTQHQLLQVVTQADSTFDPREDCQRTHFFNRILPRTDYRAPGINNKGYSSRSVHKDTVHDATSNIHTITN

SEQ ID NO: 106796 - protein, 112 aa, Oryza sativa
  unsure (1)..(112): unsure at all Xaa locations
  Clone ID: PAT_MRT4530_11208C.1.pep
TEYRCSTSPLGDTKRISNSGNVCXLPKAKTIQRQQLMRGSGYSYMMYPNVEDYWDEIQGCHHLLSTSDKYVGYITNKAEPGXSVPTAPVLLPNSSYEATRPLLWPVGYLMGP

SEQ ID NO: 106797 - protein, 114 aa, Oryza sativa
  Clone ID: PAT_MRT4530_11209C.1.pep
LLNVFRAAEACEEFGGVLVTLRMALDDLCGITGENVGPLPGYIEDAVKSAYKRYMKYLESFGPEENYLRKKVENELGTKMIHLKMRCSGVGSEWGKITLIGTSGISGSYVELRA

SEQ ID NO: 106798 - protein, 162 aa, Oryza sativa
  Clone ID: PAT_MRT4530_1120C.1.pep
MFSAKARWIVAVVLRVAAAGAAAVAAVLMAMSHDEVIVYGMEVQAKFRYTPSLVFFVAANAAVSACSLVVLLVPSSTSKLAARLLLMADVVLGMVLAGAFAAAGAMAELGKNGNSHAGWIAICVQVPLFCDRVRSALVAGSATIVLYYLMLMYSIYTLPMFP

SEQ ID NO: 106799 - protein, 68 aa, Oryza sativa
  Clone ID: PAT_MRT4530_11210C.1.pep
MVLDQCSSDRSSHHLYEWARYNYPLGPRPAYWRSSDHIYNRARVLEPWPGTLSTIGLVRCHGLRGRER

SEQ ID NO: 106800 - protein, 256 aa, Oryza sativa
  Clone ID: PAT_MRT4530_11211C.1.pep
MAAALRSSCAAARRLLRISPAALSTLTAASSRPAAVAPLARPIAAAAVSGGNNAFSWNLRRLFSSNEKHLPAISDPEVESAFKDLMAASWTGLPDSLVIEAKKAASKATDDKAGKEALLNVFRAAEACEEFGGVLVTLRMALDDLCGITGENVGPLPGYIEDAVKSAYKRYMKYLESFGPEENYLRKKVENELGTKMIHLKMRCSGVGSEWGKRPVVLPIEHWHTPLVPCNMLTFKKGITLIGTSGISGSYVELRA

SEQ ID NO: 106801 - protein, 81 aa, Oryza sativa
  Clone ID: PAT_MRT4530_11212C.1.pep
MACTSLPIEIFGQHHPLAVKSFIRGKCNACCKQLGFLGGKCNLLRGMLCLCCHEDDDQPPPSSSTHLPVAAIDHDHAANMP

SEQ ID NO: 106802 - protein, 109 aa, Oryza sativa
  unsure (1)..(109): unsure at all Xaa locations
  Clone ID: PAT_MRT4530_11213C.1.pep
PWSMVRIRTMFREKKRSSAVGIPCEKVTRVRILGCQLWSTVGIGTKLREELRSRRSRIPGDEVGYEMAHSGWTPCGSDLXNGLHEMCVQVLVFARRNERSRDVHVRWSA

SEQ ID NO: 106803 - protein, 65 aa, Oryza sativa
  Clone ID: PAT_MRT4530_11214C.1.pep
MVGSPHKPKPSQKGEHTCPSLSWIGPTATDLTNPQCCSRHGPDHYKAEHTHPTHIRSGPSPITDR

SEQ ID NO: 106804 - protein, 81 aa, Oryza sativa
  Clone ID: PAT_MRT4530_11215C.1.pep
SKKGAPGKNTPWGPSCGNHPSLGPERPGLPGVCGKKEFRGVKPRFGRGKGFPSFVRRALDLLNGLNWKLSSIGNFGLAGAV

SEQ ID NO: 106805 - protein, 299 aa, Oryza sativa
  unsure (1)..(299): unsure at all Xaa locations
  Clone ID: PAT_MRT4530_11216C.1.pep
MWGLIFAVGHGPWSQITYVVRLRRRTALSSPPAGFLLGDDDDCDAGSARRRLPSAVTMTFATPAPLLSPRPRAADSLLSRVRAPPVPHLRRWPAPSSATTTTATSPPXPTAPLGRDDDLRAAGSPTLPTPTRRRLPPLPRPCAAGSPPPPLAGSLLGDDDDRDAASARRRLLSAVTTTFAPPAPHLSAAGSLLADDDDRDAASARRRLPPQPAPTSNDDGSPDPPPPASLLAASAGRFPSSPPPPPVTTRDDNGSPDPPPPLPSSLPLSAASPPRPLRRRPRRVMTTAPMRQLGSSLSS

SEQ ID NO: 106806 - protein, 55 aa, Oryza sativa
  Clone ID: PAT_MRT4530_11217C.1.pep
LVSSTAHVEAHLWPGLYHVIRFSSDGKYLLTGGEDDLVQVWSMDDRKIVAWGEGH

SEQ ID NO: 106807 - protein, 584 aa, Oryza sativa
  Clone ID: PAT_MRT4530_11218C.1.pep
MAEDRSWMYKRVVNGYISDEYLKGVKRFMSHAVSKLQGQAEKRVRCPCTKCKNGQLHDKRIVQMHLCNKGFTENYHVWSRHGESGADTSETPEGSIDNEMNEGGNAYGESDHIDEMVLDAVGPNFCQNIEEPPNVEAASFFDMLDAADKPLWEKCGKHSQLSAVSRLLTIKSDHNMSVACFDELVKVMKEMLPPDANLPCSFYKCKKVVEALEGVVTYDCSKNQNFVMRAALMGTNLKFPDGYASNLARGVDINRGKIIGMKSHDCHVFMERLLPVAFRDFLPKHIWKCLAELSYFFRQLCAKEVDIEQMKHLQKEVPVIVCKLEQIFPPGFFDCMEHLVVHLAYEALIGGPVAYRWMYVFERELHEARKRVRNKARVEGSIVEGYRVQEVSNFISMYFADHVRTKHTRVPRHDDGGFRAPTDWLSIFSIPYRTLGKSTSRNLSREEWQAARVYALLNCAEVDKYVLKFDREMKQQNRNITTTQLQEMHEKDFPTWLRELAGKDETVEEQVRALSIGPRYMVKCYKGCDVQGFRFRTQPYEQKKLTRTTTNSGVCVSANWFDNQGPDYYGTIQEIIELEYVSDT

SEQ ID NO: 106808 - protein, 287 aa, Oryza sativa
  unsure (1)..(287): unsure at all Xaa locations
  Clone ID: PAT_MRT4530_11219C.1.pep
MAEDRSWMYKRVVNGYISDEYLKGVKRFMSHAVSKLQGQAEKRVRCPCTKCKNGQLHDKRIVQMHLCNKGFTENYHVWSRHGESGADTSETPEGSIDNEMNKGGNAYGESDHIDEMVLDAAGPNFCQNIEEPPNAEAASFFDMLDAADKPLWEKCGKHSQLSAVSRLLTIKSDHNMSVACFDELVKVMKEMLPPDANLPGSFYKCKKVVEALGMPVQKIDVCKNDCMLYYKEHANKRKCITCNEPRYIEGLELPENKKGXSTEGARYLPIIPRLQRLYMSRGTATHM

SEQ ID NO: 106809 - protein, 104 aa, Oryza sativa
  Clone ID: PAT_MRT4530_1121C.1.pep
MGRGSSARWRRRSGTRRECGGGAAARDAGEERCARGAGEAEMRERRGGERCGEGRGAMRDARGAGAAARCGRGEERSDAEEGLDANLTVGTKRGDVEAPGSREL

SEQ ID NO: 106810 - protein, 420 aa, Oryza sativa
  Clone ID: PAT_MRT4530_11220C.1.pep
MEDEATRPSSPPPAASAASSVLADDDLLREILLRLAFPTTLVRAALVSSRWLGLASDSSFLRRFRARNPPRLLGFYHTARRDEQPAFVPLPQPPELAPVLRRLGGFALGGADVSAVVFDCRNGRLLRAEFPPPPDELRFGVVSPLLPPARKPPDLPPNLHSQLHQVPNDARVLRPGWMLLPEEEEDDGGDDLSYTLVVLIRRGRGLFARAVLVRGESDDQIRTSDSIELPNHYWPNKKMNRGLLFHGSLYMLGREHVLGLNLASMSLFLIKLPDGVEQLEHMGNLELLRDGDSGLYLAHLKGFQIHVWHRATDGGGNGGDWEMVDTMSLHQSFGQVARPDWESGDPSLGDALVSLRRVEDNAELFLTIDRVIFHIHIASRTANKVFEMAPKEDIGFEIFPFMMIWPPTFPALNYDDDDDQ

SEQ ID NO: 106811 - protein, 712 aa, Oryza sativa
  Clone ID: PAT_MRT4530_11221C.1.pep
MNFCNFGEEEVVTYDRSKNQNFVMRAALMGTGHPFRHAKDKFIQNKEEKDGPPIHRSSSEVYDCVKSLPQITFGTKAGNQEIEGFGKEHNWVKRSIFWELPYWRELLVRHNLDVMHIEKNVFDNIWNTLMDIPKKTKDNVKAQFDLANICNRKELHMQQKSIGRWVKPKACYSLDKAQKKLVLQWVKNLKFPDGYASNLAQGVDINRGKIIGMKSHDCHVFMERLLPVAFRDFLPKHIWKCLAELSYFFRQLCAKEVDIEQMKHLQKEVPVIVCKLEQIFPPGFFDCMEHLVVHLAYEALIGGPVAYRWMYVFERELHEARKKVRNKARVEGSIVEGYRVQEVSNFISMYFADHVRTKHTRVPRHDDGGFRAPTDWLSIFSIPYRTLGKSTSCNLSREEWQAARVYALLNCAEVDKYVLKFDRGMKQQNRNITTTQLQEMHEKDFPTWVRELAGKDETVEEQVRALSIGPRYMVKCYKGCDVQGFRFRTQPYEQKKSSRTMTNSGVCVSANWFDNQGPDYYGTIQEIIELEYVSDSDLKVALFKCVWFDPKKGVKYDKALGLVEVNHTSRLEQYEPFVLAYQVDQVYYTPYPSPPRERKDWWVAFKTNPIGTLPVPAVDDEVDDSLPPVVSEYYQEGEQLGADISQELGDESLLHESNIVEQVDPEDMDFLNRPNSHENIESYVAMDSDCSSEDEGPIESDNDSDNDSDSSD

SEQ ID NO: 106812 - protein, 126 aa, Oryza sativa
  Clone ID: PAT_MRT4530_11222C.1.pep
MVRCTHASLCFFALTSSLLVQSSGGARPSQGEELMQRRPAAAAAASPVGSSPTTEELVDAGIAAGREADAAAPPATTPAAILGETRHSARRFLVVAAGEDAATDDGAGASCHSNNVHITCAPPSPR

SEQ ID NO: 106813 - protein, 117 aa, Oryza sativa
  unsure (1)..(117): unsure at all Xaa locations
  Clone ID: PAT_MRT4530_11223C.1.pep
GTSQWQSTRRGSPXDVIDRLQHLSQXRLLRSQAGTTEFFDVSNEPFQCTGVSFVLRVIEPKGLLLPHYTNGASLLYIIQGRGLTGPTLPGCPETYHHHLHQLSLAQLTEIHSQSPHS

SEQ ID NO: 106814 - protein, 49 aa, Oryza sativa
  Clone ID: PAT_MRT4530_11224C.1.pep
FTGECPVVYLCKHLSLPFDNCLRSVISGAADRTPSLLGSSVRRYRLPSG

SEQ ID NO: 106815 - protein, 2405 aa, Oryza sativa
  Clone ID: PAT_MRT4530_11225C.1.pep
MATPSYAAVKCLNTSSSSRKRFVFKSFSQRVEEIDIDVYRSLHEVKAEPSSGSSFFLDALVEWRELNTADDFISFYEETIHLVQTLPQIVLHCEKIFSGLLKRINMKARLSLEPILMLVAALSRDILEDFLPFLGRHANAILALLSDGGDRDPEIMEQVFTSWSYVMMYLQKYLVKDVVQVLRITAPLRFFPKDYVREFMAESVSFVLRNAPNGQQIEGVRNVLLEAAKNPSPVHIDGITALLCHVMRGTYTRLHSRAGKIMEFLLSKSNLTTIQEKFPDDKANILKLVKSLVIILGNLSFISPFYDPVFKLTDLSMLVFVRKLLTKGPKIIQTFESQILRAASLGMTGECDPQNLLDLFSIFAVNLSSPNKDLRVLTLRILSYFGKMDQRLGTDEERPHKRQKTEDSGDDTIDMKYANVLDTLLAVESTPISVSTSRKIAIFVSRIQMSLSSKMVHEDYIPLLLHGIIGILYNRFSDLWPPALDCLAVLISKHKELVWDQFIQFIATHQSNGPSVKNQDKLEATIQPQSIFDCFSIYLSTNYDCTPLETVATLLLQSLQKISDVAESRSRHLVPLFLTFMGYDNSNITSVDSYISNKCKGKQWKTILKEWLNVLRLMRNARSLYQSKILQEVLTKRVLDESDPDIQSKALDCLLNWKDEFLTPYSKSLKNLIDSKTLREELTTWAVSYDSLSIQKDHRSSVVPLVIRVLTPKLKKFKLLGSRKSLIPGNLRLEIFGSQSDNLLGNISDIVEASTEICLENLTWKKANGFLHLVEEIFGTFGMALISPVLDVLLLIVVRLLESCMRNLRSMNEEDYPSKQSNDPDDECSMTLEAGNSMSLKEHSKDLPSADHNKLSLLMMKLLIMLVKCNILSVVTPISYLTVMQESVSIKQLKDLRSLCIRIVSLALNQYGSNDFGEKFWNIFFTSVKPLIDCFRQEASSSEKPSSLFSCFMAMSQSPKLASLLGAHNLVPAIFSILTVKKASGSITSYALEFIENLIKLDTDLEQHGDHSLKKILVPHMDVLLHSLNDFVSYRRELHRKSGTWLGQRELRLFKLLMKYITDPSSAEHVLDLILPFFSKKDLNPDECLEALRVVGGILANLRCGVSAKILNALNPLLATAGLELRLCICDIYVGLSFHEPSVSTLAMLVRDLNAVSTSELGEVDYDTRIKAYDTIQPQSFLDMREEHVGAILSHCVYDMSSEELIFRQSASRALQSFLDFSASIMNNESKHCIETENNSNGIWTKGSIHQILEKTYLHNMGVAMSKDISIQKEWIILLREMVYNFNHVPSLNSFIPLCKEDLEEDFFHNITHLQAGKRSKALSLFKQRIKDTEFSEDVTMKVFVPLFFNMFFDVKAGKGEQVRDVCLDTLSSIAAKVQWEHYRTILMRCFRELSLKPDKQKIILRLICAVLDSFHFMKPAHDVSRNSDAMNEDSDSSLTFSSTIVSSEKQHYLQKIVFPQVQKLLGADPEKVNVSINLVALKILKLLPVDYFESQLSSIIHRICNFLKNRLESIRDEARSALAASLKELGIGYLQFVVKILRAILKRGYELHVLGYTLHYLLSKTITSDMNGRLNYCLEDLLAVVESDILGDVAEQKEVEKIASKMKETKKRMSLETLKLISQCVTFKTHSLKLISPISSHLQKHLTPKLKSKLEMMLHNIALGIECNPSTETFDLFVFVYGLIKDTITAGESQCKENAGSGHGQENTRRNKLLGLHDSGLQNSYIITKFAVALLRNRLKSIKLHKNDEELLSKLDPFVKLLAECLSSKHESVLSISFRCLALLIKLPLPSLKDNANLIKNVLMDIAQRAGNSNGHLVTSCLKLLADLLRGFRISLSDDQLQIIVHFPIFVDLQTNPSPVALSLLKAIVKRKLVSPEIYDIVVRIGELMVTTQTESIRQQCIQILLQFFLNYPLSEKRLQQHIDFFLTNLSYEHPSGREAVLEMLHNILTRFPQRIVDDQGQTFFLHLVVALSNEQHQNVSSMILRAIQKLLGRIGDQGKNSIFEYTLSWYTGEKQNLWSASAQVIGLLVGDRSLGIGKHLNNILANAKQIMECSVIASGGQVDLADETCLPFWKESYHSIAMMERLLARFPELYFKQNMEEIWMIVCKLLIHPHSMLRNISSSLVASYFSFVEKSKREKKFDGKSSLLIQPSMLFLIAVSLMKQLRAELSDTTANNLIVQNLSYSVCNLHTLVKQTTSPHQFWSSLSSSDHSAFLEGFELFGSTKAKNAFLICTSASTDVNGSNLDGGEELTSLLVSSLLKRMGKIAMQMQDTQMKIVFNCFSMISSALGAEVSLSYANLFLGPLYKVCEGFAGKVISDDVKQLADSVRDKLCDLIGTEKFVEVYNSVRKGLKQKRESRKQSEKLIAAVDPARHAKRKLRIAAKHREHKRRKIMTMKMGRWLR

SEQ ID NO: 106816 - protein, 87 aa, Oryza sativa
  Clone ID: PAT_MRT4530_11226C.1.pep
PRPRDPPPFRLQKRSRQVQQRCQGGRRGLIFFLLNPFSVSYSKVFCFFFKPIFSKFGPSFFKNMVVFSIWKGLFFRIFFLLGFIRLI

SEQ ID NO: 106817 - protein, 109 aa, Oryza sativa
  Clone ID: PAT_MRT4530_11227C.1.pep
KFDDKLSNMRIGRRPGRPQGVRVGRFINAAGTTGFPTGKRAVVSTLKYEYAIEKLKNEALSSQMGQLRVSDILKWREYEIASTLKDEYAIEKLKRLLNHKEINEIEWGK

SEQ ID NO: 106818 - protein, 372 aa, Oryza sativa
  Clone ID: PAT_MRT4530_11228C.1.pep
MMTDGPVLLCGLWLGLSPLPTRRLLSPSPSASLTTTTVRCSKGEMAVVKCIRVHELGGPEVLRWEQVEVGEPKEGEIRIKNTAIGVNFIDVYYRQGVYSAPLPFVPGREAVGVVTAVGPGLTGRKVGDVVAYAGNPMGSYAQEQIIPASVAVPLPPSIDHNTAAAIMLKGMTAHVLLRRVYKVQSGDCVLVHAAAGGVGSLLCQWANALGATVIGTVSNEEKAAQAAEDGCHHVIIYTKEDVVTRVKEFTAGKGVNVVYDSVGKDTYKGSVECLAWRGMLVSFGQSSGRPDPIPLSDLASKSLLVTRPSLMHYTATRDELLESAGEVFANVGSGVLRIRVNHTYPLSQAARAHADLQARKTTGSILLIPDDA

SEQ ID NO: 106819 - protein, 140 aa, Oryza sativa
  Clone ID: PAT_MRT4530_11229C.1.pep
GTRWAARAGGDWRGRGYGCRNGEGHAAARQAHRGRRRSSGPRRRRRRGGRRRSSWPRRRLEADGDARRGHGGGWRRTATLVGDAAEARGGAEVDGGARRDRGEGGRRRSSGLWRRLEAAPRRAAALVGTRDGGGGVRRRW

SEQ ID NO: 106820 - protein, 261 aa, Oryza sativa
  unsure (1)..(261): unsure at all Xaa locations
  Clone ID: PAT_MRT4530_1122C.1.pep
RRHGTHPRAPKRAQGQRTPGPRPPPPRRAEAAGGAKPPRHAPALCRARRHAAAAPPAAVPLPPHRERERANEREREQAAPSSSVRRCPSRXPPPSSSSTTARLTSATSSVSRHRHPQPRRRPSGCCHCPPXHRPPPRLPRRRRCRRRRHHHHRRPSATAXSSSSSSSATARPASAALSTVRRCHRRPSSQPAPRLPHHRPPAAXPQPASRHLPPLPSSSSSSATAVGTRGHRCGRTRGGALQVGRELHRTTMMTTVVADGR

SEQ ID NO: 106821 - protein, 97 aa, Oryza sativa
  Clone ID: PAT_MRT4530_11230C.1.pep
GDPSSFSLGLFHIWGPPPSSLVTAPPFGGFPFLGLNRGAPFSKRISLFFSWGVSFWVQKPGLNSFFGPTFFGVPSPRGECSPWFIFMCFSQPTIFVP

SEQ ID NO: 106822 - protein, 93 aa, Oryza sativa
  Clone ID: PAT_MRT4530_11231C.1.pep
SLLMAATKRMDYSITAVFMILLIISSTFSSCYAAKDMKDREAIIQRHREECKKTCRERHTYCPPEMPFCCMKNAPASSPSSVENESGDELVIN

SEQ ID NO: 106823 - protein, 355 aa, Oryza sativa
  Clone ID: PAT_MRT4530_11232C.1.pep
MKRHQMESVPRTVSTVVPNTAEATHVFDIVGYSQMKGRGREEHVTSGTFVVGGLHWAILLFPDTHVILLDDEEDNVTAFLELQSQGGSKVRACCDVRLVDQTTGLASSAAPAQPDAKTFKVFNADESNRVSCLKMKRTEFEAPPYLVDDRITLECVVTVKKEPRVSRARPVPRIKVPPSNMMQQLGDLLESKEGADVVFDVAGETFPAHKLVLAMRSPVFKAELCGPMRESGTEPISIVDMQPVVFKALLQFIYTDWLPSIRDLEGDDNSEMIRHLLVAADRYAVDRLKLLCQSILCKNLRVGNVATTLALADQHHCGMLKDACIEFMSCPNMLDDVVASQGFVDLENTAPSLVA

SEQ ID NO: 106824 - protein, 208 aa, Oryza sativa
  Clone ID: PAT_MRT4530_11233C.1.pep
MEEETVTVMTTPSRPPMPLDLKRSLASSSPAADSPPPSAGKREGVGIRRRPHLALGSSYSGGSGSDDDDSCRDDSNESPGLPGPSPVAGAEKDDESMRGGRRRQGPRSAQDRDWTLRHRCRHPQLRKGHRELLFVVRNPCQSPPFSCLLAGRHPLCISPSICYRQAPTHGTRPSPTSLRPSSPTVSSVATRCSLIYRRAPLVPRERRG

SEQ ID NO: 106825 - protein, 69 aa, Oryza sativa
  Clone ID: PAT_MRT4530_11234C.1.pep
GVHCRFHMTKHKTTEPPFGHFADLSLLWQGHRQKQIWSTCRTFPLFRGFRSWLIGQPRNWCQKVCRKGP

SEQ ID NO: 106826 - protein, 992 aa, Oryza sativa
  unsure (1)..(992): unsure at all Xaa locations
  Clone ID: PAT_MRT4530_11235C.1.pep
MSNKVTFQIVHGEGNIRFGPDGVDLSDFVMTSKGIDRPAERTFQSIYSWLLRGFRIDQEVYTMSVSVVVSRATEGYFWELMPMDSTAAWRRYVEMAFERSWPLVIFVSVQEKDINVSMQTEDVEGPINAGDVVGPSMQNEENQPREEQAMGMADEGERVGIIVDEMEREDSDNEEADDDASSDEEGDVMATDWANEDFSGLVISEGDHVPWEYKENEVIDGARYAHKDEMKEAVKHWAVSLQREFRVVKSTNYVYEVRCMKEDCPWRVHAYKGKWNDYWKVSIVTEHKCYLQGVEKYHRNITSAFVASEMYSSVVGNIGFEPKSIIRHIENKFKYTISYAKAWRAKQKIIEMRYGTFEASYDNLPRLLATIAQRNNNTYYDLHTFTSVDDRTKSVLQRAFFSLGACINAFVHCRPVLCIDGTFMTGKYRGQILTAIGCDGNNQVLPMAFAFVESENTESWYWFLERVHIAVQFKNKHLMELFKRLCAQSQEKKFNELWDKLDELTMKQTDEQSRRPQVEGDEPPIPLGALHDDPPTMRRRSGSSIRNFTQWIENERKEKWSLLFDTDRSRSRRGIYRKQAVQECVLKADGGCTCSCMKPKLHHLPCSHVLAATYHVLCEACTKTDAGAIIASCPMLLQLWAAERFAIGRPVVDSAPYGVGRSAQWPEDGPTMGTYWCRRGRRYAHVQVRRGYPDFVFEFDRLQPSDVIWEPYTEEAVAARAPLGLSSLCTRDQAYWLTILPMVFDIFVEPHCPQRVMRQFGLRQVFPGNVQPTVLPADHSLTRRGQLAGALWAPRVQQYVDDWVLATEEVINELFPHTEENYRDYLRWYLPRTRARVTFTPDAPEPHVAAVTDAYPTHRDRDYFVGADAARDISADITAVQVRLNRGLHLTDVEQRVTFDRMQEKMRAVMRVFSCRSAVDVVPPAGPXPRLPSSAPSFGAVRPTAPVSHGFAAGIFSTGASSSHADISSNVQLHRVGRHGEPTKRRNPCLPT

SEQ ID NO: 106827 - protein, 713 aa, Oryza sativa
  Clone ID: PAT_MRT4530_11236C.1.pep
MAFERSWPLVIFVSVQEKDTNVSMQTEDVEGPSNAGDVVGPSMQNEENQPREEQAMGMADEGERVGIIVDEMEREDSDNEQAEDDASSDEEGDVMATDWANEDFSGLVISEGDHVPWEYKEYEVIEGARYAHKDEMKEAILTAIGCDGNNQVLPMAFAFVESENTEKLNGWDEKGLPAKWPDVRSRWCMRHMGANFYKQFKNKHLMELFKRLCAQNQEKKFNELWDKLDELTTKQTDEQSRRPQVEGDEPPIPLGALHDDPPTMRRRSGSAIRNFSQWIENEPKEKWALLFDTDGSRYGIMTTNLAEVYNWVMRGVRVLPLVAIVEFILHGTQAYFRDRYKKIGPSMADNNIVFGNVVTKRGIYRKQAVQECVLKADGGCTYSCMKPKLHHLPCSHVLAAAGGRTLRCSKCDLRGHTYKTCPKNAEVPSGADASPSGQASDAPWTSYLQLVRYTHGLAVLPSEQDLVCLRAPLASEQCDLQHRTSYAFERVRRHDRRFRELRRGVRHLFRRVRQLFLSRSVDPSPTRRDLRYWGLFVSRRLEELQRRTLRSSQRSHLYRQDGLAVPYPRTDSRQANMEMGLMGPIYLEGRPHVQSLDLAYGREILTVEIKDGIVGKYFVGKMSNKVPGFSLITVKVKDNLVLKGWIPDESDLRPITPKDDLAPDLPMLRPSQVRKRPSTIYKQAAGPIPVPLEDVTFAKPLQMRKPVEKSVAK

SEQ ID NO: 106828 - protein, 1081 aa, Oryza sativa
  Clone ID: PAT_MRT4530_11237C.1.pep
MAFERSWPLVIFVSVQEKDTNVSMQTEDVEGPSNAGDVVGPSMQNEENQPREDQAMGMADEGERVGIIVDEMEREDLDNEQAEDDASSDEEGDVMATDWANEDVSGLVISEGDHGKWNDYWKVSIVTEHQCYLQGVEKYHRNITSAFVASEMYSSVVGNIGFEPKSIISHIENKFKYTISYAKAWRAKQKNIEMKYGTFEASYDNLPRLLATIAQRNNNTYYDLHTFTSADDRTKSVLQRAFFSLGACINAFVHCRPVLCIDGTFLTENENTESWYWFLERVHIAVVRMRPNVCLIHDRHAGMLRAIDYLQNGWDEKGLPAKWPDVWSRWCMHHMGTNFYKQFKNKHLMELFKRLCAQNQEKKFNELWDKLDELTTKQIDEQSRRPQVEGDEPPIPLGALHDDPPTMRRRSGSSIRNFTQWIENEPKEKWSLLFDTDGSRYGIMTTNLAEVYNRVMRGVRVLPLVAIVEFILHGTQAYFRDRYKKIGPSMADNNIVFGNVVTKYMEDKIKKARRHRVVAQGTQVHRQVMEGDHLVKEQQAGAQGQGVVMQQAIPWCNIAIDLGMAYDTPALFNRGIDRNHRSFLSAVEGAQLGTFRPRTSREWLRVDPRHVPWLRAAGLLPLCRLVEAAADVRDQRSGGTQTGAPVGPVDGVFGWKEDITARFEHVMRLPHLGPPKTLPPYSTVRPSKAWLLQFTLWAAERFAIGRPVVGSAPYRVGRSAQWLEDGPTMGTYRCRRGCHYAHVQRVMRQFGLRQVFPCNVEPTVLPADHSLTRRGQLAGALWAPRVQQYVDDWVLATEEVINELFPHTEENYRDYLRWYLPRTRARVTFTPDVPEPHVAAVTDAYPTHRDRDYFVGANAARDISADITAIQVRLNRGLHLTNVEQRVTFDWMQENMRAVMRIFSCRNAVYVVPPAGPDLVCLRAPLASEQCDLQHRFRTVLLNPKDFQPRSSVLVPLRLTPIGLVLLASSTTMTCTTYRPMCNFIEWVDMENPQNDRTRAYPHSETRSDYLRRKDEHERRIVAEALEWQGNPTMCGFTRWIDNVTPSYHGQKITESEIQVEYQRLKDHENAMHIDRPRRGR

SEQ ID NO: 106829 - protein, 68 aa, Oryza sativa
  Clone ID: PAT_MRT4530_11238C.1.pep
MATTEMAAPPRAPSPARACSTATRDISVVGGTGDFFMSRGVATLRADAVEGFTYFRLLMDIKLYECYI

SEQ ID NO: 106830 - protein, 554 aa, Oryza sativa
  Clone ID: PAT_MRT4530_11239C.1.pep
MAPAARRSHGGGAHAAAAQSDDRRRSSGGGERRLAALGGEEGEKEGGDASPRVAGAEEGDGGRRRQATGGRRRLADELRRALRKEKRGIREREMDHGDRDPWPKAAVEVALTRARGDEGSGDEPRRRRGGRGGPRPREANGGDGRRYAHVQVRRGYPDFVFEFDRLQPSDVIWEPYTEEAVAARAPLGLSSLCTRDQAYWLTILPMVFDIFVEPHCPQRVMRQFGLRQVFPGNVQPTVLPADHSLTRRGQLAGALWAPRVQQYVDDWVLATEEVINELFPHTEENYRDYLRWYLPRTRARVTFTPDAPEPHVAAVTDAYPTHRDRDYFVAADAARDISADITAVQVRLNRGLHLTDVEQRVTFDRMQEKMRSVMRVFSCRSAVDVVPPAGPVQPRPRAPTVGAGPRPTAPISHGPRLPSSAFAGTTGASTSSAGAFATSSGAFASSSSHGASIPRPHAGFAAGIFGTGASSSHAGRTGPTSQFYDDDLHGADHHDVLGSSQLGGAPEAHTQEQPEVTPVQAGRVGRAVPPDRLTYSHGHIRAQGRRDRGKRPRQ

SEQ ID NO: 106831 - protein, 57 aa, Oryza sativa
  Clone ID: PAT_MRT4530_1123C.1.pep
VVNVPLILGLLRRITMDRVWGLSRLQSYRYRSCQPIALKLTMLYSPCCGRRERRVCL

SEQ ID NO: 106832 - protein, 122 aa, Oryza sativa
  unsure (1)..(122): unsure at all Xaa locations
  Clone ID: PAT_MRT4530_11240C.1.pep
MKIIFVFALLAIVACNASARIECLSSRRGSPRECRFDRLQAFDPSXAVRSQAGTTEFFDVSNEQFQCTGVSVVRRVILSRGLLLPHYTNGASLVYIMQGRGMTGSTLPGCPESYQLRFQQSG

SEQ ID NO: 106833 - protein, 233 aa, Oryza sativa
  Clone ID: PAT_MRT4530_11241C.1.pep
MADEGERVGIIVDEMEREDSDNEEADDDASSDEEGFAAGIFGTGASSSHAGRTGPTSQFYDDDLHGAHHHDVLGSSQLGGAPEAHTQEQPEVTPVQAGRVGRAVPPDRLTYSQGHIRAQGRRDRALEYQAPANEGGNTLHPLENVIGQASVKGLVVFTLAEALLPVRQTSDNHKGKTIGMKGRLKEQGAPGNLNHQRRCSMSLELSTQKLVEEQSDSWLEIQMDKFSCHLGNS

SEQ ID NO: 106834 - protein, 668 aa, Oryza sativa
  Clone ID: PAT_MRT4530_11242C.1.pep
MAEYDLDNDFSVVEVYSVRDVQVGPFQSALESLPHGEVLAVGHDTSGEIMVETVELNGDSKEQLDLDSMGYPKLPSSMLGAGMILVNSFEDPFGDIYGEGVWRKFSRRASILNRNVVALASFNASLVRDSGDENKIDENLRVGVHCFVSDVLLRWSVPKPRWCRPEDAESDDDDKLAFDDTGQLQYSYILGRKVKLLRLTIPISVPIVEAKSTDEPGVDPFAQRKQKKKRVEKQGKNRLENLKKAAKVGALPSHIQLAATSLPITGTKADLPKKSRKEDLENVAGMGSATASGGKFDEKLPGEKPPKHPGKHKKFIPVAEGEGMGNLGKQQNDKILMSLLARNSEQLDESSTTISMGMLNLMRLMSVKRRRRQVQVPHDGLIALRAKRKCSPCQQDGDSQGAADIEIPDLPEVPCLLQRLISLKVFGCDNLKLIENEAPNVSIFAFQGDKTQLKLGETLQMKSLCMVRSGYVYHARAELPSIMPNLESLAMKSFKETAFAPKLCSKFLCLRHLSIALIGYFPAYDYLSLASYIHAAPSLETFYLTRYVQNVSIFAHPADLRSIREEQHHSLKSVRVTSFISVKSLVELTCHILESTTSLECLTLDASQTGFRCDTPGSKIGKCPPLDRDIIMEGHRGVLAIRRYIQPRVPSTVKLNVLEPCSCHCTEL

SEQ ID NO: 106835 - protein, 352 aa, Oryza sativa
  Clone ID: PAT_MRT4530_11243C.1.pep
MADEGERVGIIVDEMEREDSDNEEADDDASSDEEGDVMATDWANEDFSGLVISEGDHVPWEYKENEVIDGARYAHKDEMKEAVKHWAVSLQREFRVVKSTNYVYEVRCMKEDCPWRVHAYKGKWNDYWKVSIVTEHKCYLQGVEKYHRNITSAFVASEMYSSVVGNIGFKPKSIIRHIENKFKRFFQCANFDQTYRPMCNFIEWVDMENPQNDGTRAYPRSETRSDYLRWKDEHERRIAAEALEWHVNPLRLPTWRERPECRCGDRCQVIRDRWQVATSFAEQTFRRRYFVCPNVDNDFVGNPRMGGFTRWIDNVTPSYHGQKITESETQVEYQRLKDHGNAMHSDRPRRCR

SEQ ID NO: 106836 - protein, 89 aa, Oryza sativa
  Clone ID: PAT_MRT4530_11244C.1.pep
EAPRGLTSFRASFEEHQPSAPSTQAVSPSCPKTSSSPPRIPRSARNPPFDAVALRSPERSGGINDDDVTWSTLIPLSLPLLDLVFITSF

SEQ ID NO: 106837 - protein, 93 aa, Oryza sativa
  unsure (1)..(93): unsure at all Xaa locations
  Clone ID: PAT_MRT4530_11245C.1.pep
LNLPDVKLYIELIIPGMVFARSVRVCIIYXIYIELRGVGTVGCGLQFSRITAHRYRNNRFLGVWSDVRXSFLHTWVIGVWLVLXIPYKPRSIL

SEQ ID NO: 106838 - protein, 1054 aa, Oryza sativa
  unsure (1)..(1054): unsure at all Xaa locations
  Clone ID: PAT_MRT4530_11247C.1.pep
MSSKVIFQIVHGEGNIRFGPDGVDLSDFVMTSKGIDRPAERTFESIYSWLLRGFRIDQEVYTMSVSVVVSRAIEGYFWELMPMDSTAAWRRYVEMAFERSWPLVIFVSVQEKDTNVSMQTEDVEGPSNAGDVVGPSMQNEENQPREEQAMGMADEGERVGIIVDEMEREDSDNEQAEDDASSDEEGDVMATDWANEDFSGLVISEGDHVPWEYKENEVIEGARYAHKDEMKEAVKHWAVSLQREFRVIKSTNYVYEVRCMKEECPWRVHAYKGKWNDYWKVSIVTEHKCYLQGVEKYHRNITSAFVASEMYSSVVGNIGFEPKSIIRHIENKFKYTISYAKAWRAKQKIIEMRYGTFEASYDNLPRLLATIAQRNNNTYYDLHTFTSVEDRTKSVLQRAFFSLGACINAFVHCRPVLCIDGTFMTGKYRGQILTAIGCDGNNQVLPMAFAFVESENTESWYWFLERVHIAVVRMRPNVCLIHDRHAGMLRAIDYLQNGWDEKGLPAKWPDVRSRWCMRHMGANFYKQFKNKHLMDLFKRLCAQNQEKKFNELWDKLDELTTKQTDEQSRRPQVEGDEPPIPLGALHDDPPTMRRRSGSAIRNFSQWIENEPKEKWALLFDTDGSRYGIMTTNLAEVYNWVMRGVRVLPLVAIVEFILHGTQAYFRDRYKKIGPSMADNNIVFGNVVTXYMEDKIKKARRHRVVAQGTQVHRXPSKLRVKKGRRQTRRIRNDMDESEAGGRTLRCSKCDLRGHTYKKCPKNAEVPSGADASPSGQLAGALWAPRVQQYVDDWVLATEEVINELFPHTEENYRDYLRWYLPRTRARVTFTPDAPEPHVAAVTDAYPTHRDRDYFVAADAARDISADITAVQVRLSRGLHLTDVEQRSTFDRMQEKMRAVMRVFSCRSAVDVVPPAGPRMPSSAFAGTTGASASSAGAFATSSGAFASSSSHGASIPHPHAGFAAGIFGTGASSSHAGRTGPTSQFYDDDLHGADHQDVLGSSQLGGAPEAHTQEQPEVTPVQAGRVGRAVPPDRLTYSQGHIRAQGRRDRGKRPRQ

SEQ ID NO: 106839 - protein, 1254 aa, Oryza sativa
  unsure (1)..(1254): unsure at all Xaa locations
  Clone ID: PAT_MRT4530_11248C.1.pep
MSSKVTFQIVHGEGNIRFGPDGVDLSDFVMTSKGIDRPAERTFQSIYSWLLRGFRIDQEVYTMSVSVVVSRATEGYFWELMPMDSTDAWRRYVEMAFERSWPLVIFVSVQEKDINVSMQTEDVEGPINAGDVVGPSMQNEENQPREEQAMGMADEGERVSIIVDEMEREDSDNEEADDDASSDEEGDVMATDWANEDFSGLVISEGDHVPWEYKENEVIEGARYAHKDEMKEAVKHWAVSLQREFRVVKSTNYVYEVRCMKEDCPWRVHAYKGKWNDYWKVSIVTEHKCYLQGVEKYHRNITSAFVASEMYSSVVGNIGFEPKSIIRHIENKFKYTISYAKAWRAKQKIIEMRYGTFEASYDILPRLLATIAQRNNNTYYDLHTFTSVDDRTKSVLQRAFFSLGACINAFVHCRPVLCIDGTFMTGKYRGQILTAIGCDGNNQVLPMAFAFVESENTESWYWFLERVHIAVVRMRPNVCLIHDRHAGMLRAIDYLQNGWDEKGLPAKWPDVRSRWCMRHMGANFYKQFKNKHLMELFKRLCAQNQEKKFNELWDKLDELTTKQTDEQSRRPLVEGDEPPIPLGALHDNPPTMRRRSGSSIRNFTQWIENEPKEKWSLLFDTDGSRYGIMTTNLAEVYNWVMRGVRVLPLVAIVEFILHGTQAYFRDRYKKIGPSMADNNIVFGNVVTKYMEDKIKKARRHRVVAQGTQVHRYEIMCVDRSRRGIYRKQAVQECVLKADGGCTCSCMKSKLHHLPCSHVLAAAGDCGISPNVYVSNYFRKEAIFHTWSEEIYGFGISGSYTTLSAQVFYIPDPSKLRVKKGRRQTRRIRNDMDESEAGGRTLRCSKCDLRGHTYKKCPKNAEVPSGADASPSGQASDGMVYDTPALLNRGFDRNHRSFLLTRRGQLAGALWAPRVQQYVDDWVLATEEVINKLFPHTEENYRVYLRWYLPRTHARVTFTPDAPEPHVAAVTDAYPTHRDRDYFVAADAARDISADITAVQMRLNRGLHLTDVEQRVTFDRMQEKMRAVMRVFSCHSAVDVVPPAGPVQPRPRAPXSEQDLDLRHLFXRTSSAFERVRRHDRRFRELRRGVRHLFGRVRQLFLSRSVDPSPTRRICSRDLRYWGLFVSRRXTGPTSQFYDDDLHSAHHHDVLGSSQLGGAPEAHTQEQPEVTPVQAGRVGRAVPPDRLTYSQGHIRAQGRRDRVLFIHMVLEQLMLTTTHFRRFTVVSDPVARTVHNSTHEKRQLELSLSTFGAAC

SEQ ID NO: 106840 - protein, 173 aa, Oryza sativa
  unsure (1)..(173): unsure at all Xaa locations
  Clone ID: PAT_MRT4530_11249C.1.pep
MACVWLLHQTTSFLGQCPGLPPRLRXADAGGRITMRRTVKSAPQSIWYGPDRPKYLGPFSEQTPSYLTGEFPGDYGWDTVXLSADPETFARNRELECDPLPGGPCLGALGCVFPEILAKNGVKFGEAVWFKAGAQIFSEGXGLDYLGKPNLVXHAQSILAIWAXQVVLMGFVE

SEQ ID NO: 106841 - protein, 567 aa, Oryza sativa
  Clone ID: PAT_MRT4530_1124C.1.pep
MAFTEETTHLVMNHVEHCEDGGGLAVAGWTPSGSCTLSVHDDPAPETPPPHPLSATEDDADEPRPRPSGRYVLAAHRAGERDGLCRELSRAPAAKVTYRVAGWVGLQGAGAADGCCHAVRVEVCTDDGRPVGGGVVVAEAGKWGEIMGSFRVDDDEPPRCAKVFVHGPPAGVDLKVMDLQVFAVNKIARLRHLRKKTDKVRKRDVVLKLGRRTGGTAIRVVQVENSFPIGACINKTAIQNPAFVDFFTKHFDWAVLENELKWYYTEAVQGQVSYSDADELIAFCDRHGKPVRGHCIFWAVENVVQPWVRALNGDQLRAAVEGRLRSLVTRYGGRFPHYEVNNEMLHGAFFQQRLGDDINARMFRETAQMDPSPALFVNDYNVESANDPNATPERYVELVTDLQKRGAAVGGIGVQGHVTHPVGDVICDALDRLAVTGLPVWITELDVSAADEAVRADDLEIVLREAFAHPAVEGIMLWGFMQGNMWRSHAHLVDADGKLNEAGHRYVGLRQEWTSHARGQVDGSGHFKFRGFHGKYVVQLTTGAGEMKYQQFDVGKGDGPLVLDMDL

SEQ ID NO: 106842 - protein, 1309 aa, Oryza sativa
  Clone ID: PAT_MRT4530_11250C.1.pep
MSNKVTFQIVHGEGNIRFGPDGVDLSDFVMTSKGIDRPAERTFQSIYSWLLRGFRIDQEVYTMSVSVVVSRAIEGYFWELMPMDSTAAWRRYVEIAFERLWPLVIFVLVQEKDTDVSMQTEDVEGPSNAGDVVGPSMQNEENQPREEQAMGMADERERVGIIVDEIEREDSDNEQAEDDASSDEEGDVMATDWANEDFSGLVISEGDHVPWEYKENEREFRVVKSTNYMYEVRCMKEDCPWRVHTYKGKWNDYWKVSIVTEHQCYLQGVEKYHRNITSAFVASEMYSSVVGNIGFEPKSIIRHIENKFKYTISYAKAWRAKQKIIEMRYGTFEASYDNLPRLLATIAQRNNNTYYDLHTFTSVDDRTKSVLQRAFFSLGACINAFVHCRPVLCIDGTFLTGKYRGQILTAIGCDGNNQVLPMAFAFVESENTESWYWFLERVHIAVVRRRPNVCLIHDRHAGMLRAIDYLQNGWDEKGLPAKWPDVRSRWCMRHMGANFYKQFKNKHLMELFKRLCAQNQEKKFNELWDKLDELTTKQTDEQSRRPQVEGDEPPIPLGALHDDPPTMRKRSGSSIRNFTQWIENEPKEKWSLLFDTDGSRYGIMTTNLAEVYNWVMRGVRVLPLVAIVEFILHGTQAYFRDRYKKIGPSMADNNIVFGNVVTKYMEDKMKKARRHRVVAQGTQVHRYEIMCVDRSRRGIYRKQAVQECVLKADGGCTCSCMKPKLHHLPCSHVLAAAGDCGISPNVYVSNYFRKEAIFHTWSEEIYGFGISGSYTTLSGKVFYILDPSKLRVKKGRRQTRRIRNDMDKSEAGGRTLRCSKCDLRGHTYKKCPKNAEVPSGADASPSGQASDGRRPLGMAYDTPTLFNRGIDRSHRSFLSAVEGAQLGTFCPRTSREWLRVDPRHIPWLRAAGLLLLCRLVEAAADDRDPAKRWDANRSLLAALVDHWRPETHTFHLPCGEMALTLQDVSYLLGLPLAGAPVGPVDGVFGWKEDITARFEHADLLHPDADDYSDVPQWSWGSAVLAATYRALYEACTKTDAGAIFAGCPMLLQLWAAERFAIGRPVVDSAPYGVGRSAQWPEDGPTMGIYWCRRGRRYTHVQVRRGYLDFVFEFDRLQPSDVIWEPYTEEAVAARAPLGLSSLCTRDQAYWLTILPRVFDIFVEPPCPRRVMRQFGLRQVFPGNVQPTVLPADHSRFFQCANFDQTYRPMCNFIEWVDMENPQNDGTRAYPRSETRSDYLRRKDEHERRIAAEALEWQGNPRMCGFTRWIDNVTPSYHGQKITESETQVEYQRLKDHENAMHSDRPKRGR

SEQ ID NO: 106843 - protein, 1155 aa, Oryza sativa
  Clone ID: PAT_MRT4530_11251C.1.pep
KYRGQILTAIGCDGNNQVLPMAFAFVESENTESWYWFLERVHIAVVRMRPNVCLIHDRHAGMLRAIDYLQNGWDEKGLPAKWPDVRSRWCMRHMGANFYKQFKNKHLMELFKRLCAQNQEKKFNELWDKLDELTTKQTDEQSRRPQVEGDEPPIPLGALHDDPPTMRRRSGSAIRNFTQWIENEPKEKWSLLFDTDGSRYGIMTTNLAEVYNWVMRGVRVLPLVAIVEFILHGTQAYFRDRYKKIGPSMADNNIVFGNVVTKYMEDKIKKARRHRVVAQGTQVHRYEIMCVDRSRRGIYRKQAVQECVLKADGGCTCSCMKPKLHHLPCSHVLAAAGDCGISPNVYVSNYFRKEAIFHTWSEEIYGFGISGSYTMLSAQVFYVPDPSKLRVKKGRRQTRRIRNDMDESEVGGRTLRCSKCDLRGHTYKKCPKNAEVPSGADASPSGQASDGMAYDTPALLNRGIDRNHRSFLLRAAGLLPLCRLVEAAADDRDPAKRWDADRSLLAALVDRWRPETHTFHLPCGEMAPTLQNVSYLLGLPLAGAPVGPVDGVVGWKEDITARFEQVMRLPHLGPANTLPPYSTVGPSKAWLLQFTADLLHPDADDYSVRRSLEAYLLWLFGWVMFTSTHGHAVDFRLVHYARSIADAQPQDVLQWSWGSAVLAATYHALCEACTKTDAGVIIAGCPMLLQLWAAERFAIGRPVVDSAPYGVGRSAQWPEDGPTMGTYWCRRRRRYAHVQVRRGYPDFVFEFYRLQPSDVIWEPYTEEVVAARAPLGLSSLCTRDPAYWLTILPMVFDIFVEPHCPQRVMRQFGLRQVFPGNVQSTVLPADHSLTRRGQLAGALWAPRVQQYVDDWVLATEEVINELFPHTEENYRDYLRWYLPRTRARVTFTPDAPEPHVAAVTDAYPTHRDQDYFVGADAARDISADITAVQVRLNRGLHLTDVEQRVTFDRMQEKMRAVMRVFSCRSAVDVVPPAGPVQPRPRAPTVGAGPRPTAPISHGPRLPSSAFAGTTGASASSAGAFATSSGAFASSSSYGASIPRPHAGFAAGIFGTGASSSHAGRTSPTSQFYDDDLHGAHHHDVLGSSQLGGAPEAHTQEQPEGNPRMGGFTRWIDNVTPSYHGQKITESETQVEYQRLKDHENAMHSDRPRRGR

SEQ ID NO: 106844 - protein, 61 aa, Oryza sativa
  Clone ID: PAT_MRT4530_11252C.1.pep
LLEKFDLSDSEAATRSDESTETKSKVNIRTCIVYRRGQKQLTKLFLREAEHLLELSSKEEN

SEQ ID NO: 106845 - protein, 89 aa, Oryza sativa
  Clone ID: PAT_MRT4530_11253C.1.pep
MAARERRRGGRRRDGAASPTAAPSLESSVGVPFLWEEAPGRPKAVVAVPRPHDVVGGVATPSCAPAADDERAPVSHGGDSDKARTSSRR

SEQ ID NO: 106846 - protein, 77 aa, Oryza sativa
  unsure (1)..(77): unsure at all Xaa locations
  Clone ID: PAT_MRT4530_11254C.1.pep
PSRLHSNMLGAYRLRKGMKLYFXRHTRHSASWEHLHAGTTDADNTHMSTFLRWTSQAATSAVSWCSTYDSCSNTLSV

SEQ ID NO: 106847 - protein, 51 aa, Oryza sativa
  unsure (1)..(51): unsure at all Xaa locations
  Clone ID: PAT_MRT4530_11255C.1.pep
CIRTWRITGMRFRAVTTCRLPLTXKFSEPGAECTDSSGTPPEFLLGSPEPP

SEQ ID NO: 106848 - protein, 147 aa, Oryza sativa
  unsure (1)..(147): unsure at all Xaa locations
  Clone ID: PAT_MRT4530_11256C.1.pep
RFSSDRAEGRNGVMLPDRIIVWLYPDVIRCADEYPEWANHFLREHDRAMVQVERVVQTILKSRRFEEYYHAARLPNHPIEERFTALAKARAVTVICRFKNWIAPPQLPCSGLVNLMKRDPAGRIPFSSXCGVVTNVLPAIDRQISTG

SEQ ID NO: 106849 - protein, 205 aa, Oryza sativa
  unsure (1)..(205): unsure at all Xaa locations
  Clone ID: PAT_MRT4530_11257C.1.pep
SSVGLGDMSAVVQHRCWACRRPCVRKPPSRRKXPKPMWSLPLELIPKRAAXATVYLQSMQQSSHGGRMMGRQPLATGLITAEMTWSDAPRPGASSSSSSSLAATGALPRQEPTVRGNNSPGKQAARGRGAPTSLPLPQCHPTLTRVRKPGRLSVSGGDIATRPTGGSATTEQSRVGRAKQAGAGKRYANHLPMWVCGGFGNNGSS

SEQ ID NO: 106850 - protein, 247 aa, Oryza sativa
  unsure (1)..(247): unsure at all Xaa locations
  Clone ID: PAT_MRT4530_11258C.1.pep
STTTTAAASASASSPHRRIAIAVDLSDESAFAVKWSVQNYLRPGDAVVLLHVRPTSVLYGADWGSIPVSTPTPPRATSXEEAKKKREEDFDAFTSTKAQDLAQPLVAAQIPFKIHIVKDHDMKERLCLEAERLGLSAMIMGSRGFGASRRAGKGRLGSVSDYCVHHCVCPVVVVRYPDDGTGKEDGGGAKREREAAHPDLRLRPPEDNDEGFRLRPVRCSPSAASTHRRTTVRASLCLPGCGCSLPR

SEQ ID NO: 106851 - protein, 45 aa, Oryza sativa
  Clone ID: PAT_MRT4530_11259C.1.pep
MRHAAEIKYMIRHISLTDLFGLNYDFEVLAEQFVFSQSSITEVKD

SEQ ID NO: 106852 - protein, 561 aa, Oryza sativa
  Clone ID: PAT_MRT4530_1125C.1.pep
MSSFLDWPQSLEISWDSQALCKRAESCELEAEVPSINPTLLPVLEDLLIELYAILRPKPDDYEQRHLMIDVFNKIAEEIYGKKKGFPVVEAFGSFTMDLFTSKSDLDLSVNFNADFHSQFARKDKISVIRNLAKVLYAHQRNGRCHGVLPVVTAKVPVLKVIDKGTGVECDISVENKDGMSRSMIFKLISSIDERFQILCYLMKFWAKAHDVNCPRDRTMSSMAIISLVAFHLQTRRPPILPAFSALLKDGPDFPSIQRNVSLVEGFGSRNKESVAELFVSLMSKLLSVEGLWEQGLCASNFEGSWIFKTWERGVGNLSVEDFLDRSQNFARAVGKEEMQKISECIRVAVLNLNNFFRGKIDAPKLKNLLFEPPHQDELISNPSLKRPKRKDHPTHGPESNPQQQKKAKHIIGPESNQKQQKKVKHTVNPGPAASRSATNLHRPTAFVPQIRPIQPINQVSHIPQPLVDPMFAYGLPPQQHLHSAPLYCQGLLGQQQEQPHGQEMATSALLLVIGMDELFQVCWVSADKLGLFQMHIIEREVLFNFYTCKDKAILVKQAKL

SEQ ID NO: 106853 - protein, 60 aa, Oryza sativa
  unsure (1)..(60): unsure at all Xaa locations
  Clone ID: PAT_MRT4530_11260C.1.pep
XPNTYLYAGAFLIGGFPPPTIIMNFEAPINKPTILTYFILPCIHLFFEPKQSTITTHLYY

SEQ ID NO: 106854 - protein, 111 aa, Oryza sativa
  Clone ID: PAT_MRT4530_11261C.1.pep
MALQLQVVFTDNLRAFCPVSTSLSTTGATGRRGSGRNVGGITERRELDGSDRAAGVAGRRERWGGGTGGAAGARRERDIADNLAGLEGGARQPATTRVGRRSSVGCARVLW

SEQ ID NO: 106855 - protein, 165 aa, Oryza sativa
  unsure (1)..(165): unsure at all Xaa locations
  Clone ID: PAT_MRT4530_11262C.1.pep
LTKEREITFDHRVVSYVNEITLKEVVKEGVIPAKEIIGWRPAHGEEFPTPNTIEIVVFTPLFSSSFCLPTSKFFRGLVYFYGSKIYHLNPNFINHFAIFVRLCEVFLGIHPHFILFRGMFYLKAQSTKENPCIIGSSCYQLRGALRKRKDYFSLLRKLAXKGWHS

SEQ ID NO: 106856 - protein, 104 aa, Oryza sativa
  unsure (1)..(104): unsure at all Xaa locations
  Clone ID: PAT_MRT4530_11263C.1.pep
MQLNPKARTRRNKTKAKGTLPTRGNHLEAYQLNPMSHTESYCRIRLYRLTPSDSDPADXAVADPDSSRFLLCSRIDLRLXLRFVLILFSDADITKFGSLVFRLN

SEQ ID NO: 106857 - protein, 798 aa, Oryza sativa
  Clone ID: PAT_MRT4530_11264C.1.pep
MEEKLQRLLLRVQIILEEAEDRHIANQAMLQQLNILRKEMYRGYYILDKFRYHDREEENTKDHQVSNSFAPSKFNPAKRIRFCRTSGQSLQQQLQQVLASLEATIEDTSEFFMFLNSYPRLNRQPYSTHLVLDKCLFNRQMEMEHIMNFLLKDNTSSNQNPGVLPIIGPSNVGKSTLIEHACNDERVRNHFFQIVCFSVDDLEDANMVRTFGSMDAAEHPKLESIAVDMAMELNGCFMGSNVYSVLLRENFNDKFWSMALARIREFRKLNLLLCGTSNFDDPWQGVGPAYVRREEEISEAFHLTISDADAGERCHVGPKQNEHCRSFSFLIDRCYSKLPLLSNEEKIQRLERMLHRLAAAIEEADGRRILNHGMLRHINILRQDMYRGYYILDSFRFPEAHEEEIMSENNDKVIDNLEIAMADMVEFFLLLNNYPSIHRQPYNSYLFMDKCMFGRQMEMEHIINFLLRPEPPNTLSVDNLGVLPIIGPAKVGKSTLVKHVCGDERVCNHFSRILFLTEGDFREEKSLLTLRDSGEIRHMHTSSSVSSGGERLLVIIELAEDVADDKWTMMCASLRSCISAGSKIIITSRLEKIAKLGTTQPLRLKFLSREAYWYFFKVLAFGSSDPKEHPELASVSMMMFNVYFDHELYKNFTGPFMDLNIMASLIQATFYEGNWLSLHAHTRSYFLLRRGLGDDFELKTKCVPIPKKNTVVQQYCVISDYCRVGVAHEEDQKVPKIDMQDVLSGRVAPDGRFDVVLWRSHLPPYYSYIYSWTAKVAVTTATAVDPGEQMLTAHFRCT

SEQ ID NO: 106858 - protein, 129 aa, Oryza sativa
  Clone ID: PAT_MRT4530_11265C.1.pep
MGGDLAGARVVGRGFGGHLHVEDDETNPTILTNATNDVGRRSATRGGDGGDSVVGGGDSPVTGDGGEGAAELPLFHAHPMAARGSGGDGQNDGARRLFVGRRRRRLRRRGGGSTVDERARERGQTKEED

SEQ ID NO: 106859 - protein, 59 aa, Oryza sativa
  Clone ID: PAT_MRT4530_11266C.1.pep
RQLGSLQRRQRMRRRSHLLPPGGGPRPAPHAGPARYAVSGPEGPGASAGPKQYSHRTFP

SEQ ID NO: 106860 - protein, 175 aa, Oryza sativa
  Clone ID: PAT_MRT4530_11267C.1.pep
MAAASPPAEAKGDRLMAQARRELTGFWSCLLPASATYSYAAGFFEEAAKAYRLAKNWRKAALAHHEYGTYCIKMGRDCRLAAAVVLWESAECHMRDFDPDDEQTARAIESDLKRSVRMLVLENQPQLAASACEELARMYVARRRGSGTSEPRGTASSSAGPGLYRKPSPPPSEEQ

SEQ ID NO: 106861 - protein, 36 aa, Oryza sativa
  Clone ID: PAT_MRT4530_11268C.1.pep
MVDEAMHRVAAVDVAEVGGADDETKMVTLENKVSHQ

SEQ ID NO: 106862 - protein, 725 aa, Oryza sativa
  Clone ID: PAT_MRT4530_11269C.1.pep
MEREDSDNEQAEDDASFDEEGDVMATDWANEDFSGLAISEGDHVPWEYKENEVIEGARYAHKDEMKEAVKHWVVSLQREFRVVKSTNYVYEVRCMKEDCLWRVHAYKGKWNDYWKVSIVTEHQCYLQGVEKYHRNITSTFVASEMYSSVVGNIGFEPKSIISHIENKFKYTISYAKAWRAKQKIIEIRWNIFDSTHGHAVDCRLVHYARSIADAQPQDMPQWSWGSAMLAATYRALCEACTKTDAGAIFAGCPMLLQLWAAERFAIGRPVVDSEPYGVGRNAQWPEDGPTMGTYWCRRGRRYTHVQRVMRQFGLRQVFPGNVEPTVLPADISLTRRGQLAGALWAPRVQQYVDDWVLATEEVINELFPHTEENYRDYLRWYLPRTRARVTFTPDTPEPHVAAVTDAYPTHRDRDYFVGADASRDISADITAVQVRLNRGLHLTDVEQRVTFDRMQEKMRAVMRVFSCCSAVDVVPPAGPVQPRPRAPTVGAGPRPTAPVSHGPRLPSSAPSVGAVRPTAPVSHGSAQPRGPRLPSSAFAGTTGASASSAGAFASASGAFATSSVGFPAGIFGTGASSSHAGRSGPTSQFYDDDLHGAHDHDILGSSQLGGAPEAHTHEQPEVTPVQTYLPMCNFIEWVDMENPQNDGTRAYPRSETRSDYLRRKDEHERRIAAEALEWQGNPTMCGFTRWIDNVTPSYHGQKITESETQVEYQRLKDHENAMHID

SEQ ID NO: 106863 - protein, 86 aa, Oryza sativa
  unsure (1)..(86): unsure at all Xaa locations
  Clone ID: PAT_MRT4530_1126C.1.pep
MGGGGMAAWHGMAVRPTTIACALRRPPRXESGDGPRCAHPKRSVWQSISAGMALTLQRDECGNDMEPKAQAHRPSLTPPPSREPPH

SEQ ID NO: 106864 - protein, 119 aa, Oryza sativa
  Clone ID: PAT_MRT4530_11270C.1.pep
ILATLPIGSPVFLVSLYTIAISGGGIKPARSLGAAIIFSTGHAWYDHWIFWVGSFIGGALAAIYHQVVIRAITFKIRSYPASAILTDKISIHNNLFLMGSHVSHMPALLVISVESTFLS

SEQ ID NO: 106865 - protein, 441 aa, Oryza sativa
  Clone ID: PAT_MRT4530_11271C.1.pep
MSSKVTFQIVHGEGNIRFGPDGVDLSDFVMTSKGIDRPAERTFQSIYSWLLRGFRIDQEVYTMSVSVVVSRATEGYFWELMPMDSTDAWRRYVEMAFERSWPLVIFVSVQEKDINVSMQTEDVEGPINAGDVVGPSMQNEENQPREEQAMGMADEGERVGIIVDEMEREDSDNEEVDDDASSDEEGDVMATDWANEDFSGLVISEGDHVPWEYKENEVIEGARYAHKDEMKKAVKHWAVSLQREFRVVKSTSYVYEVRCMKEDCPWRVHAYKGKWNDYWKVSIVTEHKCYLQGVEKYHRNITSAFVASEMYSSVVGNIGFEPKSIIRHIENKFKYTISYAKAWRAKQKIIEMRYGTFEASYDNLPRLLATIAQRNNNMYYDLHTFTSVDDRTKSVPYPRTDSRTPTGTLGRRVGGTGVRGLVSSVLPLQSLCDRFFWLTNL

SEQ ID NO: 106866 - protein, 79 aa, Oryza sativa
  unsure (1)..(79): unsure at all Xaa locations
  Clone ID: PAT_MRT4530_11272C.1.pep
NIEHVLPLFFAGKAKGGHPNALRRKSYKKKHNRKLSRTDAHHRXHVLKXHTLNXSKAPNPLXVKPLAPKXRPFALXAWX

SEQ ID NO: 106867 - protein, 229 aa, Oryza sativa
  Clone ID: PAT_MRT4530_11273C.1.pep
MAPTLQNVSYLLGLPLAGAPVGPVDGVFGWKEDITARFEQRRYAHVQVRRGYPDFVFEFDRLQPSDVIWEPYTEEAVAARAPLGLSSLCTRDQAYWLTILPMVFDIFVEPHWPQRVMRQFGLRQVFPGNVQPTVPPADHSLTRRGQLAGALWAPRVQQYVDDWVLATEEVINELFPHTEENYRDYLRWYLPRTRAHVTFTPDAPEPHVAAVTDAYPTHRDRDYFVADNY

SEQ ID NO: 106868 - protein, 733 aa, Oryza sativa
  unsure (1)..(733): unsure at all Xaa locations
  Clone ID: PAT_MRT4530_11274C.1.pep
MSSKVTFQIVHGEGNIRFGPDGVDLSDFVMTSKGIDRPAERTFQSIYSWLLRGFRIDQEVYTMSVSVVVSRATEGYFWELMPMDSTDAWRRYVEMAFERSWPLVIFVSVQEKDINVSMQTEDVEGPINAGDVVGPSMQNEENQPREEQAMGMADEGERVGIIVDEMEREDSDNEEVDDDASSDEEGDVMATDWANEDFSGLVISDGDHVPWEYKENEVIEGARYAHKDEMKEAVKHWAVSLQREFRVVKSTNYVYEVRCMKEDCPWRVHAYKGKWNDYWKVSIVTEHKCYLQGVEKYHRNITSAFVASEMYSSVVGNIGFEPKSIIRHIENKFKYTISYAKAWRAKQKIIEMRYGTXEASYDNLPRLXKYRGQILTAIGCDGNNQVLPMAFAFVESENTESWYWFLERVHIAVVRMRPNVCLIHDRHAGMLRAIDYLQNGWDEKGLPAKWPDVRSRWCMRHMGANFYKQFKNKHLMELFKRLYAQNQEKKFNELWDKLDELTTKQTDEQSRRPLVEGDEPPIPLGALHDDPPTMRRRSGSSIRNFTQWIENEPKEKWSLLFDTDGSRYGIMTTNLAEVYNWVMRGVRVLPLVAIVEFILHGTQAYFRDRYKKIGPSMAAGTTGASTSSAGAFATSSAGFAAGIFGTGASSSHAGRTGPTSQFYDDDLHGADHHDVLGSSQLGGAPEAHTQEQPEVTPVQAGRVGRAVPPDRLTYSHGHIRAQGRRDRGKRPRQ

SEQ ID NO: 106869 - protein, 934 aa, Oryza sativa
  Clone ID: PAT_MRT4530_11275C.1.pep
MSSKVTFQIVHGEGNIRFGPDGVDLSDFVMTSKGIDRPAERTFQSIYSWLLRGFRIDQEVYTMSVSVVVSRATEGYFWELMPMDSTDAWRRYVEMAFERSWPLVIFVSVQEKDINVSMQTEDVEGPINAGDVVGPSMQNEENQPREEQAMGMADEGERVGIIVDEMEREDSDNEEVDDDASSDEEGDVMATDWANEDFSGLVISEGDHVPWEYKENEVIEGARYAHKDEMKEAVKHWAVSLQREFRVVKSTNYVYEVRCMKEDCPWRVHAYKGKWNDYWKVSIVTEHKCYLQGVEKYHRNITSAFVASEMYSSVVGNIGFEPKSIIRHIENKFKYTISYAKAWRAKQKIIEMRYGTFEASYDNLPRLLATIAQRNNNTYYDLHTFTSVDDRTKSVLQRAFFSLGACINAFVHCRPVLCIDGTFMTGKYRGQILTAIGCDGNNQVLPMAFAFVESENTESWYWFLERVHIAVVRMRPNVCLIHDRHAGMLRAIDYLQNGWDEKGLPAKWPDVRSRWCMRHMGANFYKQFKNKHLMELFKRLCAQNQEKKFNELWDKLDELTTKQTDEQSRRPLVEGDEPPIPLGALHDDPPTMRRRSGSSIRNFTQWIENEPKEKWSLLFDTDGSRYGIMTTNLAEVYNWVMRGVRVLPLVAIVEFILHGTQAYFRDRYKKIGPSMADNNIVFGNVVTKYMEDKIKKARRHRVVAQGTQVHRVDAKLEEVINELFPHTEENYREYLRWYLPRTRARVTFTPDAPEPHVAAVTDAYPTHRDRDYFVAADAARDISADITAVQVRLNRGPRLPSSAFAGTTGASTSSAGAFATSSGAFASSSSHGASIPRPHAGFAAGIFGTGASSSHAGRTGPTSQFYDDDLHGADHHDVLGSSQLGGAPEAHTQEQPEVTPVQAGRVGRAVPPDRLTYSHGHIRAQGRRDRANQI

SEQ ID NO: 106870 - protein, 139 aa, Oryza sativa
  unsure (1)..(139): unsure at all Xaa locations
  Clone ID: PAT_MRT4530_11276C.1.pep
SPAPVTPPSSPGPWAPPFAPPGAPAPSPSPRSGASAPRRPRLPGPFRGRVFPPPRPRRFSRAPGGGDFRCPPGSGFFPPPPPRPFAPPWGSGFLXAPPRRPMPPPIGGPIPLPNPAPFCWGVSGPPEIFPAVWLISLLF

SEQ ID NO: 106871 - protein, 1466 aa, Oryza sativa
  unsure (1)..(1466): unsure at all Xaa locations
  Clone ID: PAT_MRT4530_11277C.1.pep
MSSKVTFQIVHGEGNIRFGPDGVDLLDFVMTSKGIDRPAERTFQSIYSWLLRGFRIDQEVYTMSVSVVVSRATEEKDINVSMQTEDVEGPINAGDVVGPSMQNEENQPREEQAMGMADEGERVGIIVDEMERENSDNEEVDDDASSDEEGDVMATDWANEDFSGLVISEGDHVPWEYKENEVIEGARYAHKDEMKEAVKHWAVSLQREFRVVKSTNYVYEVRCMKEDCPWRVHAYKGKWNDYWKVSIVTEHKCYLQGVEKYHRNITSAFVASEMYSSVVGNIGFEPKSIIRHIENKFKYTISYAKAWRAKQKIIEMRYGTFEASYDNLPRLLATIAQRNNNTYYDLHTFTSVDDRTKSVLQRAFFSLGACINAFVHCRPVLCIDGTFMTGKYRGQILTAIGCDGNNQVLPMAFAFVESENTESWYWFLERVHIAVVRMRPNVCLIHDRHAGMLRAIDYLQNGWDEKGLPAKWPDVRSRWCMRHMGANFYKQFKNKHLMELFKRLCAQNQEKKFNELWDKLDELTTKQTDEQSRSPLVEGDEPPIPLGALHDDPPTMRRRSGSSIKNFTQWIENEPKEKWSLLFDTDGSRYDIMTTNLAEVYNWVMRGVRVLPLVAIVEFILHGTQAYFRDRYTENWKEAIFHTWSEEIYGFGISGSYTTLSAQVFYIPDPSKLRVKKGRRQTRRIRNDMDESEAGGRTLRCSKCDLRGHTYKKCPKNAEVPSGADASPSGQASDGMAYDTPALLNRGIDRNHRSFLSAVEGAQLGTFRPRTSREWLRVDPRHVPWLRAAGLLPLCRLVEAAADDRDPAKRWDADRSLLAALVDRWRPETHTFHLPCGEMAPTLQDVSYLLGLPLAGAAVGPVDGVFGWKEDITARFEQVMRLPHLGPTTTLPPYSTVGPSKAWLLQFTADLLHPDADDYSVRRSLEAYLLWLFGWVMFTSTHGHAVDFRLVHYARSIADAQPQDVPQWSWGSAVLAATYRALCEACTKTDAGAIIAGCPMLLQLWAAERFAIGRPVVDSAPYGVGRSAQWPEDGPTMGTYWCRRGRRYAHVQVRRGYPDFVFEFDRLQPSDVIWEPYTEEAVAARAPLGLSSLCTCDQAYWLTILPMVFDIFVEPHCPQRVMRQFGLRQVFPGNVQPTVLPADHSLTRRGQLAGALWAPRVQQYVDDWVLATEEVINELFPHTEENYRDYLRWYLPRTRARVTFTPDAPEPHVAAVTDAYPTHRDRDYFVAADAARDISADITAVQVRLNRGLHLTDVEQRVTFDRMQEKMRAVMRVFSCRSAVDVVPPVGPXFSAGIFGTGASSSHAGRTXGPTSQFYDDDLHGADXHHDVLVSSQLGGAPEAXTQEQPEVTPVQAGRVGRAVPPDRLTYSHGHIRAQGRRDRVLLYKIALAEGGKGAACKIPCPLAAHLQAAPXAQYKIALAEGGKGAACKIPCPPSPPICRRPPAQYKIALAESGKGAACKFR

SEQ ID NO: 106872 - protein, 413 aa, Oryza sativa
  Clone ID: PAT_MRT4530_11278C.1.pep
MSNKVTFQIVHGEGNIRFGPDGVDLSDFVMTSKDIDRPAERTFQSIYSWLLRGFRIDQEVYTMSVSVVVSRATEGYFWELMPMDSTDAWRRYVEMAFERSWPLVIFVSVQEKDINVSMQTEDVEGPINAGDVVGPSMQNEENQPREEQAMGMADEGERVGIIVDEMEREDSDNEEVDDDASSDEEGDVMATDWANEDFSGLVISEGDHVPWEYKENEVIEGARYAHKDEMKEAVKHWAVSLQREFRVVKSTNYVYEVRCMKEDCPWRVHAYKGKWNDYWKVSIVTEHKCYLQGVEKYHRNITSAFVASEMYSSVVGNIGFEPKSIIRHIENKFKYTISYAKAWRAKQKIIEMRTSSAFERVRRHDRRFHELRRGVRHLFGRVRQLFLSRSVDPSPTRICSRDLRYWGLFVSRR

SEQ ID NO: 106873 - protein, 1141 aa, Oryza sativa
  unsure (1)..(1141): unsure at all Xaa locations
  Clone ID: PAT_MRT4530_11279C.1.pep
MPPARGGRRGRGRGRRGGRGGAASRARGENVVDVEPIKLGDDDAKVDPQTKSPNEEITSAEVCEVETSEASPLGAPEEDEGKPGSTRNLKRLRKTITIDSAAAEEHGAESDDEEFDVLATASCQELAPCRRSKRLRCKPTRKRSKPTGKRDLGGKESEDDVFANSSSSSQDDAGKLASRRSKRLRERLTSDYFDGDXENCSAPRRGSKRLRNRLGPRNISYADDDSDTDDTYRKKIVPCRRTSKRLQEKRKAHDVSEESYTEASSCMLSTSSSSDDELLHNSIKPGRRNSGGPSCSICKIGIACSFLIKCKNSTCSRSFHTFCLDPPLQEIIGTWECSWCKSNAAPAVKVTEVLTSKKIQRLVGHRRILQEADFQYQFLVKWQSLSHHHDCWVPLEWLHVSDPLRVQSYLNKNCLPKEVYSEDQRKLEWFEVDHAIACRRKFHHEGLCDVLATFQDNQDFDGYEFLVKWKGLDYCEATWEPCCTDGVQQAVSMLVRRHKNASKRVNISQTCLDGSKIEEVHCGALYDYQLQGLQWLIDNFKTRRSVILADEMGLGKTVQVVCFLYHIIKESLTASPALILAPKSILLQWEKEFCQWASDLNVIVYQGDRDSRKCIQVHEMYSSDGKPLFDALVTSYEFVQIDKAVLQKFKWSTIVIDEAHRMKKLDCNLAACLKRYCSEFRLLLTGTPLQNNIMELFSLLHYIDPDEFSDPKADGLFSPIESGRDLTMDEKVARIHNILKPRMLRRMKSDVLTDSMPVKKWVEVPCALADSQRELYINILERNYSKLNSAIRNGRKLSLNNILMELRKCCNHPVGLEVGQQATEDVFLSLIASSGKLQLLHKLLPRLKERGNRVLIFSQMTRMLDILEDFLCSLGYKYARIDGQTSLSARQESIEEYKNIDSETFIFLMSTRAGGMGVDLPGADRVIIYDPDFNPFMDLQAQSRAHRIGQTRPVVVYQLITKCSVEEKILQKSKQKLAIENMLMNSSKKPSADELQSILLHGAKTIVDRKISATSIHYDNEAIENLLKLDPSTGEKCSSDDNGYLGSIVSFAHGVEDEAPSSPKVEDLKVLKPATPKVDLGRGKRQRKVVNYADEVENEDSDDMYAPEGSSTSEFSSSSSDDETDSALQLQIVTVPDIDAD

SEQ ID NO: 106874 - protein, 152 aa, Oryza sativa
  unsure (1)..(152): unsure at all Xaa locations
  Clone ID: PAT_MRT4530_1127C.1.pep
SQRLFFPPSSQIIIRFWEDKXLGNLAFKAKFPSLYTIIRRKCSSIVSVMSSVPLNVSFRRVLFXHQNFISWHDLCASIVHIQLNRSSDCFKWNFNRNGQFMVRSMYLALINSGYIKRNKIIWKLKMPLNIKIFMWYLLKGVVLTKDNLARRN

SEQ ID NO: 106875 - protein, 402 aa, Oryza sativa
  Clone ID: PAT_MRT4530_11280C.1.pep
MSNKVTFQIVHGEGNIRFGPDGVDLSDFVMTSKGIDRPAERIFQSIYSWLLRGFRIDQEVYTMSVSVVVSRATEGYFWELMPMDSTAAWRRYVEIAFERSWPLVIFVSVQEKDINVSMQTEDVEGPINAGDVVGPSMQNEENQPREEQAMGMADEGAAFASSSSHGASIPRPHAGFVAGIFGTGASSSHAGRTGPTSQFYNDDLHGAHHHDVLGSSQLGGAPEAHTQEQPEVTPVQAGRVGRAVPPDRLTYSQGHIRAQGRRDRGNLFISSFPLAHNTRKWKRHSLSVSTGKAILLLTYRPMCNFIEWVDMENPQNNGTRAYPRNETRSDYLRRKDEHERRIAAEALEWHGNPRMGGFTRWIDNVTPSYHGQKITESETQVEYQRLKDHENAMHSDRPRRGR

SEQ ID NO: 106876 - protein, 192 aa, Oryza sativa
  Clone ID: PAT_MRT4530_11281C.1.pep
MPRAAPLLSWVLSVSNDSMNVGSKPNFFFLIYMYFLRFTMSQESFMPEKLNCDSPEREKSKVELDGWNWGRGSQSPSSVHDSWEFLGGFWRGCGEGVGGAVAQPTTVYNGRNGDNVAAAVRRARSRAPVGTAAFPSIGCTREDEIKRRNIRHGEESMERGRDRIGEDSSSSRPAMDDQISFVGFDIGLVDIF

SEQ ID NO: 106877 - protein, 779 aa, Oryza sativa
  Clone ID: PAT_MRT4530_11282C.1.pep
MSNKVTFQIVHGEGNIRFGPDGVDLSDFVMTSKGIDRPAEKTFQSIYSWLLRGFRIDQEVYKMSVSVVVSRATEGYFWELMPMDSTAAWRRYVEMAFERSWPLVIFVSVQEKDINVSMQTEDVEGPINARDVVGPSMQNEENQPREEQAMGMADEGERVGIIVDEMEREDSDNEEADDDASSDEEGDVMATDWANEDFSGLVISEGDHVPWEYKENEVIEGARYAHKDEMKEAVKHWAVSLQREFRVVKSTNYVYEVRCMKEDCPWRVHAYKGKWNDYWKVSIVTEHKCYLQGVEKYHRNITSAFVGSEMYSSVVGNIGFEPKSIIRHIENKFKYTISYAKAWRAKQKIIEMRYGTFEASYDNLPRLLATIAQRNNNTYYDLHTFTSVDDRTKSVLQRAFFSLGACINAFVHCRPVLCIDGTFMTESENTESWYWFLERVHIAVVHMRPNVCLIHDRHADHNELFPHTEENYRDYLRWYLPRTRARVTFTPDAPEPHVAAVTDAYPTHRDRDYFVGADAARDISADITAVQVRLNRGLHLTDVEQRVTFDRMQEKMRAVMRVFSCRSAVDVVPPAGPVQPRPRAPTVGAGPRPTAPVSHGPRLPSSAFAGTTGASASSAGAFATSSGAFASSSSHGASIPRPHAGFAAGIFGTGASSSHAGRTGPTSQFYDDDLHGAHHHDVLGSSQLGGAPETHTQEQPEVTPVQAGRVGRAVPPDRLTYSQGHIRAQGRRDMGQSKDGWIYSMDRQCHSIISWPEDNRVRNTSRVSTIEGPRECNAF

SEQ ID NO: 106878 - protein, 2068 aa, Oryza sativa
  Clone ID: PAT_MRT4530_11283C.1.pep
MSSKVTFQIVHGEGNIRFGPDGVDLSDFVMTSKGIDRPAERTFQSIYSWLLRGFRIDQEVYTMSVSVVVSRATEGYFWELMPMDSTDAWRRYVEMAFERSWPLVIFVSVQEKDINVSMQTEDVEGPINAGDVVGPSMQNEENQPREEQAMGMADEGERVGIIVDEMEREDSDNEEVDDDASSDEEGDVMATDWANEDFSGLVISEGDHVPWEYKENEVIEGARYAHKDEMKEAVKHWAVSLQREFRVVKSTNYVYEVRCIKEDCPWRVHAYKGKWNDYWKVSIVTEHKCYLQGVEKYHRNITSAFVASEMYSSVVGNIGFEPKSIIRHIENKFKYTISYAKAWRAKQKIIEMRYGTFEASYDNLPRLLATIAQRNNNTYYDLHTFTSVDDRTKSVLQRAFFSLGACINAFVHCRPVLCIDGTFMTGKYRGQILTAIGCDGNNQVLPMAFAFVESENTESWYWFLERVHIAVVRMRPNVCLIHDHHAGMLRAIDYLQNGWDEKGLPAKWPDVRSRWCMRHMGANFYKQFKNKHLMELFKRLCAQNQEKKFNELWDKLDELTTKQTDEQSRRPLVEGDEPPIPLGALHDDPPTMRRRSGSSIRNFTQWIENEPKEKWSLLFDTDGSRYGIMTTNLAEVYNWVMRGVRVLPLVAIVEFILHGTQAYFRDRYKKIGPSMADNNIVFGNVVTKYMEDKIKKARRHRVVAQGTQVHRYEIMCVDRSRRGIYRKQAVQECVLKADGGCTCSCMKPKLHHLPCSHVLAAAGDCGISPNVYVSNYFRKEAIFHTWSEEIYGFGISGSYTTLSAQVFYIPDPSKLRVKKGRRQTRRIRNDMDESEAGGRTLRCSKCDLRGHTYKKCPKNAEVPSGADASPSGQASDGMAYDTPALLNRGIDRNHRSFLSAVEGAQLGTFRPRTSREWLRVDPHHVPWLRAAGLLPLCRLVEAAADDRDPAKRWDADRSLLAALVDRWRPETHTFHLPCGEMAPTLQDVSYLLGLPLAGAAVGPVDGVFGWKEDITARFEQVMRLPHLGPTTTLPPYSTVGPSKAWLLQFTADLLHPDADDYSVRRSLEAYLLWLFGWVMFTSTHGHAVDFRLVHYARSIADAQPQDVPQWSWGSAVLAATYRALCEACTKTDAGAIIAGCPMLLQLWAAERFAIGRPVVDSAPYGVGRSAQWPEDGPTMGTYWCRRGRRYAHVQVRRGYPDFVFEFDRLQPSDVIWEPYIEEAVAARAPLGLSSLCTRDQAYWLTILPMVFDIFVEPHCPQRVMRQFGLRQVFPGNVQPTVLPADHSLTRRGQLAGALWAPRVQQYVDDWVLATEEVINELFPHTEENYRDYLRWYLPRTRARVTFTPDAPEPHVAAVTDAYPTHRDRDYFVAADAARDISADITAVQVRLNRGLHLTDVEQRVTFDRMQEKMRAVMRVFSCRSAVDVVPPAGPVQPRPRAPTVGAGPRPTAPISHGPRLPSSAFAGTTGASTSSAGAFATSSGAFASSSSHGASIPRPHAGFAAGIFGTGASSSHAGRTGPTSQFYDDDLHGADHHDVLGSSQLGGAPEAHTQEQPEVTPVQAGRVGRAVPPDRLTYSHGHIRAQGRRDRGHGRTHGCTELQRHSHIGDASPPLLGLLLLGDRRGSRRPGAALPARAVGCRRVRRAPRFLLLCHFDVSVRVIQSPCSALAGESPSLRGLQADTLSAASPEMEDLPMGRRNPAASLTDDLVVEILRRLPVRSVCRFKRVCRSWRNLIADREHRKKLPQTLSGFFYKSISGERCPCSAHHFTNVSGKGVPLIYPSFSFLPQCDTVVPLDCCNGLLLCRCFQPGPNNSDDEIEPFHYAVCNPATKEWVMLPDADWANGETRIACLCFDPAISSHFHVLEYVEAEYEDVTGVEIYSSETGLWTLHVSGWGDDVFLRHWANPRSVFLNGFLHSATCAAEIAVVDMEGKKWRTIAMPEPEGDTGIIHQTQGRLCAFNVDPDDIFKLSIWILEDYDTDNWILKHTVSSLRLFGGMKYRFGFDYQIIAVHPECNLIFFVYGWDKTLMAYEMDRKEVRAIRNLGHDSFEPYLPYVPLFNESLADGC

SEQ ID NO: 106879 - protein, 53 aa, Oryza sativa
  Clone ID: PAT_MRT4530_11284C.1.pep
YHLCRVVLVLDLHCQCHCSLTSHHQHHPILDPHVQYHLDISSKIGVPSICDIA

SEQ ID NO: 106880 - protein, 63 aa, Oryza sativa
  unsure (1)..(63): unsure at all Xaa locations
  Clone ID: PAT_MRT4530_11285C.1.pep
AGNEVHTNSTISPSAGFQSTHHPCATQPSQQHQQGGGHGVNGSLLTGSQPRNXVSRTLFSRSA

SEQ ID NO: 106881 - protein, 65 aa, Oryza sativa
  Clone ID: PAT_MRT4530_11286C.1.pep
RLEPLPAGEQTVELLPARVNGAVLHLVAGTALSHEHLSPVLDSACVVKMPHHARHEVGHARRVPL

SEQ ID NO: 106882 - protein, 35 aa, Oryza sativa
  unsure (1)..(35): unsure at all Xaa locations
  Clone ID: PAT_MRT4530_11287C.1.pep
WEPSSLGHHNLNKLLVVDLPSPXTSAHGSSRHFLV

SEQ ID NO: 106883 - protein, 59 aa, Oryza sativa
  Clone ID: PAT_MRT4530_11288C.1.pep
NMIIYKNHDLCIVGEHLMPLCHQPVHRSHELQPLFFSRNRGRIYYNDLLLGWLIKLLIC

SEQ ID NO: 106884 - protein, 111 aa, Oryza sativa
  Clone ID: PAT_MRT4530_11289C.1.pep
GIIIYLELIDKNATRLIKKKIGIIIYFICDLLYYPKYFKHNFSFFILAQIFGIRRVVKQCKQKVKIPYITVRREYNLLLSQSSQSLLCSIQWHPPRNQNSQESQSGTKIQQ

SEQ ID NO: 106885 - protein, 60 aa, Oryza sativa
  unsure (1)..(60): unsure at all Xaa locations
  Clone ID: PAT_MRT4530_1128C.1.pep
GVGVFFFCVLXXSYLCFVRTKVGVCFLLGPQVVRRLNRCLLGLKTPHSWFEVSRVPRPVV

SEQ ID NO: 106886 - protein, 32 aa, Oryza sativa
  unsure (1)..(32): unsure at all Xaa locations
  Clone ID: PAT_MRT4530_11290C.1.pep
APRRRVGHLVGRGSRLSHRAGKGXXRSEDQVT

SEQ ID NO: 106887 - protein, 749 aa, Oryza sativa
  Clone ID: PAT_MRT4530_11291C.1.pep
MNPATILGHIQLVHMHPDVSCGVHFVTCFQEPRDKAGRNPNRSEMICRSLLLLRSNAASKASNIVKHVAATGCLPKYSSEAPARYFSSEPSLQVDSTEENGFKGHGMLAPFTAGWQSTDLHPLVIDRSEGSYVYDINGKKYIDALAGLWSTALGGNEPRLIKAATDQLNKLPFYHSFWNRTTKPSLDLANEILSMFTAREMGKIFFTNSGSEANDSQVKLVWYYNNALGRPNKKKFIARSKSYHGSTLVSASLSGLPALHQKFDLPAPFVLHTDCPHYWRFHLPDETEEEFATRLATNLENLILKEGPETIAAFIAEPVMGAGGVIPPPKTYFEKIQAVLKKYDILLIADEVITAFGRLGTMFGCDMYDIKPDLVSIAKALSSAYMPIGAILVSPEITDVIYSQSNKLGSFAHGFTYSGHPVSCAVAIEALKIYKERNIIEHVQKIAPRFQEGIKAFSGSPIVGEIRGLGLILGTEFVDNKSPNDPFPAEWGVGSLFGAECEKRGMLIRVAGDNIMLSPPLIMTPDEVEEIICKYGDALKATEERIAELKAKRVIDDGDDKLTMFNVYRVVSSVDANNELLFELADFESFADALGGYLLLLLVATWEMEMDCLGASWRSDRYAWVVGDGGSREETQRPRGSMNTQDSKRMRSLGKVLGSRVAGRRQEVHVARGYGKKMATKGRKYDMRSGGGRGGTWRRVTVMNDISHLYKIALLLILGWMYSLHSARTGYMGLTYSILVNLDTYSNLY

SEQ ID NO: 106888 - protein, 516 aa, Oryza sativa
  unsure (1)..(516): unsure at all Xaa locations
  Clone ID: PAT_MRT4530_11292C.1.pep
MVIARGLLRSNASSSSSQAINLLKYVTSTGSLQGHTQNLCDASTRHFSSVPSPQYNSTEENGFKGHGMLAPFTAGWQSTDVHPLVIERSEGSYVYDIDGKKYLDSLAGLWCTALGGSEPRLVKAATEQLHKLPFYHSFWNRTTKPSLDLAKELLSMFTAREMGKVFFTNSGSEANDSQVKLVWYYNNALGRPDKKKFIARSKSYHGSTLISASLSGLPALHQKFDLPXAPFVLHTDCPHYWRFHLPDETEEEFATRLATNLENLILKEGPETIAAFIAEPVMGAGGVIPPPKTYFEKIQAVLKKYDILLIADEVITAFGRLGTMFGCDMYDIKPDLVSIAKALSSAYMPIGAILVSPEITDVIYSQSNKLGSFAHGFTYSGHPVSCAVAIEALKIYKERNIIEHVQKIAPRFQEGIKAFSGSPIVGEIRGLGLILGTEFVDNKSPNDPFPAEWGVGSLFGAECEKRGMLIRVAGDNIMLSPPLIMTPDEVEEIICKYGDALKATEERIAELKAKRG

SEQ ID NO: 106889 - protein, 292 aa, Oryza sativa
  unsure (1)..(292): unsure at all Xaa locations
  Clone ID: PAT_MRT4530_11293C.1.pep
MICRSLLLLRSNAASKASNIVKHVAATGCLPKYSSEAPARYFSSEPSLQVDSTEENGFKGHGMLAPFTAGWQSTDLHPLVIDRSEGSYVYDINGKKYIDALAGLWSTALGGNEPRLIKAATDQLNKLPFYHSFWNRTTKPSLDLANEILSMFTAREMGKIFFTNSGSEANDSQVKLVWYYNNALGRPNKKKFIARSKSYHGSTLVSASLSGLXALXQKFDLXAXFVLHTDXXXYWRXHLPDETEEEFXTRLXTNLENLIXKEGPETIAAFIAEPVMGAGGVIAPPKTYFEKR

SEQ ID NO: 106890 - protein, 116 aa, Oryza sativa
  Clone ID: PAT_MRT4530_11294C.1.pep
MGLPQSTAIAGQRWRKGGGLVELGLVMEVAARWRIGVEWRPGRGAALRCGNVNSTVRWWLGGGSVRPEWGTTADVSGGVVRPVNQPEVEGEPNRSCGELGPNVPGGCGIDICDAYQ

SEQ ID NO: 106891 - protein, 67 aa, Oryza sativa
  unsure (1)..(67): unsure at all Xaa locations
  Clone ID: PAT_MRT4530_11295C.1.pep
RYFTYXXSRNRXLAPPFGSKXXSPSXXTGXXXLXXGXFGWAGTXVKRYXRCPKMSSTRTEISCGTKG

SEQ ID NO: 106892 - protein, 182 aa, Oryza sativa
  unsure (1)..(182): unsure at all Xaa locations
  Clone ID: PAT_MRT4530_11296C.1.pep
LSKTDGRDRTVHDRATRVDDDDVSGDVTSGGGSGALARRRTXGTMTKEAAEDERTAAASRKRRRSPSAXRRRRCSGGLQRRRRGGRGRRRDGDHDGDLPERRRRLKRWRSTAGAAATTAARGYTALGRYRRRETKARVAAGRGELGDPYIGVGRRRRRPTATGDEKESRHLDQQRDTDEIAP

SEQ ID NO: 106893 - protein, 155 aa, Oryza sativa
  Clone ID: PAT_MRT4530_11297C.1.pep
MGLPQSTAIAGQRWRKGGGLVELGLVMEVAARWRIGVEWRPGRGAALRCGNVNSTVRWWLGGGSVRPEWGTTAAWEAGSSLEVGKSGNNQRSEAPATWGHGDDVSGGVVRPVNQPEVEGEPNRSCGELGPNVPGGCGIDICGHGTGRPQQRSGRR

SEQ ID NO: 106894 - protein, 264 aa, Oryza sativa
  unsure (1)..(264): unsure at all Xaa locations
  Clone ID: PAT_MRT4530_11298C.1.pep
MDSPATSVGLSPPLLSLVLRNESCYTKGKRELLRHRLGFAVNRVHGGGSRERTAEIDPXSKTDGRDRTVHDRATRVDDDDVSGDVTSGGGSGAXLAGERRHYGTNGGHQHVESDAANSPMTKEAAEDERTAAASRKRRRSPSAXRRRRCSGGLQRRRRGGRGRRRDGDHDGDLPERRRRLKRWRSTAGAAATTAARGYTALGRYRRRETKARVAAGRGELGDPYIGVGRRRRRPTATGDEKESLGLGERDESDSRSNPQVSKPN

SEQ ID NO: 106895 - protein, 87 aa, Oryza sativa
  unsure (1)..(87): unsure at all Xaa locations
  Clone ID: PAT_MRT4530_11299C.1.pep
CCKIVPFYYFHSFCQCIGWNGTPAASFTHYTAVMSKITXAAGQLLSILAHTIGXXWAHSSVNLGXVVYAALLEGVFVXRAMQYELIY

SEQ ID NO: 106896 - protein, 72 aa, Oryza sativa
  unsure (1)..(72): unsure at all Xaa locations
  Clone ID: PAT_MRT4530_1129C.1.pep
SRSXFGSFQHLMHATMHSISPCMLLHHHPHLPAVFCAPSNQFTSSTIWLPKVQLTHXCQWLAHSQLHTLYYL

SEQ ID NO: 106897 - protein, 85 aa, Oryza sativa
  Clone ID: PAT_MRT4530_112C.1.pep
YLSLFLTSEPYTVKTHYQAHRPRVAHMVTQVRPIVTSGSAYPYLSMATLTSPTAACSLQPDSASKVSSIHQTAGSLSACCAYGPA

SEQ ID NO: 106898 - protein, 146 aa, Oryza sativa
  Clone ID: PAT_MRT4530_11300C.1.pep
MARLHLVVVAMAALFAAAAVAQGPSASPTPAPKAQPPVATPPTRPPAVAPVSPPAAQPPVTTPPPVSAPAPVPAPSAAATPSPQASAPTAEPPVLSPPAPAPGSISQSPTEAPTSPPPPSAASGVSPSAAAVVAAWAAVAAVAAFY

SEQ ID NO: 106899 - protein, 189 aa, Oryza sativa
  Clone ID: PAT_MRT4530_11301C.1.pep
MASSSTSSPLPALLLLVLLAASSAAGEDVAAAGGRDKLTRIRVYMHERFAGANATALAVVPSPLGANEAFGRVAVLDDELRDGPDRASSALIGRFQGVVAGTSLPGTAPPASFQSAISLVFTAGEHAGSTLSMVGPVLGFAGAIERPLVGGTGAFRMARGYCVMTAAAAASTAVSVVFETDLFVLLHKP

SEQ ID NO: 106900 - protein, 452 aa, Oryza sativa
  Clone ID: PAT_MRT4530_11302C.1.pep
MSCSSEKAAGAVGGKAARACDSCLRRRARWYCAADDAFLCQGCDTSVHSANPLARRHERLRLRVSSPPPLTARASVEEEAAAAVGTTTTTTSKREGGVTPAWSKRKARTRRPQVKSVGQLLSRRLVVPEMAVESSDERKADEDGAHEELEGQLLYRVPVFDPSLAEFCSPPPIDDAAAASSSCFKEDAADGAVEDAKYPAAAASSPVQQLPDSFVNFEPTDAELREFAADMEALLGQGLDDSNELQDSFYMETLGLITPPVEESGRVKMELDGGVASNSRVSLPSCRAHPKPEDVESADVLDIDFNCTSPDEQKSSASNGAAADSQFFHRSLDLRLNYEAIIESWGNSPWTDGRPPHGQLDDFWPNDHHYSGLWAAGGGGHGAEVGMMTVRPRMDGPGREARVTRYREKRRTRLFSKKIRYEVRKLNAEKRPRMKGRFVKRPSAAAAPCAVT

SEQ ID NO: 106901 - protein, 160 aa, Oryza sativa
  Clone ID: PAT_MRT4530_11303C.1.pep
MKVLIVLALVACAAAVGRNRPDTHIVGGQNADANEWRWQAGWLSGGSFSCGCSIVHANWIITAGHCVGGVIGQYSVEVGSANRGAGQRITVSSVVRHPDYNVGAGFTPNDLAVVGASVPLDGSSVIAVPGGIDKGENRESQNCYITGWGRTCGSCSLPVA

SEQ ID NO: 106902 - protein, 1523 aa, Oryza sativa
  Clone ID: PAT_MRT4530_11304C.1.pep
MAFERSWPLVIFVSVQEKDINVSMQTEDVEGPIKAGDVVGPSMQNEENQPREEQAMGMADEGERVGIIVDEMEREDSDNEEADDDASSDEEGDVMATDWANEDFSGLVTSEGDHVPWEYKENEVIDGARCMKEDCPWRVHAYKGKWNDYWKVTIVTEHKCYLQGVEKYHRNITSAFVASEMYNSVVGNIGFEPKSIIRHIENKFKYTISYAKAWRAKQKIIEMRYGTFEASYDNLPRLLATIAQRNNNTYYDLHTFTSVDDRTKSVLQRAFFSLGACINAFVHCRPVLCIDGTFMTGKYRGQILTAIGCDGNNQVVPMAFAFVESENTESWYWFLERVHIAVVRMRPNVCLIHDRHAGMLRAIDYLQNGWDEKGLPAKWPDVRSRWCMRHMGANFYKQFKNKHLMELFKRLCAQNQEKKFNELWDKLDELTTKQTDEQSRRPQVEGDEPPIPLGALHDDPPTMRRRSGSSIRNFTQWIENEPKEKWSLLFDTDGSRYGIMTTNLAEVYNWVMRGVRVLPLVAIVEFILHGTQAYFRDRYKKIGPSMADNNIVFGNVVTKYMEDKIKKARRHRVVAQGTQVHRYEIMCVDRSRRGIYRKQAVQECVLKADGGCTCSCMKPKLHHLPCSHVLAAAGDCGISPNVYVSNYFRKEAIFHTWSEEIYGFGISGSYTTLSAQVFYIPDPSKLRVKKGRRQTRRIRNDMDESEAGGRTLRCSKCDLRGHTYKKCPKNAEVPSGADASPSGQASDGMAYDTPALLNRGIDRNHRSFLSAVEGAQLGTFRPRTSREWLRVDPRHVPWLRAAGLLPLCRLVEAAADDRDPAKRWDADRSLLAALVDRWRPETHTFHLPCGEMAPTLQDVSYLLGLPLAGAPVGPVDGVFGWKEDITARFEQVMRLPHLGPANTLPPYSTVGPSKAWLLQFTADLLHPDADDNSVRRSLEAYLLWLFGWVMFTSTHGYAVDFRLVHYARSIADAQPQDVPQWSWGYAVLAATYRALCEACTKTDAGAIIAGCPMLLQLWAAERFAIGRPVVDSAPYGRRYAHVQVRRGYPDFVFEFDRLQPSDVIWEPYTEEAVAARAPLGLSSLCTRDQAYWLTILPMVFDIFVEPHCPQRVMRQFGLRQVFPGNVQPTVLPADHSLTRRGQLAGALWAPRVQQYVDDWVLATEEVINELFPHTEENYRDYLRWYLPRTRARVTFTPDALEPHVAAVTDAYPTHRDRDYFVGADAARDISADITAVQVRLNRGLHLTDVEQRVTFDRMQEKMRAVMRVFSCRSAVDVVPPAGPVQPRPRTPTVGAGPRPTVPVSHAGFAAGIFGTGASSSHAGRTGPTSQFYDDDLHGAHHHDVLGSSQLGGAPEEHTQEQPEITPVQAGRVGRAVPPDRLTYSQGHIRAQGRRDRVLFIHMVLEQLMLTTTHFRRFTTYRPMCNFIEWVDMENPQNDGTRAYPRSETRSDYLRRKDEHECRIAAEALEWHGNPRMGGFTRWIDNVTPSYHGQKITESETQVEYQRLKDHENAMHSDRPRRGR

SEQ ID NO: 106903 - protein, 183 aa, Oryza sativa
  Clone ID: PAT_MRT4530_11305C.1.pep
MADVLLVTGSNFNPAKELCKTRSKFLNNSGSRVESGDSCGSLMRIYRQQGLARADTSGPHHWVDPVAASPSLASYGEGYSTSPADGPWLHGVKAAMTTVWGWAQPTTKILGFCCGQTSGGRREAPIKGTSPIPEVASYYPAPSGLRSPRMALEGTGVSESLAVSGAPDEASVASSGSGARGSL

SEQ ID NO: 106904 - protein, 329 aa, Oryza sativa
  Clone ID: PAT_MRT4530_11306C.1.pep
MGTMTLPPGFRFHPTDDELVGYYLKRKVDSLKIELEVIPVIDLYKFEPWELPEKSFLPKRDLEWFFFCPRDRKYPNGSRTNRATSTGYWKATGKDRKIACAGEVFGLRKTLVFYKGRAPGGERTDWVMHEYRLCQDLAHGVSNFIGAYALCRVIKRHEAGLHGEPPAAKAKGMISKVSSSSSLVTVEHQLSSRGNASPSFTPTNNGSPLVDEMFVGGGGGDPFQLLPSCVPYHGGDACGFDLPPLCMPQTQDPFFSDAGFTQAAPPLYGDVMGSVSEHELKWDTLGGYSGGGGGELWNAAAAPLLCRQASDGDDLTAWFTAADDNMSVF

SEQ ID NO: 106905 - protein, 227 aa, Oryza sativa
  unsure (1)..(227): unsure at all Xaa locations
  Clone ID: PAT_MRT4530_11307C.1.pep
VCLLLFLHLSKHVLELRHVLSHGLHVDRSKGLMTYRQHVQNVFNWKQHXNVPEVTSFLGLADYYHRFIKNFSKITRPLTQLFKREHKFEWSEICELSLHELRKRLKAALVLVMPDIHESFHIYCDASRHGLDFILMQEGKVVAYASRXNYPTHDLELAAVVHALKIWHHYLIGNXCEIFIDHKSLKYFFTQLDLNLRQRRXLELIKDYNLGIHYHPEKANVVADALS

SEQ ID NO: 106906 - protein, 1353 aa, Oryza sativa
  Clone ID: PAT_MRT4530_11308C.1.pep
MSSKVTFQIVHGEGNIRFGPDGVDLSDFVMTSKGIDRPAERTFQSIYSWLLRGFRIDQEVYTMSVSVVVSRATEGYFWELMPMDSTDAWRRYVEMAFERSWPLVIFVSVQEKDINVSMQTEDVEGPINAGDVGPSMQNEENQPREEQAMGMADEGERVGIIVDEMEREDSDNEEVDDDASSDEEGDVMATDWANEDFSGLVISEGDHVPWEYKENEVIEGARYAHKDEMKEAVKHWAVSLQREFRVVKSTNYVYEVRCMKEDCPWRVHAYKGKWNDYWKVSIVTEHKCYLQGVEKYHRNITSAFVASEMYSSVVGNIGFEPKSIIRHIENKFKYTISYAKAWRAKQKIIEMRYGTFEASYDNLPRLLATIAQRNNNTYYDLHTFTSVDDRTKSVLQRAFFSLGACINAFVHCRPVLCIDGTFMTGKYRGQILTAIGCDGNNQVLPMAFAFVESENTESWYWFLERVHIAVVRMRPNVCLIHDRHAGMLRAIDYLQNGWDEKGLPTKWPDVRSRWCMRHMGANFYKQFKNKHLMELFKRLCAQNQEKKFNELWDKLDELITKQTDEQSRSPLVEGDEPPIPLGALHDDPPTMRRRSGSSIRNFTQWIENEPKEKWSLLFDTDGSRYGIMTTNLAEVYNWVMRGVRVLPLVAIVEFILHGTQAYFRDRYKKIGPSMADDNIVFGNVVTKYMEDKEDITARFEQVMRLPHLGPTTTLPPYSTVGPSKAWLLQFTADLLHPDADDYSVRRSLEAYLLWLFGWVMFTSTHGHAVDFRLVHYARSIADAQPQDVPQWSWGSAVLAATYRALCEACTKTDAGAIIAGCPMLLQLWAAERFAIGRPVVDSAPYGVGRSAQWPEDGPTMGTYWCRRGRRYAHVQVRRGYPDFVFEFDRLQPSDVIWEPYTEEAVAARAPLGLSSLCTRDQAYWLTILPMVFDIFVEPHCPQRVMRQFGLRQVFPGNVQPTVLPADHSLTRRGQLAGALWAPRVQQYVDDWVLATEEVINELFPHTEENYRDYLRWYLPRTRARVTFTPDAPEPHVAAVTDAYPTHRDRDYFVAADAARDISADITAVQVRLNRGLHLTDVEQRVTFDRMQEKMRAVMRVFSCRSAVDVVPPAGPVQPRPRAPTVGAGPRPTAPISHGPRLPSSAFAGTTGASTSSAGAFATSSGAFASSSSHGASIPRPHAGFAAGIFGTGASSSHAGRTGPTSQFYDDDLHGADHHDVLGSSQLGGAPEAHTQEQPEVTPVQAGRVGRAVPPDRLTYSHGHIRAQGRRDREHSTKSPLRRAARGPPAKFHAPSPPICRRPPAQYKIALAEGGKGAACKIPCPPSPPICRRPPAQYKIALAEGGKGAACKFR

SEQ ID NO: 106907 - protein, 1321 aa, Oryza sativa
  Clone ID: PAT_MRT4530_11309C.1.pep
METTSTGSSRQRSSVATIDLDALDCTICYNPLQPPVFQAAEKVKLIGRESLMTTAEEDGDGGGLETWSEGDFALGYLSCRSSCHGKLLDTSRCHMCSRDGGYRRCVAVDHILYAITVPCPNAAHGCAARTPYHDSHGHAAGCPHAPCFCPEPGCGFAAGATAALLAHFTGTHGWPATVMWRRRAAVGVPLQEGKRVLSLLDDDGRGSHLFLLNVAQAGEAGLVGTVLAVEAAAHGHGDAPRFECKVSFDRRGTGWRQSSTFGVRSTNLSGGLPADGFAFVAPNPPPAAASVTITLFDISSGEPGSALRPVLPRSRRSRTRLSATTTAAAAKVSIVTEHKCYLQGVEKYHRNITSAFVASEMYSSVVGNIGFEPKSIIRHIENKFKYTISYAKAWRAKQKMIEMRYGTFEASYDNLPRLLATIAQRNNNTYYDVHTFTSVDDRTKSVLQRAFFSLGACINAFVHCRPVLCIDGTFLTGKYRGQILTAIGCDGNNQVLPMAFAFVESENTESWYWFLERVHIAVVRMRPNVCLIHDRHAGMLRAIDYLKNGWDEKGVPAKWPDVRSRWCMRHMGANFYKQFKNKHLMELFKRLCAQNQEKKFNELWDKLDELTTKQTDEQSRRPQVEGDEPPIPLGALHDDPPTMRRRSGSSIRNFTQWIKNEPKEKWSLLFDTDGSRYGIMTTNLAEVYNWVMSRRDPSKLRVKKGRRQIRRIRNDIDESEAGGRTLRCSMAYDTPALLNRGIDRNHRSFLSAVEGAQLGTFRPRTSREWLRVDPRHVPWLRAAGLLPLCRLVEAAADDRDPAKRWDADRSLLAALVDRWRPETHTFHLPCGEMAPTLQDVSYLLGLPLAGAPVGPVDGVFGWKEDITTRFEQVMRLPHLGLANTLPPYSTIGPSKAWLLQFTADLLHPDADDYSVRRSLEAYLLWLFGWVMFTSTHGHTVDCRLVHYARSIADAQPQDVPQWSWGSAVLAATYRDYLRWYLPRTHARVTFTPDAPEPHVAAVTDAYPTHRDRDYFVGADAARDIGADITAVQVRLNRGLHLTNVEQRVTFDRMQEKMRAVMRVFSCRSAVDVIPPAGPVQPRPRASTVGAGPRPTAPVSHGPHLPSSAPSFGAVRPTAPVSHGTVQPRGPRLPLSAFAATTGASASSARAFASTSGTFATSSGAFASSSSHGASIPRPHEFAAGIFGTGASSSHAGRTGPTSQFYDDDLHGAHHHDTYRPMCNFIDWVDMENPQNDGTRAYPRSETRSDYLRRKDEHERRIAAEALEWQGNPRMCGFTRWIDNVTPSYQGQKITELETQVEYQRLKDHENAMHSDRPRRGR

SEQ ID NO: 106908 - protein, 281 aa, Oryza sativa
  Clone ID: PAT_MRT4530_1130C.1.pep
RRLPPPPSSSSSSPTTSPPPPPRSSSSSTPPPPPPASAGASTSRNWTPFRLPRCSRSRSRCRCRRRARTTTRSRSGCRRPPSTSSRASSTRSSPTLRSRPRRSSRSRSRASPRGCPTRRSRRSSGCPHRRRAPPRAASAACSSRTSDSGSRSPPSRAAPPRPPLSRPAAARSPARASTARTGPSPRSSWPAPPPASSPSPPGSAATAPISRCSSSRPCTRSWSRGRCSTTASTSPVTATGTLFSPGSWCRSGGQRCPARRRRSSTPRTTQRAARRGARSGA

SEQ ID NO: 106909 - protein, 270 aa, Oryza sativa
  Clone ID: PAT_MRT4530_11310C.1.pep
TGYHVNACSYEHYINTPSVASRSSDTPKSKVSEWSSSCFHNHTDNQIDTQMHQPSSDGVGGVLEALQRAKMSLREKLSKPSPPSLEMLALPAPEYHYATDDSPVRDTELSLCMSTFPSQEILALPEPAEYRSRIIPRDDVKVPVGLAGLFRLPTDSFAQNELCSADGYRSRFSLTATSRENLSNHFRANLSLSRYGSEFSPDPCFSARNSMLLSTPTFGGCSNPVSDFRVGDAYFPSEVPRSSNRRGMPSGDQGMLFHFAGDYCSNKWTL

SEQ ID NO: 106910 - protein, 355 aa, Oryza sativa
  unsure (1)..(355): unsure at all Xaa locations
  Clone ID: PAT_MRT4530_11311C.1.pep
MSVSVVVSRAIEGYFWELMPMDSTAAWRRYVEMAFERSWPLVIFVSVQEKDTNVSMQTEDVEVPSNAGDVVGPSMQNEKNQPREEQAMGMADEGERVGIIVDEMEREDSDNEQAEDDASSDEEGDVMATDWANEDFSGLVISEGDHVPWEYKENEVIEGARYAHKDEMKEAVKHWAVSLQREFRVVKSTNYVYEVRCMKEDCPWRVHAYKGKWNDYWKVSIVTEHKCYLQGVEKYHRNITSAFVASEMYSSVVGNIGFEPKSIIRHIENKFKYTISYAKAWRAKQKIIEXDRTKSVLQRAFFSLGACINAFVHCRPVLCIDGTFMTERVHIAVTETTSWRLMRRGISVPISPQSR

SEQ ID NO: 106911 - protein, 1245 aa, Oryza sativa
  Clone ID: PAT_MRT4530_11312C.1.pep
MAFEWSWPLVIFVSVQEKDTNVSMQTKYVEGPSNAGDVVGPSMQNEENQPREEQAMGMADEGERVGIIVDEMEREDSDNEQAEDDASSDEEGDVMATDWANEDFSGLVISEGDHVPWEYKENEVIEGARYAHKDEIEEAVKHWAVSLQREFRVVKSTNYVYEVRCMKEDCPWRVHAYKGKWNDYWKVSIVTEHQCYLQGVEKYHRNITLAFVVSEMYSSVVSNFGFEPKSIISYIENKFKYTISYAKAWRAKQKIIEMRYGTFEASYDNLPCLLATIAQRNNNTYCDLHTFTSADDRTKSVLQGAFFSLGACINAFVHCRPVLCIDGTFLTGKYRGQILTTIGCDGNNQVLPMAFAFVESENTESWYWFLERVHIVVVRMRPNVCLIHDRHAGMLRAIDYLQNGWDEKGLPAKWPDVRSRWCMRHMGANFYKQFKNKHLMELFKRLCAQNQEKKFNELWDKLDELTTKQTDEQSRRPQVEGDEPPIPLGALHDDPPTMRRRSGSSIRNFTQWIENEPKEKWSLLFDTDGSRYGIMTTNLAEVYNWVMRGVRVLPLVAIVEFILHGTQAYFRDRYKKIGPSMADNNIVFGNVVTKYMEDKIKKARRHRVVAQGTQVHRYVELIIFMFLINLLDAGMAYDTPALFNRGIDRNHRSFLSAYEGAQLGTFRPRTSREWLRVDPRHVPWLRAAGLLPLCRIVEAVADDRDPAKRWDADRSLLAALDVSYLLGLPLAGAPVGPVDGVFGWKEDITALFKHVMRLPHIGPPNTLPPYSTVGPSKAWLLQFTADILHPDADDYLLWAAERFAIGRPVVDSAPYGVGRSAQWPEDGPTMGTYWCRHGRRYAHVQVRRGYPDFVFEFDRLQPSDVIWEPYTEEAVAARAPLGLSSLCTRDQAYWLTILPMVFDIFVEPHCPQCVMRQFGLRQVFPGNVEPTVPPADHSLTRRGQLAGALWAPRVQQYVDDWVLATEEVINELFPHTEENYRDYLRWYLPRTRARVTFTPDAPEQHVAAVTGAYPTHRGRDYFVGADAARDISTDITAVQVRLNRGPHLPSSAPSVGAVRPTAPVSHGTAQPRAGFPAGIFGTGASSSHAGRSGPTSQFYDDDLHGAHGHDILGSSQLGGAPEAHTQEQPEVTPVQAGRVGRAIPSDRLTYSQGHVRAQGRRDRDVTQTYLKWVHMENPQNDGTRAYPRSETRSDYLRRKDEHERRIAAEALEWQEDVRKCQFVQWIDTVRVTSSGGPITQPEPTI

SEQ ID NO: 106912 - protein, 232 aa, Oryza sativa
  Clone ID: PAT_MRT4530_11313C.1.pep
MDRVQLVLLGLPILLFCSDLVTLFGPEQLPTPQPDLPPHPSPDAASDAVQPDDIAADAAASAQIAEPQVDGPASGTTVELKFCASCSYRGNAVTVKKMLETSFPGIHVVLENYPPPFPKRALSKAVPFLQVGAMATLMAGDQIFPRFGMVPPPWYYSLRANRFGTMATIWLFGNFAQSFLQSSGAFEVYCNGQLVFSKLSEQRFPSEFELRELIGNRLPDSQFGKNLEKVWS

SEQ ID NO: 106913 - protein, 111 aa, Oryza sativa
  unsure (1)..(111): unsure at all Xaa locations
  Clone ID: PAT_MRT4530_11314C.1.pep
MLYIDTVYLCVHGCFLYALRKFIVXTKTESTDGRSPTRTELGLYCIMWGLISPSSTWRSTDPRYKRDPPGGPKASNLIANTTTTAYKVGAYRSQVAGXSSRTNSTTVSSVS

SEQ ID NO: 106914 - protein, 76 aa, Oryza sativa
  Clone ID: PAT_MRT4530_11315C.1.pep
MDIELVQMCRVTKDIQEIQHVKIAINLLFLIKTYVSFFCGAFISILLVMGESIHFFLEISELNAFYGQCHISATIM

SEQ ID NO: 106915 - protein, 656 aa, Oryza sativa
  unsure (1)..(656): unsure at all Xaa locations
  Clone ID: PAT_MRT4530_11316C.1.pep
MKEAVKHWAVSLQREFRVVKSTNYVYEVRCMKEDCPWRVHAYKGKWNDYWKVSIVTEHKCYLQGVEKYHRNITSAFVASEMYSSVVGNIGFEPKSIIRHIENKFKYTISYAKAWRAKQKIIEMRWNFYXQNGWDXKGLPVKWPDVRSRWCMRHMXNQEKKFNELWDKLDELTTKQTDEQSRRPQVEGDEPPIPLGALHDDPPTMRRRSGSAIRNFSQWIENEPKEKWALLFDTDGSRYGIMTTNLAEVYNWVMRGVRVLPLVAIVEFILHGTQAYFRDRYKKIGPSMADNNIVFGNVVTKYMEDKIKKARRHRVVAQGTQVHRYEIMCVDRSRRGIYRKQAVQECVLKADGGCTYSCMKPKLHYLPCSHVLAAAGDCGISPNVYVSNYFRKEAIFHTWSEEIYGFGISGSYTTLSAQVFYIPDPSKFRVKKGRRQTRRIRNDMDESEAGGRTLRCSKCDLRGHTYKTCPKNAEVPSGADASPSGQASDGEDACGHARLLLSQRRGRRTSSWSAGFAAGIFGTGASSSHAGRTGPTSQFYDDDLHGADHQDVLGSSQLGGAPEAHTQEQPEVTPVQAGRVGRAVPPDRLTYSPGHIRAQGRRDRVLFIRMVLEQLMLTTTHFRRFTVVPYPVARTVHNSTHEKRQLELSLSTFGAAC

SEQ ID NO: 106916 - protein, 1367 aa, Oryza sativa
  Clone ID: PAT_MRT4530_11317C.1.pep
MGMADEGERVGIIVDEMEREDSDNEEADDDASSDEEGDVMATDWANEDFSGLVISEGDHVPWEYKENEVIEGARYAHKDEMKEAVKHWAVSLQREFRVVKSTNYVYEVRCMKEDCPWRVHAYKGKWNDYWKVSIVTEHKCYLQGVEKYHRNITSAFVASEMYSSVVGNIGFEPKSIIRHIENKFKYTISYAKAWRAKQKIIEMRYGTFEASYDNLSRLLATIAQRNNNTYYDLHTFTSVDDRTKSVLQRAFFSLGACINAFVHCRPVLCIDGTFMTGKYRGQILTAIGCDGNNQVLPMAFAFVESENTESWYWFLERVHIAVVRMRPNVCLIHDRYAGMLRAIDYLQNGWDEKGLPAKWPDVRSRWCMRHMGANFYKQFKNKHLMELFKRLCAQNQEKKFNELWDKLDELTTKQTDEQSRRPQVEGDEPPIPLGALHDDPPTMRRRLGPSIRNFTQWIENEPKEKWSLLFDTDGSRYGIMTTNLAEVYNWVMRGVRVLPLVAIIEFILHGTQAYFRDRYKKIGPSMADNNIVFGNIVTKYMEDKIKKARRHRVVAQGTQVHRKEAVFHTWSEEIYGFGISGSYTTLSAQVFYIPDPSKLRVKKGRRQTRRIRNDMDESEAGGRTLRCSKCDLRGHTYKKCPKNAEVPSGADASPSGQASDGIAYDTPALFNRGIDRNHRSFLSAVEGAQLGTFRPRTSREWLRVDPRHVPWLRAAGLLPLCRLVEAAADDRDPAKRWDADRSLLAALVDRWRPETHTFHLPCGEMAPTLQDVSYLLGLPLAGAPVGPVDGVFGWKEDITARFEQVMRLPHLGPANTLPPYSTVGPSKAWLLQFTADLLHPDADDYSVRRSLEAYLLWLFGWVMFTSTHGHVVDFRLVHYARSIADAQPQDVPQWSWGSAVLAATYRALSERFAIGRPVVDSAPYGVGRSAQWPEDGPTMGTYWCRRGRRYAHVQVRRGYPDFVFEFDRLQPSDVIWEPYTAEAVAARAPLGLSSLCTRDQAYWLTILPMVFDIFVEPHCPQRVMRQFGLRQVFPGNVQPTVLPADHSLTRRGQLAGALWAPRVQQYVDDWVLATEELPRTCARVTFTPDAPEPHVAAVTDAYPTHRDRDYFVGADAARDISADITVVQVRLNRGLHLTDVEQRVTFDRMQEKMHAVMRVFSCRSAVDVVPPAGPRLPSSAFAGTTGASTSSAGAFATSSGVFASSSSHGASIPRPHAGFAAGIFGTGASSSHAGRTGPTSQFYDDDLHGAHHHDVLGSSQLGGAPEAHTQEQPEVTPVQAGRVGRAVPPDRLTYSQGHIRAQGRRDRGNLFISSFPLAHNTRKWKRHSLSVSTGEAILLLTYRPMCNYIEWGRYGEPTKRRNTCLPT

SEQ ID NO: 106917 - protein, 1509 aa, Oryza sativa
  Clone ID: PAT_MRT4530_11318C.1.pep
MSSKVTFQIVHGEGNIRFGPDGVDLSDFVMTSKGIDRPAERTFQSIYSWLLRGFRIDQEVYTMSVSVVVSRATEGYFWELMPMDSTDAWRRYVEMAFERSWPLVIFVSVQEKDINVSMQTEDVEGPINARDVVGPSMQNEENQRREEQAMGMADEGERVGIIVDEMEREDSDNEEVDDDASSDEEGDVMATDWANEDFSGLVISEGDHVPWEYKENEVIEGARYAHKDEMKETVKHWAVSLQREFRVVKSTNYVYEVRCMKEDCPWRVHAYKGKWNDYWKVSIVTEHKCYLQGVEKYHRNITSAFVASEMYSSVVGNIVFEPKSIIRHIENKFKYTISYAKAWRAKQKIIEMRYGTFEASYDNLPRLLATIAQRNNDTYYDLHTFTSVDDRTKSKYRGQILTAIGCDGNNQVLPMAFAFVESENTESWYWFLERVHIAVLWDKLDELTTKQTDEQSRRPLVECDEPPIPLGALHDDPPTMRRRSGSSIRNFTQWIENEPKEKWSLLFDTDGSRYGIMTTNLVEVYNWVMRGVRVLPLVAIVEFILHGTQAYFRDRYKKIGPSMADNNIVFGNIVTKYMEDKIKKARRHRVVAQGTQVHRYEIMCVDRSRRGIYRKQAVQECVLKADGGCTCSCMKPKLHHLPCSHVLAAAGDCGISPNVYVSNYFRKEAIFHTWSEEIYGFGISGSYTTLSAQVFYIPDPSKLRVKKGRRQTRRIRNDMDESEAGGRTLRCSKCDLRGHTYKKCPKNAEVPSGADASPSGQASDGMAYDTPALLNRGIDRNHRSFLSAVEGAQLGTFRPRTSREWLRVDPRHVPWLRAAGLLPLCRLVEAAADDRDPAKRWDADRSLLAALDVSYLLGLPLAGAPVGPVDGVFGWKEDITARFEQVMRLPHLGPTNTLPPYSTVGPSKAWLLQFTADLLHPDADDYSVRRSLEAYLLWLFGWVMFTSTHGHAVDFRLVHYARSIADAQPQDVPQWSWGSAVLAATYRALCEACTKTDAGAIIAGCPMLLQLWAAERFAIGRPVVDSAPYGVGRSAQWPEDGPTMGTYWCRRGRRYAHVQVRRGYPDFVFEFDRLQPSDVIWEPYTEEAVAARAPLGLSSLCTRDQAYWLTILPMVFDIFVEPHCPQRVMRQFGLRQVFPGNVQPTVLPADHSLTRRGQLAGALWAPRVQQYVDDWVLATEEVINELFPHTEENYRDYLRWYLPRTRARVTFTPDAPEPHVAAVTDAYPTHRDRDYFVAADDARDISADITAVQVRLNRGLHLTDVEQRVTFDRMQEKMRVVMRIFSCRSAVDVVPPAGPVQPRPRAPTVGAGPRPTAPVSHGPRLPSSAFAGTTGASASSAGAFATSSGAFASSSSHGASIPRPHAGFAAGIFGTRASSSHAGRTGPTSQFYDDDLHGAHHHDVLGSSQLGGAPEAHTQEQPEVTPVQAGRVGRAVPPDRLTYSQGHIRAQGRRDRVLFIHMVLEQLMLTTTHFRRFTVVSDPVARTVHNNTHEKRQLELSLSTFGAAC

SEQ ID NO: 106918 - protein, 49 aa, Oryza sativa
  Clone ID: PAT_MRT4530_11319C.1.pep
MEEWRGTRPAGLERPQWRSTAAPPEGHDNVGTDYNGNEVIDLDKHDRNT

SEQ ID NO: 106919 - protein, 125 aa, Oryza sativa
  Clone ID: PAT_MRT4530_1131C.1.pep
AAIAEQANQPTVLQMFGGLSHLDSTFSEGVRPRNICPSVLYYDMRFSTMSYMTQGLVNGGINVPMMSHSPIVANAPTEKGGKHFMIDILMGGVSAVVSETAAAPIERVKLLIQNQDEMIKAEMLS

SEQ ID NO: 106920 - protein, 1512 aa, Oryza sativa
  Clone ID: PAT_MRT4530_11320C.1.pep
MSSKVTFQIVHGEENIRFGPDGVDLSDFVMTSKGIDRPAERTFQSIYSWLLRGFRIDQEVYTMSVSVVVSRAIEGYFWELMPMDSTAAWRRYVEMAFERSWPLVIFVSVPEKDTNVSMQTEDVEGPSNAGDVVGPSMQNEENQPREEQAMGMADEGERVGIIVDEMEREDSYNEQAEDDASSDEEEGDHVPWEYKEYEVIEGARYAHKDEMKKAVKHWQVSLQREFRVVKSTNYVYEVRCMKEDCPWRVHAYKGKWNDYWKVSIVTEHKCYLQGVEKYHRNITSAFVASEMYSSVVGKYRGQILTAIGCDGNNQVLPMAFAFVESENTESWYWFLERVHIAVVRMRPNVCLIHDRHAGMLRAIDYLQNGWDEKGLPAKWPDVRSRWCMRHMGANFYKQFKNKHLMELFKRLCAQNQEKKFNELWDKLDELTTKQTDEQSRRPQVEGDEPPIPLGALHDDPPTMRRRSGSAIRNFSQWIENEPKEKWALLFDTDGSRYGIMTTNLAEVYNWVMRGVRVLPLVAIVEFILHGTQAYFRDRYKKIGPSMADNNIVFGNVVTKYMEDKIKKARRHRVVAQGTQVHRYEIMCVDRSRRGIYRKQAVQECVLKADGGCTCSCMKPKLHHLPCSHVLAAAGDCGISPNVYVSNYFRKEAIFHTWSEEIYGFGISGSYTTLSAQVFYIPDPSKFRVKKGRRQTRRIRNDMDESEAGGRTLRCSKCDLRGHTYKTCPKNAEVPSGADASPSGQASDGMAYDTPALLNRGIDRNHRSFLSAVEGAQLGTFRPRTSREWLRVDPRHVPWLRAAGLLPLCRLVEAAADDRDPAKRWDADRSLLAALVDRWRPETHTFHLPCGEMAPTLQDVSYLLGLPLAGAPVGPVDGVFGWKEDITARFEQVMRLPHLGPTTTLPPYSTVGPSKAWLLQFTADLLHPDADDYSVRRSLEAYLLWLFGWVMFTSTHGHAVDFRLVHYARSIADAQPQDVPQWSWGSAVLAATYRALCEACTKTDAGAIIAGCPMLLQLWAAERFAIGRPVVDSAPYGVGRSAQWPEDGPTMGTYWCRRGRRYAHVQAYWLTILPMVFDIFVEPHWPQRVMRQFGLRQVFPGNVQPTVPPADHSLTRRGQLAGALWAPRVQQYVDDWVLATEEVINELFPHTEENYRDYLRWYLPRTRARVTFTPDAPEPHVAAVTDAYPTHRDRDYFVAADAARDISADITAVQVRLNRGLHLTDVEQRSTFDRMQEKMRAVMRVFSCRSAVDVVPPAGPVHPRPRGPTVGAGPRLSSSAPSFGAVRPTAPVSHGPRMPSSAFAGTTGASASSAGAFATSSGAFASSSSHGASIPRPHAGFAAGIFGTGASSSHAGRTGPTSQFYDDDLHGADHQDVLGSSQLGGAPEAHTQEQPEVTPVQAGRVGRAVPPDRLTYSQGHIRAQGRRDREHSTKSPSPRAARGPPAKFHAPSPPICRRAPAQCKIALAEGGKGAACKFPCPPSPESERPSATSFSPPSGRAIFKNRSPRGRRK

SEQ ID NO: 106921 - protein, 139 aa, Oryza sativa
  Clone ID: PAT_MRT4530_11321C.1.pep
MKSKSSRKAADEDEAKSKKLRSSRGKQRPKQRRRGRCSSTSSRSESPPRKRSKKLKVSDKKSTKNKGRRRHHSLSPSPSPSSSSVSYSTRSSSGGGGGASERSVSPPRRSRSRDVRKKKKERGRDSKRVRRSRRSTSYS

SEQ ID NO: 106922 - protein, 1556 aa, Oryza sativa
  unsure (1)..(1556): unsure at all Xaa locations
  Clone ID: PAT_MRT4530_11322C.1.pep
MSNKVTFQIVHGEGNIRFGPDGVDLSDFVMTSKGIDRPAERTLQSIYSWLLRGFRIDQEVYTMSVSVVVSRATEGYFWELMPMDITAAWRRYVEMAFERSWPLVIFVSVQEKDINVSMQTEDVEGPINAGDVVGPSMQNEKNQPREEQAMGMADEGERVGIIVDEMEREDSDNEEADDDASSDEEGDVMATDWANEDFSGLVISEGDHVPWEYKENEVIDGARYAHKDEMKEAVKHWAVSLQREFRVVKSTNYVYEVRCMKEDCPWRVHAYKGKCNDYWKVSIVTEHKCYLQGVEKYHRNITSAFVASEMYSSVVGNIGFEPKSIIRHIENKFKYTISYAKAWRAKQKIIEMRYGTFEASYDNLPRLLATIAQRNNNTYYDLHTFTSVDDRTKSVLQRAFFSLDACINAFVHCRPVLCIDGTFMTGKYRGQILTAIGCDGNNQVLPMAFAFVESENTESWYWFLERVHITVVRMRPNVCLIHDRHAGMLRAIDYLQNGWDEKGLPAKWPDVRSRWCMRHMGANFYKQFKNKHLMELFKRLCAENQEKKFNELWDKLDELTTKQTDEQSRRPQVEGDEPPIPLGALHDDPPTMRRRSGSSIKNFTQWIENEPKEKWSLLFDTDGSRYGIMTTNLAEVYNWVMRGVRVLPLVAIVEFILHGTQAYFRDRYKKIGPSMADNNIVFGNIVTKYMEDKIKKARRHRVVAQGTQVHRYEIMCVDRSRRGIYRKQAVQECVLKADGGCTCSCMKPKLHHLPCSHVLAAAGDCGISPNVYVSNYFRKEAIFHTWSEEIYGFGISGSYTTLSAQVFYIPDPSKLRVKKGRRQTRRIRNDMDESEAGGRTLRCSKCDLRGHTYKKCPKNAEVPSGADASPSGQASDGMTYDTPALLNRGIDRNHRSFLSAVEGAQLGTFRPRTSREWLRVDPRHVPWLRAAGLLPLCRLVEAAADDRDPAKRWDADRSLLAALVDRWRPETHMFHLPCGEMAPTLQDVSYLLGLPLAGAPVGPVDGVFGWKEDITARFEQVMRLPHLGPANTLPPYSTVGPSKAWLLQFTADLLHPDADDNSVRRSLEAYLLWLFGWVMFTSTHGHAVDFRLVHYARSIADAQPQDVPQWSWGSAVLAATYRALCEACTKTDAGAIIAGCPMLLQLWAAERFAIGRPVVDSAPYGVGRSAQWPEDGPTMGTYWCRRGRRYAHVQVRRGYPDFVFEFDRLQPSDVIWEPYTEEAVAARAPLGLSSLCTRDQAYWLTILLMVFDIFVEPYCPQRVMRQFGLRQVFPGNVQPTVLPADHSLTRRGQLAGALWAPRVQQYVDDWVLATEEVINELFPHTEENYRDYLCWYLSRTRARVTFTPDAPEPHVAAVTDAYPTHRDRDYFVGADAARDISADITAVQVRLNRAPWTSYLQLVRYNHGLARLPSEQDLDLRYLFRMDLVCLRAPLASEQCDLQHRTSSAFERVRRHDRRFRELRRGVRHLFGRVRQLFLSRSVDPSPTRRDLRYWGLFISSXLGGAPEAHTQEQPEVTPVQAGRVGRAVPPDRLTYSQGHIRAQGRRDREHSAKSP

SEQ ID NO: 106923 - protein, 45 aa, Oryza sativa
  Clone ID: PAT_MRT4530_11323C.1.pep
PSTKGNKSWSSTAVAAVLEIVDPPGCRNSARGAAPQMCTILRNFQ

SEQ ID NO: 106924 - protein, 131 aa, Oryza sativa
  Clone ID: PAT_MRT4530_11324C.1.pep
MTWSLIGGLTSGVNHVAGNMFESVPKGDAIFLKSMLLRNDEECIKILKNCHYALSDNGKVIVVDIVLPETPKPVPEAQNPLRMDVMMLNNLRGGKIRTEQEYAKLAMDSGFSGSFRTTYIFANFMAIELCK

SEQ ID NO: 106925 - protein, 820 aa, Oryza sativa
  unsure (1)..(820): unsure at all Xaa locations
  Clone ID: PAT_MRT4530_11325C.1.pep
MPPLHAYLGFFLLLLLLSLHNPSCSAAANDTLAVGQVLAVGEKLVSRNGKFALGFYKPALPEGAASKYGNIASPGWYLAIWFNKIPVCTTVWVANRERPITDLELKLAQLKFSQNGSSLAIIINRATEYTVWSRQIANRTAQAKTSMNTSAILLDSGNLVIESLSDVYLWQSFDDATDLVLPGAKFGWNKVTGLHRTGISKKNLIDPGLGSYFVQLNERGFILWRRDPYIEYLTWSSVQLTNMLIPLHNSQLEMNSQTKGFLMPSYVNNDEEEYFMYHSSDELASSFVSIDMSGQLKLSIWSQVNQYWQELYAQPPDPCTPFATCGPFGICNGNSEQFCDCMESFSQKSPQDWKLKDRSAGCIRNTPLDCPSNRSSTDMFQTIARVTLPANPEKLEDATTQSKCAEACLSNCSCNAYAYKDSICSVWHSELLNVKLHDNIESLSEDTLYLRLAAKDMPASTKNKREPVIAVVTTCSIVGFGLLMLVMFFLIWRIKFNCCGVPLHHNQGNSGIIAFKYTDLSHATKNFSEKLGSGGFGSVFKGVLSDSTTIAVKRLDGLHQGEKQFRAEVSSLGLIHHINLVKLIGFCYEGDKRLLVYERMINGSLDAHLFHSNGTILDWSTRHQIAIGVARGLFYLHESCHKCIIHCDIKPENILLEASFAPKIADFGMAAFVGRDFSRVLTSFRGTKGYLAPEWLSGVAITPKVDVYSFGMVLLEIISGRRNLSEAYTSKHYHFDYFPMQAMSKLHGGSVXDLLDPKLNGDFNLEEAERICKVACWCIQENEFDRPTMGEVVHILEGLQDVEMPPTPRLFADISEKVSY

SEQ ID NO: 106926 - protein, 669 aa, Oryza sativa
  Clone ID: PAT_MRT4530_11326C.1.pep
MPPKSKAAAAAAAAAAAQPVAVEDLFTTLHRHIEAGEFPQAVKVADQVLAAAPGDEDAVRCKVVAHIKSDAIEKALAAIRAAERLPIDLSYCKAYCYYRQNKLQEALDLLKGQEETSAILQLESQIYYRLGRMNDCMNSYEKLQKFKVESMDLKINIIAALVAAGRASEVQATMKAQKVDLSSRALRDTRSFELAYNSACSLIENKKYSEAKEQLDLAKRIGKEELMVDEYGDDDIEYELAPVSAQLAYVHQLQGQTQEAMETYNNITSRNLADPSSLAVATTNLISLKGTRDAADSLRKLSRLIEKSTAPNQLQLIESLESKLSPRQKEALYSAYVLLLLHANKIDQAHEFVSGLLGMFQDSTFPVLLQAAVHVREKKVQKAEEVLSQYAEKHPENSKGVLLSLAQIAASANHFQIAADSLSKIVDIQHMPATVATLVALKERLGDSNGASSVLDSAIQWWKNSMTEDNKLEVFMREAATFKLNHGRDEEACQLYEDLVKSFGSAEALAGLVATSARTNLEKAEQYEKKLKPLPGLKGINVESLEKTSGARPFEAPKPMEQDVTDEVKKQKAKKRKRKPRYPKGFDPANPGPPPDPERWLPKRERSSYRPKRKDKRAQVRGAQGAVSRDGTSSASASSSSKANQATKAPAAAPEPPKGSNKSRKKKSR

SEQ ID NO: 106927 - protein, 170 aa, Oryza sativa
  Clone ID: PAT_MRT4530_11327C.1.pep
TRPRAEFGTREHHHSIAARPTLKLQAPRTMAATSLSPPTVAGLRLAPSPRVRSPSVAFRAAPARRRSVAARAELSPSLVISLSTGVSLFLGRFVFFNFQRENVAKQVPEQNGKTHFDAGDERAKEFAGLLRSNDPVGFNLVDVLAWGSLGHIVAYYILATCSNGYNPNFF

SEQ ID NO: 106928 - protein, 77 aa, Oryza sativa
  Clone ID: PAT_MRT4530_11328C.1.pep
RAKCGGFCWQLLNADSIPPTSPSTPPNGAAILEIGIIFSNSGRRAPSSISPSPSFEEIEPSLFIQGEAPLPRHFASH

SEQ ID NO: 106929 - protein, 228 aa, Oryza sativa
  unsure (1)..(228): unsure at all Xaa locations
  Clone ID: PAT_MRT4530_11329C.1.pep
LNTALLAKWIMKIESDDKSLCIELLLRKKYLHGKGIFQCNSDKGSQFWKGLLNIRRWMQLGSEWLLGDGSHIWFWYDIWHGTCPLKTIFPKIFEICNQQNITVSEVPTKGADYLTFRRSFGEIEVQQWQDLXEIIDEIELQNSPDILTWSLAANKQFTTKSLYEAISFRGIKDINMQRVWKCXYGPTPMKMKHFIWLAMKDRIQSAGQLKKKGWGDTKTHTKISCHMH

SEQ ID NO: 106930 - protein, 109 aa, Oryza sativa
  Clone ID: PAT_MRT4530_1132C.1.pep
MVFMAELVGPRVYSCCNCRNHVCLHDDIISKAFQGRNGRAFLFSHAMNVVVGAKEDRQLMTGLHTVADIYCNDCREVLGWKYERAYEETQKYKEGKFIFEKSKIVKENW

SEQ ID NO: 106931 - protein, 76 aa, Oryza sativa
  Clone ID: PAT_MRT4530_11330C.1.pep
FIREESYLTYWIGMVSIPYDQEMAFQTAASMRNSLEGPPILGQVDHGTEPPQFIDLFQAMVILKGGIRSGYQKSSD

SEQ ID NO: 106932 - protein, 90 aa, Oryza sativa
  unsure (1)..(90): unsure at all Xaa locations
  Clone ID: PAT_MRT4530_11331C.1.pep
TFPGCRVAHQSEFQEYLYQGALLRPLWSDDPHRIHDITQGHVGALAAGDAHWXIDDGEAPIGAVYVIHQHYCADQIAPRERGALFAFNTN

SEQ ID NO: 106933 - protein, 1034 aa, Oryza sativa
  Clone ID: PAT_MRT4530_11332C.1.pep
MDHNRATSAIAQGLSTGSYKAMHTTPNQVISDGPDDGKFTAEVHHGGFFVGQGSNRAYVDQTINWIDHCEARTWDIVCLDEFLAMLGYDMTPDFKAYWLLPGKTLEDGLRVISTRADFEVMKSVVHKVKNFIIYFDQGDTIAGVDWDDVVANPISELPKVLSPRKMSTADRKVPNKQDDSDSDGSLEDDPDFVDSDYDISDADDDLYVDNVDVGVEDLSDCKAKFRKKAKGSQLKGKEIVVRNSDGEEVSTDDEDLQLLDLDDDGEVRLKFKAFMAEDVKNPIFKVGMVFPSVEVLRRAITEYSLKARVDIKIPRNEQKRLRAHCVEGCPWNLYASFDSRSKSMMVKTYLGEHKCQKEWVLKESLRSWRWFLQTLKEDLGIDNTYPWTIMTDKQKGLIPAVQQIFPDSEHRFCVRHLYSNFQAKVIFPRSRVRQAIEEQPSSRVREASQWYVERDANRSGGVMDSGGGDGIDATLHVHEPLVQQVKLRCYDSAISAPCWHGQRQQQRRRREHVRGWSAAAATLAGCSATSVRASRAMLAWSTSTRHEPSGILCSVMGGKGALRNMDLVRLLALERCMRLRTLRVSRADGEAAHTVGGTQHSCFLKLLRLPTPPQLPQASAPSMTLWSPTSQRTRTELGRRHHGLPELLRPSSAARRCCRHHKPAGLWVAVAVLVAGTIWLFSSSLSLIGIQEKDKIVWKFTSHGEYMTTSAYKAQLLGTTTTNFNYLIWKPWAPRKCKTFVWLIIQNRVWTSDRLATRGCQMNPAQWQPASSVLEWWEATANLKEAPKKAIRTLTLLGKSYPGKRFVYKERRLIGKFPLIPEEVGLLLRAMGFDNTTRIYLAPSKLFAGDRLMITKPFEAMFPHLENHSTVGPGTGMLEENTQGLAWSAVDYMVCLLSDIFIPTYDGPSNFAHNLMGHRLYHGFQTTIAPDRKALARIFIDREEGRASGYEERVRQLMFNAHFGGPRKRIHPESFYTNSWPECFCQTEARSNADQCPPDDMDGVIESQFQSEEDIEVKFINKTDSTSQTEWLVI

SEQ ID NO: 106934 - protein, 37 aa, Oryza sativa
  Clone ID: PAT_MRT4530_11333C.1.pep
MGGHSPERIALRATVDEDSTENATHTTTASDCRTTTA

SEQ ID NO: 106935 - protein, 883 aa, Oryza sativa
  Clone ID: PAT_MRT4530_11334C.1.pep
MEGAIVSIATGALKPVLMKLATLVCNEYMISKEVHKEIETLSSELTAIHSFLLKMSEEENPDAQDHAWMMDVRELSYDIEDIIDEFMVRVDDDSANPDGFISKCKNSLAKMKTRSRIAKAIRDFKSQITKVGDRHASNDGCESMQQQPKVISIVGFGGLGKTTLAYQVYQELKGKFDCSAFLSVSRNPNMMRILRTILSEVAQRDYALTEDGYEQQLIIKISNFLSNKRYLIVIDDIWKVEIWNIIKGAFSMSSQCSKIITTTRINDVARSCCSSFSGHVYNIRPLNMVHSRHLFHRRLFNSEEKCPSHLEEVSDQILKKCDGLPLAIIAISGLLVNKPMTKDQWDHVKNSIGSALERNPSVDVMISILSLSYYDLPPHLKTCLLHLSIFPEDYLIEKDDLILRWVAEGFIHKKGSYTSFELGEMCFNELANRNLIQRCSNKDDWKVHDTILDFIISMSIKDNFVTLVASPDQTIGTNKVRRLSLQIGIEDGNSILQRRLSDLSHARSLDVFCYQPKLPSLLEFRHLRVLSFRYCKWLKSHCIANIGRLFQLRYLNLKKTGLTELPEEIGCLQSLETLNVMDNHMVQLPQCITRLGNLMHLFIGNQIQLPDGIAKMQALETLQAVDLSKHSSNIVKELGQLKNLRELNLLIYDYDACTEEHMKTIASCLLQLGTYNLRRLNIMTSIILGNIYLPDPWCPAPLKLEGLDISGSPMPRVPTWIGSLVNLKRLGLALEGVNCEDLSIIGCLPSLLQLSLRVPGYRDSLIISGCYGFSCLRDFCFIGQQPIFTAGSMPRLELLILNINASKPETVTNAALENLPCLMTVQYLLYQYNKNDHEIENAEAALKRAAYTYLNKRSKASRQDGQCSRLGPQASRPWPAMHN

SEQ ID NO: 106936 - protein, 1694 aa, Oryza sativa
  Clone ID: PAT_MRT4530_11335C.1.pep
MEREFKAKVETLSKAQHPNLVLLQGYCRIGNDRLLIYSYMENGSLDHWLHEKPDGPSRLSWQTRLQIAKGAARGTMSSKVTFQIVHGEGNIRFGPDGVDLSDFVMTSKGIDRPAERTFQSIYSWLLRGFRIDQEVYTMSVSVVVSRATEGYFWELMPMDSTDAWRRYVEMAFERSWPLVIFVSVQEKDINVSMQTEDVEGPINAGDVVGPSMQNEENQPREEQAMGMADEGERVGIIVDEMEREDSDNEQAEDDASSDEEGDVMATDWANEDFSGLVISEGDHVPWEYKENEVIEGARYAHKDEMKEAVKHWAVSLQREFRVVKSTNYVYEVRCMKEDCPWRVHAYKGKWNDYWKVSIVTEHKCYLQGVEKYHRNITSAFVASEMYSSVVGNIGFEPKSIIRHIENKFKYTISYAKAWRAKQKIIEMRYGTFEASYDNLPRLLATIAQRNNNTYYDLHTFTSVDDRTKSVLQRAFFSLGACINAFVHCRPVLCIDGTFMIGKYRGQILTAIGCDGNNQNGWDEKGLPAKWPDVRSRWCMRHMGANFYKQFKNKHLMELFKRLCAQNQEKKFNELWDKLDELTTKQTDEQSRRPLVEGDEPPIPLGALYDDPPTMRRRSGSSIRNFTQWIENEPKEKWSLLFDTDGSRYGIMTTNLAEVYNWVMRGVRVLPLVAIVEFILHGTQAYFRDRYKKIGPSMADDNIVFGNVVTKYMEDKIKKARRHRVVAQGTQVHRYEIICVDRSRRGIYRKQAVQECVLKADGGCTCSCMKPKLHHLPCSHVLAAAGDCGISPNVYVSNYFRKEAIFHTWSEEIYGFGISGSYTTLSAQVFYIPDPSKLRVKKGRRQTRRIRNDMDESEAGGRTLRCSKCDLRGHTYKKCPKNAEVPSGADASPSGQASDGMAYDTPALLNRGIDRNHRSFLSAVEGAQLGTFRPRTSREWLRVDPRHVPWLRAAGLLPLCRLVEAAADDRDPAKRWDADRSLLAALVDRWRPETHTFHLPCGEMAPTLQDVSYLLGLPLAGAAVGPVDGVFGWKEDITARFEQVMRLPHLGPTTTLPPYSTVGPSKAWLLQFTADLLHPDADDYSVRRSLEAYLLWLFGWVMFTSTHGHAVDFRLVHYARSIADAQPQDVPQWSWGSAVLAATYRALCEACTKTDAGAIIAGCPMLLQLWAAERFAIGRPVVDSAPYGVGRSAQWPEDGPTMGTYWCRRGRRYAHVQVRRGYPDFVFKFDRLQPSDVIWEPYTEEAVAARAPLGLSSLCTRDQAYWLTILPMVFDIFVEPHCPQRVMRQFGLRQVFPGNVQPTVLPADHSLTRRGQLAGALWAPRVQQYVDDWVLATEEVINELFSHTEENYRDYLRWYLPRTRARVTFTPDAPEPHVAAVTDAYPTHRDRDYFVAADAARDISADITAVQVRLNRGLHLTDVEQRVTFDRMQEKMRAVMRVFSCRSAVDVVPPAGPVQPRPRAPTVGAGPRPTAPISHGPRLPSSAFAGTTGASTSSAGAFATSSGAFASSSSHGASISRPHAGFAAGIFGTGASSSHAGRTGPTSQFYDDDLHGADHHDVLGSSQLGGAPEAHTQEQPEVTPVQAGRVGRAVLPDRLTYSHGHIRAQGRRDREHSTKSPLRRAARGPPAKFHAPSPPICRRPPAQYKIALAEGGKGAACKIPCPPSPPICRRPPAQYKIALAEGGKGAACKFR

SEQ ID NO: 106937 - protein, 94 aa, Oryza sativa
  Clone ID: PAT_MRT4530_11336C.1.pep
LLIFFLKSWNSSWYLGFLGRLATRPDRQRRTSSPAPGGARTFLFFCFTGDGLAADSRTVAERWRRRSKGRERQRRKEWSRGRLMTLGLDFGEYW

SEQ ID NO: 106938 - protein, 49 aa, Oryza sativa
  Clone ID: PAT_MRT4530_11337C.1.pep
EIQRELSLAREGDTLPDRLNTRYALIAQLMAKVATTLLEGPTTFLINKV

SEQ ID NO: 106939 - protein, 1663 aa, Oryza sativa
  Clone ID: PAT_MRT4530_11338C.1.pep
MSNKVTFQIVHGEGNIRFGPDGVDLSDFVMTSKGIDRPAEKTFQSIYSWLLRGFRIDQEVYTMSVSVVVSRATEGYFWELMPMDSTAAWRRYVEMAFERSWPLVIFVSVQEKDINVSMQTEDVEGPINAGDVVGPSMQNEENQPREEQAMGMADEGERVGIIVDEMEREDSDNEEADDDASSDEEGDVMATDWANEDFSGLVISEGDHVPWEYKENEGKWNDYWKVSIVTEHKCYLQGMEKYHRNITSAFVASEMYSSVVGNICFEPKSIIRHIENKFKYTISYAKAWRAKQKIIEMRYGTFEASYDNLPRLLATIAQRNNNTYYDLHTFTSVDDRTKSVLQRAFFSLGACINAFVHCRPVLCIDGTFMTGKYRGQILTAIGCDGNNQVLPMAFAFVESENTESWYWFLERVHIAVVRMRPNVCLIHDRHAGMLRAIDYLQNGWDEKGLPAKWHDVRSRWCMRHMGANFYKQFKNKHLMKLFKRLCVQNQEKKFNELWDKLDELTTKQTNEQSRRPQVEGDEPPIPLGALHDDPPTMRRRSGSSIRNFTQWIENEPKEKWSLLFDTDGSRYGIMTTNLAEVYNWVMRGVRVLPLVAIVEFILHGTQAYFRDRYKKIGPSMADNNIVFGNVVTKYMEDKIKKARRHRVVAQGTQVHRYEIMCVDRSRRGIYRKQAVQECVLKADGGCTCSCMKPKLHHLPCSHVLAAAGDCGISSNVYVSNYFRKEAIFHTWSEEIYGFGISGSYTTLSAQVFYIPDPSKLRVKKGRRQTRLIRNDMDESEAGGRTLRCSKCNLRGHTYKKCPKNAEVPSGADASPSGQASDGMAYDTPALLNRGIDRNHRSFLSAVEGAQLGTFRPCTSREWLRVDPRHVPWLRAAGLLPLCRLVEAAADDRDPAKRWDADRSLLAALVDRWRPETHTFHLPCGEMAPTLQDVSYLLGLPLAGAPVGPVDSVVGWKEDITARFEQVMRLPHLGPANTLPPYSTVGPSKAWLLQFTADLLHPDADDYSVRRSLKAYLLWLFGWVMFTSTHGHAVDFRLVHYARSIADAQPQDVPQWSWGSAVLAATYRALCEACTKTDARAIIAGCPMLLQLWAAERFAIGRPVVDSAPYGVGRSAQWPEDGPTMGTYWCRRGRRYAHVQVRRGYPDFVFEFDRLQPSDVIWEPYTEEAVAARAPLGLSSLCTRDQAYWLTILPMVFDIFVEPHCPQRVMRQFGLRQVFPGNVQPTVLPADHSLTRRGQLAGTLWAPRVQQYIDDWVLATEEVINELFPHTEENYRDYLRWYLPRTRARVTFTPDAPEPHVAAVTDAYPTHRDRDYFVGADAARDISADITAVQVRLNRGLHLTDVEQRVTFDRMQEKMRAVMRVFSCRSVVDVVPPAGPVQPRPRAPTVGARPRPTAPVSHGPRMPSSAFAGTIGASASSAGAFATSSGAFASSSSHGVSIPRPHAGFAAGIFGTGASSSHAGRTGPTSQFYDDDLHGAHHHDVLGSSQLGGAPEAHTQEQPEVTPVQAGRVGRAVPPDRLTYSQGHIRAQGRRDRVLFIHMVLEQLMLTTTHFRRFTTYRPMCNFIEWVDMENPQNDGTRAYPRSETRSDYLRRKDEHERRIAAEALEWHGNPRMGGFTRWIDNVTPSYHGQKITESETQVEYQRLKDHENAMHSDRPRRGR

SEQ ID NO: 106940 - protein, 1683 aa, Oryza sativa
  Clone ID: PAT_MRT4530_11339C.1.pep
MSNKVTFQIVHGEGNIRFGPDGVDLSDFVMTSKGIDRPAERTFQSIYSWLLRGFRIDQEIYTMSVSVVVSRATEGYFWELMPMDSTAAWRRYVEMAFERSWPLVIFVSVQEKDINVSMQTEDVEGPINAGDVVGPSMQNEENQPREEQAMGMADEGERVGIIVDEMEREDSDNEEADDDASSDEEGDVMATDWANEDFSGLVISEGDHVPWEYKENEVIEGARYAHKDEMKEAVKHWAVSLQREFRVVKSTNYVYEVRCMKEDCPWRVHAYKGKWNDYWKVSIVTKHKCYLQGVEKYHRNITSAFVASEMYSSVVGNIGFELKSIIRHIENKFKYTISYAKAWRAKQKIIEMRYGTFEASYDNLPRLLATIAQRNNNTYYDLHTFTSVDDRTKSVLQRAFFSLGACINAFVHCRPVLCIDGTFMTGKYRGQILTAIGCDGNSQVLPMAFAFVESENTESWYWFLERVHIAVVRMRPKVCLIHDRHAGMLRAIDYLQNGWDEKGLPAKWPDVRSRWCMRHMGANFYKQFKNKHLMELFKRLCAQNQEKKFNELWDKLDELTTKQTDEKSRRPQVEGDEPPIPLGALHDDPPTMRRRSGSSIRNFTQWIENEPKEKWSLLFDTDGSRYGIMTTNLAEVYNWVMKEAIFHTWSEEIYGFGISGSYTMLSAQVFYVPDPSKLRVKKGRRQTRRIRNDMDESEVGGRTLRCSKCDLRGHTYKKCPKNAEVPSGADASPSGHSSDGMAYDTPALLNREIDRNHRSFLSAVEGAQLGTFRPRTSREWLRVDPRHVPWLREAGLLPLCRLVEAAADDRDPAKRWDADRSLLAALVDRWRPETHTFHLPCGEMAPTLQDVSYLLGLPLAGAPVGPVDGVFGWNEDITARFEQVMRLPHLGPANTLPPYSTVGPSKAWLLQFTADLLHPDADDYSVRRSLEAYLLWLFGWVMFTSTHRHAVDFRLVHYARSIADAQPQDVPQWSWGSAVLAATYRALCEACTKTDAGAIIAGCPMLLQLWAAERFAIGRPVVDSAPYGVGRSAQWPEDGPTIGTYWCRRGRRYAHVQVRRGYPDFVFEFDRLQPSDVIWEPYTEEAVAARAPLGLSSLCTRDQAYWLTILPMVFDIFVEPHCPQRVMRQFGLRQVFPGNVQPTVLPADHSLTRRGQLAVALWAPRVQQYVDDWVLATEEVINELFPHTEENYRDYLRWYVPRTRARVTFTPDAPEPHVAAVTDAYPTHRDRDYFVAADAARDISADITAVQVRLNRGLHLTDVEQRVTFDRMQEKMRAVMRVFSCRSAVDVVPPAGPVQPRPRAPTVGAGPRPTAPVSHGPRLPSSAFAGTTGASASSAGAFATSSGAFASSSSHGASIPRPHAGFAAGIFGTGASSSHTGRTGPTSQFYDDDLHGAHHHDVLGSSQLGGAPEAHTQEQPEVTPVQAGRVGRAVPPDRLTYSQGHIRAQGRRDRVLFIHMVLEQLMLTTTHFRRFTGLCEPSGWVVMGIEDYHVIVLVGEGSFGKVYMGRRKYTRQTVAMKFILKHGKTDKDIHNLRQEIEILRKLKHENIIEMIDSFETPQEFCVVTEFAQGELFEVLEDDKCLPEEQVQAIAKQLQISLFQVKALHYLHSNRIIHRDMKPQNILIGKGSVVKLCDFGFARAMSANTVVLRSIKGTPLYMAPELVREQPYNHTADLWSLGVI

SEQ ID NO: 106941 - protein, 191 aa, Oryza sativa
  Clone ID: PAT_MRT4530_1133C.1.pep
KKGKGPFFLVYKTALLAFFPIGVLLFSPRSCCFSPVQSPESYFRGCFFSRSPHLVAPFSLPVFCFPKGFFPQIIFSGAFEPQGCRFFFVKSPFFFFFLPVGPRWYPGAILGPRFFFFFSPRVSWFLGFGIFVWDFGFFPSGGGLFLFFWLFVVPLFFPGGNVSEKKKKKKKKKKKKKKGGGGGGGGGGGGR

SEQ ID NO: 106942 - protein, 113 aa, Oryza sativa
  Clone ID: PAT_MRT4530_11340C.1.pep
MASLSSAHDVLPQIFLMTDGSVDDEHNICQTVKTELISRGSKSPRISTFGLGLYCNHYFLRMLASIGRGHYDAAFETEIFLESGDGDRCTKIKRKIRKFELPLILQSRSLNYH

SEQ ID NO: 106943 - protein, 1596 aa, Oryza sativa
  unsure (1)..(1596): unsure at all Xaa locations
  Clone ID: PAT_MRT4530_11341C.1.pep
MSSKVTFQIVHGEGNIRFGPDGVDLSDFVMTSKGIDRPAERTFQSIYSWLLRGFRIDQEVYTMSVSVVVSRAIEGYFWELMPMDSTAAWRRYVEMAFERSWPLVIFVSVQEKDTNVSMQTEDVEGPSNAGDVVGPSMQNEENQPREEQAMGMADEGERVGIIVDEMEREDSDNEQAEDDASSDEEGDVMATDWANEDFSGLVISEGDHVPWEYKEYEVIEGARYAHKDEMKEAVKHWAVSLQREFRVVKSTNYVYEVRCMKEDCPWRVHAYKGKWNDYWKVSIVTEHKCYLQGVEKYHRNITSAFVASEMYSSVVGNIGFEPKSIIRHIENKFKYTITYAKAWRAKQKIIEMRYGTFEASYDNLPRLLATIAQRNNNTYYDLHTFTSVEDRTKSVLQRAFFSLGACINAFVHCRPVLCIDGTFMTESENTESWYWFLERVHIAVVRMRPNVCLIHDRHAGMLRAIDYLQNGWDEKGLPAKWPDVRSRWCMRHMGANFYKQFKNKHLMELFKRLCAQNQEKKFNELWDKLDELTTKQTDEQSRRPQVEGDEPPIPLGALHDDPPTMRRRSGSAIRNFSQWIENEPKEKWTLLFDTDGSRYGIMTTNLAEVYNWVMRGVRVLPLVAIVEFILHGTQAYFRDRYKKIGPSMADNNIVFGNVVTKYMEDKIKKARRHRVVAQGTQVHRYEIMCVDRSRRGIYRKQAVQECLLKADGGCTCSCMKPKLHHLPCSHVLAAAGDCGISPNVYVSNYFRKEAIFHTWSEEIYGFGISGSYTTLSAQVFYIPDPSKFRVKKGRRQTRRIRNDMDESEAGGRTLRCSKCDLRGHTYKTCPKNAEVPSGADASPSGQASDGMAYDTPALLNRGIDRNHRSFLSAVEGAQLGTFRHVPWLRAAGLLPLCRLVEAAADDRDPAKRWDADRSLLAALVDRWRPETHTFHLPCGEMAPTLQDVSYLLGLPLAGAPVGPVDGVFGWKEDITARFEQVMRLPHLGPTTTLPPYSTVGPSKAWLLQFTADLLHPDADDYSVRRSLEAYLLWLFGWVMFTSTHGHAVDFRLVHYARSIADAQPQDVPQWSWGSAVLAATYRALCEACTKTDAGAIIAGCPMLLQLWAAERFAIGRPVVDSAPYGVGRSAQWPEDGPTMGTYWCRRGRRYAHVQVRRGYPDFVFEFDRLQPSDVIWEPYTEEAVAARAPLGLSSLCTRDQAYWLTILPMVFDIFVEPHWPQRVIAALTRRGQLAGALWAPRVQQYVDDWVLATEEVINELFPHTEENYRDYLRWYLPRTRARVTFTPDAPEPHVAAVTDAYPTHXRDRDYFVAADAARDISADITAVQVRLNRGLHLTDVEQRSTFDRMQEKMRAVMRVFSCRSAVDVVPPAGPVHPRPRGPTVGAGPRLSSSAPSFGAVRPTAPVSHGPRMPSSAFAGTTGASASSAGAFATSSGAFASSSSHGASIPRPHAGFAAGIFGTGASSSHAGRTGPTSQFYDDDLHGADHQDVLGSSQLGGAPEAHTQEQPEVTPVQAGRVGRAVPPDRLTYSQGHIRAQGRRDRVLFIRMVLEQLMLTTTHFRRFTVVPYPVARTVHNSTHEKRQLELSLSTFGAAC

SEQ ID NO: 106944 - protein, 1638 aa, Oryza sativa
  Clone ID: PAT_MRT4530_11342C.1.pep
MSSKVTFQIVHGEGNIRFGPDGVDLSDFVMTSKGIDRPAERTFQSIYSWLLRGFRIDQEVYTMSVSVVVSRAIEGYFWELMPMDSTAAWRRYVEMAFERSWPLVIFVSVPEKDTNVSMQTEDVEGPSNAGDVVGPSMQNEENQPREEQAMGMADEGERVGIIVDEMEREDSDNEQAEDDASSDEEGDVMATDWANEDFSGLVISEGDHVPWEYKEYEVIEGARYAHKDEMKEAVKHWAVSLQREFRVVKSTNYVYEVRCMKEDCPWRVHAYKGKWNDYWKVSIVTEHKCYLQGVEKYHRNITSAFVASEMYSSVVGNIGFEPKSIIRHIENKFKYTISYAKAWRAKQKIIEMRYGTFEASYDNLPRLLATIAQRNNNTYYDLHTFTSVEDRTKSVLQRAFFSLGACINAFVHCRPVLCIDGTFMTGKYRGQILTAIGCDGNNQVLPMAFAFVESENTESWYWFLERVHIAVVRMRPNVCLIHDRHAGMLRAIDYLQNGWDEKGLPAKWPDVRSRWCMRHMGANFYKQFKNKHLMELFKRLCAQNQEKKFNELWDKLDELTTKQTDEQSRRPQVEGDEPPIPLGALHDDPPTMRRRSGSAIRNFSQWIENEPKEKWALLFDTDGSRYGIMTTNLAEVYNWVMRGVRVLPLVAIVEFILHGTQAYFRDRYKKIGPSMADNNIVFGNVVTKYMEDKIKKARRHRVVAQGTQVHRYEIMCVDRSRRGIYRKQAVQECVLKADGGCTCSCMKPKLHHLPCSHVLAAAGDCGISPNVYVSNYFRKEAIFHTWSEEIYGFGISGSYTTLSAQVFYIPDPSKFRVKKGRRQTRRIRNDMDESEAGGRTLRCSKCDLRGHTYKTCPKNAEVPSGADASPSGQASDGMAYDTPALLNRGIDRNHRSFLSAVEGAQLGTFRPRTSREWLRVDPRHVPWLRAAGLLPLCRLVEAAADDRDPAKRWDADRSLLAALVDRWRPETHTFHLPCGEMAPTLQDVSYLLGLPLAGAPVGPVDGVFGWKEDITARFEQVMRLPHLGPTTTLPPYSTVGPSKAWLLQFTADLLHPDADDYSVRRSLEAYLLWLFGWVMFTSTHGHAVDFRLVHYARSIADAQPQDVPQWSWGSAVLAATYRALCEACTKTDAGAIIAGCPMLLQLWAAERFAIGRPVVDSAPYGVGRSAQWPEDGPTMGTYWCRRGRRYAHVQAYWLTILPMVFDIFVEPHWPQRVMRQFGLRQVFPGNVQPTVPPADHSLTRRGQLAGALWAPRVQQYVDDWVLATEEVINELFPHTEENYRDYLRWYLPRTRARVTFTPDAPEPHVAAVTDAYPTHRDRDYFVAADAARDISADITAVQVRLNRGLHLTDVEQRSTFDRMQEKMRAVMRVFSCRSAVDVVPPAGPVHPRPRGPTVGAGPRLSSSAPSFGAVRPTAPVSHGPRMPSSAFAGTTGASASSAGAFATSSGAFASSSSHGASIPRPHAGFAAGIFGTGASSSHAGRTGPTSQFYDDDLHGADHQDVLGSSQLGGAPEAHTQEQPEVTPVQAGRVGRAVPPDRLTYSQGHIRAQGRRDREHSTKSPSPRAARGPPAKFHAPSPPICRRAPAQCKIALAEGGKGAACKFPCPPSPPICRRPPAQYKIALAEGGKGAACKFR

SEQ ID NO: 106945 - protein, 113 aa, Oryza sativa
  Clone ID: PAT_MRT4530_11343C.1.pep
ISIEIKSPTPPTLRFLLRPQFRRRRRRPPPRPLPFIQVPPWRTPALAGSLASPRSTSSALGPMATTFSSRSSTPRWSFRGAEALRAGTCGLPSASSAMKPALLSSPQGTTRWM

SEQ ID NO: 106946 - protein, 1641 aa, Oryza sativa
  unsure (1)..(1641): unsure at all Xaa locations
  Clone ID: PAT_MRT4530_11344C.1.pep
MSNKVTFQIVHGEGNIRFGPDGVDLSDFVMTSKGIDRPAERTFQSIYSWLLRGFRIDQEVYTMSVSVVVSHATEGYFWELMPMDSTAAWRRYVEMAFERSWPLVIFVSVQEKDINVSMQTEDVEGPINAGDVVGPSMQNEENQPREEQAMGMADEGERVGIIVDEMEREDSDNEEADDDASSDEEGDVMATDWANEDFSGLVISEGDHVPWEYKENEVIEGARYAYKDEMKEAVKHWAVFLQREFRVVKSTNYVYEVRCMKEDCPWRVHAYKGKWNDYWKVSIVTEHKCYLQGVEKYHRNITSAFVASEMYSSVVGNIGFEPKSIIRHIENKFKYTISYAKAWRAKQKIIEMRYGTFEASYDNLPRLLATIAQRNNNTYYDLHTFTSVDDRTKSVLQRAFFSLGACINAFVHCRPVLCIDGTFMTGKYRGQILTAIGCDGNNQVLPMAFAFVESENTESWYWFLERVHIAVVRMRPNVCLIHDRHAGMLRAIDYLQNGWDEKGLPAKWPDVRSRWCMRHMGANFYKQFKNKHLMELFKRLCAQNQEKKFNELWDKLDELTTKQTDEQSRRPQVEGDEPPIPLGALHDDTPTMRRRSRSSIRNFTQWIENEPKEKWSLLFDTDGSRYGIMTTNLAEVYNWVMRGVRVLPLVAIVEFILHGTQAYFRDRYKKIDPSMADNNIVFGNVVTKYMEDKIKKARRHRVVAQGTQVHRYEIMCVDRSRRGIYRKQAVQECVLKADGGCTCSCMKPKLHHLPCSHVLAAAGDCGISPNVYVSNYFRKEAIFHTWSEEIYGFGISGSYTTLSAQVFYIPDPSKLRVKKGRRQTRRIRNDMDESEAGGRTLRCSKCDLRGHTYKKCPKNAEVPSGADASPSGQASDGMAYDTPALLNRGIDRNHRSFLSAVEGAQLGTFRPRTSREWLRVHPRHVPWYALRAAGLLPLCRLVEAAADDRDPAKRWDADRSLLAALDVSYLLGLPLAGAPVGSVDGVVGWKEDITARFEQVMRLPHLGPANTLPPYSTVGPSKAWLLQFTADLLHPDADDYSVRRSLEAYLLWLFGWVMFTSTHGHAVDFRLVHYARSIADAQPQDVPQWSWGSAVLAATYRALCEACTKTDAGAIIAGCPMLLQLWAAERFAIGRPVVDSAPYGVGRSAQWPEDGPTMGTYWCRRGRRYAHVQVRRGYPDFVFEFDRLQPSDVIWEPYTEEAVAARASLGLSSLCTRDXAYWLTILPMVFDIFVDPHCPQRVMRQFGLRQVFPGNVQPTVLPADHSLTRRGQLAGALWAPRVQQYVDDWVLATEEVINELFPHTEENYRDYLRWYLPRTRARVTFTPDAPEPHVAAVTDAYPTHRDRDYFVGADAARDISADITAVQVRLNRGLHLTDVEQRVTFDRMQEKMRAVMRVFSCRSAVDVVPPAGPVQPRPRAPTVGAGPRPTAPVSHGTAQPRGPRLPSSAPSFGAVRPTAPVSHAFARICHHVLTARFLIAGPRLPSSAFAGTTGASASSARAFATSSGAFASSSSHGASIPRPHGTLLFINTIKYMYETDGPCPAGFAAGIFGTGASSSHAGRTGPTSQFYDDDLHGAHHHDVLGSSQLGGAPEAHTQEQPEVTPVQAGRVGRAVPPDRLTYSQGHIRAQGRRDRGKRPRQ

SEQ ID NO: 106947 - protein, 340 aa, Oryza sativa
  unsure (1)..(340): unsure at all Xaa locations
  Clone ID: PAT_MRT4530_11345C.1.pep
MENMRSENFNQGVSMEGVKHAPEMANTNRRALRDIKNIIGXPHQHMAXKPAAKNQAGHRPMTRKFAATLANQPSSAPLIYMQKLEMAPIGSERQKRTADSAFHGPADMECTKITSDDLPLPMMSEMDEVMGSELKEIEMEDIEEAAPDIDSCDANNSLAVVEYVDEIYSFYRRSEVHYKLELLDETLFLTVNIIDRFLARENVVRKKLQLVGVTAMLLACKYEEVSVPVVEDLILICDRAYTRTDILEMERMIVNTLQFDMSVPTPYCFMRRFLKAAQSDKKVGQKHTGASIFVLIYSSFAMECSKMMVELHQKAGHGKLTGVHRKYSTFRLLPIKSVGT

SEQ ID NO: 106948 - protein, 127 aa, Oryza sativa
  Clone ID: PAT_MRT4530_11346C.1.pep
RFLLRPQFRRRRRRPPPRPLPFIQVSITLALPSSNLTLIFMQIPPASGSDQVPPWRTPALAGSLASPRSTSSALGPMATTFSSRSSTPRWSFGGAEALRAGTCGLPSASSAMKPALLSSPQGTTRWM

SEQ ID NO: 106949 - protein, 1467 aa, Oryza sativa
  Clone ID: PAT_MRT4530_11347C.1.pep
MSNKVTFQIVHGEGNIRFGPDGVDLSDFVMTSKGIDRPAERTFQSIYSWLLRGFRIDQEVYTMSVSVVVSRATEGYFWELMPMDSTAAWRRYVEMAFERSWPLVIFVSVQEKDINVSMQTEDVKGPINAGDVVGPSMQNEKNQPREEQAMGMADEGERVGIIVDEMEREDSDNEEADDDASSDEEGDVMATDWANEDFSGLVISEGDHVPWEYKENEVIDGARYAHKDEMKEAVKHWAVSLQREFRVVKSTNYVYEVRCMKEDCPWRVHAYKGKWNDYWKVSIVTEHKCYLQGVEKYHRNITSAFVASEMYSSVVGNIGFEPKSIIRHIENKFKYTISYAKAWRAKQKIIEMRYGTFEASYDNLPRLLATIAQRNNNTYYDLHTFTSVDDRTKSVLQRAFFSLGACINAFVHCRPVLCIDGTFMTGKYRGQILTAIGCDGNNQNGWDEKGLPAKWPDVRSRWCMSHMGANFYKQFKNKHFVELFKRLCAQNQEKKFNELWDKLDELTTKQTDEQSRRPQVEGDEPPIPLGALHDDPPTMRRRSGSSIRNFTQWIENEPKEKWSLLFDTDGSRKEAIFHTWSEEIYGFGISGSYTTLSAQVFYIPDPSKLRVKKGRRQTRRIRNDMDESEAGGRTLRCSKCDLRGHTYKKCPKNAEVPSGADASPSGQASDGMAYDTPALLNRGIDRNHRSFLSALEGAQLGTFRPRTSREWLRVDPRHVPWLRAAGLLPLCRLVEAAADDRDPAKRWDADRSLLAALVDCWRPETHTFHLPCGEMAPTLQDVSYLLGLPLAGARVGPVDGVFGWKEDITARFEQVMRLPHLGPANTLPPYSTVGPSKAWLLQFTADLLHPDADDNSVRRSLEAYLLWLFGWVMFTSTHGHAVDFRLVHYARSIADAQPQDVPQCSWGSAVLAATYRALCEACTKTDAGAIIAGCPMLLQLWAAERFAIGRPVVDSAPYGVGRSAQWPEDGPTMGTYWCRRGRRYAHVQVRRGYPDYVFEFDRLQPSDVIWEPYTEEAVAARAPLGLSSLCTRDQAYWLTILPMVFDIFVEPHCPQRVMRQFGLRQVFPGNVQPTVLPADHSLTRRGQLAGALAPRVQQYVDDWVLATEEVINELFPHTEENYRDYLHWYLPRTRARVTFTPDAPEPHVAAVTDAYPTHRDRDYFVGADAARDISADITAVQVRLNRGLHLTDVEQRVTFDRMQEKMRAVMRVFSCRSAVDVVPPAGPVQPRPRAPIVGTGPRPTVPVSHAGFAAGIFGTGASSSHAGRTGPTSQFYDDDLHGAHHHDVLGSSQLGGAPEAHTQEQPEVTPVQAGRVGRAIPPDRLTYSQGHIRAQGRRDRVLFIHMMLEQLMLTTTHFRRFTTYRPMCNFIEWVDMENPQNDGTRAYPRSETRSDYLRWKDEHERRIAAEALEWHGNPRMGGFTQWIDNVTPSYHGQKITESATQVEYQRLKDHENAMHSDRPRRGR

SEQ ID NO: 106950 - protein, 294 aa, Oryza sativa
  Clone ID: PAT_MRT4530_11348C.1.pep
WRTGRRARRRRRSGRSCRRTASCTCSGGWTLTSWRPPRRWCAAGGAVRPRTHRCGGRSTCAATTSPASCRGARWRAPSRASTASTASPSPASSGSASPAPPAPSPTSPSRRYSPRRSSTTSPPSARRCGGSHCPSSPPPTTRASRHSSRGGAASPTWSSTPSRPPSRPSPRRSRCTAPTSPSSGSPPAPSSPRTPRPWRRRRRCVAASGRCAWTAATSPGRSCSPSSPAAAARRRSASSRRGSASASTTRTRRCSREAPPSSASTSEGPDCSTSPTATRPTVMITATPPTSMSS

SEQ ID NO: 106951 - protein, 76 aa, Oryza sativa
  unsure (1)..(76): unsure at all Xaa locations
  Clone ID: PAT_MRT4530_1134C.1.pep
GGEETAETHVCAICLGEFADGEKVRVLXRCRHGFHVRCVDAWLVSHGSCPTCRRQVIGGGGSTPPPDSDTIAVVVA

SEQ ID NO: 106952 - protein, 1105 aa, Oryza sativa
  Clone ID: PAT_MRT4530_11350C.1.pep
MSSKVTFQIVHGEGNIRFGPDGVDLSDFVMTSKGIDRPAERTFQSIYSWLLRGFRIDQEVYTMSVSVVVSRATEGYFWELMPMDSTDAWRRYVEMAFERTWLLVIFVSVQEKDINVSMQTEDVEGPINAGDVVGPSMQNEENQPREEQAMGMADEGERVGIIVDEMEREDSDNEEVDDDASSDEEGDVMATDWANKDFSGLVISEGDHVPWEYKENEVIEGARYAHKDEMKEAVKHWAVSLQREFRVVKSTNYVYEVRCMKEDCPWRVHAYKGKWNDYWKVSIVTEHKCYLQGVEKYHRNITSAFVASEMYNSVVGNIGFEPKSIIRHIENKFKYTISYAKAWRAKQKIIEMRYGTFEASYDNLPRLLATIAQRNNNTYYDLHTFTSVDDRTKSVLQRAFFSLGACINAFVHYRPVLCIDGTFMTGKYRGQILTAIGCDGNNQVLPMAFAFVESENTESWYWFLERVHIAVVRMRPNVCLIHDRHAGMLRAIDYLQNGWDEKGLPAKWPDVRSRWCMRHMGANFYKQLKNKHLMELFKRLCAQNQEKKFNELWDKLDELTTKQTDEQSRRPLVEGDEPPIPLGALHDDPPTMRRRSGSSIRNFTQWIENEPKEKWSLLFDTDGSRYGIMTTNLAEVYNWVMRGVRVLPLVAIVEFILHGTQAYFRDRYKKIGPSMADDNIVFGNVVTKYMEDKIKKARRHRVVAQGTQVHRYEIMCVDRSRRGIYRWLPYVASALGSRERRYAHVQVRRGYPDFVFEFDRLQPSDVIWEPYTEEAVAARAPLGLSSLCTRDQAYWLTILPMVFDIFVEPHCPQRVMRQFGLRQVFPGNVQPTVLPADHSLTRRGQLAGALWAPRVQQYVDDWVLATEEVINELFPHTEENYRDYLRWYLPRTRARVTFTPDAPEPHVAAVTDAYPTHRDRDYFVAADAARDISADITAVQVRLNRGLHLTDVEQRVTFDRMQEKMRAVMRVFSCRSAVDVVPPAGPVQPRPRAPTVGAGPRPTAPISHAGFAAGIFGTGASSSHAGRTGPTSQFYDDDLHGADRHDVLGSSQLGGAPEAHTQEQPEVTPVQAGRVGRAVPPDRLTYSHGHIRAQGRRDRGKRPRQ

SEQ ID NO: 106953 - protein, 1088 aa, Oryza sativa
  Clone ID: PAT_MRT4530_11351C.1.pep
MGQAWSRRRSGSSIRNFTQWIENEPKEKWSLLFDTDGSRYGIMTTNLAEVYNWVMRGVRVLPLVAIVEFILHGTQAYFRDRYKKIGPSMADNNIVFGNVVTKYMEDKIKKARRHRVVAQGTQVHRYEIMCVDRSRRGIYRKQAVQECVLKADGGCTCSCMKPKLHHLPCSHVLAAAGDCGISSNVYVSNYFRKEAIFHTWSEEIYGFGISGSYTTLSAQVFYIPDPSKLRVKKGRRQTRRIRNDMDESEAGGRTLRCSKCDLRGHTYKKCPKNAEVPSGADASPSGQASDGMAYDTPALLNRGIDRNHRSFLSAVEGAQLGTFRPRTSREWLRVDPRHVPWLRAAGLLPLCRLVEAAADDRDPAKRWDADRSLLTALVDRWRPETHTFHLPCGEIAPTLQHVSYLLGLPLAGAPVGPVDGVFGWKEDITARFEQVMRLPHLGPANTLPPYSTVGPSKAWLLQFTADLLHPDADDNSVRRSLEAYLLWLFGWVMFTSTHGHAVDFRLVHYARSIADAQPQDVPQWSWGSAVLAATYRALCEACTKTDAGAIIAGCPMLLQLWTAERFAIGRPVVDSAPYGVGRSAQWPEDGPTMGTYWCRRGRRYAHVQVRRGYPDFVFEFDRLQPSDVIWEPYTEEAVAARAPLGLSSLCTRDQAYWLTILPMVFDIFVEPHCPQHVMRQFGLRQVFPGNVQPTVLPADHSLTRRGQLAGALWAPRVQQYVDDWVLATEEVINELFPHTEENYRDYLRWYLPRTHARVTFTPDAPEPHVAAVTDAYPTHRDRDYFVGADAARDISADITAVQVRLNRGLHLTDVEQRVTFDRMQEKMRAVMRVFSCRSAVDVVPPAGPVQPRPRAPTVGAGPRPTVPVSHVGFAAGIFDTGASSSHAGRTGPTSQFYDDDLHGAHHHDVLGFSQLGGAPEAHSQEQPEVTPVQAGRVGRAVPPDRLTYSQGHIRAQGRRDRVLFIHIVLEQLMLTTTHFRRFTTYRPMCNFIEWVDMENPQNDGTRAYPRSETRSDYLRRKDEHERRIAAEALEWHGNPRMGGFTRWIDNVTPSYHGQKITESETQVEYQRLKDHENAMHSDRPRRGR

SEQ ID NO: 106954 - protein, 333 aa, Oryza sativa
  Clone ID: PAT_MRT4530_11352C.1.pep
LNLSGFEFQMLPDFFGNIYSLQYLNLSKCLKLEVLPQSFGQLAYLKSLNLSYCSDLKLLESFECLTSLRFLNLSNCSRLEYLPSCFDKLNNLESLNLSQCLGLKALPESLQNLKNLQLDVSGCQDCIVQSFSLSTRSSQSCQRSEKAEQVRSRNSEISEITYEEPAEIELLRNNPSKDLASISHLNEDRIEEPEVVTESSATRGMVQQIPGNQLSSPSSHLSSFASSSAPFASSSWDTSTSEHPVPNEEAAALTVPRSNEKCDNTPMPVKDGLISEDDAPSSGRVQFLHLHIVLLLPGLVWHISSSSSTSPRAGAQPNSFSSTENGAELGGAL

SEQ ID NO: 106955 - protein, 1566 aa, Oryza sativa
  Clone ID: PAT_MRT4530_11353C.1.pep
MQTEDVEGPSNAGDVVGPSMQNEENQPREEQAMGMADEGERVGIIVDEMEREDSDNEQAEDDASSDEEGDVMATDWANEDFSGLVILEGDHVPWEYKEYEVIEGARYAHKDEMKEAILTAIGCDGNNQVLPMAFAFVESENTESWYWFLERVHIAVVRMRPNVCLIHDRHAGMLRAIDYLQNGWDEKGLPAKWPDVRSRWCMRHMGANFYKQFKNKHLMELFKRLCAQNQEKKFNELWDKLDELTTKQTDEQSRRPQVEGDEPPIPLGALLDDPPTMRRRSGSAIRNFSQWIENEPKEKWALLFDTDGSRYGIMTTNLAEVYNWVMRGVRVLPLVAIVEFILHGTQAYFRDRYKKIGPSMADNNIVFGNVVTKRGIYRKQAVQECVLKADGGCTCSCMKPKLHHLPCSHVLAAAGGRTLRCSKCDLRGHTYKTCPKNAEVPSGADASPSGQASDGMAYDTPALLNRGIDRNHRSFLSAVEGAQLGTFRPRTSREWLRVDPRHVPWYALVEAAADDRDPAKRWDADRSLLAALVDRWRPETHTFHLPCGEMAPTLQDVSYLLGLPLAGAPVGPIDGVFGWKEDITARFEQADLLHPDADDYSVRRSLEAYLLWLFGWVMFTSTHGHAVDFRLVHYARSIADAQPQDVPQWSWGSAVLAATYRALCEACTKTDAGAIIAGCPMLLQLWAAERFAIGRPVVDSAPYGVGRSAQWPEDGPTMGTYWCRRGRRYAHVQVRRGYPDFVFEFDRLQPSDVIWEPYTEEAVAARAPLGLSSLCTRDQAYWLTILPMVFDIFVEPHWPQRVMRQFGLRQVFPGNVQPTVPPADHSLTRRGQLAGALWAPRVQQYVDDWVLATEEVINELFPHTEENYRDYLRWYLPRTRARVTFTPDAPEPHVAAVTDAYPTHRDRDYFVAADAARDISADITAVQVRLNRAPWTSYLQLVRYTHGLAVLPSEQDLVCLRAPLASEQCDLQHRTSYAFERVRRHDRRFRELRRGVRHLFRRVRQLFLSRSVDPSPTRRDLRYWGLFVSRRLEELQRRTLRSSQRSHLYRQDGGGFGGAAEAEMAHRLLRDAQADGWERSDFPIICESCLGDNPYLRAEYDKECKICARPFTVFRWRPGRDARYKKTEICQTCCKLKNVCQVCLLDLEYGLPVQVRDTALSTNSNDAIPRSDVNREYFAEEHDRRARAGIDYDSSNGKARANDTILKLQRTAPYYKRNRAHVCSFYVRGECTRGAECPYRHEMPETGELSQQNIKDRYYGAQVCYLDWKRNGKEPVNAFTVNDPVALKLLSKAGEMPSLTPPDDESIRTLYIGGLDSRVTEQDLRDQFYAHGEIETIRMVLQRACAFVTYTTREGAEKAAEELANKLVIKGVRLKLMWGKPQAPKPEEDEAGRQGHVAHGGMLPRAVISQQQSGDQPQPPGMEGQQQPASASYYFNIPAPPAAERTLYPSMDPQRMGALVESQEGDGKPGPQQAGQGQASSSSGQSYPEPPPPYYHGGQYPPYYPPYGGYMPPPRMPYQQPPQYPAYQPMLAPPAQSQASSLQQPAPATQQLGQGPQQQTTQNGMT

SEQ ID NO: 106956 - protein, 78 aa, Oryza sativa
  Clone ID: PAT_MRT4530_11354C.1.pep
MDCLPDDVFIKVIRCLPARSLAASRCVSKEWCSIIDTNRLLLPHVMTHSVHGIFSSYLAHDMTHFFSRPSYSAGCGIC

SEQ ID NO: 106957 - protein, 80 aa, Oryza sativa
  unsure (1)..(80): unsure at all Xaa locations
  Clone ID: PAT_MRT4530_11355C.1.pep
MTSFCHCNFSRWIEFSKKSVAKRVANLLNGEQIGGKKRSPFYYDIWNIKYLKKFKWDDLXGEIAEKTHIKEHKLNLEIAA

SEQ ID NO: 106958 - protein, 610 aa, Oryza sativa
  Clone ID: PAT_MRT4530_11356C.1.pep
MGEMVLAGYGMDKAVRSSVSFETPCGRLLRELEQIWTEIGEREEDKDRMFLELETECMRVYRRKVDSANAERSQLRQSLMAKEAELKVLVASIGEITPKFKVDEKQSLKEQLAKVTPLLEDLRSKKEERIKQFSLVQSQIEKIKAQISDHNNQHDNGPVNHSKDNHDLSTRRLSDLQAELRNLQKEKSDRLQKVFIYVDEVHCLCSVLGMDFAKTVKDVHPSLHGANSENSTNISDSTLEGLTETILKLKAEKRTRVSKLQEIVGKLHKLWNLMESTEQERRHFTRVAAVLGSTEEEITSSSVLSLETIQETEEEVERLTKQKASRMKELVLKKRLELEDICSNAHMEPDMSTAPEKITALIDSGLVDPCELLSSIETQIAKAREESLTRKDIMEKVDRWLSACDEETWLEEYNQDSSRYSAGRGAHINLKRAEKARILVQKIPSMIDNLIAKTFAWEDERSVPFLYDGARLVAILEEQKLRRVQKEEDKRRHRDQKKLQSLLLKEKELIFGSKPSPKKTSSFNRRTSSHHPNGNGAGFMTPVPRRVSAGSATPELLTPRSYSGRYNNYFKENRRLAAAPLNFSTVSKEDSMSSFASISGSEPDSPLVLH

SEQ ID NO: 106959 - protein, 72 aa, Oryza sativa
  unsure (1)..(72): unsure at all Xaa locations
  Clone ID: PAT_MRT4530_11357C.1.pep
PKSITSNHFFYQSLTEKIGNKHKKIVTDGPENTQTWKQGPGLNGKVTSPRSITPNIXSAXLEPLXXRPYQGK

SEQ ID NO: 106960 - protein, 1590 aa, Oryza sativa
  Clone ID: PAT_MRT4530_11358C.1.pep
MAAVEEEGRWEPTAAAAEEEEMGVEAEEAMEDGEVEGEVGQQQQEEEGNGDAGKSEEHGSAGGRMVWKKKHHHHHQPRTPVAAESRATWRGGKGSGKGRGGGGGGGGFHHCPWNLQPDNLNRFNKPGVYGGAIIICNHMTKRGFFEKKLFGLPGYAATFIKKIRVGMLLFVFELGERKLYGVFEATSNGALDILPNAFTSLRKPRPAQRNIDNGYFIFTLWMKFRFSSEEFGSVLNLVHLFASKRIELQPYQKPKSRVIYDYKISLAHLGREFSPRTHNKTFSSHSSSTFCNNRFSLPRSSYLYTKQNAKHDACKYESPLHSPLKSVIFKAPDVKGESLEPNPDYIPLELDDSKSDSDADPSDSLETVSFYPTLEGCISYEDQDLKPFNGKFNGDDGHHSHVLIRGLNSECETDRNSVFSRNVKERQSSLAKGGKGCKRKAIVEFDEQSSPRRGCTMKRVSFSFSGEEISVTSEKSLHRPTAFAELPNTRESSAEEGKQEVGCVVQKARSKGEDVSAKIKLMGLSLPEALRTNRVHSCSSNSQSLVTQTDLGCERKGSPILCVSVEFSCPCKLQACIGVCLKKVKVGATLFLYDTDQHKLHGVFEATSDGSMNIIPDAYVSSGKRYPCQIRFKRIWFCKPLMESELHDAIQNNFTSKNKLRYGLSHQQIMDLNKTWPLHPILLIHLASELPKNVSLMQSSSNSSSHGSFKSPCQTCSSSTHGERAATLSHKLADPMPLMHRGLKPYTSGAVKSKDSSRFPLHIGANTDIVTVPVSQEAMDDRSSDDYIPLPQEENTLEGIDDLSDLLEDESYSSESQGTIDSEEHGTFHQACAIKEDECYPPVVNFKLRSDSEGRSSVFSRLLGKPRTLGPRKKSSAKAFPSMSSGHLPQRKKQWRKKQSKPFPCDRDGVLGTHQANKLRRIPALDYSFVWDDGSRSTNSFGRKPSDIQTSLELCEHGNKWDMCTKEHSRSNEFKRLFVPEAIRKLIRPYDKELSIPPVFPGVHDGNEVNSKEEVNDSSLDLKRRGKDDQDFGDENDNVEEATWKKRRLADASFSQEEYLSGGVLVPKGTEDMDMLAISDGNCKDKSICLSPRDTCAEMARACLQTKVVLQDEQQKNIQDCCEEVAGVTSLILEHSESMDLLPKRNCRNMKTCLNIETKSQVASGNLETRSSLEDTQKQSVRSCHGVINGDKILLMENFETMDVLPNHDEDCLAKSTFVRNDSNHLETEMPMQEKQSPSVQNCCEALHGDNMLIQEKSENMLYKIDADSDCGKKKSVSFDKAYSNVAGSSLETHVPMQEPLRIASSCCEIVNADQVCAGEVGKNSFSLDENGGYVTCPCNTTWALENAMAMDTVESIHGDIGNNSNNSAACRSMGSDYMEEVHQLVTNCSEISAAIPESSGTLNNFAKCCGDSANKNSLLDQTSENVSTDHQEVSMLPQDQHYHSCSGDTSSALEYSDTNAGDGDSEHRNSFDQKGGESMYPVTGVLLQAEQHQKLQGEPESSSSHEISNSGSFVVCAEDSRSKSGLSADRMVTDLETNSESRTGFFNTSSSECGENFSASASSSENAQQKLSGSAVSAEVARLQHDPGE

SEQ ID NO: 106961 - protein, 799 aa, Oryza sativa
  Clone ID: PAT_MRT4530_11359C.1.pep
MAAAAIVVLLVCSLPSLLVCSLPSLLVGAAAAGGGEKQSYVVYLGEHAHGERLGAAAAADVDVEALARQAEDSHCELLAGVLGDKEKAREAIFYSYTRHINGFAANLDAAAAAKIAEKPGVVSVFPNRGHKLHTTRSWQFLGLAGVGGAPTGAAWKKARFGEDTIIGNLDTGVWPESESFRDDGLGPIPSWWRGECQKGQDDAFSCNRKLIGARFFNKGYASAVGNLNTSLFDTPRDTDGHGTHTLSTAGGAPVAGASVFGYGNGTASGGSPMARVAAYRVCYTPVNGSECFDADILAAFDAAIHDGVHVLSVSLGGDAGDYFADGLAIGSFHAVRHGIAVVCSAGNSGPAPGTVSNVAPWLFTAAASTMDREFPAYVVFNDTKLKGQSLSASALSPASSSFPMIDSSLAASPNRTQNESQLCFLGSLDPEKVKGKIVVCLRGVNPRVEKGEAVLEAGGAGMVLANDVTTGNEIIADAHVLPATHIKFSDGQILFSYLKNTKSPAGTITRPETRLGTKPAPFMAAFSSQGPNTVTPGILKPDITAPGVSVVAAWTRASAPTDLAFDKRRVAFNSESGTSMSCPHVAGVVGLLRTLRPDWSPAAIRSALMTTAVEVDNERDAILNSSFAAANPFGFGAGHVSPARAMNPGLVYDLAAVDYLNFLCSLSYNATVMAMFAGGGGAAPFRCPASPPKVQDLNYPSITVVNLTSSATVRRTVKNVGKPGVYKAYVTSPAGVRVTVSPDTLPFLLKGEKKTFQVRFEVTNASLAMDYSFGALVWTNGKQFVRSPLVVKTTTPTMA

SEQ ID NO: 106962 - protein, 536 aa, Oryza sativa
  Clone ID: PAT_MRT4530_1135C.1.pep
MAAAAAAATATASSGLIRCATGGAPAHGHHQVFRCSAAKPSPLALRHRAGRPAPLQAFPEYDRVTPFDYDGEVDGGDGDDHPREECGVFGVVGDPDATSLCYLGLQKLQHRGEEGAGIAAAGDDGTIKLERGLGLVGDVFGDPARLGKLPGQAAIGHVRYSTAGAAASLRNVQPFLAGYRFGQLAVAHNGNLVNYQALRNKLEAQGSIFSTSSDTEVILHLIATSLSRPLLARICDACERLAGAYSLLFLTADKLLAVRDPFGFRPLVMGRRANGAIVFASETCALDLIDATYEREVEPGEVVVVDRRDMSVSSACLVPHRPRKSCVFEHIYFALPNSVVFGHAVHERRNAYGRALAEESPAPTADVVIPVPDSGFYAALGFSQTSGLEFQQGLIRWHYSGRSFIQPSQAIRDLAVKLKLAPVHGVIRGKSVIVRLLRDAGAREVHMRIASPPVIGSCLYGIDTPSEGELISNRMDLEGVRRAIGCDSLAFLSLDKLHTIYGDEAHELCDACFSRNYPVLPTVPEPVPELVSAFED

SEQ ID NO: 106963 - protein, 75 aa, Oryza sativa
  Clone ID: PAT_MRT4530_11360C.1.pep
NLFLFFSPLQTCKLISAKKKNENMLQSIPNFLLLPPSKKMNLVLDVTYSSTMNLYRDIPDSFYYNGSYPNMFSFV

SEQ ID NO: 106964 - protein, 151 aa, Oryza sativa
  Clone ID: PAT_MRT4530_11361C.1.pep
MEVTREVVLLELKCYDDKDEPVVSAAGGELRHARGGNEHDQGMFSCEAEAIREWLRSGHVTSSMANLKFPYHKFILNHPLCDTIHECRLHRAMRNKVAHYYLTFPVGHPSTSRRPLSTPQVALPSSLPQWPPLSLSSAARYPTIGLCSKAW

SEQ ID NO: 106965 - protein, 546 aa, Oryza sativa
  Clone ID: PAT_MRT4530_11362C.1.pep
MSSTPAANFSNEDDERKAPTGFHPSLWGDFFISYQPPTAPKHAYMKERAEVLKEEVRKVVKGSNEVPEILDLVITLQRLGLDSYYKAEIDELLCTVYNTDYNDKDLHLVSLRFYLLRKNGYDVSSDIFQHFKDKEGSFVADDTRSLLSLYNAAYMRTHGEKVLDEAVVFTTNRLRSELKHLKSPVADEVSLALDTPLFRRVRIIETQNYIPIYESATTRNEAILEFAKLNVNLLQLIYCEELKTITRWWKELNVESNLSFIRDRIVEMHFWMTGACSEPHYSLLRIILTKMTAFITILDDIFDTYATTEESMMLAKAIYMCNESATVLLPKYMKDFYLYYLKTFDSFEEALGPNKSYRVLYFKELFKILIKGYSEEIKWRDDHYIPKTIEEHLELSRMTVGAFQLACASLVGMGDFITEDTLDYLLTYPKLIKSYTTCVRLSNDIASTKREQAGDHYASTIQCYMLQHGTTIHEACIGIKELIEDSWKDMMKEYLAPTNLQPKIVARTVIDFARTGDYIYKQADSFTFSHTIKDMIASLYVEPYSI

SEQ ID NO: 106966 - protein, 712 aa, Oryza sativa
  Clone ID: PAT_MRT4530_11363C.1.pep
MSSPPPPPPSKPKRRRLLSLPAVYPCEDIAPAPLLASLLSLAADVASRRAADVDAFPVLRCGVRKAVRLAGILLAFLEEVQDAAAAAALPSSAVLGLTELHVAMQKLRFLLADCARRGARLWVLVNAGMVASELRLVLGSVAAAMDALPRSVAEASVEAGELARVVSEQAWRAAVRPDGADERAARSVRSILDQFKDGVAPDADDVRRVLRRVRVGSWSDCSEEIAFLESEICARLDAGDENSNDVLVMNSLMTFLVYCRVVLFDHIDASKSQPAAAAAPAPARCPEWIRPEALQCPITLDLMTDPVTVSTGQTYDRASITRWMKAGCRTCPVTGERLSTADLVPNTVLRGIIERMLLINGVTLPELSAAGGGGHRHGAVANTAVPFGPAAAGAARLAVAHIVAQLSRGSTEERRKATSEARKLSKHSVFYRACLVDANAVPWLLCLLSSTDAAVQDNAVASLLNLSKHPAGRTAIVEVGGVGLVVDVINVGAKAEAQHNAAAVLFYLSSNSPDSAEEIGRIPEAIPTLVQLIRDGAYRGRKNAMVSLYGLLQSAANHGRAIAAGAVSALAALLLSADRDDLAGDSVALLARIAEQPSGAAAVLSQPGLVARLAEALAASSASSSRSARDHSVSLLASLCRHGGAKVVPVLGRMPGLMASLYSLVADGGSPQTSKKARALLNEIHRHYEVAPPPPASSASSDAGGDRVVRVL

SEQ ID NO: 106967 - protein, 591 aa, Oryza sativa
  unsure (1)..(591): unsure at all Xaa locations
  Clone ID: PAT_MRT4530_11364C.1.pep
AATAKGSYKLPPLWGNFFLSYQPPTAPXQLLSYYILSPYFNVTDYLLYVYMHAYMKERVQVVKEEVRKVVKGSSEVPEILDLVITLQRLGLDSYYETEINDLLCIVYNTDYNDKDLHLVSLRFYLLRKNGYDVSSDMFQHFKDKEGSFVADDVRSLLSLYNAAFLRTHGEKVLDEAIVFTTNRLRSELEHLKSPAADEVSLALNTPLFRRVRILEIRNYIPIYESATTRNESILEFAKLNFNLLQLIYCEELKSITGWWKELNVESNLSFIRDRIVEMHFWMIGACSEPHYSLSRIILTKMIAFITILDDIFDTYATTEESMMLAKAIYMCNETATVLLPKYMKDFYLYYLKTFDSFEEALCPNKSYRVCYLKELNISNSTNNTDCFILRGNYGNHFIYDILMTQSYFLFKRLVQEFSQEIKWRDDHYIPKTIEEHLELSRKTVGAFELACASFVGMGDLVAKETLDCLLTYPELLKSFTTCVRLSNDIASTKREQAGDHHHASTIQSYMLQHGATAHEACVGIKELIEDSWKDMMKEYLTPTDLQPKIVARTVIDFARTGDYMYKQVDSFTISHTIKDMIASLYMEPYNI

SEQ ID NO: 106968 - protein, 158 aa, Oryza sativa
  unsure (1)..(158): unsure at all Xaa locations
  Clone ID: PAT_MRT4530_11365C.1.pep
AISPPAEEGRDGDAPLHCSAHRKKPGCVVGEHAYSLLLLAPPPPPRDDDTTVAVALLGGDWVCSFVWCFVGALDAVAPEPVNAPGNLLLRLHPGGLLRXLVSSLKRASSSSTTIAGVTPERSAKTQIFRHYDEVDHDNAACSVCFVALAPMRHGCCLL

SEQ ID NO: 106969 - protein, 42 aa, Oryza sativa
  Clone ID: PAT_MRT4530_11366C.1.pep
QVFDEMPHNGSPVILLQQGRQTEDSAAQQGEDEHEEIGRHLA

SEQ ID NO: 106970 - protein, 120 aa, Oryza sativa
  Clone ID: PAT_MRT4530_11367C.1.pep
LKLRSFMGPPRLTSAEGSESNQGGTKTNKKKKGFAWGPPPPNARPLRLGKQVLHPPGKPIHPPPRPIAAPARTGPTRTRGATRPWRTRACTGTPPPFCASCSTWAYPGAWPSPCRTGSPL

SEQ ID NO: 106971 - protein, 433 aa, Oryza sativa
  Clone ID: PAT_MRT4530_11368C.1.pep
MGPPLGSIDNIELAGFKSRNFDRWWGEWKLHLFQQSASMYMTDLFPDIIPKTIDSSPPRQSNSGVQYAPGLIPNGGGPSPPVIGYHAPKTSTLLQGLIREPTDVSKKRKTRSSAMGTLALVPKRKVKSKKTKPTDDLLALDPSIERALDEEDIEDDVDQAVAEKKKTAVKKKSTTTIVKPVPPPPPPPSPPVLQSSSDRTPSAVGSHHIGEEEQPAAPTIPVLADQISFDIRDYLDEAEEDTSSKALAPLSDDVKKTLEDISCRLEASSLDSLVVDYGSIRTRLHEVQALILEELAAVLTPAAYLEQNQFKLEKANQRLAERRECKEIEATIQLSEGPIKSNINRLKARKIDLLAQLEECNAELDMEHKRLADLPKSVEEQKARLKSAIKNVADLTKSLKVISGTDAQDAQAIEEVKQIRQRAILAIQRYLSQ

SEQ ID NO: 106972 - protein, 717 aa, Oryza sativa
  Clone ID: PAT_MRT4530_11369C.1.pep
MAFGREKGIQGNTMRESRAIEGPHVLRQTLSNGCNCSTKLFMAVKEAGGPNAKAGCSIVVLEKQSWRKEEKEMETRGVRKRQLRRTFHGGGGRLTRGADVDESHAAHESRRGANGRICLRGGGHVRGISAPCAETGLRKVEDSGRSISTTGFLRRGSSVSLKDQGNEERPNKTKLNPMNARWADSKEKPRYLREPFRSSGTKAACPSSSKAPVRKYFEEKQGRTFLGEADNAESSSRRTEANRLQCSKKAVVEEDVHPYGQQDEPEDLLSTSTTEDQPAELDPELLDSSVSSGVSAHAIGSVVRNAALRSKSRQQKGKEELCQIRPQTASAFVNRSTIPRNSTNGVKSSNAAGPGVQRRTLKNLGCTSISDVLPSGCSSANSIHNKRAEVMRNRAFDGESSSRPRGLNGHSSLGHSPAMYSGITGPRVRTAEQSASQQTRTSSRSIQESADSSRIRRPSTQHARVRVPNEREDSVFALRETLARDRQPEWAHFSLGEAAPRRSMRPFSMELPHEIYSSSRQGSSNQTARSRSSYRPDESPPQMFHGLLVERENYRRINMEGIAEVLLALDRIEQDDELTYEQLLVLETNLFLSGLGLHDQHRDMRMDIDNMSYEELLALEERIGSVSTALSDEQLVKCLKRNVYKLPNSDLEANRAVLDDAKCSICQEEYIEGEEVGRMQCEHQYHVSCIHEWLRQKNWCPICKTSAIPSEMDKGGT

SEQ ID NO: 106973 - protein, 163 aa, Oryza sativa
  Clone ID: PAT_MRT4530_1136C.1.pep
MAGTSNNSSSSKRPRRTAPPRRDNPAERLTDDLLVEILSRVPYMSLARCSRVCRRWRRVISHPDHRRLLPRYHLRSAIAGLFCVEPYWRPLADPRRFYTVPAPEPPPLIDPSFSFLPKCERILLLDSCNGLILCFCSKLNNPDVFNYVVCNPATKKSFVLPDF

SEQ ID NO: 106974 - protein, 64 aa, Oryza sativa
  Clone ID: PAT_MRT4530_11370C.1.pep
CDNMDYPIECFNRYLKKVVLAGYEGRRREFQLARVKVSYALYFRYPTKCQDILHSHVVLRWILR

SEQ ID NO: 106975 - protein, 80 aa, Oryza sativa
  Clone ID: PAT_MRT4530_11371C.1.pep
FGKRIRQVFGRVTGWSVSKTEDIFVVTVRKYLRTVTTGSNSINLVVVVDGKSAVRMPPVRAMRAIVLAAACTECLARTRN

SEQ ID NO: 106976 - protein, 45 aa, Oryza sativa
  Clone ID: PAT_MRT4530_11372C.1.pep
FFFFLIIISNNVLGIYPYRRGKLCLNWHDIFNSDCITPMFNCHTR

SEQ ID NO: 106977 - protein, 1781 aa, Oryza sativa
  Clone ID: PAT_MRT4530_11373C.1.pep
MAAVGVSFVSLLNAVAWHCRLPSVSYLWELDGNDALPSDESPSKTVSKFFWIATSDQPIVSHEMVAHQAVRFLQAKYGFAVHDYNLQTLLSYRQIAASAVDAALTASTHLARFRARYGFLQAPVFSNVSPTAPRLTTVLPGLSGSIPSVPKPALSLPTISDVGVESQTGSIGSTSCPVHDSQPAPSRKRTLLDVPRHAATANRERRRLKRAGGDSGHLLQKILDGPVPTLDDVLPLPKDYIASLKALCPERSYYGGPSHECPYCGAAFWYQERVKRDSAVTQRRIVYNLCCRAGKISLPELRFPPAMLANLLRFDGDRRSRRFLRQIRSYNSLFAFTSLGADVDKSINNGTAPCVFKINGIVHHRIGSLLPQQGAPPKFAQLYIYDTENEVSNRMRVFDKESSTDEPDPFIVTELGAMLDEHNDLVKSFRFARKRLKDHGDEKIALRLLGCNSKDEVQYNLPTSGEIAGIIVGDYSNDKYTYDVVVQSCDSRLRRVSALHPSYMALQYPLLFPYGERGFHLGIKYTDFPSITGTSRRYVTMLEYYRYRLHYRLNKPNPYTCCGRLSDSICVDMYSTVEGSRLKFIADNQPDLRSECVQGIADAIDHGLESGDSVGQKYVLPSSFTGGRRYMVQNYQDAMAVCRVFGSPDLFVTFTCNSKWQEIYDALLFEPGQVPSDRSDMIVRVFNMKVNEFITDIREGKTFGPVLAVLYTVEFQKRGLPHIHCLVWLAANTTDFNAATVDGFSSAEIPDVFTDPLGYALVDEFMIHGPCEWFEANKKHSKARHLTYCDFPKEWTWDNSARCWRPLTPVEKIGRMYYISPVAGELYYLRMLLMIVKGVMCFADIRTYEGVVYPTFRQACEARGLLENDNEWHLLFDEAIVSASSYQLRQLFVTVVMFCSIGNVRSLFDKYWTYFTDDIQHRVRKMLSNPSYVIPHDRLLSLLIKELKSVFANSGGNIDDYDLPQSTARTDDDSGNRMVSEELALDSVALAAHADSIIPKLNSDQKRVFDTIMCRVNESKPGFFFVYGHGGTGKTFLCNALISKVRSEKKIVLAVASSGVASLLLPRGRTAHSRFKIPIDINENSLCTIKRGTMLAELIQKTSLIIWDEAPMTHRRCFEALDRTLRDLLSEHAPSNGLVPFGGKVVVLGGDFRQILPVVRKGSRASIIDASITNSPLWSHAVLLKLTVNMRLLQCNLGEQQQQELEKFAQNDESEATWIDIPDDLLIKTTGDKIHSIVNEVFPGFASKYTDPSYLASCAIVCPNNSTVDDINDRMVDMVPGEVKEYLSCDTISKSSEHIPDFDLLYPTEFLNSISANNFPAHKLALKKGVTVMLLRNLNQSMGLCNGTRLLALSLGQRLLECQILTGTNIGDRVFIPRIALTTTSPKWPFTLQRRQFPVRVCYAMTINKSQGQTLKRVGVYLKKAVFTHGQLYVAVSRSTSRDGLRILTEGDDEACSSKTRNVVYHEVLQTVDLMMGHTLLSDLSLGDDNERICVRVSRFWAFCDQKDDDKILHFGLVLIDEKGTSIAAQIYPPCDEIFRPIITEGKVYYIKYFRVRKCNRQYKPVDNCMSIYFTRWTKLEERVDPPAEIPLYTYSLSPFGGLRSRVGKKDSFTVPMVPCLIEYMFSRRCLFISIQATYSPIEWTDLPPAAPAYSNAEPKTIIQIKDLNPFEFKKHEFLVTVVIKKIDMEYSWWYTACDICRRTARPYGNTYKCQNESCPPLVGASPRFKLSVVAGDDTADAKFVLFGRLAQRLIGRSVEILLEGNAAGKEATPKETTNLP

SEQ ID NO: 106978 - protein, 1562 aa, Oryza sativa
  Clone ID: PAT_MRT4530_11374C.1.pep
MSSKVTFQIVHGEGNIRFGPDGVDLSDFVMTSKGIDRPAERTFQSIYSWLLRGFRIDQEVYTMSVSVVVSRAIEGYFWELMPMDSTAAWRRYVKMAFERSWPLVIFVSVQEKDTNVSMQTEDVEGPSNEGDVVGPSMENEENQPREEQAMGMADEGERVGIIVDEMERKDSDNEQAEDDASSDEEGDVMATDWANEDFSGLVISEGDHVPWEYKENEIIEGARYAHKDEMKEAVKHWAVSLQREFRVVKSTNYVYEVRCMKEDCPWRVHAYKGKWNDYWKVSIVTEHKCYLQGVEKYHRNITSAFVASEMYSSVVGNIGFEPKSIIRHIENKFKYTISYAKAWRAKQKIIEMRYGTFEASYDNLPRLLATIAQRNNNTYYDLHTFTSVDDRTKSVLQRAFFSLGACINAFVHCRPVLCIDGTFMTSEYRGQILTAIGCDGNNQVLPMAFAFVESENTESWYWFLERVHIAVVRMRPNVCLIHDRHAGMLRAIDYLQNGWDEKGLPAKWPDVRSRWCMRHMGANFYKQFKNKHLMELFKRLCAQNQEKKFNELWDKLDELTTKQTDEQSRRPQVEGDEPPIPLGALHDDPPTMRRRSGSSIRNFTQWIENEPKEKWSLLFDTDGSRYGIMTTNLAEVYNWVMRGVRVLPLVAIVEFILHGTQAYFRDRYKKIGPSMADNNIVFGNVVTKYMEDKIKKARRHRVVAQGTQVHRYEIMFVDRSRRGIYRKQAVQECVLKADGGCTCSCMKPKLHHLPCSHVLAAAEAGGRTLRCSKCDLRGHTYKKCPKNAEVPSSADASPSGQASDGMAYDTPALLNRGIDRNHRSFLSAVEGAQLGTFRPRTSREWLRVDPHHVPWLRAAGLLPLCRLVEAAADDRDPAKRWDADRSLLAALVDRWRPETHTFHLPCGEMAPTLQDVSYLLGLPLAGAPVGPVDGVFGWKEDITARFEQVMRLPHLGPANTLPPYSTVGPSKAWLLQFTADRLQPDADDYSVRRSLEAYLLWLFGWVMFTRTHGHAVDFRLVHYARSIADAQPQDVPQWSWGSAVLAATYRALCEACTKTDAGAIIAGCPMLLQLWAAERFAIGRPVVDSAPYGRRYAHVQVRRGYPDFVFEFDRLQPSDVIWEPYTEEAVAARAPLGLSSLCTRDQAYWLTILPMVFDIFVEPHCPQRVMRQFGLRQVFPGNVQPTVLPADHSLTRRGQLAGALWAPRVQQYVDDWVLATEEVINELFPHTEENYRDYLRWYLPRTRAHVTFTPDAPEPHVAAVTDAYPTHRDRDYFVAADAARDISADITAVQVRLNRGLHLTDVKQRVTFARMQEKMRAVMRVFSCRSAVDVVPPAGPVHPRPRAPTVGAGPHLPSSAPSFGAVRPTAPVSHGPRLPSSAFAGTTGASASSAGAFATSSGAFASSSSHGASIPRPHAGYAAGIFGTGASSSHAGRTGPTSQFYDDDLHGADHQDVLGSSQLGGAPKAHTQEQPEVTPVQAGRVGRAIPPDRLTYSQGHIRAQGRRDRVLFIHMVLEQLMLTTTHFRRFTVVPYPVARTVHNSTHEKRQLELSLSTFGAAC

SEQ ID NO: 106979 - protein, 1664 aa, Oryza sativa
  unsure (1)..(1664): unsure at all Xaa locations
  Clone ID: PAT_MRT4530_11375C.1.pep
MSNKVTFQIVHGEGNIRFGPDGVDLSDFVMTSKGIDRPAERTFQSIYSWLLRGFRIDQEVYTMSVSVVVSRAIEGYFWELMPMDSTVAWRRYVEMAFERSWPLVIFVSVQEKYTNVSMQTEDVEGPSNAGDVVGPSMQNEENQPREEQAMGMADEGERVGIIVDEMEREDSDNEQAEDDASSNEEGDVMATDWANEDFSGLVISEGDHVPWEYKENEVIKGARYAHKDEMKEAVKHWAVSLQREFRVVKSTNYVYEVRCMKEDCPWRVHAXKGKWNDYWKVSIVTEHQCYLQGVEKYHRNITSAFVASEMYSSVVGNIGFEPKSIIRHIENKFKYTISYAKAWRAKQKIIEMRYGTFEASYDNLPRLLATIAQRNNNTYYDLHTFTSVDDRIKSVLQRAFFSLGACINAFVHCRPVLCIDGTFLTGKYRGQILTAIGCDGNNQVLPMAFAFVESGNTESWYWFLERVHIAVVRMRPNVCLIHDCHAGMLRAIDYLQNGWDEKGLPAKWPNVRSRWCMRHMGANFYKQFKNKHLMELFKRLCAQNQEKKFNELWDKLDELTTKQTDEQSRRPQVEGDEPPIPLGALHDDPPTMRRRSGSSIRNFTQWIENEPKEKWSLLFDTDXSRYGIMTTNLADVYNWVMRGVRVLPLVAIVEFILHGTQAYFRDRYKKIGPSMADXNIVFGNVVTKYMEDKIKKARRHRVVAQGTQVHRYEIICVDRSRRGIYRKQAMQECVLKADGGCTCSCMKPKLHQLPCSHVLATAGDCGISPNVYVSNYFRKEAIFHTWSEEIYGFGISGSYTTLSGKVFYIPDPSKLRVKKGXRQTRRIRNDMDESEAGGRTLRCSKCDLRGHTYKKCPKNAEVPSGADASPSGQASDGMAYDTPALFNRGIDRSHCSFLSSVEGAQLGTFRPRTSREWLRVDPRHIPWLRAAGLLPXLCRLVEAAADDRDPAKRWDADRSLLATLVDRWRPETHTFHLPCGKMAPTLQDVSYLLGLPLAGAPVGPVDGVFGWKEDITARFEHVMRLPHLGPADTLPPNSTVGPSKAWLLQFTTDLLHPDADDYSVRRSLEAYLLWLFGWVMFTSTHGHAVDCRLVHYARSIADAQPQDVPQWSXGSAVLVAMYRALCEACTKTDAGAIFAGCPMLLQLWAAERFAIGRPVVDSAPYGVGRSAQWPEDGPTMGTYWCRRGRRYAHVQVRRGYPDFVFEFDRLQPSDVIWEPYTEEAVAARAPLGLSSLCTCDQAYWLPILPMVFDIFVEPHCPQCVMRQFGLRQVFPGNVQPTVLPADHSLTRQGQLAGALWAPRVQQYVDDWVLATEEVINELFPHTEENYRDYLRRYLPRTRACVTFTPDAPEPHVAAVTDAYPMHHDRDYFVGADAARDISADITAVQVRLNRGLHLTDVEQRMTFDRMQEKMRAVMRVFSCRSAVDIVPPAGPVQPRPRAPTVGAGPRLPSSAPSVGAVRPTAPVSHGPRLPSSAFAGTTGASASSAGAFASTSGAFATSSGAFASSSSHGASIPRPHAGFAAGILGTGASSSHAGRSGPTSHFYDDDLHGAHHHDVLGSSQLGGAPEVHTQEQPEVTPVQAGRVGRAIPPDRLTYSQGHVRAQGRRDRVLFIHMVLEQLMLTTTHFRRFTVVSDPVARTVQHGTHEKRQLEXSLSTFGAAC

SEQ ID NO: 106980 - protein, 1436 aa, Oryza sativa
  Clone ID: PAT_MRT4530_11376C.1.pep
MSSKVTFQIVHGEGNIRFGPDGVDLSDFVMTSKGIDRPAERTFQSIYSWLLRGFRIDQEVYTMSVSVVVSRAIEGYFWELMPMDSTAAWRRYVQMAFERSWPLVIFVSVQEKDTNVSMRTEDVEGPSNAGDVVGPSMENEENQPREEQAMGMADEGERVGIIVDEMEREDSDNEQAEDDASSDEEGDVMATDWANENFSGLVISEGDHVPWEYKENEVIEGARYAHKDEMKEAVKHWAVSLQREFRVVKSTNYVYEVRCMKEDCPWRVHAYKGKWNDYWKVSIVTEHKCYLQGVEKYHRNITSAFVASEMYSSVVGKYRGQILTAIGCDGNNQVLPMAFAFVESENTESWYWFLERVHIAVVRMRPNVCLIHDRHAGMLRAIDYLQNGWDEKGLPAKWPDVRSRWCMRHMGANFYKQFKNKHLMELFKRLCAQNQEKKFNELWDKLDELTTKQTDEQSRRPQVEGDEPPIPLGALHDDPPTMRRRSGSSIRNFSQWIENEPKEKWSLLFDTDGSRYGIMTTNLAEVYNWVMRGVRVLPLVAIVEFILHGTQAYFRDRYKKIGPSMADNNIVFGNVVTKYMEDKIKKARRHRVVAQGTQVHRKEAIFHTWSEEIYGFGISGSYTTLSAQVFYIPDPSKLRVKKGRRQTRRIRNDMDESEAGGRTLRCSKCDLRGHTYKQCPKNAEVPSGADASPSGQASDGMAYDTPALLNRAIDRNHRSFLSAVEGAQLGTFRPRTSREWLRVDPRHVPWLRAAGLLPLCRLVEAAADDRDPAKRWDADRSLLAALVDRWRPKTHTFHLPCGEMAPTLQDVSYLLGLPLAGAPVGPVDGVFGWKEDITARFEQVMRLPHLGPTSTLPPYSTVGPSKAWLLQFTADLLHPEADDYSVRRSLEAYLLWLFGWVMFTSTHGHAVDFRLVHYARSIADAQPQDVPQWSWGSAVLAATYRALCEACTKTDAGAIIAGCPMLLQLWAAERFAIGRPVVDSAPYGVGRSAQWPEDGPTMGTYWCRRGVRRGYPDFVFEFDRLQPSDVIWEPYTEEAVAARAPLGLSSLCTRDQDYWLTILPMVFDIFVEPHCPQRVMRQFGLRQVFPGNVQTTVPPSDHSLTRRGQLAGALWAPRVQQYVDDWVLATEEVINELFPHTEENYRDYLRWYLPRTRARVTFTPDAPEPHVAAVTDAYPTHRDRDYFVAADAARDISADITAVQVRLNRGLHLTDVEQRATFDRMQDKMRAVMRVFSCRSAVDVVPPAGPRLPSSAFAGTTGASASSAGPFATSSGAFASSSSHGASFPRPHAGYAAGIFGTGASSSHAGRTGPTSQFYDDDLHGADHQDVLGSSQLGGAPEAHTQEQPEVTPVQAGRVGRAVPPDRLTYSQGHIRAQGRRDRVLFIHMVLEQLMLTTTHFRRFTVVPYPVARTVHNSTHEKRQLELSLSTFDAAC

SEQ ID NO: 106981 - protein, 1632 aa, Oryza sativa
  unsure (1)..(1632): unsure at all Xaa locations
  Clone ID: PAT_MRT4530_11377C.1.pep
MSSKVTFQIVHGEGNIRFGPDGVDLSDFVMTSKGIDRPAERTFQSIYSWLLRGFRIDQEVYTMSVSVVVSRATEGYFWELMPMDSTDAWRRYVEMAFERSWPLVIFVSVQEKDINVSMQTEDVEGPINAGDVVGPSMQNEENQPREEQAMGMADEGERVGIIVDEMEREDSDNEEVDDDASSDEEGDVMATDWANEDFSGLVISEGDHVPWEYKENEVIEGARYAHKDEMKEAVKHWAVSLQREFRVVKSTNYVYEVRCMKEDCPWRVHAYKGKWNDYWKVSIVTEHKCYLQGVEKYHRNITSAFVASEMYSSVVGNIGFEPKSIIRHIENKFKYTISYAKAWRAKQKIIEMRYGTFEASYDNLPRLLATIAQRNNNTYYDLHTFTSVDDRTKSVLQRAFFSLGACINAFVHCRPVLCIDGTFMTGKYRGQILTAIGCDGNNQVLPMAFAFVESENTESWYWFLERVHIAVVRMRPNVCLIHDRHAGMLRAIDYLQNGWDEKGLPAKWPDVRSRWCMRHMGANFYKQFKNKHLMELFKRLCAQNQEKKFNELWDKLDELTTKQTDEQSRRPLVEGDEPPIPLGALHDDPPTMRRRSGSSIRNFTQWIENEPKEKWSLWFDTDGSRYGIMTTNLAEVYNWVMRGVRVLPLVAIVEFILHGTQAYFRDRYKKIGPSMADNNIVFGNVVTKYMEDKIKKARRHRVVAQGTQVHRYEIMCVDRSRRGIYRKQAVQECVLKADGRCTCSCMKPKLHHLPCSHVLAAAGDCGISPNVYVSNYFRKEAIFHTWSEEIYGFGISGSYTTLSAQVFYIPDPSKLRVKKGRRQTRRIRNDMDESEAGGRTLRCSKCDLRGHTYKKCPKNAEVPSGADASPSGQASDGMAYDTPALLNRGIDRNHRSFLSAVEGAQLGTFRPRTSREWLRVDPRHVPWLRAAGLLPLCRLVEAAADDRDPAKRWDADRSLLAALVDRWRPETHTFHLPCGEMAPTLQDVSYLLGLPLAGAAVGPVDGFFGWKEDITARFEQVMRLPHLGPTTTLPPYSTVGPSKAWLLQFTADLLHPDADDYSVRRSLEAYLLWLFGWVMFTSTHGHAVDFRLVHYARSIADAQPQDVPQWSWGSAVLAATYRALCEACTKTDAGAIIAGCPMLLQLWAAERFAIGRPVVDSAPYGVGRSAQWPEDGPTMGTYWCRRGRHYAHVQVRRGYPDFVFEFDRLQPSDVIWEPYTEEAVAARAPLGLSSLCTRDQAYWLTILPMVFDIFVEPHCPQRVMRQFGLRQVFPGNVQPTVLPADHSLTRRGQLAGALWAPRVQQYVDDWVLATEEVINELFPHTEENYRDYLRWYLPRTRARVTFTPDAPEPHVAAVTDAYPTHRDRDYFVAASWRYIQFADAARDISADITAVQVRLNRXAVDVVPPAGPVQPRPRAPTVGAGPRPTAPISHGPRLPSSAPSFGSVRPTAPDLXLPSSAFAGTTGASTSSAGVFATSSGAFASSSSHGASIPRPHAGIFGTGASSSHAXLGGAPEAHTQEQPEVTPVQAGRVGRVVPPDRLTYSQGHIRAQEQENGQEEGWHHRRRCERPSSMQALTGQRIQPNRVRSRRHHRWRLGTHLGVNKAPGTNHGIQVLRPGMASNCDREVPKP

SEQ ID NO: 106982 - protein, 1625 aa, Oryza sativa
  unsure (1)..(1625): unsure at all Xaa locations
  Clone ID: PAT_MRT4530_11378C.1.pep
MSSKVTFQIVHGEGNIRFGPDGVDLSDFVMTSKGIDRPAERTFQSIYSWLLRGFRIDQEVYTMSVSVVVSRAIEGYFWELMPMDSTAAWRRYVEMAFERSWPLVIFVSVQEKDTNVSMRTEDVEGPSNTGDVVGPSMENEENQPREEQAMGMADEGERVGIIVDEMEREDSDNEQAEDDASSDEEGYXLAPYWAKEGFXGLFNSKGGLIAPGSLRGTKVMGGAXYVLRDEMXEGVKAWAXVSLQRELGVVQSTNXYVYKVSGMKEDCPWRVHAYKGXWNDYWKVXSIGTEHKCYLPGVXEKYHRNITSAFVASEMYSSVVGNIGFEPKSIITHIENKFKYTISYAKAWRAKQKIIEMRYGTFEASYDNLPRLLATIAQRNNNTYYDLHTFTSVDDRTKSVLQRAFFSLGACINAFVHCRPVLCIDGTFMTGKYRGQILTAIGCDGNNQVLPMAFAFVESENTESWYWFLERVHIAVVRMRPNVCLIHDRHAGMLRAIDYLQNGWDEKGLPAKWPDVRSRWCMRHMGANFYKQFKNKHLMELFKRLCAQNQEKKFNELWDKLDELTTKQTDEQSRRPQVEGDEPPIPLGALHDDPPTMRRRSGSSIRNFTQWIENEPKEKWSLLFDTDGSRYGIMTTNLAEVYNWVMRGVRVLPLVAIVEFILHGTQAYFRDRYKKIGPSMADNNIVFGNVVTKYMEDKIKKARRHRVVAQGTQVHRYEIMCVDRSRRGIYRKQAVQECVLKADGGCTCSCMKPKLHHLPCSHVLAAAGDCGISPNVYVSNYFRKEAIFHTWSEEIYGFGISGSYTTLSAQVFYIPDPSKLRVKKGRRQTRRIRNDMDESEAGGRTLRCSKCDLRGHTYKKCPKNAEVPSGADASPSGQASDGMAYDTPALLNRGIDRNHRSFLSAVEGAQLGTFRPRTSREWLRVDPRHVPWLRAAVLLPLCRLVEAAADDRDPAKRWDADRSLLAALVDRWRPETHTFHLPCGEMAPTLQDVSYLLGLPLAGAPVGPVDGVFGWKEDITARFEQVMRLPHLGPANTLPPYSTVGPSKAWLLQFTADRLHPDADDYSVRRSLEAYLLWLFGWVMFTSTHGHAVDFRLVHYARSIADAQPQDVPQWSWGSAVLAATYRALCEACTKTDAGAIIAGCPMLLQLWAAERFAIGRPVVDSAPYGVGRSAQWPEDGPTMGTYWCRRGRRYAHVQVRRGYPDFVFEFDRLQPSDVIWEPYTEEAVAARAPLGLSSLCTRDQAYWLTILPMVFDIFVEPHCPQRVMRQFGLRQVFPGNVQPTVPPADHSLTRRGQLAGALWAPRVQQYVDDWVLATEEVINELFPYTEKNYRDYLRWYLPRTRARVTFTPDAPEPHVAAVTDAYPTHRDRDYFVAADATRDISADITAVQVRLNRGLHLTDVEQRVTFARMQEKMRAVMRVFSCRSAMDVVPPAGPRLPSSAFAGTTGASASSAGAFATSSGAFASSSSHGASIPRPHAGYVAGIFGTGASSSHAGRTGPTSQFYDDDLHGADHQDVLGSSQLGGAPEAHTQEQPEVTPVQAGRVGRAVPPDRLTYSQGHIRAQGRRDRVLFIHMVLEQLMLTTTHFRRFTVVPYPVARTVHNSTHEKRQLELSLSTFGAAC

SEQ ID NO: 106983 - protein, 1493 aa, Oryza sativa
  unsure (1)..(1493): unsure at all Xaa locations
  Clone ID: PAT_MRT4530_11379C.1.pep
MSNKVTFQIVHGEGNIRFGPDGVDLSDFVMTSKGIDRPVEKTFQSIYSWLLRGFRIDQEVYTMSVSVVVSRATEGYFWELMPMDSTAAWRRYVKMAFERSWPLVIFVSVQEKDINVSMQTEDVEGPINARDVVGPSMQNEKNQPREEQAMGMADEGERVGIIVDEMEREDSDNEEANDDASSDEEGDVMATDWANEDFSGLVISEGDHVPWEYKENEVIEGARYAHKDEMKEAVKHWAVSLQREFRVVKSTNYVYEVRCMKEDCPWRVHAYKGKWNDYWKVSIVTEHKCYLQGVEKYHRNITSAFVVSEMYSSVVGNIGFEPKSIIRHIENKFKYTISYAKAWRAKQKIIEMRYGTFEASYDNLPRLLATIAQRNNNTYYDLHTFTSVDDRTKSVLQRAFFSLGACINAFVHCRPVLCIDGTFMTGKYQGQILTAIGCDGNNQVLPMAFAFVESENTESWYWFLERVHIAVVRMRPNVCLIHVRHAGMLRAIDYLQNGWDEKGLPAKWPDVRSRWCMRHMGANFYKQFKNKHLMELFKRLCAQNQEKKFNELWDKLDELTTKQTDEQSRRPQVEGDEPPIPLGALHNDPPTMRRRSGSAIRNFTQWIENEPKEKWSLLFDTDGSRYGIMTTNLAEVYNWVMRGVRVLPLVAIVEFILHGTQAYFRDRYKKIGPSMADNNIVFGNVVTKYMEDKIKKVRRHRVVAQGTQVHRYEIMCVDRSRRGIYRKQAVQECVLKADGGCTCSCMKPKLHHLPCSHVLAAAGDCGISPNVYVSNYFRKEAIFHTWSEEIYGFGISESYTTLSAQVFYIPDPSKLRVKKGRRQTRRIRNDMDESEAGGRTLRCSKCDLRGHTYKKCPKNAEVPSGADASPSGQASDGMAYDTPALLNRGIDRNHRSFLSAVEGAQLDTFRPRTSREWLRVDPRHVPWLRAAGLLPLCRLVEAAADDRDPAKRWDADRSLLAAQVDRWRPETHTFHLPCGEMAPTLQDVSYLLGLPLAGAPVGPVDGVVGWKEDITARFEXHAVDFRLVHYARSIADAQPQDVPQWSWGSAVLAATVVTLTSXVRRGYPDFVFEFDRLQPSDVIWEPYTEEAVATRAPLGLSSLCTRDQAYWLTILPMVFDIFVEPHCPQRVMRQFGLRQPYNLPRLTRRGQLAGALWAPRVQQYVDDWVLATEEVINELFPHTEENYRDYLRWYLPRTRARVTFTPDAPEPHVAAVTDAYPTHRDRDYFVGADAARDISADITAVQVRLNRGLHLTDVEQRVTFDRMQEKMRAVMRVFSCRSAVDVVPPAGPVQPRPRAPXSEQDLDLRHLFXRTSSAFERVRRHDRRFRELRRGVRHLFGRVRQLFLSRSVDPSPTXGFAAGIFGTGASSSHAGRTGPTSQFYDDDLHGAHHHDVLGSSQLGGAPEAHTQEQPEVTPVQAGRVGRAVPPDRLTYSQGHIRAQGRRDRGQSKDGWIYSMDRQCHSIISWPEDNRVRNTSRVSTIEGPRECNAF

SEQ ID NO: 106984 - protein, 551 aa, Oryza sativa
  Clone ID: PAT_MRT4530_1137C.1.pep
MAAAAAAATATASSGLIRCATGGAPAHGHHQVFRCSAAKPSPLALRHRAGRPAPLQAFPEYDRVTPFDYDGEVDGGDGDDHPREECGVFGVVGDPDATSLCYLGLQKLQHRGEEGAGIAAAGDDGTIKLERGLGLVGDVFGDPARLGKLPGQAAIGHVRYSTAGAAASLRNVQPFLAGYRFGQLAVAHNGNLVNYQALRNKLEAQGSIFSTSSDTEVILHLIATSLSRPLLARICDACERLAGAYSLLFLTADKLLAVRDPFGFRPLVMGRRANGAIVFASETCALDLIDATYEREVEPGEVVVVDRRDMSVSSACLVPHRPRKSCVFEHIYFALPNSVVFGHAVHERRNAYGRALAEESPAPTADVVIPVPDSGFYAALGFSQTSGLEFQQGLIRWHYSGRSFIQPSQAIRDLAVKLKLAPVHGVIRGKSVVVVDDSLVRGTTSSKIVRLLRDAGAREVHMRIASPPVIGSCLYGIDTPSEGELISNRMDLEGVRRAIGCDSLAFLSLDKLHTIYGDEAHELCDACFSRNYPVLPTVPEPVPELVSAFED

SEQ ID NO: 106985 - protein, 510 aa, Oryza sativa
  Clone ID: PAT_MRT4530_11380C.1.pep
MGSPPPPRRRCCAIQGFVVLFLVYVLAVLVLAGGELFRDDHPLDLRFPSSPGIGSSSSSSARFLLSPRSLLLRLGEIASRRGRWWRPESDSPTSGGRKDGNSSTTEACSRRCAASGLMGISLRLAEQFSAEEDGGGGGGNLVFSPLSIYSALSVVTAGARGTTLTELLAALGAPSRDALAKNAAEIARALAGGTATGGPRVAHACGLWHERTRSLKLAFRDAAAASFNAATRAVDFLANPEEARKEINSWVAAATENLIDTILPPGSVSTDTGLVVTSAIYFNGTWQTPFRKQDTKKDKFHLLDGHGTVDADFMRTGEDQYIAAHDGFKVLKMPYAHDHAAPQPSPRYYSMYILLPDERDGLSSLEDRMAAAGGGGGGEGFLSEHMPVRRVEVGEFRIPRFKLSFSRSVVRALRGVGVNAVFDRAELPDMIEGEPLRVSDVLHKAVIEVNEEGTEAAAATAVLMEGAARYAPPPPPREDFVADHPFAFFVVEESSGAVLFAGHVVDPTKS

SEQ ID NO: 106986 - protein, 1634 aa, Oryza sativa
  Clone ID: PAT_MRT4530_11381C.1.pep
MSSKVTFQIVHGEGNIRFGPDGVDLSDFVMTSKGIDRPAERTFQSIYSWLLRGFRIDQEVYTMSVSVVVSRAIEGYFWELMPMDSTAAWRRYVEMAFERSWPLVIFVSVQEKDTNVSMQTEDVEGPSNAGDVVGPSMQNEENQPREEQAMGMADEGERVGIIVDEMEREDSDNEQAEDDASSDEEGDVMATDWANEDFSGLVISEGDHVPWEYKEYEVIEGARYAHKDEMKEAVKHWAVSLQREFRVVKSTNYVYEVRCMKEDCPWRVHAYKGKWNDYWKVSIVTEHKCYLQGVEKYHRNITSAFVASEMYSSVVGNIGFEPKSIIRHIENKFKYTISYAKAWRAKQKIIEMRYGTFEASYDNLPRLLATIAQRNNNTYYDLHTFTSVEDRTKSVLQRAFFSLGACINAFVHCRPVLCIDGTFMTGKYRGQILTAIGCNGNNQVLPMAFAFVESENTESWYWFLERVHIAVVRMRPNVCLIHDRHAGMLRAIDYLQNGWDEKGLPAKWPDVRSRWCMRHMGANFYKQFKNKHLMELFKRLCAQNQEKKFNELWDKLDELTTKQTDEQSRRPQVEGDEPPIPLGALHDDPPTMRRRSGSAIKNFSQWIENEPKEKWALLFDTDGSRYGIMTTNLAEVYNWVMRGVRVLPLVAIVEFILHGTQAYFRDRYKKIGPSMADNNIVFGNVVTKYMEDKIKKARRHRVVAQGTQVHRYEIMCVDRSRRGIYRKQAVQECVLKADGGCTCSCMKPKLHHLPCSHVLAAAGDCGISPNVYVSNYFRKEAIFHTWSEEIYGFGISGSYTTLSAQVFYIPDPSKFRVKKGRRQTRRIRNDMDESEAGGRTLRCSKCDLRGHTYKKCPKNAEVPSGADASPSGQASDGMAYDTPALLNRGIDRNHRSFLSAVEGAQLGTFRPRTSREWLRVDPRHVPWLRAAGLLPLCRLVEAAADDRDPAKRWDADRSLLAALVDRWRPETHTFHLPCGEMAPTLQDVSYLLGLPLAGAPVGPVDGPTTTLPPYSTVGPSKAWLLQFTADLLHPDADDYSVRRSLEAYLLWLFGWVMFTSTHGHAVDFRLVHYARSIADAQPQDVPQWSWGSAVLAATYRALCEACTKTDAGAIIAGCPMLLQLWAAERFAIGRPVVDSAPYGVGRSAQWPEDGPTMGTYWCRRGRRYAHVQVRRGYPDFVFEFDRLQPSDVIWEPYTEEAVAARAPLGLSSLCTRDQAYWLTILPMVFDIFVEPHCPQRVMRQFGLRQVFPGNVQPTVPPADHSLTRRGQLAGALWAPRVQQYVDDWVLATEEVINELFPHTEENYRDYLRWYLPRTRARVTFTPDAPEPHVAAVTDAYPTHRDRDYFVAADAARDISADITAVQVRLNRGLHLTDVEQRSTFDRMQEKMRAVMRVFSCRSAVDVVPPAGPVHPRPRGPTVGAGPRLSSSAPSFGAVRPTAPVSHGPRMPSSAFAGTTGASASSAGAFATSSGAFASSSSHGASIPRPHAGFAAGIFGTGASSSHAGRTGPTSQFYDDDLHGADHQDVLGSSQLGGAPEAHTQEQPEVTPVQAGRVGRAVPPDRLTYSHGHIRAQGRRDRVLFIHMVLEQLMLTTTHFRRFTVVSDPVARTVHNSTHEKRQLKLSLSTFGAAC

SEQ ID NO: 106987 - protein, 1597 aa, Oryza sativa
  Clone ID: PAT_MRT4530_11382C.1.pep
MSSKVTFQIVHDEGNIRFGPDGVDLSDFVMTSKGIDRPAERTFQSIYSWLLRGFRIDQEVYTMSVSVVVSRATEGYFWELMPMDSTAAWRRYVEMAFERSWPLVIFVSVQEKDINVSMQTEDVEGPINAGDVVGPSMQNEENQPREEQAMGMADEGERVGIIVDEMDREDSDNEEADDDASSDEEGDVMATDWANEDFSGLVISEGDHVPWEYKENEVIEGARYAHKDEMKEAVKHWAVSLQREFRVVKSTNYVYEVRCMKEDCPWRVHAYKGKWNDYWKVSIVTEHKCYLQGVEKYHRNITSAFVASEMYSSVVGNIGFEPKSIIRHIENKFKYTISYAKAWRAKQKIIEMRYGTFEASYDNLPRLLATIAQRNNNTYYDLHTFTSVDDRTKSVLQRAFFSLGACINAFVHCRPVLCIDGTFMTGKYRGQILTAIGCDGNNQVLPMAFAFVESENTESWYWFLERVHIAVVRMRPNVCLIHDRHAGMLRAIDYLQNGWDEKGLPAKWPDVRSRWCMRHMGANFYKQFKNKHLMELFKRLCAQNQGKKFNELWDKLDELTTKQTDDQSRRPQVEGDEPPIPLGALHDDPPTMRRRSGSSIKNFTQWIKNEPKEKWSLLFDTDGSRYGIMTTNLAEVYNWVMRGVRVLPLVAIVEFILHGTQAYFRDRYKKIGPSMADNNIVFGNVVTKYMEDKIKKARRHRVVAQGTQVHRYEIMCVDRSRRGIYRKQAMQECVLKADGGCACSCMKPKLHHLPCSHVLAAAGDCGISPNVYVSNYFRKEAIFHTWSEEIYGFGISGSYTTLSAQVFYVPDPSKLRVKKGRRQTRRIRNDMDESEAGGRTLRCSKCDLRGHTYKKCPKNAEVPSGADASPSGHSSDGMAYDTPALLNRGIDRNHRSFLSAVEGAQLGTFRPRTSREWLRVDPRHVPWLRAAGLLPLCRLVEAAADDRDPAKRWDADRSLLAALVDRWRPETHTFHLPCGEMAPTLQDVSYLLGLPLAGAPVGPVDGVFGWKEDITARFEQVMRLPHLGPANTLPPYSTVGPSKAWLLQFTADLLHPDADDYSVRRSLEAYLLWLFGWVMFTSTHGHAVDFRLVHYARSIADAQPQDVPQWSWGSAVLAATYRALCEACTKTDAGAIIAGCPMLLQLWAAERFAIGRPVVDSAPYGVGRSAQWPEDGPTMGTYWCRRGRRYAHVQVRRGYPDFVFEFDRLQPSDVIWEPYTEEAVAARAPLGLSSLCTRDQAYWLTILPMVFDIFVEPHCPQRVMRQFGLRQVFPGNVQPTVLPADHSLTRRGQLAGALWAPRVQQYVDDWVLATEEVINELFPHTEENYRDYLRWYLPRTRARVTFTLDAPEPHVAAVTDAYPTHRDRDYFVAADAARDISADITAVQVRLNRGLHLTDVEQRVTFDRMQQKMRAVMRVFSCRSAVDVVPPAGPVQPRPRAPTVGAGPRPTAPVSHGPRLPSSAFAGTTGASASSAGAFATSSGAFASSSSHGASIPRLHAGFAAGIFGTGVSSSHAGRTGPTSQFYDDDLHGAHHHDVLGSSQLGGAPEAHTQEQPEVTPVQAGRVGRAVPPDRLTYSQGHIRAQGRRDRGKRPRQ

SEQ ID NO: 106988 - protein, 1571 aa, Oryza sativa
  Clone ID: PAT_MRT4530_11383C.1.pep
MSNKVTFQLVHGEGNIRFGPDGVDLSDFVMTSKGIDRPAERTFQSIYSWLLRGFRIDQEVYTMSVSVVVSRATEGYFWELMPMDSTAAWRRYVEMAFERSWLLVIFVSVQEKDINVSMQTEDVEGPINAGDVVGPSMQNEENQPREEQAMGMADEGERVGIIVDEMEREDSDNEEADDDASSDEEEGDHVPWEYKENEIIDGARYAHKYEMKEAVKHWAVSLQREFRVVKSTNYVYEVRCMKEDCPWRVHAYKGKWNDYWKVSIVTEHKCYLQGVEKYHRNITSAFVASEMYSSVVGNIGFEPKSIIRHIENKFKYTISYAKAWRAKQKIIEMRYGTFEASYDNLPRLLATIAQRNNNTYYDLHTFTSVDDRTKSVMQRAFFSLGACINAFVHCRPVLCIDGTFMTESENTESWYWFLERVHIAVVRMRPNVCLIHDRHARMLRAIDYLQNGWDEKGLPAKWPDVRSRWCMRHMGANFYKQFKNKHLMELFKRLCVQNQEKKFNELWDKLDELTTKQTDEQSRRPQVEGDEPPIALGALHDDPPTMRRRSGSSIRNFTQWIENEPKEKWSLLFDTDGSRYGIMTTNLAEVYNWVMRGVRVLPLVAIVEFILHGTQAYFRDRYKKIGPSMADNNIVFGNVVTKYMEDKFKKARRHRVIAQGTQVHRYEIMCVDRSGRGIYRKQAVQECVLKADGGCTCSCMKPKLHHLPCSHVLAAAGDCGISPNVYVSNYFRKEAIFHTWSEEIYGFGILGSYTTLSAQVFYIPDPSKLRVKKGRRQTRRIRNDMDESEAGGRTLRCSKCDLRGHTYKKCPKNAEVPSGADASPSGQASDGMAYDTSALLNRGIDRNHRSFLSAVEGAQLGTFRPRTSREWLRVDPRHVPWLRATGLLPLCRLVEAAADDRDPAKRWDADRSLLAALVDRWRPETHTFHLPCGEMAPTLQDVSYLLGLPLAGAPVGPVDGVFGWKEDITARFEQVMRLPHLGPANTLPPYSTVGPSKAWLLQFTAYLLHPDADDNSVRRGYPDFVFEFDRLQPSDVIWEPYTEEAVAARAPLGLSSLCTRDQAYWLTILPMVFDIFVEPHCPQRVMRQFGLRQVFPGNVQPTVLPADHSLTRRGQLAGALWAPRVQQYVDDWVLATEEVINELFPHTEENYRDYLRWYLPRTRARVTFTPDAPEPHVAAVTDAYPTHRDRDYFVGADAARDISADITAVQVRLNRGLHLTDVEQRVTFDRMQEKMRAVMRVFSCRSAVDVVPPAGPVQPRPRAPTVGAGPRPTVPVSHAGFAAGIFGTGASSSHAGRTGPTSQFYDDDLHGAHHHDVLGSSQLGGAPEAHTQEQPEVTPVQAGRVGRAVPPDRLTYSQGHIRAQGRRDRVLFIHMVLEQLMFTTTHFRRFTVVQPLHIFFPTSTQHTKMEAPFLERLNWRSDPFAGWFPPWCDRPLCDCGDGCILKSSLMIQTRGRRFFQCANFDQTYRPMCNFIEWVDMENPQNDGTRAYPRSETRSDYLRRKDEHERRIAAEALEWHGNPRMGGFTRWIDNVTLSYHGQKITESETQVEYQRLKDHENTMHSDRPRRGR

SEQ ID NO: 106989 - protein, 1574 aa, Oryza sativa
  Clone ID: PAT_MRT4530_11384C.1.pep
MSNKVTFQIVHGEGNIRFGPDGVDLSDFVMTSKGIDRPAEKTFQSIYSWLLRGFRIDQEVYTMSVSVVVSRATEGYFWELMPMDSTAAWRRYVEMAFERSWPLVIFVSVQEKDINVSMQTEDVEGPINARDVVGPSMQNEENQPREEQAMGMADEGERVGIIVDEMEREDSDNEEADDDASSDEEGDVMATDWANEDFSGLVISEGDHVPWEYKENEVIEGARYAHKDEMKEAVKHWAVSLQREFRVVKSTNYVYEVRCMKEDCPWRVHAYKGKWNDYWKVSIVTEHKCYLQGVEKYHRNITSAFVASEMYSSVVGNIGFEPKSIIRHIENKFKYTISYAKAWRAKQKIIEMRYGTFEASYDNLPRLLATIAQRNNNTYYDLHTFTSVDDRTKSVLQRAFFSLGACINAFVHCRPVLCIDGTFMTGKYRGQILTAIGCDGNNQVLPMAFAFVESENTESWYWFLERVHIAVVRMRPNVCLIHDRHTGMLRAIDYLQNGWDEKGLPAKWPDVRSRWCMRHMGANFYKQFKNKHLMELFKRLCAQNQEKKFNELWDKLDELTTKQTEEQSCRPQVEGDEPPIPLGALHDDPPTMRRRSGSAIRNFTQWIENEPKEKLSLLFDTDGSRYGIMTTNLAEVYNWVMRGVRVLPLVAIVEFILHGTQAYKKIGPSMADNNIVFGNVVTKYMEDKIKKARRHRVVAQGTQVHRYEIMCVDRSRRGIYRKQAVQECVLKADGGCTCSCMKPKLHHLPCSHVLAAAGDCGISPNVYVSNYFRKEAIFHTWSEEIYGFGILGSYTTLSAQVFYIPDPSKLRVKKGRRQTRRIRNDMDESEAGGRTLRCSKCDLRGHTYKKCPKNAEVPSGADASLSGQASDGMVYDTPALLNRGIDRNHRSFLSAVEGAQLGTFRPRTSREWLRVDPRHIPWLRAAGLLPLCRLVEAAADDRDPAKRWDADRSLLVALVDRWRPETHTFHLPCGEMAPTLQDVSYLLGLPLAGARVGPVDGVVGWKEDITARFEQVMRLPHLGPANTLPPYSTVGPSKAWLLQFTAYLLWLFGWVMFTSTHGHAVDFRLVHYARSIADAQPQDVPQWSWGSAVLAATYRALCEACTKTDAGAIIAGCPMLLELWAAERFAIGRPVVDSAPYGVGRSAQWPEDGPTMGTYWCRRGRRYAHVQVRRGYPDFVFEFDRLQPSDVIWEPYTEEAVAARAPLGLSSLCTRDQAYWLTILLMVFDIFVEPHCPQRVMRQFGLRQVFPGNVQPTVLPADHSLTRRGHLAGALWAPRVQQYVDDWVLATEEVINELFPHTEENYRDYLRWYLPRTRARVTFTPDAPEPHVAAVTDAYPTHHDRDYFVGADAARDISADITAVQVRLNRGLHLTDVEQRVTFDRMQEKMRAVMRVFSCRSAVDVVPPAGPVQPRPHAPTVGAGPRPTAPVSHGPRLPSSAFAGTTGASASSAGAFATSSGAFASSSSHGASIPRPHAGFAAGIFGTGASSSHAGRTGPTSQFYDDDLHGAHHHDVLGSSQLGGAPEAHTQEQPEVTPVQAGRVGRAVPPDRLTYSQGHIRAQGRRDRGKRPRQ

SEQ ID NO: 106990 - protein, 31 aa, Oryza sativa
  Clone ID: PAT_MRT4530_11385C.1.pep
ILFLKKKKKKKKKKKKKKQKPKKKKKKKKKK

SEQ ID NO: 106991 - protein, 1101 aa, Oryza sativa
  Clone ID: PAT_MRT4530_11386C.1.pep
MATLPLATGVGWVVSPVIKLMFEKVQSYISTQYKWQSNLVDDLKKLETILTEILLVVGTAERRRTLDCNQQALLRQLKDAVYDAEDIMDEFDYMFLKANAQKRKLRSLGSSSISIAKRLVGHDKFRSKLGKMLKSLSTVKECAHMLVRVMGVENFSSHMLPEPLQWRISSSISIGEFVVGRQKEREELVHQLLEQSDKPESRSKGARSTSLEVITIVGNGGIGKTTLAQLIYNDKRIEDNFDMRAWVCVSHVFDKVRITKEILTTIDKSIDLTNFNFSMLQEELKNKITMKKFLLVLDDVWYDEKVGVPINADRWRELFAPLWHGAKVIKILVTTRMGIVANTLGCATPFCLSGLESKDSWELFRRCAFSTRDPNEHLELKSIGEHIVQKLNGSALAIKAVGGHLSSNFNYEEWNRVLKSGLSNEKDIMTILRLSYECLPEHLQQCFSFCGLFPKGYYFEPDMLVNMWIAHEFIQDRGRTYGSLTSTGKSYFDELLSRSFFQALRYGGTVHYVMHDLMNDLAVHVSNGKCYRVEANEPQEIFPEVQHLSILAERVDLLRPFICWYADLHRAFASLTEMKIVGCPNITSLLDFRYFPVLKNLIIQDCPELNELQEDGHLTTLTEVLIEHCNKLVSLRSLRNLSFLSKLEIRNCLKLLKGVRVLDKSYALMLTGMHQLPCVEGSGEFHVGKKGQSIVGLKDLNELRGELAIRLLENVKTKEEAAKANLELKKHIRKLELEWGSGDHDGHTSNGCDVLNVLKPHPNLVELTISGYPGATSPTWLNSGWLSSLQLICLRDCKKWEVLPPLGDLPLLKALEVRRMDELKILDQEFLGRKGFPSLERLLLERLPKLEWSIVENDQLFPALRDLSFSGCPRLREYPTYVRTLRHIAILDKEQIHFKVFMDNFELTRSFCCLLQLNIYKCYWLMSLEGSQSLVSLKELRLENCDNLESVPDMDNMPSLQILLLRSCPQVTRLYQSGCHTALEELRIESCDGLASLEDLNELVSLRKMKVIECSALISLPDMSTFYSLKILVIGRCTQLRALPRNGLPVSLKAFFLIEGHPLLGKQFELKNGPDYNKVAALSGCMRHTNQSKIWDYSLNF

SEQ ID NO: 106992 - protein, 403 aa, Oryza sativa
  Clone ID: PAT_MRT4530_11387C.1.pep
MSTSASPSAAPSAEYTEHLSNLIAIPSLSHEHQYFLGPIGDSDPIEFISAETNRIPFRLANPNLESSPPRKSNSGKDIEYAPGLLPNGGGLAPPVIGYHAPRTSSLLQGQIREPADAGRKRKTKASGVDPSALAPKKKTKKKKSKPADDLPTLDPSIEQALDEEEIEEDVNQVAAELSDLGEKTPSASPKQTPPTPATPANFSRPPPPPSPPARPMPSDRTPSAAGSHNIEEEEQPVAPVIPVLADLFSFDIKDYLDETEEDTTSKAIAPLSYDVRRTLEDISHRLKASSLDNLVVDCGSIRTRLQEIQSLIPDELADALTPAVYLEQHQFKREKAKQRLAERGERKDIEVTIQINWQLVHEEESKLDQLSEGPIKSNIDQLEAQKIELLAQLEEGNAELDLE

SEQ ID NO: 106993 - protein, 93 aa, Oryza sativa
  Clone ID: PAT_MRT4530_11388C.1.pep
MAAVAGLAAPGMERCREYDVPDTNFIFSTEIQQYGGIGGETFSGCGEFVTGGEGSYGSRNRCLPRQRRCGVHQEASTVALELFSGDHRDDQKE

SEQ ID NO: 106994 - protein, 575 aa, Oryza sativa
  Clone ID: PAT_MRT4530_11389C.1.pep
MADHIVVRYAGLVDRHPARVVKPPCTSRDTHYRDAIRITGRQGPGQNTQGAGVGHSQEWRELAPKVPRTLVLIGAAELKSLAYIDQSRHQQVRKFQKHVELLHEHLSNLVAIPSLSHEHQYFLGPIGYSDPTEFISTETNRIPFRLANPNLGHWKNTFKSWPSLEKSSPEKSWPVWYKRVSASKQVHWDELGISQALALTLVNSAKDEPLMASATYFWSNTLNAFIFNQGPMTPTLLDMLNNASVKITSGSVVGAGGPWWLLQTWLNLVAMKAVNRSSLTYAEFPRLEPITNDDGEELTHRRCMSYGEAASTPADSGSKLSAELLRDWFFSFYDGFQKDARVWFAYEDSMSFELPSDFIFEEINSKKYDKSREVFSAAISPCILPVGIHQGRNIQVSYEFYHPMSSARQFGMGQLPIGFYFADKIQCRGKISSTLMMDRLLNIPGPPLGSIDNVELARFRSTNFDKWWGEWKQHLFHQSASMYMTDLFPDVIPQTIESSPHRKSNSGKDIEYAPGLLLNGGGLAPPVIGCYAPRTSSLLQGQIREPADAGRKRKTKATRCSQMLLYYVPGQGGLK

SEQ ID NO: 106995 - protein, 339 aa, Oryza sativa [sequence omitted]

SEQ ID NO: 106996 - protein, 240 aa, Oryza sativa
  unsure (1)..(240): unsure at all Xaa locations
  Clone ID: PAT_MRT4530_11390C.1.pep
GAPAPSSSPSPSATAALIFIPASTPAMAGKIKTVVVLVQENRSFDHMLGWMKSLNPEIDGVTGAEFNRATAGDPSSPAIHFGDGSGYVDPDPGHSFQAIYEQVYGDXTRGGPPRMSGFAQEAEKERAGMSSTVMNGFRPEKVPVYRELVREFAVCDRWFASVPTSTQPNRMFVHSATSHGLVSNDGKQLRAGLPQRTIFDALHDAGHSFGVYYQFPPSVLFYREEHKMVWSTYLHERPYK

SEQ ID NO: 106997 - protein, 51 aa, Oryza sativa
  Clone ID: PAT_MRT4530_11391C.1.pep
MGHSLHHGLVTVVAGFGGWTNGSGDLEAGLAPCRVSFSFLHLSIPPASRTF

SEQ ID NO: 106998 - protein, 227 aa, Oryza sativa
  unsure (1)..(227): unsure at all Xaa locations
  Clone ID: PAT_MRT4530_11392C.1.pep
MAYPKNRAYSMANSENSPLQAVGYTRXDSSSNQRGRSAELPAQIPPRSPTVSPLLLLLPPPXLAESQRISAKNPQHMEGQEEEDEEFFASIDSLWFFSSVFLLPPPVKEKTKCPPPGPGELQPEERDSPEIHEKDGDCGHEDPGGVRKAVAPVAGGRRAAAAARGRVVEEERMDMWQEQCRQMRVAAAAAAAAPARCSPLPMPRTSDGPAMRAHLRSWAHAVACSVR

SEQ ID NO: 106999 - protein, 66 aa, Oryza sativa
  Clone ID: PAT_MRT4530_11393C.1.pep
REDRDNPGWSFFLLLFYFLPNRMACTSQIKPQIPNKVTSQIHITNPKSTSQILKLLIHTNLKHHKS

SEQ ID NO: 107000 - protein, 324 aa, Oryza sativa
  Clone ID: PAT_MRT4530_11394C.1.pep
MVSSALPRGEPVTHICVDLADPAAVSAALAPLTDITHVFYVAWAPHFFEEDQNREANSRMLRNVLSAVVPNCPALVHVSLQTGSKHYIGPPESIGKFTIETPFSEDMPRLDNCPNLYYDQEDALFDAVSRSRRRGAAVISWSVHRPSLVFGFSPQSAMNVVCTLCVYAAICRKEGGRKLRWPGSLGAWEGFSNASDADLVAEQHIWAAVDPAARNEAYNCSNGDVYKWKQLWTVLAGRFGMEWSGYEGEESREGLVAAAELDQVANWWFVDALFMDKWEFLDTMNKSKEHGFLGFRNTVKSFGTWIDKLRLYKIVPSCRIVSSL

SEQ ID NO: 107001 - protein, 95 aa, Oryza sativa
  unsure (1)..(95): unsure at all Xaa locations
  Clone ID: PAT_MRT4530_11395C.1.pep
MRILMVGLDTSGRTTILYKLKLGKIKLTIPTTGSKVEAVECNNIRSTVWEGXGQNTNRPLCRHYLENTQELICEADNNHTDTLNEARYDAAQDAE

SEQ ID NO: 107002 - protein, 86 aa, Oryza sativa
  Clone ID: PAT_MRT4530_11396C.1.pep
IFFFFGAVDISCSTLSNRCGLFKLLGASAGTILECLPVKTHRVSSHVVYACRFADQYPQFYVFIRRNAGMYINSNGPVAFSCRKLT

SEQ ID NO: 107003 - protein, 542 aa, Oryza sativa
  Clone ID: PAT_MRT4530_11397C.1.pep
MGRQVRKHEGSHGKVDAPPPKKPRSTERPLAPLAAATTTAKPRRDVVRPAARKSSASSDRGPVAPGSDLETEGQLGHKHECSHNKLDVGLLPKTPKDSDRLGTPLFVSGNPGLHGSCGCGPGSDLDSDDSDGLGCLTPDSTKATLQQDDYGKGEYSPGVVLSKTVADVQDLPVEDLRDNEVITVDSEGPGKPLQSIPLVQDKDAIQLARTFVNEKVKELMEGVSEPGVLQSRLSKITSFLVQATSIAAGLHDEVPLQIRGQTAALVTQISGLEQQVEELSKKLCSTEDELEVTNAMLKETQAAMLEAQSDRATAITAMNSLAMRMGASFARLGTILDPPPNAADSLEKSIKQMTALVSLLGPVSHSHSLSLARSSLTVGIAALLCRERGIEGLREPSGMDTRQFVRSQGPEFHSLISQVVDSMEQRLAKMVEGSGWRDSGATKEPGKPADTQLTDCQYSMYRALAVWILQCLLLPQGGFHSCRYLQVLAGELHRKDAPSHPTAVIDPCRPHPLCIAISSAIDQEMDLLFTASPPSFCQGHRH

SEQ ID NO: 107004 - protein, 40 aa, Oryza sativa
  Clone ID: PAT_MRT4530_11398C.1.pep
MDSSFNFRAPAPASPLLELELSQIVSAPPKLGVELGGALS

SEQ ID NO: 107005 - protein, 189 aa, Oryza sativa
  Clone ID: PAT_MRT4530_11399C.1.pep
MGRSAREGGPRHARGEGGGGGTGGPGPPCMVPSGTRLLAARLTVAPTWRLRGCHAGRREEDDNVGRNGRRTAAASGGEIYGDAGEGEHTGRLHGTRGDELMARIRRRKLDGSRLRRRQPAARKEGNGDDATRVRFLRTRASTRSPESIPRIGLSGATTREAGDERRLPSTGGGGGEHTASGGSRRGGAS

SEQ ID NO: 107006 - protein, 67 aa, Oryza sativa
  Clone ID: PAT_MRT4530_1139C.1.pep
MARIPFAAIVVAILSFAIAAAAQAPAPSPTSDGTSVDQGIAYLLMIVALVLTYLIHPLDASSAYKLF

SEQ ID NO: 107007 - protein, 231 aa, Oryza sativa
  unsure (1)..(231): unsure at all Xaa locations
  Clone ID: PAT_MRT4530_113C.1.pep
YDLAPALSPHRPVSPRLLGTLLSRLPDACRGVALLDLLAPDLPTSALLILYNLLLCSTCRAGMLRLASGLLLDMRDRGVAANAFSYSTLLAALTRAGHLDHALTFLPLMEDDAVAPDLVLFSNLIHLALREGDAPKXALALFSRLRGAGWPPDSAPPSGPTTAAIGRVLAGPTLLLGHPTGSSFQDWPLDGGVARPGRLNPPGARPVSPPTGDPYHTCSPLVPVTPRLSVE

SEQ ID NO: 107008 - protein, 1672 aa, Oryza sativa
  unsure (1)..(1672): unsure at all Xaa locations
  Clone ID: PAT_MRT4530_11400C.1.pep
MSNKVTFQIVHGEGNIRFGPDGVDLSDFVMTSKGIDRPAERTFQSIYSWLLRGFRIDQEVYTMSVSVVVSRATEGYFWELMPMDSTAAWRRYVEMAFERSWPLVIFVSVQEKDINVSMQTEDVEGPINAGDVVGPSMQNEENQPREKQAMGMADEGERVGIIVDEMEREDSDNEEADDDASSDEEGDVMATDWANEDFSGLVISEGDHVPWEYKENEVIDGARYAHKDEMKEAVKHWAVSLQREFRVVKSTNYVYEVRCMKEDCPWRVHAYKGKWNDYWKVSIVTEHKCYLQGVEKYHRNITSAFVASEMYSSVVGNIGFEPKSIIRHIENKFKYTISYAKAWRAKQKIIEMRYGTFEASYDNLPRLLATIAQRNNNTYYDLHTFTSVDDRTKSVLQRAFFSLGACINAFVHCRPVLCIDGTFMTGKYRGQILTAIGCDGNNQVVPMAFAFIESENTESWYWFLERVHIAVVRMRPNVCLIHDRHAGMLRAIDYLQNGWDEKGLPAKWPDVRSRWCMRHMGANFYKQFKNKHLMELFKRLCAQNQEKKFNELWDKLDELTTKQTDEQSRRPQVEGDEPPIPLGALHDDPPTMRRRSGSSIRNFTQWIENEPKEKWSLLFDTDGSWYGIMTTNLAEVYNWVMRGVRILPLVAIVEFILHGTQAYFSDRYKKIGPSMADNNIVFGNVVTKYMEDKIKKARRHRVVAQGTQVHRYEIMCVDRSRRGIYRKQAVQECVLKADGGCTCSCMKPKLHHLPCSHVLAAAGDCGISPNVYVSNYFRKEAIFHTWSEEIYGFGISGSYTTLSAQVFYIPDPSKLRVKKGRRQTRRIRNDIDESEAGGRTLRCSKCDLRGHTYKKCPKNAEVPSGADASPSGQASDGMAYDTPALLNRGIDRNHRSFLSAVEGAQLGTFRPRTSREWLRVDPRHVPWLRAAGLLPLCRLVEAAADNRDPAKRWDADRSLLAALVDRWRPETHTFHLPCGEMAPTLQDVSYLLGLPLAGAPVGPVDGVFGWKEDITARFEQVMRLPHLGPANTLPPCSTVGPSKAWLLQFTADLLHPDANDNSVRRSLEAYLLWLFGWVMFTSTHGHAVDFRLVHYARSIADAQPQDVPQWSWGSAVLAATYRALCEACTKTDAGAIIAGCPMLLQLWAAERFAIGRPVVDSAPYGVGRSAQWPEDGPTMGTYWCRRGRRYAHVQVRRGYPDFVFEFDRLQPSDVIWEPYTEEAVAARAPLGLSSLCTRDQAYWLTILPMVFDIFVEPHCPQRVMRQFGLRQVFPGNVQPTVLHVDHSLTRRGQLAGALWAPRVQQYVDDWVLATEEAINELFPHTEENYRDYLRWYLPRTRARVTFTPDAPEPHVAAVTDAYPTHRDRDYFVGADAARDISADITAVQVRLNRGLHLTDVEQRMTFDRMQEKMRAVMRIFSCRSAVDVVPPAGPVQPRPRAPTVGAGPRPTVPVSHAGFAAGIFGTGASSSHAGRTGPTSQFYDDNLHGAHHHDVLGSSQLGGAPEAHTQEQPEVTPVQAGRVGRAVPPDRLTYSQGHIRAQGRRDRVLFVHMVLEQLMLMTTHFRRFTTYRPMCNFIEWVDMENPQNDGTRAYPRSETRSDYLRWKDEHERRIAAEALEWHVNPLGLPMWRERPECRCGDRCQVIRYVRQRTXGQRCFVCPNIVDDDFIFI

SEQ ID NO: 107009 - protein, 1554 aa, Oryza sativa
  unsure (1)..(1554): unsure at all Xaa locations
  Clone ID: PAT_MRT4530_11401C.1.pep
MSSKVTFQIVHGEGNIRFGPDGVDLSDFVMTSKGIDRPAERTFQSIYSWLLRGFRIDQEVYTMSVSVVVSRATEGYFWELMPMDSTDAWRRYVEMAFERSWPLVIFVSVEEKDINVSMQTEDVEGPINAGDVVGPSMQNEENQPREEQAMGMADEGERVGIIVDEMEREDSDNEEVDDDASSDEEGDVMATDWANEDFSGLVISEGDHVPWEYKENEVIEGARYAHKDEMKEAVKHWAVSLQREFRVVKSTNYVYEVRCMKEDCPWRVHAYKGKWNDYWKVSIVTEHKCYLQGVEKYHRNITSAFVASEMYSSVVGNIGFEPKSIIRHIENKFKYTISYAKAWRAKQKIIEMRYGTFEASYDNLPRLLATIAQRNNNTYYDLHTFTSVDDRTKSVLQRAFFSLGACINAFVHCRPVLCIDGTFMTGKYRGQILTAIGCDGNNQVLPMAFAFVESENTESWYWFLERVHIAVVRMRPNVCLIHDRHAGMLRAIDYLQNGWDEKGLPAKWPDVRSRWCMRHMGANFYKQFKNKHLMELFKRLCAQNQEKKFNELWDKLDELTTKQTDEQSRRPLVEGDEPPIPLGALHDDPPTMRRRSGSSIRNFTQWIENEPKEKWSLLFDTDGSRYGIMTTNLAEVYNWVMRGVRVLPLVAIVEFILHGTQAYFRDRYKKIGPSMADNNIVFGNVVTKYMEDKIKKARRHRVVAQGTQVHRYEIMCVDRSRRGIYRKQAVQECVLKADGGCTCSCMKPKLHHVPCSHVLAAAGDCGISPNVYVSNYFRKEAIFHTWSEEIYEFRISGSYTTLSAQVFYIPDPSKLRVKKGRRQTRRIRNDMDESEAGGRTLRCSKCDLLGHTYKKCPKNAEVPSGADASPSGQASDGMAYDTPALLNRGIDRNHRSFLSAVEGAQLGTFRPRTSREWLRVDPRHVPWLRAAGLLPLCRLVEAAADDRDPAKRWDADRSLLAALIDRWRPETHTFHLPCGEMAPTLQDVSYLLGLPLAGAAVGPVDGVFGWKEDITARFEQVMRLPHLGPTTTLPPYSIVGPSKAWLLQFTADLLHPDADDYSVRRSLEAYLLWLFGWVMFTSTHGHAVDFRLVHYARSIADAQPQDVPQWSWGSAVLAATYRALCEACTKIDAGAIIAGCPMLLQLWAAERFAIGRPVVDSAPYGVGRSAQWPEDGPTMGTYWCRRGRRYAHVQVRRGYPDFVFEFDRLQPSDVIWEPYTEEAVAARAPLGLSSLCTRDQAYWLTILPMVFDIFVEPHCPQRVMRQFGLRQVFPGNVQPTVLPADHSLTRRGQLAGALWAPRVQQYVDDWVLATEEVINELFPHTEENYRDYLRWYLPRTRARVTFTPDAPEPHVAAVTDAYPTHRDRDYFVAADAARDISADITAVQVRLNRGXMRPVMRVFSCRSAVDVVPPAGPXPRLPSSAFAGTTGASTSSAGAFATSSGAFASSSSHGASIPRPHAGFAAGIFGTGASSSHAGRTGPTSQFYDDDLHGADHHDVLGSSQLGGAPEAHTQEQPEVTPVQAGRVGRAVPPDRLTYSHGHIRAQVASVPFH

SEQ ID NO: 107010 - protein, 300 aa, Oryza sativa
  Clone ID: PAT_MRT4530_11402C.1.pep
MESPTSPASRLDFYDFIGRMRRPAAADLFHSIRSFLASLSQGGEPNAEVDGGRVQTFFAEMETAIRDHPLWANATNQEIDNALEGLEKYIMTKLFDRAFASSAEDVKSDMEISEKIGLLQHFVRPHHLDIPKLLHNEAAWLLAVKELQKINSFKSPREKLSCIMSCCQVINNLLLNVSMSNDRTLSGADDFLPILIYITIKESVFQTHMESARLGNHISVASTNSSQGLGTSTPGQNEESGDTEGLKFPFMDSETESLTPAEVKQLHELYRQVVTRYTLLSKALRKLSVDEDQLLNSVDD

SEQ ID NO: 107011 - protein, 1615 aa, Oryza sativa
  unsure (1)..(1615): unsure at all Xaa locations
  Clone ID: PAT_MRT4530_11403C.1.pep
MSSKVTFQIVHGEGNIRFGPDGVDLSDFVMTSKGIDRPAERTFQSIYSWLLRGFRIDQEVYTMSVSVVVSRATEGYFWELMPMDSTDAWRRYVEMAFERSWPLVIFVSVQEKDINVSMQTEDVEGPINAGDVVGPSMQNEENQPREEQAMGMADEGERVGIIVDEMEREDSDNEEVDDDASSDEEGDVMATDWANEDFSGLVISEGDHVPWEYKENEVIEGARYAHKDERKEAVKHWAVSLQREFRVVKSTNYVYEVRCMKEDCPWRVHAYKGKLKEYWKXVNIVTEHKCYLQGVEKYHRNITSAFVASEMYSSVVGNIGFEPKSIIRHIENKFKYTISYAKAWRAKQKIIEMRYGTFEASYDNLPRLLATIAQRNNNTYYDLHTFTSVDDRTKSVLQRAFFSLGACINAFVHCRPVLCIDGTFMTGKYRGQILTAIGCDGNNQVLPMAFAFVESENTESWYWFLERVHIAVVCMRPNVCLIHDRHAGMLRAIDYLQNGWDEKGLPAKWPDVRSRWCMRHMGANFYKQFKNKHLMELFKRLCAQNQEKKFNELWDKLDELTTKQTDEQSRSPLVEGDEPPIPLGALHDDPPTMRRRSGSSIRNFTQWIENEPKEKWSLLFDTDGSRYGIMTTNLAEVYNWVMRGVRVLPLVAIVEFILHGTQAYFRDRYKKIGPSMADDNIVFGNVVTKYMEDKIKKARRHRVVAQGTQVHRYEIMCVDRSRRGIYRKQAVQECVLKADGGCTCSCMKPKLHHLPCSHVLAAAGDCGISPNVYVSNYFRKEAIFHTWSEEIYGFGISGSYTTLSAQVFYIPDPSKLRVKKGRRQTRRIRNDMDESEAGMAYDTPALLNRGIDRNHRSFLSAVEGAQLGTFRPRTSREWLRVDPRHVPWLRAAGLLPLCRLVEAAADDRDPAKRWDADRSLLAALVDRWRPETHTFHLPCGEMAPTLQDVSYLLGLPLAGAAVGPVDGVFGWKEDITARFEQVMRLPHLGPTTTLPPYSTVGPSKAWLLQFTAYLLWLFGWVMFTSTHGHAVDFRLVHYARCIADAQPQDVPQWSWGSAVLAATYRALCEACTKTDAGAIIAGCPMLLQLWAAERFAIGRPVVDSAPYGVGRSAQWPEDGPTMGTYWCRRGRRYAHVQVRRGYPDFVFEFDRLQPSDVIWEPYTEEAVAARAPLGLSSLCTRDQAYWLTILPMVFDIFVEPHCPQRVMRQFGLRQVFPGNVQPTVLPADHSLTRRGQLAGALWAPRVQQYVDDWVLATEEVINELFPHTEENYRDYLRWYLPRTRARVTFTPDAPEPHVAAVTDAYPTHRDRDYFVAADAARDISADITAVQVRLNRGLHLTDVEQRVTFDRMQEKMRAVMRVFSCRSAVDVVPPAGPVQPRPRAPTVGAGPRPTAPISHGPRLPSSAFAGTTGASTSSAGAFATSSGAFASSSSHGASIPRPHAGFAAGIFGTGASSSHAGRTGPTSQFYDDDLHGADHHDVLGSSQLGGAPEAHTQEQPEVTPVQAGRVGRAVPPDRLTYSHGHIRAQGRRDREHSTKSPLRRAARGSPAKFHAPSPPICRRPPAQYKIALAEGGKGAACKIPCLPSPPICRRPPAQYKIALAEGGKGAACKFR

SEQ ID NO: 107012 - protein, 67 aa, Oryza sativa
  Clone ID: PAT_MRT4530_11404C.1.pep
HSPPPSFLFFNHQVYVPCSPRKRCPHRKFLLQPPEVNPQNPAISKIHCHNLKERGKKFQTFSFSFIE

SEQ ID NO: 107013 - protein, 49 aa, Oryza sativa
  Clone ID: PAT_MRT4530_11405C.1.pep
MDRGGPWEKMGQEPGQMGPAQVRPNHLVQPNHNLSHPGWGLAWTVLIIS

SEQ ID NO: 107014 - protein, 1499 aa, Oryza sativa
  unsure (1)..(1499): unsure at all Xaa locations
  Clone ID: PAT_MRT4530_11406C.1.pep
MSNKVTFQIVHGEGNIRFGPDGVDLSDFVMTSKGIDRPAERTFQSIYSWLLRGFRIDQEVYTMSVSVVVSRATEGYFWELMPMDSTAAWRRYVEMAFERSWPLVIFVSVQEKDINVSMQTEDVEGPINAGDVVGPSMQNEENQPREEQAMGMADEGERVGTIVDEMEREDSDNEEADDDASSDEEGDVMATDWANEDFSGLVISEGDHVPWEYKENEVIEGARYAHKDEMKEAVKHWTVSLQREFRVVKSTNYVYEVRCIKEDCPWRVHAYKGKWNDYWKVSIVTEHKCYLQGVEKYHRNITSAFVASEMYSSVVGNIGFEPKSIIRHIENKFKYTISYAKAWRTKQKIIEMRYGTFEASYDNLPRLLATIAQRNNNTYYDLHTFTSVDDRTKSVLQRAFFSLGACINAFVHCRPVLCIDGTFMTESENTKSWYWFLERVHIAVQFKNKHLMELFKRLCAQNQEKKFNELWDKLDELTTKQTDEQSRRPQVEGDEPPIPLGALHDDPPTMRRRSGSSIRNFTQWIENEPKEKWSLLFDTDGSRYGIMTTNLAEVYNWVMRGVRVLPLVAIVEFILHGTQAYFRDRYKKIGPSMADNNIVFGNVMTKYMEDKIKKARRHRVVAQGTQVHRKKTIFHTWSEEIYGFGISGSYTTLSAQVFYIPDPSKLRVKKGRRQTRRIRNDMDESEAGGRTLRCSKCDLXYKKCPKNAEVPSGADASPSGQASDGNKMLLCCMAYDTPALLNRGIDRNHRSFLSAVEGAQLGTFRPRTSREWLRVDPRHVPWLRAAGLLPLCRLVEAAADDRDPAKRWDADRSLLAALVDRWRPETHTFHLPCGEMAPTLQDVSYLLGLPLVGAPVGPVDCVFGWKEDITARFEQVMRLPHLGPANTLPPYSTVGPSKAWLLQFTADLLHPDADDYSVRRSLEAYLLLLFGWVMFTSTHGHAVDFRLVHYARFIADAQPQDVPQWSWGSAVLAATYRALCEACTKTDAGAIIAGCPMLLQLWAAERFAIGRPVVDSAPYGVGRSAQWLEDGPTMGTYWCRRGRRYAHIQVRRGYPDFVFEFDCLLPSDVIWEPYTEEAVAARAPLGLSSLCTRDQAYWLTILPMVFDIFVEPHCPQRVMRQFGLRQVFPGNVQPTVLLADHSLTRRGQLAGALWAPRVQQYVDDWVLATEEVINELFPHREENYRDYLRWYLPRTRARVTFTPDAPEPHVAAVTDAYPTHRDRDYFVGADAARDISADITAVQVRLNRGLHLTDVEQRVTFDRMQQKMRAVMRVFSCRSAMDVVPPAGPDLVCLRAPXLRSSATYSTGPRLPSSAFAGTTDASASSAGAFATSSGAFASSSSHGASIPRPHVLVXAGFAAGIFGTGASSSHAGRTGPTSQFYDDDLHGAHHHDVLGSSQLGGAPEAHTQEQPEVTPVQAGRVGRAIPPDRLTYSQGHIRAQGRRDRVLFIHMVLEQLMLTTTHFRRFTVVSDPVARTVHNSTHEKRQLELSLSTFGAAC

SEQ ID NO: 107015 - protein, 68 aa, Oryza sativa
  Clone ID: PAT_MRT4530_11407C.1.pep
RGFACQVTLPACPPPALAPTLARRRPFCLLRSRAIPPPSRRLLHLSPLRATATPAPPSAAHTHMPACA

SEQ ID NO: 107016 - protein, 81 aa, Oryza sativa
  Clone ID: PAT_MRT4530_11408C.1.pep
LLGLLLEHLPEGVFMHQSTYTKRVLGKFNMDKCHPLKTPMVVQSPRRFYVPRLPPLAPHPSASALAPGRRARDRPCHLFYA

SEQ ID NO: 107017 - protein, 1654 aa, Oryza sativa
  unsure (1)..(1654): unsure at all Xaa locations
  Clone ID: PAT_MRT4530_11409C.1.pep
MSSKVTFQIVHGEGNIRFGPDGVDLSDFVMTSKGIDRPAERTFQSIYSWLLRGFRIDQEVYTMSVSVVVSRATEGYFWELMPMDSTDAWRRYVEMAFERSWPLVIFVSVQEKDINVSMQTEDVEGPINAGDVVGPSMQNEENQPREKQAMGMADEGERVGIIVDEMEREDLDNEEADDDASSDEEGDVMATDWANEDFSGLVISEGDHVPWEYNENEVIEGARYAHKDEMKEAVKHWAVSLQREFRVVKSTNYVYEVRCMKEDCPWRVHAYKGKWNDYWKVSIVTEHKCYLQGVEKYHRNITSAFVASEMYSSVVGNIGFEPKSIIRHIENKFKYTISYAKAWRAKQKIIEMRYGTFEASYDNLPHLLATIAQRNNNTYYDLHTFTSVDDRTKSVLQRAFFSLGACINAFVHCRPVLCIDGTFMTGKYRGQILTAIGCDGNNQVLPMAFAFVESENTESWYWFLERVHIAVVRMRPNVCLIHDRHAGMLRAIDYLQNGWDEKGLPAKWPDVRSRWCMRHMGANFYKQFMNKHLMELFKRLCAQNQEKKFNELWDKLDELTTKQTDEQSRRPLVEGDEPPIPLGALHDDPPTMRRRSGSSIRNFTQWIENEPKEKWSLLFDTDGSRYGIMTTNLAEVYNWVMRGVRVLPLVAIVEFILHGTQAYFRDRYKKIGPSMADNNIVFGNVVTKYMEDKIKKARRHRVVAQGTQVHRYEIMCVDRSRRVIYRKQAVQECVLKADGGCTCSCMKPKLHHLPCSHVLAAAGDCGISPNVYVSNYFRKEAIFHTWSEEIYGFGISGSYTTLSAQVFYIPDPSKLRVKKGRRQTRRIRNDMDESEAGGRTLRCSKCDLRGHTYKKCPKNAEVPSGADASPSGQASDGMAYDTPALLNRGIDRNHRSFLSAVEGAQLGTFRPRTSREWLRVDPRHVPWLRAAGLLPLCRLVEAAADDRDPAKRWDADRSLLAALVDRWRPETHTFHLPCGEMAPTLQDVSYLLGLPLAGAPVGPVDGVFGWKEDITARFEQVMRLPHLGPANTLPPYSTVGPSKAWLLQFTADLLHPDADDYSVRRSLEAYLLWLFGWVMFTSTHGHAVDFRLVHYARSIADAQPQDVPQWSWGSAVLAATYRALCEACTKTDAGAIIAGCPMLLQLWAAERFAIGRPVVDSAPYGVGRSAQWPEDGPTMGTYWCRRGRRYAHVQVRRGYPDFVFEFDRLQPSDVIWEPYTEEAIAARAPLGLSSLCTRDQAYWLTILPMVFDIFVEPHCPQRVMRQFGLRQVFPGNVQPTVLPADHSLTRRGQLAGALWAPRVQQYVDDWVLATEEVINELFPHTEENYRDYLRSRPRAARAAVTDAYPTHRDRDYFVAADAARDISADITAVQVRLNRGLHLTDVEQRVTFDRMQEKMRAVMRVFSCRSAVDVIPPAGPVQPRPRAPTVGAGPRPTAPVSHGPRLPSSAFAGTTGASASSAGAFATSSGAFASSSSHGASIPRPHAGFAAGIFGXTGASSSHAGRTGPTSQFYDDDLHGAHHHDVLGSSQLGRAPEAHTQEQPEVTPVQTYRPMCNFIEWVDMENPQNDGTRAYPRSETRSDYLRRKDEHERRIAAEALEWHGNPRMGGFTRWIDNVTPSYHGQKITESETQVEYQRLKDHENAMHSDRPRRG

SEQ ID NO: 107018 - protein, 95 aa, Oryza sativa
  Clone ID: PAT_MRT4530_1140C.1.pep
RPRLPPLIHASPYLRVRLRIWDRPSLVRVSPRLRGRSRRSATAAASGTSRHRVCNRLRCRRSSAGNQTALTEAPGIQIHASSEISKFSPQQLVVE

SEQ ID NO: 107019 - protein, 1734 aa, Oryza sativa
  Clone ID: PAT_MRT4530_11410C.1.pep
MSSKVTFQIVHGEGNIRFGPDGVDLSDFVMTSKGIDRPAERTFQSIYSWLLRGFRIDQEVYTMSVSVVVSRAIEGYFWELMPMDSTAAWRRYVEMAFERSWPLVIFVSVQEKDTNVSMQTEDVEGPSNAGDVVGPSMQNEENQPREEQAMGMADEGERVGIIVDEMEREDSDNEQAEDDASSDEEGDVMATDWANEDFSGLVISEGDHVPWEYKENEVIEGARYAHKDEMKEAVKHWAVSLQREFRVVKSTNYVYEVRCMKEDCPWRVHAYKGKWNDYWKVSIVTEHKCYLQGVEKYHRNITSAFVASEMYSSVVGNIGFEPKSIIRHIENKFKYTISYAKAWRAKQKIIEMRYGTFEASYDNLPRLLATIAQRNNNTYYDLHTFTSVEDRTKSVLQRAFFSLGACINAFVHCRPVLCIDGTFMTGKYRGQILTAIGCDGNNQVLPMAFAFVESENTESWYWFLERVHIAVVRMRPNVCLIHDRHAGMLRAIDYLQNGWDEKGLPAKWPDVRSRWCMRHMGANFYKQFKNKHLMDLFKRLCAQNQEKKFNELWDKLDELTTKQTDEQSRRPQVEGDEPPIPLGALHDDPPTMRRRSGSAIRNFSQWIENEPKEKWALLFDTDGSRYGIMTTNLAEVYNWVMRGVRVLPLVAIVEFILHGTQAYFRDRYKKIGPSMADNNIVFGNVVTKYMEDKIKKARRHRVVAQGTQVHRYEIMCVDRSRRGIYRKQAVQECILKADGGCTCSCMKPKLHHLPCSHVLAAAGDCGISPNVYVSNYFRKEAIFHTWSEEIYGFGISGSYTTLSAQVFYIPDPSKLRVKKGRRQTRRIRNDMDESEAGGRTLRCSKCDLRGHTYKKCPKNAEVPSGADASPSGQASDGMAYDTPALLNRGIDRNHRSFLSAVEGAQLGTFRPRTSREWLRVDPRHVPWLRAAGLLPLCRLVEAAADDRDPAKRWDADRSLLAALVDRWRPETHTFHLPCGEMAPTLQDVSYLLGLPLAGAPVGPVDGVFGWKEDITARFEQVMRLPHLGPTTTLPPYSTVGLSKAWLLQFTADLLHPDADDYSVMFTSTHGHAVDFRLVHYARSIADAQPQDVPQWSWGSAVLAATYRALCEACTKTDAGAIIAGCPMLLQLWAAERFAIGRPVVDSAPYGVGRSAQWPEDGPTMGTYWCRRGRRYAHVQVRRGYPDFVFEFDRLQPSDVIWEPYTEEAVAARAPLGLSSLCTRDQAYWLTILPMVFDIFVEPHCPQRVMRQFGLRQVFPGNVQPTVPPADHSLTRRGQLAGALWAPRVQQYVDDWVLATEEVINELFPHTEENYRDYLRWYLPRTRSRVTFTPDAPEPHVAAVTDAYPTHRDRDYFVAADAARDISADITAVQVRLNRGLHLTDVEQRATFDRMQEKMRAVMRVFSCRSAVDVVPPAGPVHPRPRAPTVGAGPRLSSSAPSFGAVRPTAPVSHGPRLHSSAFAGTTGASASSAGAFATSSGAFASSSSHGASIPRPHAGFAAGIFGTGASSSHAGRTGPTSQFYDDDLHGADHQDVLGSSQLGGAPEAHTQEQPEVTPVQAGRVGRAVPPDRLTYSQGHIRAQGRRDRVLFIHKVLEQLMLTTTHFRRFTCYRRLVDQLDFAIAVNDMLVGLTPRTATLSLVRRAPFSAMPELPCHHIYMADAGVQIAVFESIDLASWHPRNQCPKSSHLIELVGAQLPPDQMCPLSLHPSFHMDLTSANTANIRSGNLRYQVP

SEQ ID NO: 107020 - protein, 52 aa, Oryza sativa
  Clone ID: PAT_MRT4530_11411C.1.pep
MGKEEETGALKLIVVPMRKKKRMGGILLTLSTPNKSFPTFINSYAIVTPKIH

SEQ ID NO: 107021 - protein, 157 aa, Oryza sativa
  Clone ID: PAT_MRT4530_11412C.1.pep
MGFVSFAGRVLFASVFLLSAYQEFSEFGADGGPAAKALRPKYNVFTKNISAHLGVAVPHVELKHIVAATIGLKGLGGLLFILSSSFGAYLLLIYLAFITPVVYDFYNYDMEKSEFVQLFMKFTQNLALFGALLFFLGMKNSIPKRQAKKKAPKSKTN

SEQ ID NO: 107022 - protein, 1603 aa, Oryza sativa
  Clone ID: PAT_MRT4530_11413C.1.pep
MSSKVTFQIVHGEGNIRFGPDGVDLSDFVMTSKGIDRPAERTFQSIYSWLLRGFRIDQEVYTMSVSVVVSRATEGYFWELMPMDSTAAWRRYVEMAFERSWPLVIFVSVQEKDTNVSMRTEDVEGTSNAGDVVGPSMGNEENQPREEQAMGMADEGERVGIIVDEMEREDSDNEQVEDDASSDEEGDVMATDWSNEDFSGLVISEGDHVPWEYKENEVIEGARYAHKDEMKEAVKHWAVSLQREFRVVKSTNYVYEVRCMKEDCPWRVHAYKGKWNDYWKVSIVTEHKCYLQGVEKYHRNITSVFVASEMYSSVVCNIGFEPKSIIRHIENKFKYTISYAKAWRAKQKIIEMRYGTFEASYDNLPRLLATIAQRNNNTYYDLHTFTSVDDRTKSVLQRAFFSLGACINAFVHCRPVLCIDGTFMTGKYRGQILTAIGCDGNNQVLPMAFAFVESENTESWYWFLERVHIAVVRMRPNVCLIHDRHAGMLRAIDYLKNGWDEKGLPAKWSDVRSRWCMRHMGANFYKQFKNKHLMELFKRLCAQNQEKKFNKLWDKLDELTTKQTDEQSRRPQVEGDEPPIPLGALHDDPPTMRRRSGSSIRNFTQWIENEPKEKWSLLFDTDGSRYGIMTTNLAEVYNWVMRGVRVLPLVAIIEFILHGTQAYFRDRYKKIGPSMADNNIVFGNVVTKYMEDKIKKARRHRVVAQGTQVHRYEIMCVDRSRRGIYRKQAVQEYVLKADGGCTCSCMKPKLLHLPCSHVLAAAGDCGISPNVYVSNYFRKEAIFHTWSEEIYGFGISGSYTTLSAQVFYIPDPSKLRVKKGRRQTRRIRNDMDESEAGGRTLRYSKCDLRGHTYKKCPKNAEVPSGADASPSGQASDGMAYDTPALLNRAIDRNHRSFLSAVEGAQLGTFRPRTSREWLRVDPRHVPWLRAAGLLPLCRLVEAAADDRDPAKRWDADRSLLAALVDRWRPERHTFHLPCGEMAPTLQDVSYLLGLPLAGAPVGPVDGVVGWKEDITARFEQVMRLPHLGPTSTLPPYSTVGPSKAWLLQFTADLLHPDADDYSVRRSLEAYLLWLFGWVMFTSTHGHAVDFRLVHYARSIADAQPQDVPQWSWGSAVLAATYRALCEACTKTDAGAIIAGCPMLLQLWAAERFAIGRPVVDSAPYGVGRSAQWPEDGPTMGTYWCRRGRRYAHVQVRRGYPDFVFEFDRLQPSDVIWEPYTEEAVAARAPLGLSSLCTRDQAYWLTILPMVFDIFVEPHCPQRVMRQFGLRQAFPGNVQPTVPPSDHSLTRRGQLAGALWAPRVQQYVDDWVLATEEVINELFPHTEENYRDYLRWYLPRTRARVTFTPDAPEQHVAAVTDAYPTHRDRDYFVAADAARDISADITAVQVRLNRGLHLSDVEQRATFDRMQEKMRAVMRVFSCRSAVDVVPPAAFARLCHHVLTARFLIAGPRLPSSAFAGTTGASMSSAGAFATSSGAFASSSSHGASIPRPHAGIFGTGASSSHAGRTGPTSQFYDDDLHGADHHDVLGSSQLGGAPEAHTQEQPEVTPIQAGRVGRAVPPDRLTYSHGHVRAQGRRDREFTLGIKDFFVDESHEVVLEPPR

SEQ ID NO: 107023 - protein, 146 aa, Oryza sativa
  unsure (1)..(146): unsure at all Xaa locations
  Clone ID: PAT_MRT4530_11414C.1.pep
MEDLPMGRRNPAASLTDDLVVEILRRLPVRSVCRFKRVCRSWRNLIADREHRKKLPQTLSGFFYKSISGERCPCSAHHFTNVSGKGVPLIYPSFSFLPQCDTVVPLDCXHGXLLCRCFQPGPYNSDDEIEPFHYAVCNPATXEWVM

SEQ ID NO: 107024 - protein, 253 aa, Oryza sativa
  Clone ID: PAT_MRT4530_11415C.1.pep
MKQISPPHHDFNPVSATGCKDYISFYLFLEDAVDEPVMGQVTFSLLDQDGKPVLSRTHTTRMFSFSLNSSFGFHKFIRREDMEQSKHLKDDCFAVSVHLVITKGAPSVKVPPSNLHSHYGDLLSSKQGADVEFMMFEALLIFIYTDMLPKMDQEDEVAMAQHLLVASDTYGLQRLMLICEDRLCNHINTDSLAIMLVLAEKHHCIRLKEVCFEFLSSSTALVEFMESSDFLYFIRSCPTVLKDLIYNVAAHGK

SEQ ID NO: 107025 - protein, 459 aa, Oryza sativa
  Clone ID: PAT_MRT4530_11416C.1.pep
MSVGADPEAEVIALSPRTLMATNRFVCEICGKGFQRDQNLQLHRRGHNLPWKLRQRSGKEPRKRVYVCPEKSCVHHNPSRALGDLTGIKKHFCRKHGEKKWKCDKCSKRYAVQSDWKAHSKTCGTREYRCDCGTLFSRRDSFITHRAFCDALAEETARLNAASGAAAAAAAATATSLCGQSYLFAGSGGPGMAGMRPNMMMPPAAAAAGGQLRAGQMLGPAAGGVGGDLCDGGVARHGGLSLWGGEALPSMGHIGVLASGGAATVPPQLYVDLFAPSSGAPPPQFDAAQLSWLYGNGKLSSSNASELTSATAAAKEAESVPSVFSNQQHAKPAAPTDMSATALLQKAAQIGAVTSTAAMPLVSPFEPTKPGGATASPADECGKFDGAALFAAASHHNANLGGAMSELTGAAGNVPYDVLSAVRHHAGLKDAGGVGREETRDFLGVGVQALCSSSIHGWI

SEQ ID NO: 107026 - protein, 137 aa, Oryza sativa
  Clone ID: PAT_MRT4530_11417C.1.pep
MTRTQTFSVSRARSTAAPHPGSGPLLGTATDACLLYRNCSTSTSTSTLYDTSRGNPPASAAAPTFFPDAEDDDDDSATTSSSSAPAPPTSAACPPQHHPPRWRRRATMFVAGRLATGEKTEREEEGRMLTAALPPPA

SEQ ID NO: 107027 - protein, 83 aa, Oryza sativa
  Clone ID: PAT_MRT4530_11418C.1.pep
GSHDGSTGDGSAAGSSGSNAFPSAAGRTATPATSKNRPSPVRHYPQQSRNHKKTRPKRTNLPLIYSSRHERSLLASGRAYTSA

SEQ ID NO: 107028 - protein, 1639 aa, Oryza sativa
  unsure (1)..(1639): unsure at all Xaa locations
  Clone ID: PAT_MRT4530_11419C.1.pep
MSSKVTFQIVHGEGNIRFGPDGVDLSDFVMTSKGIDRPAERTFQSIYSWLLRGFRIDQEVYTMSVSVVVSRATEGYFWELMPMDSTDAWRRYVEMAFERSWPLVIFVSVQEKDINVSMQTEDVEGPINAGDVVGPSMQNEENQPREEQAMGMADEGERVGIIVDEMEREDSDNEEVDDDASSDEEGDVMATDWANEDFSGLVISEGDHVPWEYKENEVIEGARYAHKDEMKEAVKHWAVSLQREFRVVKSTNYVYEVRCMKEDCPWRVHAYKGKWNDYWKVSIVTEHKCYLQGVEKYHRNITSAFVASEMYSSVVGNIGFEPKSIIRHIENKFKYTISYAKAWRAKQKIIEMRYGTFEASYDNLPRLLATIAQRNNNTYYDLHTFTSVDDRIKSVLQRAFFAIPWCNNAFDXEIKCCCDVMSVRTKYFYRVISIQCCCNEYLRLLLYXSIANYSVLYHNVIVMSVRTKHXVCLIDRNHRSFLSAVEGAQLGTFRPRTSREWARVRRRYCMKRRGKIYYXNINXLHKILIFVRFSGEEXAEFGQMTVRSAESVRXAAEGVRRRPLAGGSQPAASSLPRGGGLSQPRARXGRKGEVVGNGGNHIKAEEGCKWCFFASTSPKYIGCKVLLXRIYEWLFCLEFLFKMKHELXFFACRLRQVDQSTLVDXFNKCGETMVTTKWVADRVVDLLRDNPSRGARQQYVALLGTASWLTSSLWMVFTTHGRIARPMASSTVLYTTRFGLTPAAFISSNTLSAPSKLPLLECTLITVAHMTGSSCHFSARARSYRRRAVSASPARPYASITAEYVSXPASTRSPASSRTTPRXLPGMPQARAQLMTVEKVALSGCTPSRSISSQSASAXAPAPPLAQGLERDVVEDDLLANLGVXRNHHSASTTAAGLAEVVLSTMTASCSDGGSGNAASSAAATGASPASQAASAAAAAARRARRPDPARARASPAARGLLGLTQTYLLVLLDLPGLGLASEGGGGGSWTETXRWPERERGSWVGRRGRLRGEAMRGGRKGKPCRAMLSLCGLGGGRRGESATASARSVATRRVSVCGPAMSVTDQMKERHNRRPRRGALPAPRETPNSQKTTARRAAGRTELAIRDDAAGAVAAASAVQRRAATRQAYFSRVSPTSQPYPLDALHVFLPFPPRMGIRSCLLQRRYAHVQVRRGYPDFVFEFDRLQPSDVIWEPYTEEAVAARAPLGLSSLCTRDQAYWLTILPMVFDIFVEPHCPQRVMRQFGLRQVFPGNVQPTVLPADHSLTRRGQLAGALWAPRVQQYVDDWVLATEEVINELFPHTEENYRDYLRWYLPRTRARVTFTPDAPEPHVAAVTDAYPTHRDRDYFVAADAARDISADITAVQVRLNRGLHLTDVEQRVTFDRMQEKMRAVMRVFSCRSAVDVVPPAGPVQPRPRAPTVGAGPRPTAPISHGTAQPRGPRLPSSAPSFGSVRPTAPVSHVFARLCHHVLTARFLIAGPRLPSSAFAGTTGASTSSAGAFATSSGAFATSSSHGASIPRPHGTLLFINTVKYLYETDGPCPAGFAAGIFGTGASSSHAGRTGPTSQFYDDDLHGADHHDILGSSQLGGAPEAHTQEQPEVTPVQAGRVGRAVPPDRLTYSHGHIRAQGRRDRGKRPRQ

SEQ ID NO: 107029 - protein, 318 aa, Oryza sativa
  Clone ID: PAT_MRT4530_1141C.1.pep
MAACLAAVAASCQRKCGEIDIPFPFGIAGQPGCAMTGFKLSCNDTGNGVPTLLLRNVEVLGISLPLGQARMKMDMSYDCYNTTRKDIDCVDMVDLNLKGSPFTFSDTANKFIVFGCRMLAYLGPGEQNDVGSNLTIGCAATCGIGDDLVSINSAGCSGIGCCQTNIPKGIRYYKVWFDGRFNTTDIYNWTRCAYAALVETSSFNFSTVYNSLSRFNDNLGSQPPFVVDWAIGNSTCEQAKTNSDSYMCISSNSVCLNSRNGPGYICNCQNGFEGNPYLNDSFGCQGKTKGVHMRCKLENKSDQLAYSIILVDVFNIFG

SEQ ID NO: 107030 - protein, 435 aa, Oryza sativa
  Clone ID: PAT_MRT4530_11420C.1.pep
MELFSAILGDLTSRSISYVMDRYCSNQPAAIDDGVRQLRRLLLRTHTIVEEAEGRHITNQGMLPQLKAMRDELFRGHYVLDTFRHRADLLQKEEEKEDEQVRSSFAMSRLNPAKRIRFSRARTSSFQDLESMIRSLEDAIADTKEFIVFLMSCPPVMYRQPFSTHLYLDKCMFSRQIEREQVIDFLLRIDPDPHGSCNDIGVLPIIGPALIGKSTLIEHVCRDERVKSHFSLILFYNGDELKHETVATFRDRCDVDEDTWKELYYSSENRIPRGSKIIITSRSEVFVFGSADPDEHPKLTSIAMEIAAELRRSLFCAHVVGALLRVHLDAHFWRRVLEGTREYMQKNLILASEYPHDLKTDKNHPRYAWIISEPKPIKSLLIYDSYQKGSENAEVPNITIQDLLFGEASGRGKFDILLWKSQMPPYCSHICSCVV

SEQ ID NO: 107031 - protein, 86 aa, Oryza sativa
  Clone ID: PAT_MRT4530_11421C.1.pep
KKKTPWAKEITPSPRGLLRSNKRTGSTGFTKNKNGAKEGTRKKRRKRPPQGPPGAPPKPHGPQDPGTSSGATIDQGGSQAHKNTNP

SEQ ID NO: 107032 - protein, 766 aa, Oryza sativa
  Clone ID: PAT_MRT4530_11422C.1.pep
MMLHHEASVQQAREEEEELDHHGDPMITSPLLRPSTSGSSPENGEEENSPVELVALTVPVSDEPETPVLTFRMWVLGTASCAVLSFLNQFFWYRKEPLTITAISAQIAVVPLGRLMAATLPEHAFFRGRPWEFTLNPGPFNVKEHVLITIFANSGAGTVYAIHVITGVRVFYGKTLSFFISLLVVLTTQYHQMLGFGWAGIFRRYLVEPASMWWPSNLVQVSLFSALHEKEARRKGGLTRNQFFLVAFVCSFAYYIFPGYLFQMLTSLSWICWVFPSSVLAQQLGSGLRGLGVGAIGLDWSSISSYLGSPLASPWFATVNVGVGFFIVMYIITPIAYWFNFYKAQNFPIFSDGLFTSTGQKYNVSSIVDSHFHFDTKAYEKNGPLYLSTSLLVTYGVGFATLAATIVHALLFHGSEIWLLSKSAFQEKRMDIHTKLMRRYKQVPEWWFICILIANIGTTIFACEYYNEELQLPWWGVLFACSIAFFFTLPIGIIKATTNQTPGLNVITEYIIGYLYPGRPVANMCFKVYGYISMKQALAFLEDFKLGHYMKIPPRTMFMAQVVGTSIAAFVYIGTAWWLMETIPNICNTELLPSDSPWTCPGDHVFYDASVTWGLISPRRIFGDLGTYSALNWFFLCGAIAPLLVWFAHKTFPGQNWILLIKTPVLIGATFQMPPATAVNYTTWILVGFLSGYVVYRYRRDWWERHNYLLSGALDAGLAFMAVLIYLCLGLEDISLNWWGNDLDGCPLASCPTAKGIVVKGCAVYT

SEQ ID NO: 107033 - protein, 77 aa, Oryza sativa
  Clone ID: PAT_MRT4530_11423C.1.pep
YRCFVGCLSWATDDRFLEGVFFTFGEILDSKIIIDRETGRLRGFGLFTFYSEQSMRDAIEGLNGKELDGRNIYVNEA

SEQ ID NO: 107034 - protein, 221 aa, Oryza sativa
  unsure (1)..(221): unsure at all Xaa locations
  Clone ID: PAT_MRT4530_11424C.1.pep
MLMRHARCRLVVSSAPETANFPRPPTRRRAALATRGEERRRPWTHRHVHAWRAGCPAGGSRGRRGRRAPLHVARTVGHHRVAPAQPARSTAQPPVGGGTARVRHVNDLSIRRLQGGPGNMPSVGRRRCPPPPCGVAXGHQLAAAGRSAAECCARPGLWRSTGGGCRRQARVGGAAGGQAMASGAAALADVIAHVDTTTVAGAVAPLLFDHPRRRLVAIVGV

SEQ ID NO: 107035 - protein, 100 aa, Oryza sativa
  Clone ID: PAT_MRT4530_11425C.1.pep
EHCMAEAFLSVEQHYQMEYRISQSKYYQGASITVLIERACPTVFIQRVNQKFKGGEGIQNLQSDFVCNRGVYSVNCHEYSHYKVLVSWTVELGRCWPCLH

SEQ ID NO: 107036 - protein, 221 aa, Oryza sativa; identical to SEQ ID NO: 107034
  unsure (1)..(221): unsure at all Xaa locations
  Clone ID: PAT_MRT4530_11426C.1.pep

SEQ ID NO: 107037 - protein, 129 aa, Oryza sativa
  unsure (1)..(129): unsure at all Xaa locations
  Clone ID: PAT_MRT4530_11427C.1.pep
MDIESVRCACCGXXEDCTKEYIENVKANFEGKWLCGLCSEAVGDELSKDRREQDGIEDAIKAHMAFCRMALSSPAVKVADGMKEMLRKRSKDKVILCSSSPLENIYSEIIVETNHSCIITTNTSNARFS

SEQ ID NO: 107038 - protein, 130 aa, Oryza sativa
  unsure (1)..(130): unsure at all Xaa locations
  Clone ID: PAT_MRT4530_11428C.1.pep
MDHTLGASPRTAHCQLMPRLQDHHQLPRVALRLRAFQALRLPGPAGRGQGGSPARQSRPAGGISRRAANPPPPCGVAXGHQLAAAGRSAAECCARPGLWRSTGGGCRRQARVGGAAGGQAMASGAAALAD

SEQ ID NO: 107039 - protein, 38 aa, Oryza sativa
  unsure (1)..(38): unsure at all Xaa locations
  Clone ID: PAT_MRT4530_11429C.1.pep
TGVELFYDHTLNLIDGTXGCQLVITHLDNRQMLIKSKL

SEQ ID NO: 107040 - protein, 89 aa, Oryza sativa
  Clone ID: PAT_MRT4530_1142C.1.pep
GARGPLYKRGQGKEGGKNNWGGQINLEKNLQAKKGVPKKRGKRRTKKFSRRPKRWALYAKGEKFWDTKAPSKSSVKYFFMAQKKHWRGR

SEQ ID NO: 107041 - protein, 32 aa, Oryza sativa
  Clone ID: PAT_MRT4530_11430C.1.pep
KQTTTRDYTHDAETMTDQLCLDKKGSAYTRIR

SEQ ID NO: 107042 - protein, 551 aa, Oryza sativa
  Clone ID: PAT_MRT4530_11431C.1.pep
MALALATPVAAVAANHGDTAAAKDNVAVVPRIAASAAAAASSVNVTAICMATPYPSACETALSSAAARGAANDPFAASVQFAMTRAESARALARNLSASSSRPRVAPSGMDDCAELLDISLDQLHDALAARAADAAGVTTWLSAALTNQGTCGDSLAAVPDPAARSAVRARVAALEQFIGTALALHAKLNNGGSGSSSPAPPSRAAFPSWVTKHDRHLLSSPASTIAPDAVVALDGSGTHTSISDAIAAVTAPPPPAHHPTASGGGGGGRSRKVIYVKAGRYEESVSITSKQKDVMLLGDGKGKTVISGHRSVAGGYTTYASATVAAMGSGFIAKGLTIVNSAGPGKGQAVALRVGGDLSVVYNCGIEAYQDTLYVHSNRQFYAADDISGTVDFIFGNAAAVIQGCEIRARRPSPGQEDTVTAQGRSDPNQNTGISIHRCRITGAPDLGGTPVYLGRPWRRYSRTVVMGTFLDRSIAPAGWLEWSGQFGLSTLYYGEYGNTGPGAGTRRRVTWSGVHTSMSTSDATRFTVANFIVGDAWLPATGVTYTSGL

SEQ ID NO: 107043 - protein, 80 aa, Oryza sativa
  Clone ID: PAT_MRT4530_11432C.1.pep
LWKTTKRAYCHSSATSNKHVLDEINLNKTCITMRRTDRQKHGTSYALSLSTGSSCFLCLPITPQSLCMPRYGSLGKQPDV

SEQ ID NO: 107044 - protein, 1284 aa, Oryza sativa
  Clone ID: PAT_MRT4530_11433C.1.pep
MSSKVTFQIVHGEGNIRFGPDGVDLSDFVMTSKGIDRPAERTFQSIYSWLLRGFRIDQEVYTMSVSVVVSRATEGYFWELMPMDSTDAWRRYVEMAFERSWPLVIFVSVQEKDINVSMQTEDVEGPINAGDVVGPSMQNEENQPREEQAMGMADEGERVGIIVDEMEREDSDNEEVDDDASSDEEGDVMATDWANEDFSGLVISEGDHVPWEYKENEVIEGARYAHKDEMKEAVKHWAVSLQREFRVVKSTNYVYEVRCMKEDCPWCVHAYKGKWNDYWKVSIVTEHKCYLQGVEKYHRNITSAFVASEMYSSIVGNIGFEPKSIIMHIENKFKYTISYAKAWRAKQKIIEMRYGTFEASYDNLPRLLATIAQRNNNTYYDLHTFTSVDDRTKSVLQRAFFSLGACINAFVHCRPVLCIDGTFMTGKYRGQILTAIGCDGNNQVLPMAFAFVESENTESWYWFLERVHIAVVRMRPNVCLIHDRHAGMLRAIDYLQNGWDEKGLPAKWPDVRSRWCMRHMGANFYKQFKNKHLMELFKRLCAQNQKKKFNELWDKLDELTTKQTDEQSRRPLVEGDEPPIPLGALHDDPPTMRRRSGSSIRNFTQWIENEPKEKWSLLFDTDGSRYGIMTTNLAEVYNWVMRGVRVLPLVAIVEFILHGTQAYFRDRYKKIGPSMADNNIVFGNVVTKYMEDKIKKARRHRVVAQGIQVHRYEIMCVDRSRRGIYRKQAVQECVLKADGGCTCSCMKPKLHHLPCSHVLAAAGDCGISPNVYVSNYFRKEAIFHTWSEEIYGFGISGSYTTLSAQVFYIPDPSKLRVKKGRRQTRRIRNDMDESEAGGRTLRCSKCDLRGHTYKKCPKNAEVPSGADASPSGQASDGMAYDTPALLNRGIDRNHRSFLSAVEGAQLGTFRPRTSCEWLRVDPRHVPWLTRRGQLAGALWAPRVQQYVDDWVLATEEVINELFPHTEENYRDYLRWYLPRTRARVTFTPDAPEPHVAAVTDAYPMHRDRDYFVAADAARDISADITAVQVRLNRGLHLTDVEQRVTFDRMQEKMRAVMRVFSCRSAVDVVPPAGPVQPRPRAPTVGAGPRPTAPVSHGPRLPSSAFAGTTGASASSAGAFATSSGAFASSSSHGASIPRPHAGFAAGIFGTGASSSHAGRTGPTSQFYDDDLHGAHHHDVLGSSQLGGAPEAHTQEQPEVTPVQAGRVGRVVPPDRLTYSQGHIRAQGRRDRVLFIHMVLEQLMLTTTHFRRFTVVSDPVARTVHNSTHEKRQLELSLSTFGAAC

SEQ ID NO: 107045 - protein, 1491 aa, Oryza sativa
  Clone ID: PAT_MRT4530_11434C.1.pep
MSSKVTFQIVHGEGNIRFGPDGVDLSDFVMTSKGIDSPAERTFQSIYSWLLRGFRIDQEVYTMSVSVVVSRATEGYFWELMPMDSTAAWRRYVQMAFERSWPLVIFVSVQEKDINVSMQTEDVEGPINAGDVVGPSMQNEENQPREEQAMGMADEGERVRIIVDEMEREDSDNEEADDDASSDEEGDVMATDWANEDFSGLVISEGDHVPWEYKENEVIEGARYAHKDEMKEAVKHWAVSLQREFRVVKSTNYVYEVRCMKEDCPWRVHAYKGKWNDYWKVSIVTEHKCYLHGVEKYHRNITSAFVASEMYSSVVGNIGFEPKSIIRHIENKFKYTISYAKAWRAKQKIIEMRYGTFEASYDNLPRLLATIAQRNNNTYYDLHTFTSVDDRTKSVLQRAYFSLGACINAFVHCRPVLCIDGTFMTGKYRGQILTAIGCDGNNQVLPMAFAFVESENTESWYWFLERVHIAVVRMRPNVCLIHDRHAGMLRAIDYLQNGWDEKGLPAKWPDVRSRWCMRHMGANFYKQFKNKHLMELFKRLCAQNQEKKFNELWDKLDELTTKQTDEQSRRPLVEGDEPPIPLGALHDDPPTMRRRLGTSIRNFTQWIENEPKEKWSLLFDTDGSRYGIMTTNLAEVYNWVMRGVRVLPLVAIVEFILHGTQAYFRDRYKKIGPSMADNNIVFGNVVTKYMEDKIKKVRRHRVVAQGTQVHRYEIMCVDRSRRGIYRKQAVQECVLKADGGCTCSCMKPKLHHLPCSHVLAAAGDCGISPNVYVSNYFRKEAIFHTWSEEIYGFGISGSYTTLSAQVFYIPDPSKLRVKKGRRQTRRIRNDMDESEAGGRTLRCSKCDLRGHIYKKCPKNAEVPSGADASPSGQASDGMAYDTPALLNRGIDRNHRSFLSAVEGAQLGTFRPRTSREWLRVDPRHVPWLRAAGLLPLCRLVEAAADDRDPAKRWDADRSLLAALVDRWRPETHTFHLPCGEMAPTLQDVSYLLGLPLTGAPVGPVDGFFGWKEDITARFEQVIRLPHLGPTNTLPPYSTVGPSKAWLLQFTADLLHPDADDYSVRRSLEAYLLWLFGWVMFTSTHGHAVDFRLVHYARSIADAQPQDVPQWSWGSAVLAATYRALCEACTKTDAGAIIAGCPMLLQLWAAERFAIGRPVVDSAPYGVGRSAQWPEDGPTMGTYWCRRGRRYAHVQVRRGYPDFMFEFDRLQPSDVIWEPYTEEAVAARAPLGLSSLCTRDQAYWLTILPMPTVLPADHSLTRRGQLAGALWAPRVQQYVDDWVLATEEVINELFPHTEENYREYLRWYLPRTRARVTFTPDAPEPHVAAVTDAYPMHRDRDYFVAADAARDISADITAVQVRLNRGLHLTDVEQRVTFDRMQEKMRAVMRVFSCRSAVDVVPPAGPVQPRPRAPTVGAGPRPTAPVSHAGFAAGIFGTGASSSHAGRTGPTSQFYDDDLHGAHHHDVLGSSQLGGAPEAHTQEQPEVTPAER

SEQ ID NO: 107046 - protein, 1394 aa, Oryza sativa
  Clone ID: PAT_MRT4530_11435C.1.pep
MSNKVTFQIVHGEGNIRFGPDGVDLSDFVMTSKGIDRPAERTFQSIYSWLLRGFRIDQEVYTMSVSVVVSRATEGYFWELMPMDSTAAWRRYVEMAFERSWPLVIFVSVQEKDINVSMQTEDVEGPINAGDVVGPSMQNEENQPREEQAMGMADEGERVGIIVDEIEREDSDNEEADDDASSDEEGDVMATDWANEDFSGLVISEGDHVPWEYKENEVIDGARYAHKDEMKEAVKHWAVSLQREFRVVKSTNYVYEVRCMKEDCPWRVHAYKGKWNDYWKVSIVTEHKCYLQGVEKYHRNITSAFVASEMYSSVVGTIGFEPKSIIRHIENKFKYTISYAKAWRAKQKIIEMRYGTFEASYDNLPRLLATIAQRNNNTYYDLHTFTSVDDRTKSVLQRAFFSLGACINAFVHCRPVLCIDGTFMTDKYRGQILTAIGCDGNNQVLPMTFAFVESENTESWYWFLERVHIAVDEKGLPAKWPDVRSRWCMRHMGANFYKQFKNKHLMELFKRLCAQNQEKKFNELLDKLDELTTKQTDEQSRIPQVEGDEPPIPLGALHDDPPTMRRRKEAIFHTWSEEIYGFGISGSYTTLSAQVFYIPDPSKLRVKKGRRQTRRIRNDMDESEAGGRTLRCSKCDLRGHTYKKCPKNAEVPSGVDASPSGQASDGMAYDTPALLNRGIDRNHRSFLSAVEGAQLGTFRPRMSREWLRVDPRHVPWLRAAGLLPLCRLVEAAADDRDPAKRWDADRSLLAALVDRWRPETHTFHLPCGEMALTLQDVSYLLGLPLAGAPVGPVDGVFGWKEDITARFEQVMRLPHLGLANTLPPYSTVGPSKAWLLQFTTDLLHPDADDNSVRRSLEAYLLWLFGWVMFTSTHGHAVDFRLVHYARSIADAQPQDVPQWSWGSAVLAATYRALCEACTKTDAGAIIAGCPMLLQLWAAERFAIGRPVVDSAPYGVGRSAQWPEDGPTMGTYWCRRGRRYAHVQVRRGYPDFVFEFDRLQPSDVIWEPYTEEAVAARAPLGLSSLCTRDQAYWLTILPMVFDIFVEPHWPQRVMRQFGLRQVFPGNVQPTVPPADHSLTRRGQLAGALWAPRVQQYVDDWVLATEEVINELFPHTEENYRDYLRWYLPRTRARVTFTPDAPEPHVAAVTDAYPTHRDRDYFVAADAARDISADITAVQVRLNRAPWTSYLQLVRYTHGLAVLPSEQDLVCLRAPLASEQCDLQHRTSYAFERVRRHDRRFRELRRGVRHLFRRVRQLFLSRSVDPSPTRRDLRYWGLFVSRRLEELQRRTLRSSQRSHLYRQDGLAVPYPRTDSRTIDGHVDCPARYGLGPAVPGPRHVGPARPDRRTGPCLSILCVPGLAYRPIVPGQPSVPVERPRHSPAVRPGRHGPDPSDV

SEQ ID NO: 107047 - protein, 1789 aa, Oryza sativa
  unsure (1)..(1789): unsure at all Xaa locations
  Clone ID: PAT_MRT4530_11436C.1.pep
MSNKVTFQIVHGEGNIRFGPDGVDLSDFVMTSKGIDRPAERTFQSIYSWLLRGFRIDQEVYTMSVSVVVSRATEGYFWELMPMDSTAAWRRYVEMAFQRSWPLVIFVSVQEKDINVSMQTEDVEGPINAGDVVGPSMQNEENQPREEQAMGMADEGERVGIIVDEMEREDSDNEEADDDASSDEEGDVMATDWANEDFSGLVISEGDHVPWEYKENEVIDGARYAHKDEMKEAVKHWVVSLQREFRVVKSTNYVYEVRCMKEDCPWRVHAYKGKWNDYWKVSIVTEHKCYLQGVEKYHRNITSAFVASEMYNSVVGKYRGQILTAIGCDGNNQVVPMAFAFVESENTESWYWFLERVHIAVVRMRPNVCLIHDRHAGMLRTIDYLQNGWDEKGLPAKWPDVRSRWCMRHMGANFYKQFKNKHLMELFKRLCAQNQEKKFNELWDKLDELTTKQTDEQSRRPQVEGDEPPIPLGALHDDPPTMRRRSGSSIRNFTQWIENEPKEKWSLLFDTDGSRYGIMTTNFAEVYNWVMRGVRILPLVAIVEFILHGTQAYFRDRYKKIGLSMADNNIVFGNVVTKYMEDKIKKARRHRVVAQGTQVHRYEIMCVDRSRRGIYRKQAVQECVLKADGGCTCSCMKPKLHHLPCSHVLAAAGDCGISPNVYVSNYFRKETIFHTWSEEIYGFGISGSYTTLSAQVFYITDPSKLRVKKGRRQTRRIRNDMDESEAGGRTLRCSKCDLRGHTYKKCPKNAEVPSGADASPSGQASDGMAYDTPALLNRGIDRNHRSFLSAVEGAQLGTFHPRTSREWLRVDLRHVPWLRAAGLLPLCRLVEAAADDRDPAKRWDADRSLLAALVDRWRPETHTFHLPCGEMAPTLQDDVSYLLGLPLAGAPVGPVDGVFGWKEDITARFEQVMRLPHLGPANTLPPYSTVGPSKAWLLQFTADLLHPDADDNSVRRSLEAYLLWLFGWVMFTSTHGHVVDFRLVHYARSIADAQPQDVPQWSWGSAVLAATYRALCEACTKTDAGVIIAGCPMLLQLWAAENAQWPEDCPTMGTYWCRRGRRYAHVQVRRGYPDFVFEFDRLQPSDVIWEPYTEEAVAARAPLGLSSLCTRDQAYWLTILPMVFDIFVEPHCPQRVMRQFGLRQLFPGNVQPTVLPADHSLTRRGQLAGALWAPRVQQYVDDWVLATEEVINELFPXRRRTTMTTFAEPHVAVVTDAYPTHRDRDYFVGADAARDISADITAVQVRLNRGLHLTDVEQRSTFDRMQEKMRAVMRVFSCRSAVDVVPPAAFARMCHHVLTARFLIAGPRMPSSAFAGTTGASASSAGAFATSSGAFASSSSHGASIPRPHAGIFGTGASSSHAGRTGPTSQFYDDDLHGADHQDVLGSSQLGGAPEAHTQEQPEVTPVQAGRVGRAVPPDRLTYSQGHIRAQGRRDRGATEDNGARRRAAGGKRGGSNAQRPARRAGREDAGRPAMAESHGRGLDGDGRRERCAADGGQREREWRPPSAADDVDVDLGILGDSLSSPRGRRSVPSAIASRAAAAQGLVPSAADANGRGGRRRPTQRHRAAPELLRLRRPVRRWRAMERWGEGRRTSPFPPPRGVGRRSAEHSGAGVARGSLSSWRPSPPRRSILSIPTFAGHPLHPHSRRPPLLHTTMPAFPIHRRPVKLPFPPSSARRRPDSSPYATSWPRTAEPPRPAAAVDAAPTSLFHPALISPPSPPPPALPQTHRRPWSSLRLLPLHCRCRAIAPNRLRTPRLAAPLPPLPPAAGHRVPLPLRPRERGEERRDR

SEQ ID NO: 107048 - protein, 367 aa, Oryza sativa
  Clone ID: PAT_MRT4530_11437C.1.pep
MDYTNAIHIIPDAAGPDAWANAAAQGGDAGIWATEDDYNSQWNADGGGGGSSRAGSEQPPPGKKSRGGGGGEGGGNTSKSRAIGKMFFKTKLCCKFRAGTCPYVTNCNFAHGMEELRKPPPNWQEIVAAHEEATEAREEHQIPIMTSSGPTAGGDAGCGGGGGGGSGRAYKGRHCKKFYTDEGCPYGDACTFLHDEQSKARESVAISLSPSVGGGGGGGSYNSAAAAAASASAAAGNGPMQKPSNWKTRICNKWEMTGYCPFGSKCHFAHGAAELHKYGGGLVDIDSRDAAATPDSKQAVVSAKAPAETAAASTTVLPHADVYHLGVQAQRSTIAGQRSGQVQRPIQKWKGPDKISRIYGDWIDETE

SEQ ID NO: 107049 - protein, 2522 aa, Oryza sativa
  Clone ID: PAT_MRT4530_11438C.1.pep
MSSKVTFQIVHGEGNIRFGPDGVDLSDFVMTSKGIDRPAERTFQSIYSWLLRGFRIDQEVYTMSVSVVVSRAIEGYFWELMPMDSTAAWRRYVEMAFERSWPLVIFVSVQEKDTNVSMQTEDVEGPSNAGDVVGPSMQNEENQPREEQAMGMADEGERVGIIVDEMEREDSDNEQAEDDASSDEEGDVMATDWANEDFSGLVISEGDHVPWEYKEYEVIEGARYAHKDEMKEAVKHWAVSLQREFRVVKSTNYVYEVRCMKEDCPWRVHAYKGKWNDYWKVSIVTEHKCYLQGVEKYHRNITSAFVASEMYSSVVGNIGFEPKSIIRHIENKFKYTISYAKAWRAKQKIIEMRYGTFEASYDNLPRLLATIAQRNNNTYYDLHTFTSVEDRTKSVLQRAFFSLGACINAFVHCRPVLCIDGTFMTGKYRGQILTAIGCDGNNQVLPMAFAFVESENTESWYWFLERVHIAVVRMRPNVCLIHDRHAGMLRAIDYLQNGWDEKGLPAKWPDVRSRWCMRHMGANFYKQFKNKHLMELFKRLCAQNQEKKFNELWDKLDELTTKQTDEQSRRPQVEGDEPPIPLGALHDDPPTMRRRSGSAIRNFSQWIENEPKEKWALLFDTDGSRYGIMTTNLAEVYNWVMRGVRVLPLVAIVEFILHGTQAYFRDRYKKIGPSMADNNIVFGNVVTKYMEDKIKKARRHRVVAQGTQVHRYEIMCVDRSRRGIYRKQAVQECVLKADGGCTCSCMKPKLHHLPCSHVLAAAGDCGISPNVYVSNYFRKEAIFHTWSEEIYGFGISGSYTTLSAQVFYIPDPSKFRVKKGRRQTRRIRNDMDESEAGGRTLRCSKCDLRGHTYKTCPKNAEVPSGADASLSGQASDGMAYDTPALLNRGIDRNHRSFLSAVEGAQLGTFRPRTSREWLRVDPRHVPWLRAAGLLPLCRLVEAAADDRDPAKRWDADRSLLAALVDRWRPETHTFHLPCGEMAPTLQDVSYLLGLPLAGAPVGPIDGVFGWKEDITARFEQVMRLPHLGPTTTLPPYSTVGPSKAWLLQFTADLLHPDADDYSVRRSLEAYLLWLFGWVMFTSTHGHAVDFRLVHYARSIADAQPQDVPQWSWGSAVLAATYRALCEACTKTDAGAIIAGCPMLLQLWAAERFAIGRPVVDSAPYGVGRSAQWPEDGPTMGTYWCRRGRRYAHVQVRRGYPDFVFEFDRLQPSDVIWEPYTEEAVAARAPLGLSSLCTRDQAYWLTILPMVFDIFVEPHWPQRVMRQFGLRQVFPGNVQPTVPPADHSLTRRGQLAGALWAPRVQQYVDDWVLATEEVINELFPHTEENYRDYLRWYLPRTRARVTFTPDAPEPHVAAVTDAYPTHRDRDYFVAADAARDISADITAVQVRLNRGLHLTDVEQRSTFDRMQEKMRAVMRVFSCRSAVDVVPPAGPVHPRPRGPTVGAGPRLSSSAPSFGAVRPTAPVSHGPRMPSSAFAGTTGASASSAGAFATSSGAFASSSSHGASIPRPHAGFAAGIFGTGASSSHAGRTGPTSQFYDDDLHGADHQDVLGSSQLGGAPEAHTQEQPEVTPVQAGRVGRAVPPDRLTYSQGHIRAQGRRDRELVGYNFTSLLCFRERPGGTGGQAARRGVAARRRGGAGKAADLAYWESAARMIADSSRSSKVVVEKSTVPVKTAEAIEKILAHNAHVVEFQALKDVYAQWVPVDRIITTNLWSAELSKLAVNAFLVQRVSSVNAISALCEATGTDVMEVATGAAQRLGAGSTAAADATSCAATASVGTARRRCGAPGEWRQLKRLQDLACMCVHEVSEATWMIDGEEDDVVAASLRCAFQSAVGTTAFQRLPVAPEFEPGLGALLMGAGEVVLAGAVEEHAGAGLGGGAVEAEILPDGEQENNAVELEIAAEQEIEETSSATAKKPIRARVPNPRYSGPMWAKGIDKTWYQSLLSHPILDPAAKGFRLGIGDRLLQLKSAKRNRGSGSRCVKLEKPRYQTKQAFKIMENEAKLDLILKKLTETDSKLVDLEKNSRADMLNLKTSVDSWKPQLEKKVTDLATTVGNLQLQFDQLQLLNKAEPKPDLTAQLGARNAAEIRAEVLGSHPQSPPPANGTNSILFSTPAPYFHDPAMRTAFTGSAVGTSTGLPPMPCPQFDGDNPQMWRENCEAYFDTYGVSPAHWVRIATLNFSGNASFWLQSVRSQLIGVTWVELCEKVCAKFSRDRHQQLIRQYIHIRQTGSVTEYVDKFDSLMHQLIAYDSELKPVYFVTKFVEGLKDAIHTVIMVQRPQDLDTACSLALLQEEAMLGTRRLEFSTPVKSNFRNTAQVSLTPLPVRPVVNEDKKTPEAAKITPRDDRLSSLKAYRKSKGLCFTCGERWGRDHKCASTVQLHVMEELLEALQEDDDPVGDDIVAEAEGTLMAVSSQAIAGVESSKSIRVRGWVQGLELLMLVDSGSTHSFIDEQVARKLAGIQTLSHPVQIKIADGGTMQCDRSIPNCNWWIQGCSFRTEFRVLLSRALIPRVAGPWLRSS

SEQ ID NO: 107050 - protein, 115 aa, Oryza sativa
  Clone ID: PAT_MRT4530_11439C.1.pep
MEAAAPAMLAPSSLGRRQLLLLPRRRVVTGAHAIRILDCEKRGHSGQGKEDKDVNSLVCKNRCAGKHRKLSRFGSRPGLPNYLEPDHLELSITLPGGVGQICAIRHTSRARIKPH

SEQ ID NO: 107051 - protein, 304 aa, Oryza sativa
  Clone ID: PAT_MRT4530_1143C.1.pep
MARRATGGSGSVGSSPTRETASAARMESRRGGRDGGAARHRGCAAGEGGRERWRWGSPELPVTRPRTHRLLRCSAADGDGESGASSNNGAAVMEVKREEDSMGGAWVFIAEARSFLTPHEKRSVTKEEMVVVVGEVGEAEEGKGKDGCGGMVRGDDEGGWAPLASSERCIGGATDAEEGSPAPAMAAAAAQPPQRRLPAHRLYRSHPHFRHRQPLQELHNSCNTRSRWPRRGARRGGRDPRVARRASASRCSTSTAVRRFRRLCIRGSTPTTVCILAHLVAAWAHAGELEDHFHVSVGVQRPRR

SEQ ID NO: 107052 - protein, 1898 aa, Oryza sativa
  Clone ID: PAT_MRT4530_11440C.1.pep
MSSKVTFQIVHGEGNIRFGPDGVDLSDFVMTSKGIDRPAERTFQSIYSWLLRGFRIDQEVYTMSVSVVVSRATEGYFWELMPMDSTDAWRRYVEMAFERSWPLVIFVSVQEKDINVSMQTEDVEGPINAGDVVGPSMQNEENQPREEQAMGMADEGERVGIIVDEMEREDSDNEEVDDDASSDEEGDVMATDWANEDFSGLVISEGDHVPWEYKENEVIEGARYAHKDEMKEAVKHWAVSLQREFRVVKSTNYVYEVRCMKEDCPWRVHAYKGKWNDYWKVSIVTEHKCYLQGVEKYHRNITSAFVASEMYSSVVGNIGFEPKSIIRHIENKFKYTISYAKAWRAKQKIIEMRYGTFEASYDNLPRLLATIAQRNNNTYYDLHTFTSVDDRTKSVLQRAFFSLGACINAFVHCRLVLCIDGTFMTGKYRGQILTAIGCDGNNQVLPMAFAFVESENTESWYWFLERVHIAVVRMRPNVCLIHDRHAGMLRAIDYLQNGWDEKGLPAKWPDVRSRWCMRHMGANFYKQFKNKHLMELFKRLCAQNQEKKFNELWDKLDELTTKQTDEQSRRPQVEGDEPPIPLGALHDDPPTMRRRSGSSIRNFTQWIENEPKEKWSLLFDTDGSRYGIMTTNLAEVYNWVMRGVRVLPLVAIVEFILHGTQAYFRDRYKKIGPSMADNNIVFGNVVTKYMEDKIKKARRHRVVAQGTQVHRKEAIFHTWSEEIYGFGISGSYTTLSAQVFYIPDPSKLRVKKGRRQTRRIRNDMDESEAGGRTLRCSKCDLRGHTYKKCPKNAEVPSGADASPSGQASEGMAYDTPALLNRGIDRNHRSFLSAVEGAQLGTFRPRTSREWLRVDPRHVPWLRAAGLPPLCRLVEAAADDRDPAKRWDADRSLLAALVDRWRPETHTFHLPCGEMAPTLEDVSYLLGLPLAGAPVGPVDGVFGWKEDITARFEQVMRLPHLGPANTLPPYSTVGPSKAWLLQFTADLLHPDADDYSVRRSLEAYLLLLFGWVMFTSTHGHAVDFRLVHYARFIADAQPQDVPQWSWGSAVLAATYRALCEACTKTDAGAIIAGCPMLLQLWAAERFAIGRPVVDSAPYGVGRSAQWPEDGPTMGTYWCRRGRRYAHVQVRRGYPDFVFEFDRLLPSDVIWEPYTEEAVAARAPLGLSSLCTRDQAYWLTILPMVFDIFVEPHCPQHVMRQFGLRQLAGALWAPRVQQYVDDWVLATEEVINELFPHTEENYRDYLRWYLPRTRARVTFTPDAPEPHVAAVTDAYPTHRDRDYFVGADAARDISADITAVQVRLNRGLHLTDVEQRVTFDRMQEKMRAVMRVFSCRSAMDVVPPAGPVQPRPRVPTVGAGPRPTAPVSHGPRLPSSAFAGTTGTSASSAGAFATSSGAFASSSSHGASIPRPHGTLLFINTIKYLYETDSPCPAGFAAGIFGTGASSSHAGRTGPTSQFYDDDLHGAHHHDVLGSSQLGGAPEAHTQEQPEVTPVQAGRVGRAVPPDRLTYSQGHIRAQGRRDRAGDGRRCGGGGRRGEGRGEGPAAGVAPAEATPPSASSLPPLSLSLSLFSPVGSRPATNIVARRRHRGGWCCVGHAAEVGGAGAEEEEVVALSSSSSSASRKKVGAAAEARGLPRLVRYKVLVLVLVLQFLYSRQASVAAPNSGPLPGCGAWGCWHTRCGAAVDLALDTLKLSIHTSRGNPLASAAAASTFFPDSEDDDDDSATSKAASGGSPAIPPPTTAPRFPPPRATTARTASARSPTTSSSPASRQGRDSHRRARLPLAARLELHAARPPRQAPCAPAWRALGAARSPWRRWWPARGGSTAAAALVADLLLSAAEAVGVAAVGRALAGHPDPFRVVHRSELAESSTICSPASLALALNRQRERRNRGPANVAS

SEQ ID NO: 107053 - protein, 167 aa, Oryza sativa
  Clone ID: PAT_MRT4530_11441C.1.pep
TQPQAFNTVALCNSVHACLPFVAAHGRYLCADVQLTWDQKDRTEQLSRSSPAARVDVATRQKGFTRYQDSKTPQCIKSFLSIHTSHQSERKMKIQPCSSIVHETSNICSPKISCRSLAHSIIVKKLATSITATLSHASDRRSRALCVYTGLVDPCAYMRGSYQCPVQ

SEQ ID NO: 107054 - protein, 69 aa, Oryza sativa
  unsure (1)..(69): unsure at all Xaa locations
  Clone ID: PAT_MRT4530_11442C.1.pep
ETSXRSSXXSLSEKKPXRRGIAGCFEQDLSASSAAXLAPLTSCLSSTSTPMTIARSSSRXEXIGYYWLV

SEQ ID NO: 107055 - protein, 90 aa, Oryza sativa
  Clone ID: PAT_MRT4530_11443C.1.pep
GRVGYPLISQQPPILHQRGARPSTLVHHVPRHVTLLHTLIHSPSPFHQALPIPYSHLTLQLINTPFYRPPTFSLIISNRIRSHPIRLHVY

SEQ ID NO: 107056 - protein, 105 aa, Oryza sativa
  unsure (1)..(105): unsure at all Xaa locations
  Clone ID: PAT_MRT4530_11444C.1.pep
ATSSFGRFDDSFSAASLKAYVAEFISTLVFCFTGVGFAIAYTKLTGGAPLDPAGLVVVVVCXHGFGLFVAVAICANISCGHVNPDVTFGLXALRGQITMLTGRFL

SEQ ID NO: 107057 - protein, 276 aa, Oryza sativa
  Clone ID: PAT_MRT4530_11445C.1.pep
MAVGVLDAPLPPPICRPASCHAASSPPSLPSGATAATSPPALSMDEFNEKFFEEYGCDLTELLFTEEEVRVLMLEYEAEKAHLLSHGEVKETAPAEQVPDAPRPSKKARGENGKAAAAENVEVQTPPPPLVADAPRHSKKRKAPPPPSPPREEEAEDAVFQTTPPPSHKKVAERILNRRFFPPDPSHGGTILWCLCRELLPRGGPRCALHQKAPFRSWMSEQGYVEEAGGAGGWALVPKLSAECGRSLFQRYARWRRRAWMPTRFFLETTQPPTRT

SEQ ID NO: 107058 - protein, 66 aa, Oryza sativa
  unsure (1)..(66): unsure at all Xaa locations
  Clone ID: PAT_MRT4530_11446C.1.pep
XFHPXYITKYKRLHNQVTQVHIAKXSLCLPLXNXPQMKILLXITYFFPXFGGIXFAAXGGLXGVAI

SEQ ID NO: 107059 - protein, 316 aa, Oryza sativa
  Clone ID: PAT_MRT4530_11447C.1.pep
MASKLGMVVLLISGLFAARCAAVVTTGEPVVAGLSWGFYDTSCPSVEGIGCDASVLLTGSQSELGEIPNQTLRPSALKLIEDIRAAVHSACGAKVSCADITTLATRDAIVASGGPYFDVPLGRRDGLAPASSDKVGLLPAPFFDVPTLIQAFKDRNLDKTDLVALSGAHTIGLGHCGSFNDRFDGSKPIMDPVLVKKLQAKCAKDVPVNSVTQELDVRTPNAFDNKYYFDLIAKQGIFKSDQGLIEDAQTNRTAVRFALNQAAFFDQFARSMVKMSQMDVLTGNAGEIRNNCAAPNRRSSDLLNAADDDQGFAADA

SEQ ID NO: 107060 - protein, 106 aa, Oryza sativa
  unsure (1)..(106): unsure at all Xaa locations
  Clone ID: PAT_MRT4530_11448C.1.pep
PPRKPPTVQRPGTRTXNPPHKRILEDVVYPAGSDDKPIRYRLNGPKVIQSFLDPKERNNTVYKLEPFSAVNRRLCGKNAAFKYPMAGPAFRCFPWIVPHGFHKSKF

SEQ ID NO: 107061 - protein, 354 aa, Oryza sativa
  unsure (1)..(354): unsure at all Xaa locations
  Clone ID: PAT_MRT4530_11449C.1.pep
MASKLGMVVLLISGLFAARCAAVVTTGEPVVAGLSWGFYDTSCPSVEGIVRWHVTEALRRDIGIAAGLVRIFFHDCFPXQGCDASVLLTGSQSELGEIPNQTLRPSALKLIEDIRAAVHSACGAKVSCADITTLATRDAIVASGGPYFDVPLGRRDGLAPASSDKVGLLPAPFFDVPTLIQAFKDRNLDKTDLVALSGAHTIGLGHCGSFNDRFDGSKPIMDPVLVKKLQAKCAKDVPVNSVTQELDVRTPNAFDNKYYFDLIAKQGIFKSDQGLIEDAQTNRTAVRFALNQAAFFDQFARSMVKMSQMDVLTGNAGEIRNNCAAPNRRSSDLXQRCRRRPRLRRRRLINLWSN

SEQ ID NO: 107062 - protein, 648 aa, Oryza sativa
  Clone ID: PAT_MRT4530_1144C.1.pep
MRRRKRRHGVGAGGEAGDWGGSLGRFKRTRGGSRRKESAREGPTAADCGGGHRRRRKGENSPGQQESNSPGKELLHGSGNSFQATGGDEGGGALTDERGAASAAGAARRATGESGSVGSSPTRETASAARMESRQGGRDGGAAWHRGCAVGVEGRERWRWGSPELLVTRPRMHRLLRCSAADGDGESGASSNNGAAVMEVRRQRRGMPATLVTLDLGYNALDDVITAEHLSHLNRLKHIDLSYTSLKIQIVSEWQPPFRLESASFQFCQMGPRFPAWLQSQKSIDSLDMSSTGLSGPLPSNLPNLSEVVLFSNNISGRIPKSICQSQDLATLDLANNRLKLVFLDLGWNEFHGRLPVWIGDLVRLEVLALDHNKFFGGIPDKITNISCLIHLNLAANNISGAMPRHLSNFTSMSGSINGCGDIPDNNSPSEKDNVSVVTKGKDLYYDDAEILDMVTIDLSSNYLTGDIPQEITSLLSLRCLNLSGNHLSGKIPNKIGILQSLESLDLSRNNLSGEIPSSLSNLTFLSDLDLSFNNLRGTIPSGSQLDSLYTEHPRMFDGNGGLCGPPLGKNCYVPQKGHMRRKENFSKIQPFHVGILLGFIAGLWVVFCIMLFKKSWRIAYFRLFDSMYDKVYVLVVVSWGKFAQENY

SEQ ID NO: 107063 - protein, 93 aa, Oryza sativa
  Clone ID: PAT_MRT4530_11450C.1.pep
TARNCNRRHERGNTNNSGSSGTNGLTPNTTGDGWEPGRNPNVHFTSSSTSGRRNYIYLYRARVSTVQLPSSTTIRFHSGSLVYDARRHPESHR

SEQ ID NO: 107064 - protein, 100 aa, Oryza sativa
  Clone ID: PAT_MRT4530_11451C.1.pep
KKLLSFYPRKINSTLAAKKIFFQTRQKRARFLSPNWYKKHWKGLKIDFTGYPDRNCCCSSPKKKRTRWSCCCANLYKFFSKQMSKKKKKKLCKKFVIWPR

SEQ ID NO: 107065 - protein, 960 aa, Oryza sativa
  Clone ID: PAT_MRT4530_11452C.1.pep
MMMMCAGGAAAIIFLTALSSAASALGVAAAAAAAACVPSERAALLAIKAGFTSDPDGRLASWGAAADCCRWDGVVCDNATGHVTELRLHNARADIDGGAGLGGEISRSLLGLPRLAYLDLSQNNLIGGDGVSPSPLPRFLGSLCDLRYLNLSFTGLAGEIPPQLGNLTRLRQLDLSSNVGGLYSGDISWLSGMSSLEYLDMSVVNLNASVGWAGVVSNLPSLRVLALSDCGLTAAPSPPARANLTRLQKLDLSTNVINTSSANSWFWDVPTLTYLDLSGNALSGVFPDALGNMTNLRVLNLQGNDMVGMIPATLQRLCGLQVVDLTVNSVNGDMAEFMRRLPRCVFGKLQVLQLSAVNMSGHLPKWIGEMSELTILDLSFNKLSGEIPLGIGSLSNLTRLFLHNNLLNGSLSEEHFADLVSLEWIDLSLNNLSMEIKPSWKPPCKLVYAYFPDVQMGPHFPAWIKHQPSIKYLDISNAGIVDELPPWFWKSYSDAVYLNISVNQISGVLPPSLKFMRSALAIYLGSNNLTGSVPLLPEKLLVLDLSRNSLSGPFPQEFGAPELVELDVSSNMISGIVPETLCRFPNLLHLDLSNNNLTGHLPRCRNISSDGLGLITLILYRNNFTGEFPVFLKHCKSMTFLDLAQNMFSGIVPEWIGRKLPSLTHLRMKSNRFSGSIPTQLTELPDLQFLDLADNRLSGSIPPSLANMTGMTQNHLPLALNPLTGYGASGNDRIVDSLPMVTKGQDRSYTSGVIYMVSLDLSDNVLDGSIPDELSSLTGLVNLNLSMNRLTGTIPRKIGALQKLESLDLSINVLSGEIPSSLSDLTSLSQLNLSYNNLSGRIPSGNQLQALANPAYIYIGNAGLCGPPLQKNCSSEKNRTSQPDLHEGKGLSDTMSFYLGLALGFVVGLWMVFCSLLFVKTWRIVYFQAINKAYDTLYVFIGVRWAKFRVDKTTTTSVPK

SEQ ID NO: 107066 - protein, 92 aa, Oryza sativa
  Clone ID: PAT_MRT4530_11453C.1.pep
ALRSSYLSMEEFSDLSAEMKASGFWSLSRHRLPSIIVDVQHQKVGDPLPRPILEPLISAPSSADQLCNVFTQDIVSVCVCVFRTRGSTGGTL

SEQ ID NO: 107067 - protein, 769 aa, Oryza sativa
  unsure (1)..(769): unsure at all Xaa locations
  Clone ID: PAT_MRT4530_11454C.1.pep
MHEHIRARAWEATVRKVVQQQQPQPQPGGSRRRVSPMLAADDPETASSSSASTAGGGDDGGYVERGLPNGDFYTGQWRGGAPHGAGKYLWTDGCMYEGEWRHGKATGRGRFSWPSGATYEGEFRDGFMDGAGTYTGAAGDTYRGSWSMNLKHGHGKKSYANGDHYDGEWRSGLQDGAGRYIWRNGTEYTGQWRGGLIHGRGALVWSNGNRYDGGWEDGCPRGQGTFRWADGSVYVGYWTRDAATGIVQQKGVYYPSPAASSPTARDPRDVXLNHSGNRGGAAAAAGNARSSSASGLSNSSGGDRKXDKICIWESDGDITCDIVDGAALADEAVGPRRSIKAAAAGDGLVLAPPSPAPRIAKWVPPREAKRQGETIAKGHKNYELMLNLQLGIRHAVGKQGPVTLDLKSSAFDPKEKVWTKFPPEGSKYTPPHNSCDFKWKDYCPQVFRTLRKLFKVDAADYMLSLCGSEALRELSSPGKSGSFFYLTNDDRYMIKTMKKSEVKMLLKMLPAYYNHVRSFENTLVTKFFGLHCVKLAGANQKKVRFVIMGNLFCSDHSIHRRFDLKGSSLGRTTDKPQTEIDQYTTLKDLDLNFIFRLKKQWFHEFQRQVDRDCDFLEQEKIMDYSLLVGVHFRGNREKLLSEGSTDYDINKISTPRLSRGNVDQCLTDPNRWPKIKLGANMPARAELTARKNDLEPQLIGEPTGEYYDAILYFGIIDILQDYDISKKLEHAYKSFQYDPTSISAVDPRQYSRRFKDFIYKAFQEDRLDS

SEQ ID NO: 107068 - protein, 50 aa, Oryza sativa
  Clone ID: PAT_MRT4530_11455C.1.pep
MARRSPCLDVAMLLLGALAVASAFIDEALPDGRELDHGAHFMSKQGSVTY

SEQ ID NO: 107069 - protein, 390 aa, Oryza sativa
  Clone ID: PAT_MRT4530_11456C.1.pep
MARGFRGVRDDLTELGRHILDIACFLHPLLGPAHLTVDSPPATPTHRHHHHRRSPSPRPATPPSPSILAGILADLAEIGGSFTGGFARRAALPEPAFSSASASASATTAESPRAASSTASSPSPSPAAAAAADVADDVVGAAQALAARPEAWIDFPVLALDENSIISDIQRDHMEAIEKLVPDLASLRARLCPSYMDIDVFWKIYFTLLESNLTEHTSEVDENVPGSVHHVNEIESDSAPNVCEIESVKSTQEGYQSPDDRVLIKTRSNQSIDQWVFAKSKSEQSMDQWSEIPSDVESSRDGRRYISGEELSDADSAHIVVMDKYMDSLLSDRRSLHYASSSVRRDSVRRKPASSTDYSHRPPQPTPPASLSKKESWDVIEDSEFEILDS

SEQ ID NO: 107070 - protein, 298 aa, Oryza sativa
  Clone ID: PAT_MRT4530_11457C.1.pep
MAAHANLPKSRGEMGQGKGGLGWNIPIPGPEPTTRRIMSPVPTPIRSPHSERCSWVCGRRWKRDDAPGMVGKENGLGLIDVLVCCESPRARAGGGRGGAMATMTLLAHAPTEAKEEAHPRGGRGGALCRRICRCVMEVYLELGMELVVDTGSIAVGAARDANAAALPSPTAMNMRDRIADGKLRSVALAVTAKMPWLWAMTIMPFLPCTLATGSKSVELLMGRETHHGGHHRLLALSKSTRSPRILLHENWDGPGITDVDTELGWLSTNLHRSRGDNGVGQRWIGTSPPLAPNQRPGE

SEQ ID NO: 107071 - protein, 130 aa, Oryza sativa
  unsure (1)..(130): unsure at all Xaa locations
  Clone ID: PAT_MRT4530_11458C.1.pep
SRRARRGVRVGXRRXRGWRRRWRRRRRHPPRSLPPAAQEIVPRSLLLLSLTPSTKFISSITARDSPRYRSKLQSTPMAKQRWRGVAFLFLGVRGAGGAGRARGSEREREEFLSQWCGCGAISFFLGACPA

SEQ ID NO: 107072 - protein, 81 aa, Oryza sativa
  Clone ID: PAT_MRT4530_11459C.1.pep
MRVRAGDANVAPGKKVAAAWVSGTCVSAETGSEDGGGFGVGRRHPGNVGCSKISTTTLVYGTCRQVIKGTMELEGSGEIMV

SEQ ID NO: 107073 - protein, 163 aa, Oryza sativa
  Clone ID: PAT_MRT4530_1145C.1.pep
MSSSSRPGRASISPFRSRRTSAAGGGAGVAAAAHPPPARTSSGGRPSTPSSSSSAAGGGRPTTPSSSSAGGRPTTPSAAFARSTTPSSGRPTTPSSASSRAAGRAPPVAAVDAANAKENIMVTVRFRPLSPREINKGDEVAWYANGDNMVRNEYNPSIAYAFG

SEQ ID NO: 107074 - protein, 151 aa, Oryza sativa
  unsure (1)..(151): unsure at all Xaa locations
  Clone ID: PAT_MRT4530_11460C.1.pep
SPTGRLVRRRLVFPPARLAYYAAIVGRLHLLXRPPRMTPTGAIVFTVAXFASTAARLRYRFVSVAADLCSLHHGYATLSPWWSGFIFIVFSTSKLYCLYFASFPIEDLIIIVGCYNAIDWITDIVIFINIHRLHLSSPTIFFIFMIGGLRH

SEQ ID NO: 107075 - protein, 173 aa, Oryza sativa
  Clone ID: PAT_MRT4530_11461C.1.pep
MSLAATFVFLLVSALQMLDQVLDLVKKRGSITDDQLKLRLEITQILKEASALSTPSTFAQAAKLKRLAAAKEKELAKLQQQDIKGKQSLYNQYGRVMLFSKVLIYGLLILWVWSAPVTTVPKHLLQPVGRMFSWRGVDAATGRVVVGIIPWLLLTSRVSKLWCQKLAPIFLHP

SEQ ID NO: 107076 - protein, 169 aa, Oryza sativa
  Clone ID: PAT_MRT4530_11462C.1.pep
MSVQFTSEHVCYVNCNYCNTILVVNVPNNCSYNIVTVRCGHCTMVLSMDLAPFHQARTVQDHQVQNRGFQGNNFGSYDIASRNQRTSTAMYPMPTSQQQVSPIRPPEKRQRVPSAYNRFIKEEIQRIKTSNPEISHREAFSAAAKNWAHLPRLHFGLSVADGGGGGGSN

SEQ ID NO: 107077 - protein, 206 aa, Oryza sativa
  unsure (1)..(206): unsure at all Xaa locations
  Clone ID: PAT_MRT4530_11463C.1.pep
MGNSLGCSASGERLVSAARDGDAVEARMLLELSPALARYSTFGGLNSPLHFAAAKGHLDIVTLLLEKGADVNVRNYCGQTALMHACRHGHWEVVQMLLLFRCNVTRADYLSGRTALHFAAHDGLVRCVRLLLADFVPSAPLEDGASSTVDGGXECQTNSGSSPCSSLGLKFNESARLRYINXPAVGGVTALHMAALNGHFDCMQLV

SEQ ID NO: 107078 - protein, 176 aa, Oryza sativa
  unsure (1)..(176): unsure at all Xaa locations
  Clone ID: PAT_MRT4530_11464C.1.pep
KKPPKGKRVKKKGGPGKKKKKKEGGEKRPGPKLPNPGFGSREPKKPPPGGGFNLKKGPXKIWEKKVLNPQKRGPWKPNPPQNPKIGKGGGPMGFFPPPKKKKSLGTPGGKGLKRPPGEKKKPLGRTKGNPKRGPPPGEKRLLAPXPNFPVWPPKPWRGLGGKPRPRKKKKPPGFVG

SEQ ID NO: 107079 - protein, 89 aa, Oryza sativa
  Clone ID: PAT_MRT4530_11465C.1.pep
MKHIFKIIAMLVAVSAIWIALLETATVPRSYTWLLPIYLVVALGCYGLFMVGFGLMFFPTCPQEAVLLQQDILEAKEFLSKKGVDVGSE

SEQ ID NO: 107080 - protein, 49 aa, Oryza sativa
  unsure (1)..(49): unsure at all Xaa locations
  Clone ID: PAT_MRT4530_11466C.1.pep
SSMSVKFLVHFVFIAELQHLIVVLVPTLLXQTMMPMCLCLVWTPYYYAF

SEQ ID NO: 107081 - protein, 58 aa, Oryza sativa
  Clone ID: PAT_MRT4530_11467C.1.pep
FLFSISYHLHGGGSLIIWGLTLSEGSLGSSTPGPFDARWLSIALSTIPTYPPTTLPTC

SEQ ID NO: 107082 - protein, 40 aa, Oryza sativa
  Clone ID: PAT_MRT4530_11468C.1.pep
PHSGNNQGLPVLQWIRPLWFPPDTSWPTETTDFQIAFRRP

SEQ ID NO: 107083 - protein, 70 aa, Oryza sativa
  Clone ID: PAT_MRT4530_11469C.1.pep
LLLWPTGGRHTHVSSMPGATRMWKDKHPCTAMITTLSVFSLRRGGPTTPLIPNTPRHNRALYDPYTLTPS

SEQ ID NO: 107084 - protein, 145 aa, Oryza sativa
  Clone ID: PAT_MRT4530_1146C.1.pep
MPKIKTSRVKYPGGWELIEPTIRELDAKMREAENDTHDGKRKCEALWPIFRISHQRSRYIYDLYYRRKEISKELYEFCLDQGYADRNLIAKWKKPGYERLCCLRCIQTRDHNFATTCVCRVPKHLREEKVIECVHCGCRGCASGD

SEQ ID NO: 107085 - protein, 141 aa, Oryza sativa
  Clone ID: PAT_MRT4530_11470C.1.pep
QQEDDIASSLVTARVRVGVYSASDVGLGLGDTSGNGKAVAVEAARGSAVARQSGQVEWRRSHAPTQSAWNVEPVAAPREEARQVDANSGVGARGRRWYAHWEVDVPRRCDVSDDDASSSSAPPAMDDDDGGPRLPEKNRQK

SEQ ID NO: 107086 - protein, 138 aa, Oryza sativa
  unsure (1)..(138): unsure at all Xaa locations
  Clone ID: PAT_MRT4530_11471C.1.pep
AAARILNPNVWXKVLTDLVEGLEXASVTVEIRLKIDQKHADLKGGSFRDYGEAVLKHLENAISKDEYLCKAPKNYEGVRVSGYGGWFLLRLSLHDPVLPLNIEAPSKDDAIKLGLAVLTAVSEFPALDITALNKFLQQ

SEQ ID NO: 107087 - protein, 60 aa, Oryza sativa
  Clone ID: PAT_MRT4530_11472C.1.pep
MAVQIWPWLLCTRKEGGVGGVRMEVAMVMALRRLAMAGATHGVTAGNFLGVGVGSCSTGG

SEQ ID NO: 107088 - protein, 83 aa, Oryza sativa
  Clone ID: PAT_MRT4530_11473C.1.pep
VVLARIGSNPTSAVGGGAHRRSSGGARRHGPEGVPADARALPRRSISRLLRNLHPLPCLPFSYPTLSFPARVGRGRIGVSAAI

SEQ ID NO: 107089 - protein, 98 aa, Oryza sativa
  Clone ID: PAT_MRT4530_11474C.1.pep
LGDRRLWSRALGNCLIACDRAPRTCNTGSRRVLAAVSSLPRLVRRRLVVLDEHIIGASVMVDIPRVIMSHSVLVGHVVVLRCRLGGGLRCYRCHGLAG

SEQ ID NO: 107090 - protein, 109 aa, Oryza sativa
  Clone ID: PAT_MRT4530_11475C.1.pep
MASPSSVNLASALGIHVAVTAAPATLWAFQLAIPLTLENLVAVWMKTAALAASWPEGGPSACESAAAVAAISALAAYKEEAKSIFTDPGRSYNGFSISHQFLDPTLVPN

SEQ ID NO: 107091 - protein, 109 aa, Oryza sativa
  Clone ID: PAT_MRT4530_11476C.1.pep
WRWKRILADIRAQAASPTCPTRCSSTTSSASSPSQSWPRPALSTLWRPGSWRPSARHNFRVLFVCGCRDLGEALRRIREGAAIIRTKGEAPLTWPTQGRKGCGDGEKRD

SEQ ID NO: 107092 - protein, 78 aa, Oryza sativa
  Clone ID: PAT_MRT4530_11477C.1.pep
PRGRIELILIGWAEGRRGADIIKPFFINTYPIFPNNKLTGTDSLYPGGMRLDPLGWSTSSPHKNQELDTKEIKNEGVG

SEQ ID NO: 107093 - protein, 293 aa, Oryza sativa
  Clone ID: PAT_MRT4530_11478C.1.pep
MAMASTLPLLLVHRSTPPTPRPTAPPLLHSRRLTLPSRLASLPATTAVVHPRKGVRLSKLHAASCCDSASAAGVAAGGGAGGGGAKGEMDWRLLLAWYLLALDKHPITTKAVTSAVLTLTGDLICQLAIDKVPKLDLKRTFVFTFLGLVLVGPTLHVWYLYLSKLVMINGASGAIARLLLDQFIFSPIFIGVFMSLLVTLEGKPSLVVPKLKQEWLSSVIANWQLWIPFQFLNFYFVPQKFQLDFPKATQTTFLYLLQFKMMLIGAKGAVCSFVTHEEQPVVSLEAKEMDKVK

SEQ ID NO: 107094 - protein, 668 aa, Oryza sativa
  Clone ID: PAT_MRT4530_11479C.1.pep
MDHESIVASDLSIYPLPPGTRTLATPRVVLAPPPVTVVNQPHADWRGLPDAAVSRVLDRLPVVDLFRLGYLFSPRWLHIWRARPLYLHDRQFTTPPIPAANVANAITNVLHHHVGEGVQLLPVQGGGGGGGGQGEGALVGGGDADEAVTSDDEIYEDEGIIQNAGHEIGRVYCLRVETTRWSLDHLVRWCAELQRGGARVLMLANLAIPEHPELPQAILNCGASHLGLHVFFFTVEAYHIAALVELRALGLYGCIEGHGMIDRVLHPESPIRKLAIHGGMGRTFAVAGATRLRSLVLFDNQVGTVAVDGAARFRNLYMSDTKPSRIRIGAAPRLRRILSLDIFNTVLVIQGLAIQIGMMEPPPQIRSVRHLCLRVNYTEMDVRLPRLMEQILKSFPRVKSLDIMRCDDVTQAEGLLQWNDAHYDGNNFFDGLESFNYHLRWIYLEDFRGGKCEVALMKAMLDKASVLRQLMIQYSTSSVPQLTLNQLDLSLQNFKLHTLNEAPPAAAIAVDGSSSPPPVEIRGGFTHRRWRLRAQRLGGEGGGAGEMKGSAIPAVAIMPSPLFLWRFKVFSDLERSVCRMVNRQVYYWVLASNLVLRCTWTYKLSAHLRHNYLTVFTIAALEILRRFQWVFFRVENEWNKMTAKQSLEMSSDMPSEGDRLLDSNSHTV

SEQ ID NO: 107095 - protein, 411 aa, Oryza sativa
  Clone ID: PAT_MRT4530_1147C.1.pep
MAKLGPGQGLGCEAAVGLLAPSRKREYKACNKLTEGKRPLYAIGFNFLDFHYYEVFATVGGNRVTTYSCLKDGNFAILQAYIDEDKDESFYTLSWACDLDGTPLLVAAGSNGIIRVINCATEKLLKFLANFNENSFLRIYALLLSDIPMIEAMLQIIVASLTFVGHGDSINEIRTQALKPSLIISASKDESVRLWNVHTGICILIFAGAGGHRNEVLSVDFHPSDIYRIASCGMDNTVKIWSMKEFWPYVEQSFTWTDLPSKFPTKYVQFPVLVAVVHSNYVDCTRWLGDFILSKSVDNEIVLWEPKTKEQSPGEGSIDILQKYPVPECDIWFIKFSCDFHFNQLAIGNREGKVFVWEVQSSPPVLTARLTNPQCKSAIRQTAVSFDGSTILACSEDGSIWRWDEVDHPKA

SEQ ID NO: 107096 - protein, 31 aa, Oryza sativa
  Clone ID: PAT_MRT4530_11480C.1.pep
TVHVCSRGDSFIKYNCVRRILVSELGLCRHV

SEQ ID NO: 107097 - protein, 337 aa, Oryza sativa
  Clone ID: PAT_MRT4530_11481C.1.pep
MVRSAHDNSLPLAASEVTAHLVRRAAPKRRVAELDVEAQQASGGRRGGCRRRGGGHAYGYLSDAEWHPGGCFVPESEDQTCGSVNDSELPPDGGFVPDSEDEASGGVDDSELPPDGCVVPDSEDEASGGVDDSDLPPDGCVPDSKDEASGGVDDSDLPADGCVVPDSKDEESGGVHDSELPPEGCVVPDSEDKESGGVHDSELPPKGCVVPDSEDEESGGVHDSELPPEGCVVPDSEDEESGGVDDSELPPEGCVVPNSEDEESGGGVHNLEQKPDKDISANLEEQHMDDIEQLVGGEEVTGLQDDAGVAARDEGVDKFAEIREITLIIEPRVCNCC

SEQ ID NO: 107098 - protein, 206 aa, Oryza sativa
  unsure (1)..(206): unsure at all Xaa locations
  Clone ID: PAT_MRT4530_11482C.1.pep
IQIQICIVGIHVYKLISYASGMHQSEHHRXVAFAAADXCPHLHGWPIMPPLMGVFAFTTGLPLPSPPRLCDYATADGRLRLHRQLAFITVDWCLRPHGCVFSPPACLRRHRLVLSLPRVSAFAIIIRQLHLHHLHHQQFRSPLLHQLCYFTQHXATKYDVVLIYYKWCSNPQDFYSNILNAYLYSSDGYSTIRSYSFLTLCSVVPN

SEQ ID NO: 107099 - protein, 722 aa, Oryza sativa
  Clone ID: PAT_MRT4530_11483C.1.pep
MDGLDDEWDDDKFLAELFRAQDEAVASRNPNPTPPPPPPPPDLISYLPPPSTSSYPSSSAAAAALPLSYITPGPHVFSAAPVHFLPPRELSQHPQGFDVGLRDFSPPRELSQRPAAEVSSREIVAVSSGIAGADRFRGGGGGGARRERDAREAADRREVERLKRELNRVSKQMNDVKNECSELKKDRTRKDLEIKAKEAEIQSLRRANVGSANKYAGSMAMDIDQSVHAPANGALHTGDSCLASTRRAETLNGRNKELSSPQDGLCLNQRNQTYASEVLEESVRFESKGSKHKEIKTVGVQTDLPGNNEYLEHKKVLVDRISSNLCAVWGMPTNSLMGRSLISKILVSCSEEILTLVQSTGSLDKCEASSEASSSVRNAISQVYDIIIKTSSDTIPIQTLLEALLNLAAVGNDAVVSRALRMLHSVLQHLLNNRTMSNQRHSEENIRVDALSIMIIIARTSDPKVEREKFGFTSVMEKLHQLLQKENGLLVKKHSVDLLFLLLNCPTTLKLLCNGGKDSPEQIEAIRCENDRSQEAISSIFKDLSECLSCRATSSLGIKLCRVVVTLLAYIASSGKLGYEVLLGPVTVRGANFLELIMEVLASQMEYDTALSNGEHELLKERYLLMREVLILLNRLASHANFSKPTLEVLTSSKLCATLTIDVANQLPQRSKYPLRHLGEINIQMANDLAELAQKFRTRVHSFLEEQHSTVDHSNPSALHES

SEQ ID NO: 107100 - protein, 85 aa, Oryza sativa
  Clone ID: PAT_MRT4530_11484C.1.pep
QSEMCLVLQFKVSLVKTRVKLCPDIVDHFGSERLIAARCFTLYEWLCTINKMVLCCNLINRSVPDYYSKTLHIFQSLQQGCQLCA

SEQ ID NO: 107101 - protein, 114 aa, Oryza sativa
  Clone ID: PAT_MRT4530_11485C.1.pep
RLPVSHRDLLFLFKISGVEKLFFKLESFSPGKGLFCFVSRGEFSPRAPLIAKKWGGLVYGGLRWTSAPKGGFCSLQGPLSLCFFRRSMFWSQLVPMNGELDVKKIFPLFWLDQG

SEQ ID NO: 107102 - protein, 584 aa, Oryza sativa
  Clone ID: PAT_MRT4530_11486C.1.pep
MATMPSTCASSSSLFLLLRRDRRSSRSASLPGPARRLGVVRASAKEIAFDQGSRSSLQAGVEKLAAAVAVTLGPRGRNVVLDEFGSPKVVNDGVTIARAIELADPMENAGAALIREVASKTNDSAGDGTTTASVLAREIIKLGLLSVTSGANPVSIKKGIDKTVHSLVEELEKKSRPVKGSGDIKAVAAISAGNDDFVGTMIAEAIDKVGPDGVLSIESSSSFETTVEVEEGMEIDRGYISPQFVTNPEKSLVEFENARILVTDQKISSIKEIIPLLEQTTQLRAPLLIIAEDVAGEALATLVVNKLRGILNVAAIKAPGFGERRKALLQDIAIVTGAEFQAKDLGLLVESTTVEQLGIARKVTISQSSTTIIADVATKDEIQARIAQLKRELSQTDSAYDSEKLAERIAKLSGGVAVIKVGAATETELEDRKLRIEDAKNATFAAIEEGIVPGGGAAYVHLSKFVPAIKEKLDDPEERLGADIIQKALVAPAALIAHNAGVEGEVIVEKIKESEWEVGYNAMADRHENLVQAGVIDPAKVTRCALQNAASVAGMVLTTQAIVVEKPKKKASAASGAPEGSLAM

SEQ ID NO: 107103 - protein, 282 aa, Oryza sativa
  unsure (1)..(282): unsure at all Xaa locations
  Clone ID: PAT_MRT4530_11487C.1.pep
LCSTSTEYWVGINVCAPFATGFQVCHSLGGGTGSGMGTLLISKIREEYPDRMMLTFSVFPSPKVSDTVVEPYNATLSVHQLVENADECMVLDNEALYDICFRTLKLATPTGXSQQYRALTVPELTQQMWDAKNMMCAADPRHGRYLTASAMFRGXMSTKEVDEQMLNVQNKNSSYFVEWIPNNVKSSVCDIPPNGLKMASTFIGNSTSIQEMFRRVSEQFTAMFRRKAFLHWYTGEGMDEMEFTEAESNMNDLVAEYQQYQDATADDEEEDYGDEEEDEVAA

SEQ ID NO: 107104 - protein, 44 aa, Oryza sativa
  unsure (1)..(44): unsure at all Xaa locations
  Clone ID: PAT_MRT4530_11488C.1.pep
LHARTMSWPVTGTLMYAPTERVCSDXLDRLCDALVSIRVETAEF

SEQ ID NO: 107105 - protein, 447 aa, Oryza sativa
  Clone ID: PAT_MRT4530_11489C.1.pep
MREILHIQGGQCGNQIGAKFWEVICDEHGIDHTGKYSGDSDLQLERINVYYNEASGGRFVPRAVLMDLEPGTMDSVRSGPFGQIFRPDNFVFGQSGAGNNWAKGHYTEGAELIDSVLDVVRKEAENCDCLQGFQVCHSLGGGTGSGMGTLLISKIREEYPDRMMLTFSVFPSPKVSDTVVEPYNATLSVHQLVENADECMVLDNEALYDICFRTLKLATPTFGDLNHLISATMSGVTCCLRFPGQLNSDLRKLAVNLIPFPRLHFFMVGFAPLTSRGSQQYRALTVPELTQQMWDAKNMMCAADPRHGRYLTASAMFRGKMSTKEVDEQMLNVQNKNSSYFVEWIPNNVKSSVCDIPPNGLKMASTFIGNSTSIQEMFRRVSEQFTAMFRRKAFLHWYTGEGMDEMEFTEAESNMNDLVAEYQQYQDATADDEEEDYGDEEEDEVAA

SEQ ID NO: 107106 - protein, 334 aa, Oryza sativa
  unsure (1)..(334): unsure at all Xaa locations
  Clone ID: PAT_MRT4530_1148C.1.pep
MAMPHLPVSTDLPPALSGGVEADDQAMTMRQINADRNHNLRYLNNVIPVAGWKLWRAGERRSRGGARRPRRWPALRSAPVEQRRPKRRRAGFGGPSRAWGAPSSVPTGQGTPAPTPPDTGWNVGALPSVPSPVTGHRPHSSCLATPRFALAALPSPVRRTVHRPPESPSSPPRRGTQLPCAAEWMWCEAVRWREHGELGARRFETAARARRTASLALSNRKEFTTPHNGAINSLQNATEYEAGFIAKHRSILLVDKQHENGHKFVVSMAVWYPVDTGLFVTASFDQYVKXAMSPIATTHMLIATGSADVQDPLNSLQPSSSSKIYSAQQRTGKS

SEQ ID NO: 107107 - protein, 182 aa, Oryza sativa
  Clone ID: PAT_MRT4530_11490C.1.pep
MDKFYGEEEQCEGSAGNCDMPNEDVGCEQEDQTCVDHSEANLDQMMRDGEKADTDDRKYRMFKTMVEDSKAPPYNGLCKASRYNCGDRDDDGGSNSTMKKKRVPMKRIPQERVSARGHRKKKSTCLLPCHGRKGKADPSPAMPLEQGDGQRYHYPGVAWSRGEEEEPSTLTDTVLTAARHKS

SEQ ID NO: 107108 - protein, 170 aa, Oryza sativa
  unsure (1)..(170): unsure at all Xaa locations
  Clone ID: PAT_MRT4530_11491C.1.pep
LRQRCQQISPTFKPQIHPKCLFTTSLPLSLRPLPSVPSFARLLSLPSSPPSLALPTTAPRLPTLRRSSFAQRRPPLLELLGEPRWSALLFSRMVSVPSSTPLPPFSYKGSAYXRCSDSLWLPSAPGYISQVFLEKRPLETVGVSVVAKVMETVGLACVLTWWGTRTNPFE

SEQ ID NO: 107109 - protein, 67 aa, Oryza sativa
  Clone ID: PAT_MRT4530_11492C.1.pep
MPCKRVAVCIARPEEEGVEMAAPDVKYRCFVGGLAWATRYRSLQAAFWTYGEILYLKIINHRETARS

SEQ ID NO: 107110 - protein, 197 aa, Oryza sativa
  unsure (1)..(197): unsure at all Xaa locations
  Clone ID: PAT_MRT4530_11493C.1.pep
MPGDAEDLPPAITKLGRHFRLTEAHIWDGWYAAGADVSHRSWHSDDIDSGGCCQTDKVQNKPTKQTDEGDLFVEDLELSNLMGSLGLPVSFSTSKEKKNAPNKVKKNGRRVSYEAANTLIDDDSRTCTGTKETESIVQLMACVEXTNPCSSSRITVGYSEVCQGDIEKMDXDIXYANEQERVCDLCSSKVYQVAKPE

SEQ ID NO: 107111 - protein, 109 aa, Oryza sativa
  Clone ID: PAT_MRT4530_11494C.1.pep
MGWPAGRLSYYCPRQLRLSCTVALRYVWEEANKCWATFPGTKIRIPGYKSYGAQFPIPCARRHRRSATAFIAWDVKPGTAWERDRRPPPSHSSLHSTASFLVRIQMIVR

SEQ ID NO: 107112 - protein, 702 aa, Oryza sativa
  Clone ID: PAT_MRT4530_11495C.1.pep
MPGDAEDLPPAITKLGRHFRLTEAHIWDGWYAAGADVSHRSWHSDDIDSGGTNMNIAKGFSLGCCQTDKVQNKPTKQTDEGDLFVEDLELSNLMGSLGLPVSFSTSKEKKNAPNKVKKNGRRVSYEAANTLIDDDSRTCTGTKETESIVQLMACVEQTNPCSSSRITVGYSEVCQGDIEKMDKDIVYANEQEESGDLCSSKVLSSSKAEDNYEHETCQFHANMNNPVKADSPVRENETAEVVLKLNKEMLGQNSVDNESRFSSAEICMEGGLSTIKDQLSGETPSTSHDNKDVDHETCLSSAEPSPVDNNPAQKSDSSFYFEYGDWRVLWDPFYSRYYFYNILTQESTWYPPHGLEDFASHSNTCIPEDLDEFGSQNKSTPAQEHDQAGGDKHLDEQGQACYSELSNLSDIPDGERINQCMVTFTDEARHTDNIHHQNDSSMSEISEMNQEIGRTKKKKRVRRSKSYHSCQDLAGNISNDIAKYWAQRYSLFSLFDSGIKMDEEGWFSVTPELIAKHHASRVGAGIVIDCFTGVGGNAIHFANKCRHVIAIDIDPQKIDCAQHNATVYGVHDHIDFVRGDFIHVAPRLKGETVFMSPPWGGPDYAKVDVYDIKTMLKPCDGYSLFKLGTSIASRVVMFLPRNIDQNQLADMCLSVDPPWAVEVEKNFLNGKLKAITAYFEQQDGSDVQDASDTNPQNPEYHA

SEQ ID NO: 107113 - protein, 106 aa, Oryza sativa
  Clone ID: PAT_MRT4530_11496C.1.pep
PYQTSGRRDRAAQWHMNPAARMVRIVSSECGHASTVARVGQCNTRIWQFIKWCKGFVAVRTGAEGQNVSRRKLYCWNAVLWETVTLVGNRIYVCSNLALAVALPSM

SEQ ID NO: 107114 - protein, 221 aa, Oryza sativa
  Clone ID: PAT_MRT4530_11497C.1.pep
MARERREIRRIESAAARQVTFSKRRRGLFKKAEELAVLCDADVALVVFSSTGKLSQFASSNMNEIIDKYTTHSKNLGKTDKQPSIDLNLEHSKCSSLNEQLAEASLQLRQMRGEELEGLSVEELQQMEKNLEAGLQRVLCTKDQQFMQEISELQRKGIQLAEENMRLRDQMPQVPTAGLAVPDTENVLTEDGQSSESVMTALNSGSSQDNDDGSDISLKLG

SEQ ID NO: 107115 - protein, 116 aa, Oryza sativa
  Clone ID: PAT_MRT4530_11498C.1.pep
MAVERNVTAAAAMASLVLLMLSTTATARRARHGPPGELPPIRTPPPPSVISGPRVSPVLRSVPTGPNPITSDPPPPPPNHERFQADEDKGVLFPSKPRGHVPPSGPSKPPPSYHLS

SEQ ID NO: 107116 - protein, 119 aa, Oryza sativa
  Clone ID: PAT_MRT4530_11499C.1.pep
RQQARVGNCRDSEDMVLHGSFVHYHLHQDGRCGRRPCLLSWRALLPHGRDAHLWAWWRGALTAEEVSTTSPPAAPSTAKVRGPSSRQRYEEHPPTLINPTPPRGTDRHEYNSSLPILHA

SEQ ID NO: 107117 - protein, 996 aa, Oryza sativa
  Clone ID: PAT_MRT4530_114C.1.pep
MEAAALLSPTATSRSPLPLLSTAPAAHRLHVLLPLSGRRRRLCLRSSPRPRGSLGCAGDCVVRSMGSSRERGVLVKTSSSSASVESATQEVGAASSGEWSGDAIRRRFLDFYAARGHKILPSSSLVPDDPTVFLTIAGMLQFKPIFLGKEPRRVPCATTSQKCIRTNDIENVGRTSRHQTFFEMLGNFSFGDYFKKEAITWAWELTTKEFGLPPERLWISVFQDDDEAFSIWHNEVGVPKERIKRLGEDDNFWTSGATGPCGPCSEIYYDFYPERGSSDADLGDDSRFIEFYNLVFMQYNKKDDGSLEPLKQKNIDTGMGLERMARILQKVPNNYETDLIFPIIEKAASMALVSYTTADDAMKTNLKIIGDHMRAVVYLISDGVIPSNIGRGYVVRRLIRRVVRTGRLIGIRGDGHGNSEGAFLPSLAEVAISLSTEIDPDVESRRKSILGELQREELRFVQTLERGEKLLDELLDEALSSAGNNGGKPCLSGKDVFLLYDTYGFPVEITAEISGERGVIVDMKGFDMEMENQRKQSQAAHNVVKLSVGNETEIVKSIPDTEFLGYDSLSATAVVKGLLVNGNSVNVVSEGSDVEIFLDRTPFYAESGGQVGDNGFLYVYGEEDAKQKAVIEINDVQKSLGNIFVHKGTIKQGSVEVGKEIDAAVDAKLRQGAKAHHTATHLLQSALKSIIGSETSQAGSLVAFDRLRFDFNFHRPLSEEELMKIESLVNQWVSSATHLETKVMDLQDAKNAGAIAMFGEKYGEQVRVVEVPGVSMELCGGTHVSNTAEIRGFKIISEQGIASGVRRIEAVAGDAFVEYVCARDNYMRCLCSSLKVKAEDVNGRVETILEELRTTRNEVSSLRSKIAVLKAASLANKATTIDNTRVVVENMGDVDADGLKSAAEYLVDTLEDPAAVILGSSPGDGKVSLVAAFSPGVVKMGIQAGKFVGGIAKLCGGGGGGKPNFAQAGGRKPENLPGALEKARDEIVAAISSKSS

SEQ ID NO: 107118 - protein, 115 aa, Oryza sativa
  unsure (1)..(115): unsure at all Xaa locations
  Clone ID: PAT_MRT4530_11500C.1.pep
METGDDVDHAWGLRYSYSPLAAGDGDSDDLGAVRRSGRRPLCGNLLLGSDSVIDSFIEQFIFDLSPRLPLASTIGGLFIIGSGSLNGGAAYLFEADCANEELTEADKKXIMAAER

SEQ ID NO: 107119 - protein, 61 aa, Oryza sativa
  Clone ID: PAT_MRT4530_11501C.1.pep
FFFFFCFHLLHTMMHDFIFLSCTTILVQFNTRYTTVGMLQWAASVCQLVCQHHLPSFDGTV

SEQ ID NO: 107120 - protein, 33 aa, Oryza sativa
  Clone ID: PAT_MRT4530_11502C.1.pep
MSGDQADDVRKELSVGRDDSAFVEIVLNNRVRK

SEQ ID NO: 107121 - protein, 957 aa, Oryza sativa
  unsure (1)..(957): unsure at all Xaa locations
  Clone ID: PAT_MRT4530_11503C.1.pep
MAVGAMLPTVTMLPRGVRQDIVRGSTTDVDDAAFAHATHNTSKAGWLHQAHHVNKIRETNLHANQPRLHDWPIMSPLLGVYVFTAGLPPSAADWCPRLHGRPIMPSLLGVYVFTAGLPLPPPTGVSACTAGLLCRRCWASTFSPPACLCRRRPVFPPAPLAYYAAVVGRLRLHRRPTFATADRCFRLHRWPIMPPLLGVYVFTAGLPLPPPTGGTLHCLCRRRPVFPPARLVFYAAVGGHLRFHRRPPRSPLTGVLVCTAYEAVVGRLRLHRRPPRLPLTGVLACTAGLLCRRCWASTSSPSACLCRRRPVFPPARLAYYAAVGGHLRFHRRQPRSPLTGVLACTASLLCRRCWASTSSPPACLRLLPTGVLACTAGLLCRRCWASTSSRPACLCRRRPVFPPAPLAYYAAVVRCLRLSPPACLCRRRPVFPPARLAYYATVGGHLRFHRRPPHSPLTAVVGRLRLHRPAASSTADWCLRLHGWPIMPPLLGVYIFTAGCLRLRRLVSPPAWLAYYAAVVGRLRLHRPAASSAADWCLRLHGWPIMPLLLGVYDFTAGLPSPPLTGASACTASLLCRHCWASTTSPPACLRXRRLVSPPARLAYYAAVVRHLHLHRPTTSYDANWCYRLHGWPXPPPLIGVVIFNTSCLRLXRLVSSLPWLHDYDTIDWPYSLHRQSSCLLIDWCPRLYGWFIPLPLXWTSSSSLLAALSDADWFVRLHSYMSSSTLTGVIVITSLPLPPPMASSLSWLAYFAAVKERLCFHHHSTSSSNFIFIIFGTGKLYCLYFASFATSPTTTSTRASTSRHASTSIMPCYFTITSGVPIFKIFTRTSSMRIFTQAMTTRRQEATILDSMFSCFSTNQRVGGYTNTRLSKFDKLYVKMKQSINQPTSSMESTSGVISLVFTSEQTFYFSNSYYYTGNFGFFTPPQSAPNFSKYQSLRFYLHVREFRVINQSAQF

SEQ ID NO: 107122 - protein, 387 aa, Oryza sativa
  unsure (1)..(387): unsure at all Xaa locations
  Clone ID: PAT_MRT4530_11504C.1.pep
MPHTTPLRPVGCTKPIMSTKSERRIYMQISLAYTIGLLCRRCWASTSSPPACLRLPPTGVLACTAGLLCRRCWASTSSPPACLCRRRPVFPPAPLAYYAAVVXVVGRLRLHRPAASSTADWCLRLHGWPIMPPLLGVYIFTAGCLRLRRLVSPPAWLAYYAAVVGRLRLHRPAASSAADWCLRLHGWPIMPLLLGVYDFTAGLPSPPPTGASACTAGLLCHRCWVSTSSPPACLRLRRLVSPPARLAYYAAVVGRLRLHRPAASSVADWCLRLHGWPIMPLLLGVYDFTAGLPSPLPTGASACTAGLLCHRCWVSTSSPPACLRLRRLVSPPARLAYYAAVVGRLRLHRPAASSVADWCLRLHGWPIIPLLLGVYDFTAGLPSPPPT

SEQ ID NO: 107123 - protein, 1189 aa, Oryza sativa
  unsure (1)..(1189): unsure at all Xaa locations
  Clone ID: PAT_MRT4530_11505C.1.pep
MAVGAMLPTVTMLPRGVRQDIVRGSTTDVDDAAFAHATHNTSKAGWLHQAHHVNKIRETNLHANQPRLHDWPIMSPLLGVYVFTAGLPPSAADWCPRLHGRPIMPSLLGVYVFTAGLPLPPPTGVSACTAGLLCRRCWASTFSPPACLCRRRPVFPPAPLAYYAAVVGRLRLHRRPTFATADRCFRLHRWPIMPPLLGVYVFTAGLPLPPPTGGTLHCLCRRRPVFPPARLVFYAAVGGHLRFHRRPPRSPLTGVLVCTAYEAVVGRLRLHRRPPRLPLTGVLACTAGLLCRRCWASTSSPSACLCRRRPVFPPARLAYYAAVGGHLRFHRRQPRSPLTGVLACTASLLCRRCWASTSSPPACLRLLPTGVLACTAGLLCRRCWASTSSRPACLCRRRPVFPPAPLAYYAAVVRCLRLSPPACLCRRRPVFPPARLAYYATVGGHLRFHRRPPHSPLTAVVGRLRLHRPAASSTADWCLRLHGWPIMPPLLGVYIFTAGCLRLRRLVSPPAWLAYYAAVVGRLRLHRPAASSAADWCLRLHGWPIMPLLLGVYDFTAGLPSPPPTGASACTAGLLCHRCWVSTSSPPACLRLRRLVSPPARLAYYAAVVGRLRLHRPAASSVADWCLRLHGWPIMPLLLGVYDFTAGLPSPLPTGASACTAGLLCHRCWVSTSSPPACLRLRRLVSPPARLAYYAAVVGRLRLHRPAASSVADWCLRLHGWPIIPLLLGVYDFTAGLPSPPPTGASACTAGLLCHRCWASTSSPLACLRHRRLVLPPARLAYYAAVVGRLRLHRAAASSAADWCLRLHSWPIMPLLLGVYDFTADLPSSADWCHRLHGWPIMPLLLGVYDFTAGLPSPPLTGASACTASLLCRHCWASTTSPPACLRPPPTGVSACTAGLLCRRRXDIYIFTDRPPRMTPTGAIVFTAGHVAATANRRRYLQHKLSASAADCYMSSSTLTGVIVITSLPLPPPMASSLSWLAYFAAVKERLCFHHHSTSSSNFIFIIFGTGKLYCLYFASFATSPTTTSTRASTSRHASTSIMPCYFTITSGVPIFKIFTRTSSMRIFTQAMTTRRQEATILDSMFSCFSTNQRVGGYTNTRLSKFDKLYVKMKQSINQPTSSMESTSGVISLVFTSEQTFYFSNSYYYTGNFGFFTPPQSAPNFSKYQSLRFYLHVREFRVINQSAQF

SEQ ID NO: 107124 - protein, 316 aa, Oryza sativa
  unsure (1)..(316): unsure at all Xaa locations
  Clone ID: PAT_MRT4530_11506C.1.pep
MAVGAMLPTVTMLPRGVRQDIVRGSTTDVDDAAFAHATHNTSKAGWLHQAHHVNKIRETNLHANQPRLHDWPIMSPLLGVYVFTAGLPPSAADWCPRLHGRPIMPSLLGVYVFTAGLPLPPPXGVSACTAGLLCRRCWASTFSPPACLCRRRPVFPPAPLAYYAAVGGHLRFHRRPAFATSFPEANLQRTPGLSVLGLEQFGMGXPTGNPEGGTLHCLCRRRPVFPPARLVFYAAVGGHLRFHRRPPRSPLTGVLVCTAYEAVVGRLRLHRRPPRLPLTGVLACTAGLLCRRCRASTSSPSACLCRRRPVFPPARL

SEQ ID NO: 107125 - protein, 93 aa, Oryza sativa
  Clone ID: PAT_MRT4530_11507C.1.pep
MWHQSQTFRVIGVAGLSSMPCRFSLSCISEFVQVDVMEKDCSLDPNFGSKHSLNVKLILSYRQQTQEIEMHTSNDLVEIPTLNPLYSTNHNYL

SEQ ID NO: 107126 - protein, 239 aa, Oryza sativa
  unsure (1)..(239): unsure at all Xaa locations
  Clone ID: PAT_MRT4530_11508C.1.pep
YVFTAGLPLPPPTGVSACTAGLLCRRCWASTFSPPACLCRRRPVFPPXATADRCFRLHRWPIMPPLLGVYVFTAGLPLPPPTGYCLCRRRPVFPPARLVFYAAVGGHLRFHRRPPRSPLTGVLVCTAYEXRCWAPSACLCRRRPVFPPARLAYYAAVGGHLRFHRRQPRSPLTGRPPRPPPTGVSACTAGLLCRCCWVSTTSPPTCLRPPTGVTACTAGLLCRCCWASMTSPPACLRHR

SEQ ID NO: 107127 - protein, 934 aa, Oryza sativa
  unsure (1)..(934): unsure at all Xaa locations
  Clone ID: PAT_MRT4530_11509C.1.pep
MAVGAMLPTVTMLPRGVRQDIVRGSTTDVDDAAFAHATHNTSKAGWLHQAHHVNKIRETNLHANQPRLHDWPIMSPLLGVYVFTAGLPPSAADWCPRLHGRPIMPSLLGVYVFTAGLPLPPPTGVSACTAGLLCRRCWASTFSPPACLCRRRPVFPPAPLAYYAAVVGRLRLHRRPTFATADRCFRLHRWPIMPPLLGVYVFTAGLPLPPPTGGTLHCLCRRRPVFPPARLVFYAAVGGHLRFHRRPPRSPLTGVLVCTAYEAVVGRLRLHRRPPRLPLTGVLACTAGLLCRRCWASTSSPSACLCRRRPVFPPARLAYYAAVGGHLRFHRRQPRSPLTGVLACTASLLCRRCWASTSSPPACLRLLPTGVLACTAGLLCRRCWASTSSRPACLCRRRPVFPPAPLAYYAAVVRCLRLSPPACLCRRRPVFPPARLAYYAAVVGRLRLHRPAASSVADWCPRLHGWPIMKPLLGAYVFTXTGLPSPPPTGASACTAGLLCHRCWASTSSPLACLRHRRLVLPPARLAYYAAVVGRLRLHRAAASSAADWCLRLHSWPIMPLLLGVYDFTADLPSSADWCHRLHGWPIMPLLLGVYDFTAGLPSPPLTGASACTASLLCRHCWASTTSPPACLRPPPTGVSACTAGLLCRRXDIYIFTDRPPRMTPTGAIVFTAGHVAATANRRRYLQHKLSASAADCYMSSSTLTGVIVITSLPLPPPMASSLSWLAYFAAVKERLCFHHHSTSSSNFIFIIFGTGKLYCLYFASFATSPTTTSTRASTSRHASTSIMPCYFTITSGVPIFKIFTRTSSMRIFTQAMTTRRQEATILDSMFSCFSTNQRVGGYTNTRLSKFDKLYVKMKQSINQPTSSMESTSGVISLVFTSEQTFYFSNSYYYTGNFGFFTPPQSAPNFSKYQSLRFYLHVREFRVINQSAQF

SEQ ID NO: 107128 - protein, 181 aa, Oryza sativa
  unsure (1)..(181): unsure at all Xaa locations
  Clone ID: PAT_MRT4530_1150C.1.pep
MYGGDEVSAIVIDVGSYSCKAGYAGDDTPKAVFPSVVGSIEQTGETDEAKADKEAEAASDSKNGAKPMDVDKAKTKRKLYVGQELEFRRDHMEVISPMKDGTVTDWDIVDNIWNHAFRQRLLINPEEHPMLIAEPSTNTGQQREKAAELMFEKYKVPALFLAXNAVLTSFASGRATSLVVD

SEQ ID NO: 107129 - protein, 93 aa, Oryza sativa
  Clone ID: PAT_MRT4530_11510C.1.pep
YQVFFPLLASSAQLFFFLSAREAETFSLRYQNTQIIHRDRELQIESSYGGNRVDRRPACPFAAEEEEDEPRASESRVPTKEACPESERERRAE

SEQ ID NO: 107130 - protein, 79 aa, Oryza sativa
  Clone ID: PAT_MRT4530_11511C.1.pep
FKVSSDVGGPSPPRTASSKGHEESPPPGVPPTAQALPNLGSYQKAKLVLLHPSGPPKEKISAQPTVDSPVWVKIPKSVV

SEQ ID NO: 107131 - protein, 101 aa, Oryza sativa
  Clone ID: PAT_MRT4530_11512C.1.pep
LWAQSASCMVFSTSFFGGFCINVSPGFAALSRVSCVSFAVFLSILRVVSHLSLVRCFKIYFRSVGATNKFAAYVCVSVVGSSERVALKIFTVFVCGIAWEA

SEQ ID NO: 107132 - protein, 231 aa, Oryza sativa
  Clone ID: PAT_MRT4530_11513C.1.pep
MASDLRPPEHQVAGHRASADKLGPLVDGEGLFYKPLQAGERGEHEAAFYAAFTAHPAVPPRCLAKDRETTSALLGFRVSGVRVVDARGGAVWRPDRSELKGIDAAGVRRVLRRYVSTGGGDGLDCALAAAVYGGEGGVLAQLRELKAWFEEQTLYHFYSASILFGYDANAAAAAAPGGGSGGVRVKLVDFAHVDDGDGVIDHNFLGGLCSLIKFIGDIVAEVTEKASSDHS

SEQ ID NO: 107133 - protein, 295 aa, Oryza sativa
  Clone ID: PAT_MRT4530_11514C.1.pep
MASDLRPPEHQVAGHRASADKLGPLVDGEGLFYKPLQAGERGEHEAAFYAAFTAHPAVPPRVRGAFFPRFHGTRFLPAPASPGGAPYPHIVLDDLLAGLPSPCVADVKIGACTWPPRSPDPYVAKCLAKDRETTSALLGFRVSGVRVVDARGGAVWRPDRSELKGIDAAGVRRVLRRYVSTGGGDGLDCALAAAVYGGEGGVLAQLRELKAWFEEQTLYHFYSASILFGYDANAAAAAAPGGGSGGVRVKLVDFAHVDDGDGVIDHNFLGGLCSLIKFIGDIVAEVTEKASSDHS

SEQ ID NO: 107134 - protein, 337 aa, Oryza sativa
  Clone ID: PAT_MRT4530_11515C.1.pep
AAYLVADGALDDDDEGAVNQRSTGPHAEEEGRKHSVEGRGSSGSGAPGGEEGRWSRRTGRDGGSATGRRIRRQNKDQTELRRSYSEYSNTTRAADHLVAGAGVVAVASSGGASGGGGGGSGSDVETTVRCACCSVTEECTAAYIRHIRAAHYGDWVCGLCAEAVRERMRGGGGGGGVEAALRWHMEVCRDFNSTTRLNPKLSLAGSMRDIARRSFNRRTTASTSAAATCHDQLRAAKTMARTLSCQQSAHHLFNEMSSRYGVSEGDVLHVMNEEMLTRDEAIHWLLEDFELMESQRRFDDKLDRATTTFDLAYFSAHPVFDAGTKRYHQGSAQWHSY

SEQ ID NO: 107135 - protein, 148 aa, Oryza sativa
  Clone ID: PAT_MRT4530_11516C.1.pep
RGWAQNRVPVKATGGIKGGSHTPHFDKTLTRCETARVRKKDPRFPKKKAQGVSTKNRKGPNFASRLRRGVADSLMQLARRVSRLKTGHPPVTRSSTKESRNSIESGDTKFTVSRITIHWPSFYNVVTGKTLALPNLIALQHIPLSPAG

SEQ ID NO: 107136 - protein, 50 aa, Oryza sativa
  Clone ID: PAT_MRT4530_11517C.1.pep
MPLASAGAPYPPPSYLCRRTLAFERSALAAGRATLTSASMQGALALLLHG

SEQ ID NO: 107137 - protein, 144 aa, Oryza sativa
  Clone ID: PAT_MRT4530_11518C.1.pep
MPKNKGKGGKNRKRGKNEADDDKRELVFKEDGQEYAQVTRMLGNGRCEAICVDGTKRLCHIRGKMHKKVWIAAGDIILVGLRDYQDDKADVILKYMNDEARLLKAYGELPDTLRLNEGVDVDGPEDGGDHDDYIQFEDEDIDKI

SEQ ID NO: 107138 - protein, 711 aa, Oryza sativa
  Clone ID: PAT_MRT4530_11519C.1.pep
MATMASAAAASASARRWRWRWKWRTRDAVLALLIASVLAPPLLLYGGAPIAPFSGPILMGSAASGLDLSNLDAFAAVKEPIQTVASDAAALKAGLIQHIVDQSSGIDRGTKDNGMVASVNKKGGVEFTKENGLIDDGKLRENKVRAMRNSSGLNITLNKVKGSYAVSTEEYAFHQTIPPLTDLMFGTFPPALLDHTADRPPEKTTDTTSEDSDIRAISNNTSHSTASPDSTIRVLRDQLKRARTYIGFLSSRGNHGFIKDLRRRMRDIQQALSGATNDKQLPKKYYLSHRYTKFFTVGISDDDLCLVSGVHGRIREMELTLTKIKQVHENCAAIISKLQATLHSTEEQMQAHKQEANYVTQIAAKALPKRLNCLAMRLTNEYYSSSSSNKHFPYEEKLEDPKLQHYALFSDNVLGAAVVVNSTIIHAKTPENHVFHIVTDKLNYAAMRMWFLENSQGKAAIEVQNIEDFTWLNSSYSPVLKQLESQFMINYYFKTQQDKRDNNPKFQNPKYLSILNHLRFYLPEIFPKLNKVLFLDDDIVVQQDLSALWSIDLKGKVNGAIQTCGETFHRFDRYLNFSNPLIAKNFERRACGWAYGMNMFDLSEWRKRNITDVYHYWQEQNEHRLLWKLGTLPAGLVTFWNQTFPLDHKWHLLGLGYKPNVNQKDIEGAAVIHYNGNRKPWLEIAMAKYRKYWSKYVNFDNVFIRQCNIHP

SEQ ID NO: 107139 - protein, 167 aa, Oryza sativa
  Clone ID: PAT_MRT4530_1151C.1.pep
HEAAFDEVAYANVPTTSYELPDGQTIEVGADRFKIPDILFNPSLSQTIPGVDGFADSMSVRGLPRMVIDSVNRCDVDIRKELLSSILLSGGSSSILQLKERLEKEVLEESSGNTRVKVLASGNSVERRFSVWIGGSILASLGSFQQMWFSKAEYEEHGVSYIQRKCP

SEQ ID NO: 107140 - protein, 93 aa, Oryza sativa
  Clone ID: PAT_MRT4530_11520C.1.pep
PGFEQPAHSTRLLQTRVIVDRFNVLQADAQDLVRDAAISDRVDLRITGDVGAKILVLGFSSPKVQVSVDCAIAISPRRQSLTYKQCGVDGLSV

SEQ ID NO: 107141 - protein, 253 aa, Oryza sativa
  Clone ID: PAT_MRT4530_11521C.1.pep
MARSSPCLAVAVLLLGVVVAAIGAFADEEAASGWGLGHGARFLSRRGRAAYEKSSEPEAKPASQQEPKSDSYSQAKPGPKDEPKPEPEAMSASQPESKPATYSESKPESKAEPESKPEPKAESTPQPEAKSEPKSEPKPKSEPYAEPKSEPKSEPQSEPNPETKAEPKSEPKYEPKSEPTPQTEPRAESQPEPKTEPKSESKAEPKPERKSYSKSKPEPESKPEAKAERQPESKPEPKPESAPKKETPSSAYP

SEQ ID NO: 107142 - protein, 1170 aa, Oryza sativa
  Clone ID: PAT_MRT4530_11522C.1.pep
MYVVKRDGRQETVHFDKITARLKKLSYGLSQEHCDPVLVAQKVCAGVYKGVTTSQLDELAAETAAAMTASHPDYASVTATELHRCWFFCSPFGSTLSPPDMWIAVVKLAARIAVSNLHKNTKKSFSETIKDMYGHFNERSGLNAPLVAHDVYEVIMKNASRLDSEIIYDRDFDYDYFGFKTLERSYLLKLGGKVVERPQHMLMRVSVGIHKDDIESAIKTYHLMSQRWFTHASPTLFNAGTPRPQLSSCFLICMKDDSIEGIYDTLKECAVISKSAGGIGVSVHNIRATGSYIRGTNGTSNGIVPMLRVFNDTARYVDQGGGKRKGAFAVYLEPWHADIFEFLDLRKNHGKEEHRARDLFYALWVPDLFMQRVQNNQEWSLFCPNEAPGLADCWGDEFEKLYTKYEREFIEVGKDYNNIALYFQGKAKKIVPAQTLWFDILKAQIETGTPYMLYKDTCNRKSNQQNLGTIKSSNLCTEIIEYTSPTETAVCNLASIALPRFVREKGVPIESHPSKLVGSSDSKNRYFDFDKLAEVTSTVTYNLNKIIDINYYPVETAKRSNMRHRPIGIGVQGLADTFILLGMPFDSPEAQQLNKDIFETIYFHSLKASAELAGKEGPYETYEGSPVSKGILQPDMWNVVPSDRWNWPSLRSTISKVGLRNSLLVAPMPTASTSQILGNNECFEPYTSNIYSRRVLSGEFVVVNKHLLHDLTEMGVWTPALKNKIIYEDGSVQKMTVIPDDLKAIYKTVWEIKQKTLVDMAVDRGCYIDQSQSLNVHMEQPNFGKLTSLHFHAWSKGLKTGMYYLRTRAAADAIKFTVDTALLKANGENGTKAAEEEDVEAKMAQMELYISVCNMITFSETDRKFNMMDSFELSKVDQAPANVDIELGLQGGMSSSAQPGFEGFFEQVREIEKLHETLTKLLKDLQNSNEESKIVTKASAMKEIKKRMEKDVNEVTKTARLAKSKVEKLNKDNAANREKPGFGKGSGVDRSRTTTTVSLTKRLRERISEFQDFYLNCTDSLTLVIIHCVKLSKTVTGERADEETIDKLIETGDSEQIFQRAIQEQGRGRVLDTLQEIQERHDAVKEIEQKLLELQQIFLDMSVLVEAQGEILDNIESQVSGAAEHIQTGTNLLQKARFLQKNTRKWTCIGIVILLIIILIVVLSLKPWSK

SEQ ID NO: 107143 - protein, 128 aa, Oryza sativa
  Clone ID: PAT_MRT4530_11523C.1.pep
SHDQNALHSKGKSFFLARIQCDCLVPVCLISYPQQIYGWIICNKNSIFHAKTVCANGCIAQQLFVRLHKLNPFVPCIPNAPLKLNNSTFSETQSGQHTSGLSRGWRMESPFMYNIFHMKLTCSYCRIF

SEQ ID NO: 107144 - protein, 736 aa, Oryza sativa
  Clone ID: PAT_MRT4530_11524C.1.pep
MKPSICLTGTNVPSPGVNALNLQVLEVRDNTFTGVVPSFWALQNLTQLDLGANLFESVDWTSLSSKINSTKLVAIYLDNNRIHGILPSSIGNLPGSLQTLYMTNNRIAGTIPSEIGNLNNLTVLHLAENLISGDIPETLCNLVNLFVLGLHRNNLSGEIPQSIGKLEKLGELYLQENNFSGAIPSSIGRCKNLVMLNLSCNTFNGIIPPELLSISSLSKGLDLSYNGFSGPIPSKIGSLINLDSINISNNQLSGEIPHTLGECLHLESLQLEVNFLNGSIPDSFTSLRGINEMDLSQNNLSGEIPKFFETFSSLQLLNLSFNNLEGMVPTYGVFSNSSKVFVQGNRELCTGSSMLQLPLCTSTSSKTNKKSYIIPIVVPLASAATFLMICVATFLYKKRNNLGKQIDQSCKEWKFTYAEIAKATNEFSSDNLVGSGAFGVVYIGRFKIDAEPVAIKVFKLDEIGASNNFLAECEVLRNTRHRNLMHVISLCSSFDPMGKEFKALILEYMANGNLESWLHPKVQKHRQRRPLGLGSIIQIATDIAAALDYLHNWCTPPLVHCDLKPSNVLLDEDMVAHVSDFICNHSSAGLNSLSSIAGPRGSVGYIAPEYGMGCQISTAGDVYSYGVILLEMLTGKHPTDDMFKDGLNIHKLVDCAYPHNVVEILEASIIPRYTHEGRNHDLDNDVDEMSIMERCITQMLKIGLQCSLESPGDRPLIQDVYAEITKIKETFSALDS

SEQ ID NO: 107145 - protein, 134 aa, Oryza sativa
  Clone ID: PAT_MRT4530_11525C.1.pep
MAAEPGTNKLKMLLYFLLLIVATLVITAEVGVVLAAAARVLSPSTTEEVPVVTSVRLPAQTEISSSSEGEARGGGSSRASAAAAARRMAIGSRAPTCTYNECRGCRRRCSVQEVPVDAGDPMNSAYHYRCICHL

SEQ ID NO: 107146 - protein, 95 aa, Oryza sativa
  Clone ID: PAT_MRT4530_11526C.1.pep
GLLSDEKDAPEDKKSKIDQRKNQSRVKKREFSRWCLPQRTRRLMLSEGWRRSTLSMTKIGVVGDRLWIAGKLEEVAGELKTANWGKFWLERLKRK

SEQ ID NO: 107147 - protein, 161 aa, Oryza sativa
  Clone ID: PAT_MRT4530_11527C.1.pep
LSENTSDGRLSSKVHPLVSSSFDDSVDQSLAGSSKCNGKRIFPLDLNTVDAGNVVNISDDEEMPERDAPDFELELTDNNSPRKTMFSFLSPKVEENRSKEHSLPTDSPGSLSLSLAFPASREHAGVLTSSYIQGAELLNCKEQSSGRKCYFAGNSDMLFKT

SEQ ID NO: 107148 - protein, 86 aa, Oryza sativa
  Clone ID: PAT_MRT4530_11528C.1.pep
RPSRSLFDLDFIGFYSNSNGIQINSSHVILESKGVADPSEGQDLQDYEQGKSSLFFEHVDPNCEIVLFKNKIACNDEHPTCDYAMP

SEQ ID NO: 107149 - protein, 176 aa, Oryza sativa
  Clone ID: PAT_MRT4530_11529C.1.pep
WSSFISIGKSSPRAAFSRHPRTIDELGHLLPPPVPAPLLSSPALLSSLRRRQPPLLPPRASPPPFAGERTETTPPPPGSNSPLLLVRLDLVGSGAAVFEEAEAAAWIQSGDGEEAEAAAWIRSGDGRGGRGGLISLLLPCRLPSHLTSLDERRRRWRKRRRRWRKRRRRGRAESKQ

SEQ ID NO: 107150 - protein, 94 aa, Oryza sativa
  Clone ID: PAT_MRT4530_1152C.1.pep
MGHQSCFCGSELFHLAIQNSFECLSHPFPLFPLILGCCSCFGPSLFHKVDVDKGLEMEEQNVDSMVVERQNVGSMVVERQEEVLGILTSEPGTA

SEQ ID NO: 107151 - protein, 51 aa, Oryza sativa
  Clone ID: PAT_MRT4530_11530C.1.pep
PPKKKSLSFFFLYVQSVYSKTDYLLNLSVLGAVKTGGFLPVILAFLSALKL

SEQ ID NO: 107152 - protein, 500 aa, Oryza sativa
  Clone ID: PAT_MRT4530_11531C.1.pep
MRLMSVGCRHGAARALQPLPLCRLSISSCTQSSRDVSNVNLTVEEEEAARLIKNSLSKARKWSVQDLIQCLGADCSGIRLTGNIVDTLLFKFGDDWKSALGFFQWAQSRDDYRHTAYACNRMVDLLGKMRQIDQMWELLSDMHGRGLVTVETVAKSIRRLAGARRWKDVVLLFDKLEDMGLERNTETMNVLLDVLCKERKIEVAREVFAVLSPHIPPDAYTFNIFVHGWCSIRRIDEAMWTIEEMKRRGFPPSVITYTTVLEAYCKQRNFRRVYEVLDSMGSQGCHPNVITYTMIMTSLAKCERFEEALSVSHRMKSSGCKPDTLFYNSLINLLGKSGHLFEASQVFRVEMPMNGVSHNLATYNTMISIFCYYGRDDDALNVLKEMEAQSCKPDIQSYRPLLRLFLSRRGQADTVRHLLSELTSKHNLGLDLDTYTLLIHGLCRVGDTVWAYQLFDEMVSSEIAPRSKTCVMLLDEAQRTNMETYVERIGNYMSSFGISV

SEQ ID NO: 107153 - protein, 467 aa, Oryza sativa
  Clone ID: PAT_MRT4530_11532C.1.pep
MLCSASEQAQLLLNDNLRRVLLRIPPLLMLQLEALLLNLMRVMMWIPPLLLLTYQITALLMEKKKKVKPLMALLIHNLKPSTALIMQKIKPSTTFQLHKLLSTKKLEELKIFTVIRMKIRKELKAKLEPSTPNFITTPWHFVRNRVAIARREQYESRIDAVTAEGNTVLHIAASRGHAHAPGPDGTSQQEDLITVLYKARWHLLSSLNSEGETPLHRAARAGHVHAVQRIIAGVKENLEKLAENQLMDIIATRNCAGENALHLAAMHGDAQVVTTLLKYARDARLSSVLTEANNASALYLAVMSTSWPPSKHYSLTNAMIRQLKVQKGRMLYMLPQFSRIEDSEGSTALHIAALMGHVNVVRLLIKASPDSADIRDKQGRTFLHIACADEGWQRPTVRYVVKNPMLHDLLNSQDKEGNTPLHLAANHGKFVDVYALISSGKVHPDIMNAEGETAFDIAKNTVSFFFM

SEQ ID NO: 107154 - protein, 611 aa, Oryza sativa
  Clone ID: PAT_MRT4530_11533C.1.pep
MERAQPDQPVAAAAPGHVVLCFGASTAVAERQPEEGPAADSPVADAATGGAAAEPYARHDVDPPAAFAHVHALDHPAASIDAALPPRMPKHLYLAVFNGEKANVIEMLQLPNNGAPHGEEEEGQATDGASHSQPQTIDGAHHAEDQTVYDFPIAQVAINEEVGGAQNIHRDPHENKEGAQGQGHFVRNRVAIARREQYESRIDAVTAEGNTVLHIAASRGHAHAPGPDGTSQQEDLITVLYKARWHLLSSLNSEGETPLHRAARAGHVHAVQRIIAGVKENLEKLAENQLMDIIATRNCAGENALHLAAMHGDAQVVTTLLKYARDARLSSVLTEANNASALYLAVMSTSVATVKALLAHECNDTSAQGPKGQNALHAAAVLQNREMVNILLEKKPELASGVDDMKSTPLHFASSDGAYSIVHAILYPKSKSLFGDPAGQSLVAMQDSEGSTALHIAALMGHVNVVRLLIKASPDSADIRDKQGRTFLHIACADEGWQRPTVRYVVKNPMLHDLLNSQDKEGNTPLHLAANHGKFVDVYALISSGKVHPDIMNAEGETAFDIAKNTVSFFFMLHDPYTPATYNDQLGFSVEVRLMEGGVESSLHYTGQGHL

SEQ ID NO: 107155 - protein, 529 aa, Oryza sativa
  unsure (1)..(529): unsure at all Xaa locations
  Clone ID: PAT_MRT4530_11534C.1.pep
MDHRTKRVAIVGAGTSGVAACKHLLARGFRPVVFDAGASVGGQWTRTLASTRLQSPHVAYRFSDFPWPDSVDWYPRHDQVVDYLAAYARRFAVDERVRFRSTVLAAEFVGDDAADGWERWNGNGEAFGXGSGAWRLTVHHDXHGHHAGEVYEFDFLILCIGRFSGVPNIPAFPPAGGPDVFRGRVIHSMEFSDMDDADAAALVKGKRVVVVGSGKSAFDIAAECAEANGVEQPCTMICRSPRWLLHDTNVWGKVDIGYIYFTRFAELMVRKPGAGVASNLLATFLSPLGWLISKLTEAYYKKEIPMEEHGMSPEYGLSKSLSSCLIGMLPERFYDKVKEGSVVIKRSAKSFTFRDDGLVLDDDGGGGGERVVQADLVILATGFRGDEKLRRMFASRRVRDIVAGSPETAAPLYRECVHPRVPQMAVIGYSESATNIQTCEMLTKWVARLLDGAFRLPPVRRMEASVAEWGRYMRRSAGEEHFRRSCLGGVGIWYSDELCRDMGCDPRRKKGLLAEWFQPYGAVDYADIQ

SEQ ID NO: 107156 - protein, 381 aa, Oryza sativa
  Clone ID: PAT_MRT4530_11535C.1.pep
SLLGRRGLRGGGPREGRGERGGGRGAGWTGLTSRGPERARLSVRRCTVETAHAGAGARVSGARGLGAVHRVDGWRRAHVQPHGLPWTARTGGKTEGGAADRLGPVKAEVAPTWCLCGSHAGRREEEEGEAEMDGGRRPSSPELVATIRERGSTPERWDGREEVSHQIGFAGGRPAMTNRGGARRNPFPAPDGTEEHRGEPATSGGLRERTAMVARPCRVAAGLGAASTRVWEVSDGIGVITSVSGRGKGGREGDRSPLRLRAHAGFPAHVTAEEGEDGGSKAAMALWQLAVVLGASGQAAAEAVTGVTPAKEKGEKRRETSFAPLLFWEEGGCENEREEHELCLLVLEGCGMGASEPGDDSGDVGKRRAGPGSCAAQARQG

SEQ ID NO: 107157 - protein, 96 aa, Oryza sativa
  Clone ID: PAT_MRT4530_11536C.1.pep
MSSSLRLGREQVAPAGLVTILRSSGQLDDRRFDLEATGEGRGRGTEEGRGKGLEVEAYVNSEPDKLDPQPCPDKPSSPPQTRHLRRCLASFAVENA

SEQ ID NO: 107158 - protein, 233 aa, Oryza sativa
  unsure (1)..(233): unsure at all Xaa locations
  Clone ID: PAT_MRT4530_11537C.1.pep
GTYVAATRAGGRRKKGRPRWTADGGQVHRSSSRRFEREGVHRNDGTDERKXSTGSDSPEGGRRRRIAAAHAGGEKRGKGRRGDEDSIQGGGSIYGGRGIRFRRRMGRRGTEEGRRRAATSGSERQWRRGRAGRRRGSGRRLCAFGRATELPRELEVARESDEGEQKXGTTEPGRAXDERQTARERALRPRAGEEEGEGWPESASAPRAHAGFAGARGAAARPRWEETSGRSRR

SEQ ID NO: 107159 - protein, 180 aa, Oryza sativa
  Clone ID: PAT_MRT4530_11538C.1.pep
MGIPGSVAGWEHLRGSRNPFPASDWTEEHRGQPETSGGLRERTAMAARPCRAAAGLGAASTRVWEGGITSVSGRGRGGREGDRSPLRLRAHAGFPAHATAEEGEDGGSKAAMALQRWRLKRQLAVVLGASGQAAAEAVTGVTPAKEKGCGMGASEPGDDSGDVGKRRAGPGGCAAQARQG

SEQ ID NO: 107160 - protein, 100 aa, Oryza sativa
  Clone ID: PAT_MRT4530_11539C.1.pep
MSTEVVGEHEEGLALRLYSRDFLPKEQGQHHSYRSLVLARLQRDSACAVAMSARAAIAADGVTTFNLMLANVMVFEALATKQWRYRVTIELYVLMLYNNG

SEQ ID NO: 107161 - protein, 79 aa, Oryza sativa
  Clone ID: PAT_MRT4530_1153C.1.pep
MGLVISRILLLRDGAKYRPGIRPKWVHAAVSGSKSIGSASRRPTRGVSSPSQWIPAILAEVDGTARHHAQALTHRSAGG

SEQ ID NO: 107162 - protein, 273 aa, Oryza sativa
  unsure (1)..(273): unsure at all Xaa locations
  Clone ID: PAT_MRT4530_11540C.1.pep
GFGCAWFGRGAPGGRMAAGPRAAARLAVDRAHGREDGGRGRLTGLARSKPRWRRRGAYVAATRAGGRRKKGRPRWTADGGQVHRSSSRQFEREGVHRNDGTDERKXATGSDSPEGGRRRRIAAAHADSXKRGKLHRSNGGSIKRSGSISGVQGIRFRRRMGQRSTKEGRRRAAVSGSGRQWRRGHAGRRRGSGRRPHAFGSATELSRRLEGARESEEGEREEALPSRDGRCDERPTARXELSGLAPGKGKKGDGKGERWAGDPTGQILESLVI

SEQ ID NO: 107163 - protein, 246 aa, Oryza sativa
  Clone ID: PAT_MRT4530_11541C.1.pep
MDASLMGAPSAAAGDNPTSGEHRMGTTIVGVCYDGGVVLAADSRTSTGMYVANRASDKITQLTDNVYICRSGSAADTQVISDYVRYFLHQHTIQLGQPATVKVAANLIRLLAYQNKNMLQAGMIVGGWDKYEGGQIFSVPLGGTILRQPFAIGGSGSSYLYGLLDHEWKEGMSQEEAEKFVVKVVSLAIARDGASGGVVRTVTINADGVSRKFHPGDKLQLWHEELEPQNSLLDILAAGNPDPMVQ

SEQ ID NO: 107164 - protein, 231 aa, Oryza sativa
  unsure (1)..(231): unsure at all Xaa locations
  Clone ID: PAT_MRT4530_11542C.1.pep
EWGQRSSSARAEERRRWVANERRRSERRRSVADEAAAXVVEAEVGXDGGGGGQSRRRRSDTDGGGGGRGGGGGGRTRMRRRRSRRWREQVEEDGAAPGEEAGGGGTVGGRGRAAAGPGAEARREXAAAVGRRRGGGRSRRRRXADVAAAVARRWREQAEEDGAAPGEGAAGGGTGGRGGXPSGRLRPGADVVLSVEVGWIGPADFGGPFHPGXNIPLXGLSHPTYLSTKHP

SEQ ID NO: 107165 - protein, 246 aa, Oryza sativa
  unsure (1)..(246): unsure at all Xaa locations
  Clone ID: PAT_MRT4530_11543C.1.pep
MDASLMGSPSPAAGDAPTSGEHRMGTTIVGVCYDGGVVLAADSRTSTGMYVANRASDKITQLTDNVYVCRSGSAADTQVISEYVRYFLHQHTIQLGQPATVKVAANLIRLVAYQNKNMLQAGMIVGGWDKYEGVQIFSVPXGGTILRQPFAIGGSGSSYLYGLLDHEWKEGMSQEEAEKFVVKVVSLAIARDGASGGVVRTVTINADGVSRKFHPGDKLPLWHEEMEPQNSLLDILAAGNPDPMVQ

SEQ ID NO: 107166 - protein, 311 aa, Oryza sativa
  Clone ID: PAT_MRT4530_11544C.1.pep
MRVSTVGGEGSGRSEGGIVADERWGGREGKGRRRGEEFHRRWGKGKGRRRGEEIRRRRHTGDGAVREKETGRGMCVWDEDLEGEKERGGPPRRPKLGSKPPKDLGHPTPTDADPTSQNPPTPPPPPPMMASSSDLILYNLVPAQPLNPSAIPNPNPDLSIAAAEPPSSDGATPRRVRPRKSPSSSDRHSKVAGRGRRVRIPAMVAARVFQLTRELGHRTDGETIEWLLRQAEPSIIAATGTGVTPEEAPPAAVAIGSSSVAAAAAAGGHGGAFVHVPYYTALLMQPPNADEPPMASAASASGTTAADENNN

SEQ ID NO: 107167 - protein, 691 aa, Oryza sativa
  Clone ID: PAT_MRT4530_11545C.1.pep
MSQLLRPGYLGLLLFLLSMLLDASDHLIAGAAAAPPVFSFNFSADHPSTYRQDLVFQDDAIEPQKAGAPVELTCTWNDQVCRRGGRMSYAHPVQLYQLAANGRISKVASFSTSFTFAIRPIEGNGTCRGDGMAFFLASFPSKVPYRSAGGNLGLITDKTTTSNIAPDDRFIAVEFDIGIGFDNDPKEKTDHIAIDINSVKDSAITTYLPKNVTLNGTMIADIVFNSSTGMLVAYLRFLDHPSSAAHAQVVSANLTEHLKGTPPPGPQVAVGFSAATAGCVEICQILSWSFNSSLPLIHQDTHNIARLLVELIIGGALVFALVLWFLLSCWEQKRIRNVFDKGTGGARRFEYRNLAAATDHFSEDRKLGQGAFGAVYSGHLKLLDHQVAVKKIVRESSEGHKDFFAEVRTISEAKHKNLVKFFGWCSRGHSWNILRFMCSCFWSKKNNELFLVYELMTNGNLNDYLYKSESSEVLSWQTRYKIAKDIGSGLLYLHHECDPHILHRDIKPCNVLLDENFNAKLADFGLSRMANQDNATLLTTAIGSEGYLDPQCLKHGKVPFKRSSDVYSFGIALLEIACARRHREQIWDLYRSGGNVVEAADTRLTMGGGLDMREIERVIVLGLWCSALQTQHRPSMRQAMDVLERDGPLPDLNSLIVVNTTLASTTEEDASSAPAAGNRYDCDEAPLLIPG

SEQ ID NO: 107168 - protein, 50 aa, Oryza sativa
  Clone ID: PAT_MRT4530_11546C.1.pep
TRWSASQERSDWEAPEIWVLKIRHTRPKNCYMNLLLLYSFVYLLIIISGC

SEQ ID NO: 107169 - protein, 166 aa, Oryza sativa
  Clone ID: PAT_MRT4530_11547C.1.pep
MIGVGKAKQYANVLDKPLSRGRQEVSLSAFAFLFSELVQYNQTQVDNIAELERRLEDAGYAVGARVLELLCHREKVADSLEKGTEHEDEYMISEKELLVNRFISVPKDMGAFNCGAFVAGIGVLENAGFPAVVTAHFVPIEGQQRPRTTILIKFAEEVLQREARFG

SEQ ID NO: 107170 - protein, 59 aa, Oryza sativa
  unsure (1)..(59): unsure at all Xaa locations
  Clone ID: PAT_MRT4530_11548C.1.pep
IIHLLCPTQRLLDTTMTTHDTWDLHGTQQLPRRLTCVLPLLTLRWTPRPXGGXSWSHGI

SEQ ID NO: 107171 - protein, 194 aa, Oryza sativa
  Clone ID: PAT_MRT4530_11549C.1.pep
MIGVGKAKQYANVLDKPLSRGRQEVSLSAFAFLFSELVQYNQTQVDNIAELERRLEDAGYAVGARVLELLCHREKGNRRETRLLGILSFIHSTVWKVLFGKVADSLEKGTEHEDEYMISEKELLVNRFISVPKDMGAFNCGAFVAGIVRGVLENAGFPAVVTAHFVPIEGQQRPRTTILIKFAEEVLQREARFG

SEQ ID NO: 107172 - protein, 96 aa, Oryza sativa
  Clone ID: PAT_MRT4530_1154C.1.pep
GSIDILQKYPVPECDIWFIKFSCDFHFNQLAIGNREGKVFVWEVQSSPPVLTARLTNPQCKSAIRQTAVSFDGSTILACSEDGSIWRWDEVDHPKA

SEQ ID NO: 107173 - protein, 86 aa, Oryza sativa
  Clone ID: PAT_MRT4530_11550C.1.pep
MVAAVTLLISTGCASVEPRYHVTTSALTRAEVPRDHLGINPNPAAPTAPDWHEGGIQLNGSPKQALLNHHEGVKCLGTQRRWTATT

SEQ ID NO: 107174 - protein, 103 aa, Oryza sativa
  unsure (1)..(103): unsure at all Xaa locations
  Clone ID: PAT_MRT4530_11551C.1.pep
VLLCNLASNVPTALLMGDEVAKAAALISPAAVTTSWLLMEWASTCDGXNLSLLATAANLIVCXSRRALAPRNTYNLSFWXHILLTVRSKVIVNAGVIPLIIEI

SEQ ID NO: 107175 - protein, 77 aa, Oryza sativa
  Clone ID: PAT_MRT4530_11552C.1.pep
FFFFFLGQHSHAVAATIFLSNPFHSSNTHGCHPLTINQHTFPQAQQLVPFHHHAPWQQSHLSTTVSPVSSTCHCCIV

SEQ ID NO: 107176 - protein, 226 aa, Oryza sativa
  Clone ID: PAT_MRT4530_11553C.1.pep
MGEERERESTSLWGRFCNWITSTENRLYIGWFGVLMIPTLLTATSVFIIAFIAAPPVDIDGIREPVSGSLLYGNNIISGAIIPTSTAIGLHFYPIWEAASVDEWLYNGGPYELIVLHFLLGVACYMGREWELSFRLGMRPWIAVAYSAPVAAATAVFLIYPIGQGSFFDGVAGVFGGSLFSAMHGSLVTSSLIGETTENESANEGYRFGQEEETYIIVAAHVNDEI

SEQ ID NO: 107177 - protein, 353 aa, Oryza sativa
  unsure (1)..(353): unsure at all Xaa locations
  Clone ID: PAT_MRT4530_11554C.1.pep
MTAILERRESTSLWGRFCNWITSTENRLYIGWFGVLMIPTLLTATSVFIIAFIAAPPVDIDGIREPVSGSLLYGNNIISGTIIPTSAAIGLHFYPIWEAASVDEWLYNGGPYELIVLHFLLGVACYMGREWELSFRLGMRPWIAVLYSTPVAAATAVFLIYPIGQGSFSDGMPLGISGTFNFMIVFQAEHNILMHPFHMLGVAGVFGGSLFSAMHGSLVTSSLIRETTENEFANEGYRFGQEEETYNIVAAHGYFGRLIFQYASFNNSRSLHFFLAAWPVVGIWFTALGISTMAFNLNGFNFNXSVVDSQGRVINTWADIINRANLGMGVIHERNTHNFPLDLAALEVPSLNG

SEQ ID NO: 107178 - protein, 113 aa, Oryza sativa
  Clone ID: PAT_MRT4530_11555C.1.pep
MAAVDDDAYSSASWCRGGGGRRRQPPLLSCWCPLLMIAELLSIGSALLVAMVISDGDGGIGGRTARQSFHPKDYRGLSSMTRTTASIANFFNAKARQLSFFSFSKAAKRRLYE

SEQ ID NO: 107179 - protein, 86 aa, Oryza sativa
  Clone ID: PAT_MRT4530_11556C.1.pep
PRVRFFFYTLLLFACGSEKRRRGGGQGKQMLGAAPVSSSDPSLFLILSCSCDLGSVKFLVLVSWGEDEEMMRRPNRLQNSSPGSSD

SEQ ID NO: 107180 - protein, 70 aa, Oryza sativa
  Clone ID: PAT_MRT4530_11557C.1.pep
MKTFSIYVLFPLIGWGINEFAPFIYPYGWVLIFSDILLVCFGERLKQFLTGIPWKNLRVQNFAIFLKRIC

SEQ ID NO: 107181 - protein, 172 aa, Oryza sativa
  Clone ID: PAT_MRT4530_11558C.1.pep
DAHLGTQLAPCKDVAILFGKQPHHSQIFCNVVYACSKMDTTQIDETSLSESPSWPRVSLQIKKIFFSWSLECQDDGDAGNPDRSFFHVSAQEPSRLGRCFPLPVPFSSWATASNCSNCHFWGPFRWVRAQGDPDMWAPLVVETLEQPIKISSKSNQHGNKGREMHGCSLICS

SEQ ID NO: 107182 - protein, 430 aa, Oryza sativa
  Clone ID: PAT_MRT4530_11559C.1.pep
MGGGGRCTHSPGDALGVALDGLLAEGLAAVDAGELPPQHKNRNKSITIHHFLSPRDEQDQINRSYREGGGKSKPCRLSAGAEVAGELGLLEVVAAAVLALEPRHCRRRRELSCFTSDASLARVFGCGSARRRTGRRKLLHARPVEWLPTCRSGAEARGEKELLKLEAQGLATPCALQPDSATAPRVLGACTRLEHLAMYDCDAAVPGEALDGAAQSGTHARMVNAGVVGTHGGRPRSWDVMIQSERTGQSAWEAIKTVRIGTRHVQEVNEQLFRQEFADARFKDGENVEDFSVRLTGLANSIRGFGGDLPERNSCSFPTCTSRVPTRTVSIASNAEVDGYEERPFLVVGPRQNRVVDGGARLPDNAWLDALRLSLATPAPMARRGFCRSARGGVHDGRCGGVRDSRSGGERCDMAPASQRGSYTNCWRTT

SEQ ID NO: 107183 - protein, 367 aa, Oryza sativa
  Clone ID: PAT_MRT4530_1155C.1.pep
MSMTEATAAAGKNSFPARAPQEAPKGTTGRSISKGIRRPRKLRRLRLQQAGEPLCEALCRCRLVETGRNSVTTSPPSTFCYDYIYNSKAIEFYRGTHGFIKRGGYDPKKNVGYANLGKGEKEENWSVRISHLIPNFACLSGSGNYGSGYPPPHQHHMAPPPIHTPSRLSHDSPGGSPWRSPMQFQAPMSGYRGPPPGAPPPWSPHSGVPPPWNPHSAPPSQGLYPHPPSYGPRNYNPGQGGGRMNYGPRGRPDSPYGRGRGQNNYNNPGSRGRGGRDGGRDGSGTQNYSGWQDGRVRYHKSMTDDPWRDLQPIVGNIMIPRDGSKSWLPESLRAKKDTSDRGQVKPPSGLSLAEYLDLSFNEASNDT

SEQ ID NO: 107184 - protein, 40 aa, Oryza sativa
  Clone ID: PAT_MRT4530_11560C.1.pep
PDAWVRVVGVEVRSKPDAAARPGGVAASIAAAARLNRGRQ

SEQ ID NO: 107185 - protein, 51 aa, Oryza sativa
  Clone ID: PAT_MRT4530_11561C.1.pep
LSNHQLPYTWTYVSSKGFNSTKAHTVAVSTLTTQLTPKVEATVGDALEERF

SEQ ID NO: 107186 - protein, 54 aa, Oryza sativa
  Clone ID: PAT_MRT4530_11562C.1.pep
EKWPLFNSLVIAIAQSSSHGEERRLDLGRADAQEETGGGSRWREMTRMRRPAAG

SEQ ID NO: 107187 - protein, 66 aa, Oryza sativa
  Clone ID: PAT_MRT4530_11563C.1.pep
HIHIHIGIRGISLLRYINIFTSIYVGNKWHPCQLKTPLFRLDLSQCITFRRFCLSCHSKHAPQVVS

SEQ ID NO: 107188 - protein, 137 aa, Oryza sativa
  unsure (1)..(137): unsure at all Xaa locations
  Clone ID: PAT_MRT4530_11564C.1.pep
PLVNARFCTVLTPPLPFSPHSQPPGCPDFRHPAPHLSLPLVVCSPPQYPYPFPNARLYGILVRNAPNIARSCIRHSKLTTRRSCPPLPSIPPRLHLFVLHTFCVAMQPPCPHIALVSTFLCGPQWYLSVVXLYVIPA

SEQ ID NO: 107189 - protein, 487 aa, Oryza sativa
  Clone ID: PAT_MRT4530_11565C.1.pep
MAASASASLRHHLLLRRRPRFPLGPSPTFRTSSLPRRHQRLFASAPSSSTVENGEPSSPVEPSDGASVVDVNPPRGTRDFPPEDMRLRTWLFDQFREVSRVMAFEEVDFPVLESEALFIRKAGEEITQQLYNFEDKGGRRVVLRPEITPSLARLVIKQGKSVSLPLKWFTIGQCWRYERMTRGRRREHYQWNMDIFGMPKVRAESELLQAIILLFERLGITSSDVGIRVSSRKVLQAVLNMYSIPEHLFTEVCVIVDKLGKLTREEIEKKLVTIGLSSEAVLGIIEVLSLKSLPKLEEVLGSDVEAVADLKKLFSFAEQYGYADWICFDASVVRGLAYYTGIVFEAFDRDGKLRAICGGGRYDRLLSTFGSEDIPACGFGFGDAVIVELLKEKGLLPDLSRQIDDIVFPLDEELEGPACSVASSLRRQGRSVDLVEDKRLKWVFKHAERINAGRLILVGKSEWERGMVRVKILSTREEFEVKAGELQ

SEQ ID NO: 107190 - protein, 386 aa, Oryza sativa
  unsure (1)..(386): unsure at all Xaa locations
  Clone ID: PAT_MRT4530_11566C.1.pep
MYFPVEKLCLCLYFSYTKLRHYLLSNECTIVCKADVIKYMLSAPVLKGRVGKWIYALIEFDLRYESPKAIKGQAIADFIVEHRDNSIGSVDIAPWTLFFNGSVYTHGCGIGLVIISPRGASFEFAYTIKPYATNNQAEYEAVLKGLQLLKEVEADDVEIMRDSLLVISQLAGEYECKNDTLMIYNEKCRELMNSFRLVTLKHVSREQNVEANDLAQGASGYKPMTPSQSASRKLCYKALKYTLLDDELYYQTIDGVLLKCLSTDQAKVVMEEYGYYAEANGQAEASNKSLLKLIKRKIFDLPRQWNTRLAEALWSYRMACHGLIQVPPYKLVYGHEAVLPWEIRIGSRRMDLQNELTANEYYNIIADEXEDLVQSRLRALAKVTKD

SEQ ID NO: 107191 - protein, 1012 aa, Oryza sativa
  unsure (1)..(1012): unsure at all Xaa locations
  Clone ID: PAT_MRT4530_11567C.1.pep
GIQRRGRTGTGLSADNQLKMETPNYYFEGIVEGSNFYTKDTVDDLDGKLGQGFMSADDLEEIDIGPGDRPRPTFIXELFKEYRDCFAWEYYEMPGLSQSIIEHRLPIKPGYKPYQQPPRRCKADMYDAIKAEVTRLYDVGFIRPCRYAEXVSNIVSVIKKNGKLRVCIDFWNLNKVTPKDEYPMPIANQLVDATSRHKIISFMDGNAGYNQIFMAEEDIHKIAFRCPGAISLFEWVVMTFGLKSAGATYQRALNYIFHDLIGLLVEVYIDDVVVQSKEVEDHRADLKKVFERTRKYGLKMNPTKCAFNVSAGQFMGFLVHERGIKVIQRSVNAIKKILPPEDKKXLQKLIGKVNFXRRFISNLSGRLEPFTPLLRLKADQEFTWGAEQQNALNNIKEYLSSPPVLIAPQKGIPFRLYLSAGEKSIGSVLIQELEGKERLIFYLRRRLLDAGTMYFPVEKLCLCLYFSYTKLRHYLLSNECTIVCKADVIKYMLSAPVLKGRVGKWIYALIEFDLRYESPKAIKGQAIADFIVEHRDNSIGSVDIAPWTLFFNGSVYTHGCGIGLVIISPRGASFEFAYTIKPYATNNQAEYEAVLKGLQLLKEVEADDVEIMRDSLLVISQLAGEYECKNDTLMIYNEKCRELMNSFRLVTLKHVSREQNVEANDLAQGASGYKPMVKDIEIEVATIAADDWRYDLFQYLXTPSQSASRKLCYKALKYTLLDDELYYQTIDGVLLKCLSTDQAKVVMEEVLEGICGTHQXAHKMKWLLRRAGYFWPTMLKDCFRYYKGCQDCQKFGAIQRALALAMNPIIKPWPFRGWGIDMIGMINPPSSKGHKFILVATDYFTKWVEAIPLKNVDSGDAIQFVKEHIIYXFGIPQTITTDQGSIFVSDEFVQFADSXGYYAEANGQAEASNKSLLKLIKRKIFDLPRQWNTRLAEALWSYRMACHGLIQVPPYKLVYGHEAVLPWEIRIGSRRMDLQNELTANEYYNIIADEKRRLGSIQTESSCKSYQG

SEQ ID NO: 107192 - protein, 82 aa, Oryza sativa
  Clone ID: PAT_MRT4530_11568C.1.pep
SVPRQLLKVSGELTCPINAAKGVSLQEEVTRGWERAVQGQLRRVRCDSTTRPSRCTRAAPLCSSGLAGSPKHSIHIKCQIVI

SEQ ID NO: 107193 - protein, 135 aa, Oryza sativa
  unsure (1)..(135): unsure at all Xaa locations
  Clone ID: PAT_MRT4530_11569C.1.pep
GCFTRKQKSRRTARVPLERSKEWRAIPMRFHRDAEELMDDARGGGRKRGIARFLGGFAMMGRSRWTARAPAGGSEXSRAEASASEEVSPRCREAGVWQALVVILILLQCTQVADDSCSERCHIGIRIVLFLNGIP

SEQ ID NO: 107194 - protein, 1565 aa, Oryza sativa
  Clone ID: PAT_MRT4530_1156C.1.pep
MEQRGDGTDGPSVSPPERVPTPSSSRYAGWRRLSSPGPLRCSTRSVGYEDGDDSERYFSPHSEFSQDTSDTDSVSTSISRMYTFRLGTSSPVDSPVRRLGLGDTSPSSRRSCHSPVYPLNSVHGSEDVDYSSFVDSPVCGDEQQNNTSIPIDFESNRLIWYPPPPQDEGDDFENGFFEYDDDDYDGNDVGDTNTFTRVNHDHGGEDDSLGIKGKHNIAHKEFLRNALHGHFRALVSQLLQGHGVDPVDVWSDIISSLAWQAATFVRPDTSKGGSMDPTDYVKVKCVASGNPNDSTFIKGVVCSKNVKHKRMVSKHENPRLLLLGGALEHQKASNKLASINSILEQEKEYLKIAVAKIEAQRPHVLLVEKSVPLYAQQLLAKDISLVLNVKRSLLERISRCTGAQIASSIENVTSVRLGQCQTFWIERVSESSSPKNANKKSAKTLMFFDGCPRRLGCTILLRGTSHEELRRVKLALQFALFAAYHLSLETSYLADEGATLPKIPSDISALPLENHVDGGNCSSSYCLQDFNDFQIVGQKTSDNGCNMPANCLNDSENPLSADKSFLGPNLNQAEYIGVTNGIYPRSPRSSLDKGCVPPSDIIVQTSKSSPMGPRFHRVESDLDNGWQNTSDEEHAGLAVRDHNENHIEYFPTSDNPQSILVSLSIACPQRGVVCKQSQLFRIKFYGNFDKPLGRYFREDLFNQISCCESCKEPAESHVRCYTHRQGSLTISVRNLASVRLPGENDGKIWMWHRCLRCKPKDGIPPATQRVVMSDAARGLSFGKFLELSFSNHTTANRVASCGHSLQRDCLRFYGYGSMVAVFRYSPVDILSVNLPPAVLDFTYPMAQDWIIKDAADVASRKEYFYKEIFDKLDSIENIVSAQNMSMKTGLPKHVIDLKDLIRVEWKKYDVLSRFASTENLNTLELAIDILELNRLRRELIVDAHIWDRRLYMMQALTKENCHTVPTDVQCLDKIPERFVEKSKVEIPGTHENWENSLEHTQSSSLTVAANSIKPLIRGDQIDTIVTHFGLKTDIKGEVPPQSAEDYSSSVVPGPSERPNDGILTDELEKTFERSRSSATNLSDRIDLAWTGSSQLANDPSKCSIEALPVVPAALVDDPSYQRVIAPIRINSFDSAINFKNRLSPVDGSDGIIRRAYSQKPPKALERTGRGLSPTFKTELSVPDIMHGEGRLLLQNAGDVVVPIYDDEPSSMIAHAMTVPDYHKFMLPLLDQQNDLGRFSVGNSLDQDSSSRSSLDVSTWSYGSDQPRTGNNDSKDIHLTVSFEDDDSISVDKAKFSVTCYFAKQFDAIRRKCCPDELYYIRSLSRCKRWSAQGGKSNVYFAKTLDDRFVIKQVTRTELDSFEDYAAEYFKYLTESVSSGSPTCLAKVLGLYQVAARNLRDGKELKLDVMVMENLFYKKKISRIYDLKGSLRSRYNPDTSGNNKVLLDLNLLETLHTKPIFLGSKAKRRLERAVWNDTSFLASVDVMDYSLLVGIDEESKELVMGIIDYLRQYTWDKQLETWVKASGFLGGSRDVLPTIISPDQYKKRFRKAMSRYFLTVPDQWSS

SEQ ID NO: 107195 - protein, 107 aa, Oryza sativa
  unsure (1)..(107): unsure at all Xaa locations
  Clone ID: PAT_MRT4530_11570C.1.pep
RHEGLICSLRSGVTGAEHPCFFCPLLSLEKGEFIVTGSEDXNVYFYDLTRPKNSCVNKLQGHGSPVIGVAWSHGENLLASSDSDGTVMYGSGHKLIRADSTKRKLLV

SEQ ID NO: 107196 - protein, 43 aa, Oryza sativa
  Clone ID: PAT_MRT4530_11571C.1.pep
EATVARSYRPLCYLPLEVEVRSFTSLIREAAIARSYRSTFGGG

SEQ ID NO: 107197 - protein, 38 aa, Oryza sativa
  unsure (1)..(38): unsure at all Xaa locations
  Clone ID: PAT_MRT4530_11572C.1.pep
FSXRXPVCRGVGKIFXYGHWDFIYRNNSLKGKYRTKSG

SEQ ID NO: 107198 - protein, 563 aa, Oryza sativa
  Clone ID: PAT_MRT4530_11573C.1.pep
GRHNRPRGLAPSGDVGPEGDVFALLLVSPRGSDHSRLGPEGRGAPTPRGFCSAYRSDCGLGGDRRSDARLAPSRQDESLQALVPSWSRRVSSWRWHVGSDSHVPTSRLLPAEVEVGPTTPPVRSFLYLRPLEPKSPCRPLPPTSRRIRRSPARALAPKPHEIGFPPPPPPLPPLFPNFRVDSSSTSPTSPAPLPTSNSSCSATISTTRAYQKPPRALIFRFPFLPELLAPSPVLPTRAQAPPLAGDPPAGRCRRCRRPRAAPFAPTASSRVAAPRPPLRFRNKPPGHRFHRAPEPQPPLVASSRAPPLLPSLSRCAATAESFIVPCRTPASDPFPQIATTAAPPPSTRATTTIGRLQPRRPAAPSLLVHSFPSATRRWSAALSLRPELHRPPPSIAVPHGEHSPSLFLFLPFVGHLPCSPPRHVAGGRSAILRHCLARLLPCRFGVPRVDRPWFWPTAHPRTRSTVCLPLDPMTCGGHLSASALFDDLDFFLGTGGEGGRDGVGSAGVSGCPAAGFIAAHEGTARCLARSGGETLAWCGWLGESYMKGLVTITRRGDVFIMGT

SEQ ID NO: 107199 - protein, 46 aa, Oryza sativa
  Clone ID: PAT_MRT4530_11574C.1.pep
MGLQVETDDRGESIGVGDEGGDVAGEGKEDLVANMELLATEDEDDM

SEQ ID NO: 107200 - protein, 147 aa, Oryza sativa
  Clone ID: PAT_MRT4530_11575C.1.pep
MAGYQQEEEEEEEEEEETYHGWWRERERDAMDASPSQEEPPPLDRWLACACAVFLSCVILSTEEARRSPIRNGLDPSRRRRWPGLQKKPAGRLWKQRNMEAACLMSYGSSIVLRKNYMRLNSPRRSFEDENRGWIQRRGGGVSSPHY

SEQ ID NO: 107201 - protein, 319 aa, Oryza sativa
  Clone ID: PAT_MRT4530_11576C.1.pep
MPLLPASPPPLSLSRSLAAAAAASRRGRAVTCAAARGAASSSSASFDAAGFEAERLRLDAEARAGMASAAAVAGAEAADPKAWKWAIRKRVWDALEAEGVARDPRPVHHRIPNFDGAAAAADSLGRLDVFQDAQCVKVNPDSPQKQVRFLTLSEACTSVGAAKYGRPIGLDEKIKVDLIVIGSVAVDPSTGARLGKGEGFAELEYGMLRYMGSISDSTMIVTTVHDKQLVNDIPVEKLLVHDVPVDIICTPTQVIFTNTTIAKPQGIYWEKLSPEKLGQIRILQELKRRIESETGTTLPCGPSEKLPPTAQRRRRKRRR

SEQ ID NO: 107202 - protein, 514 aa, Oryza sativa
  Clone ID: PAT_MRT4530_11577C.1.pep
MSHRKFEHPRHGSLGFLPRKRSSRHRGKVKSFPKDDVSKPCHLTSFVGYKAGMTHIVREVEKPGSKLHKKETCEAVTIIETPPLVIVGLVAYVKTPRGLRSLNSVWAQHLSEEVRRRFYKNWCKSKKKAFTKYALKYDSDAGKKEIQMQLEKMKKYASIVRVIAHTQIRKMKGLKQKKAHLMEIQINGGTIADKVDYGYKFFEKEIPVDAVFQKDEMIDIIGVTKGKGYEGVVTRWGVTRLPRKTHRGLRKVACIGAWHPARVSYTVARAGQNGYHHRTEMNKKVYKIGKSGQESHAACTEFDRTEKDITPMGGFPHYGVVKGDYLMIKGCCVGPKKRVVTLRQSLLKQTSRLALEEIKLKFIDTSSKFGHGRFQTTDEKQSLSSRPRRDVRSCEGRGFVFVGLVRRGGVRGRAAPPRRRGAGRDGVRGGGGGGGGGGPQGVEVGDTEAGVGRAGGGGRRARPAPRPPPHPQLRWRRSRRGLAGETRRVPGCTMCEGQSRLTSEASSLLNTLRR

SEQ ID NO: 107203 - protein, 421 aa, Oryza sativa
  Clone ID: PAT_MRT4530_11578C.1.pep
MLTLGKAHRPGPALSSRRRRRRRHSPQVRRRKMSHRKFEHPRHGSLGFLPRKRSSRHRGKVKSFPKDDVSKPCHLTSFVGYKAGMTHIVREVEKPGSKLHKKETCEAVTIIETPPLVIVGLVAYVKTPRGLRSLNSVWAQHLSEEVRRRFYKNWCKSKKKAFTKYALKYDSDAGKKEIQMQLEKMKKYASIVRVIAHTQIRKMKGLKQKKAHLMEIQINGGTIADKVDYGYKFFEKEIPVDAVFQKDEMIDIIGVTKGKGYEGVVTRWGVTRLPRKTHRGLRKVACIGAWHPARVSYTVARAGQNGYHHRTEMNKKVYKIGKSGQESHAACTEFDRTEKDITPMGGFPHYGVVKGDYLMIKGCCVGPKKRVVTLRQSLLKQTSRLALEEIKLKFIDTSSKFGHGRFQTTDEKQRFFGKLKA

SEQ ID NO: 107204 - protein, 5125 aa, Oryza sativa
  unsure (1)..(5125): unsure at all Xaa locations
  Clone ID: PAT_MRT4530_11579C.1.pep
MSLDGSFSAAAAAARLLARCPALRADPRVLALASTAGGGGPSRDDVAAALAEPLLHPRYTVPVVGCFLPLAPALLDRAVGLLRAAGAAALRSDDPAAREGEEAGEGDLRVVEFYLSRGRGLRLHEIACLALARALDLAPYLLRHLLNYFKFAPPPFQRFLSGGVPSQIPIKVGLHLLLDATQVSYRFLELEPRVFCEQWDWSCFLDLVYSTADYSLVDDSLYSVVLDLRWCAIQILMVVLKASDEAVESFGLGADEAFTCFLRWKEFCTDTSLEKASLYLQAEEVDCKTDADGLTCLADSLPDWHEFSVGRQHGSGSNICPFVLTATLRKSYEVALMAVNQKWPILLYGPVGAGKTALINKLAQIGGNRVLFIHMDEQMDGRTLIGSYVCTEKPGEFKWSPGSLTQAVEVAENFRLFATVTTSKNDVSHALEGRLTFSALWRKVMAVDIFASSLSSLDKRLYVAREIAKLFCVPHGAETISPSDKPIIQALIQKGPFADIRRALEVLERVACSIKFNEPVLLVGETGTGKTTLVQNLASWLKQPLTVVNLSQQSDISDLLGGFKPADARSICFPLYIEFKDLFCRSFSGKDNEAILRHCDVYVMEKKWKKLLRALEKCVEKAQKLIDGSSRSNSGSKRKRPLPAQVISDWDSFSSRLNAACSQIGSEIGMSFQFVEGAFVSALRNGHWILLDEVNLAPPETLQRIGAVLDGESGTLCLAERGDVDYIERHPCFRMFACMNPATDAGKRELPYTFRSRFTEFFVDDLIDDDDLRLFVSKYLDGLHAAKGVADSIVRFYKAAKKESEEKLQDGANQKPQFSLRSLSRSLGYIKNAERKFGFKKALYDGFCMFFLTMLDAPSAKIINNLIVSLLLDGRVPPRISFADYFVEKPKLLNGSESDDFLRSYVLTNSVTEHIVNLACAVYIKKYPVLLQGPTSSGKTSLVRFLAAQTGHEFVRINNHEHTDLQEYLGTYVTDSHGKLQFQEGALVKAVREGHWIVLDELNLAPSDVLEALNRLLDDNRELFVPELQETIPAHPNFMLFATQNPPVLYGGRKILSRAFRNRFIEVHVDEIPEDELITILEQRCSIACSYATRMVQVMKDLQTHRQNSRVFAGKHGFITPRDLFRWANRYRLFEGKSYEDLAKDGYLLLAERLRDDTEKAVVQEVLERHLHVKLSISNLYNMEVSCDNNLSRESIRLRVQETFGNITWTESMWRLYFLIERCYRSREPVLLVGETGGGKTTVCQVLSAVLGVKLHILNCHQYTETSDFIGGFCPIRDRSKIAMEFKHLITKMKQLKIFIHVAGDMSFPADISGAVSVVNHIDEILDRYIKEKELFPQVPPHDFAAMEQIKLDLMQLHKRWQAIFLWQDGSLVQAMKNGDLFLIDEISLADDSVLERLNSVLEPERKLVNSLAEKGGSVLEKVVAHPNFFILATMNPGGDYGKKELSPALRNRFTEVWVPAVTNVDELKSIAIERFTNAEVSCFGDCIVNFWMWFNQLHTGRMLTIRDLLSWISFINVTERNLGPQQALIHGLFLVLLDGLTLGMNVSKTEATELRRTCLSFLLEELQKVEGKPLNSDLHDLKNYGWGDHTREIDIGQPDHFGIMPFYIDTGHFTRKQQGFQFMAPTTSKNVFRVLRGMQLPKPLLLEGSPGVGKTSLIVALAGFSGHNVVRINLSEQTDMMDLLGSDLPVEGENGMEFAWSDGILLQALKNGSWVLLDELNLAPQSVLEGLNAILDHRAEVFIPELGQTYKCPPSFRVFACQNPSSQGGGRKGLPKSFLNRFTKVYVDELSESDYSFICKSQYPSIKDDILKKLISFNNRLYMDTMIHKKYGQEGSPWEFNLRDIIRSCEMIVGACETARGYPETSMVDCFLNTVYLQRMRTVADREEVVKLFEEVFQTNXLVVGSASIRRNRVHSCKVQNSQLNILPGTLHSLEAAMHCINQVXGNTLNEVNLSSATDVSELLGCFEQYNFFRHYKVVISQVERYIDEYFSLSQYIQWKSLVADRKTLFVKWFEFVIAKKFSSICISTLVEMSKNSSLPSLSLVRDIVEDMKCDMEMFDLPVSFNKDDLSKTLRSIYYLQQSEAVHQPVKFEWVAGDLIRAIECGEWIVLDNANFCNPTVLDRINSLVEQERSIVVNECGLVDGNPVILKAHPKFRMFLTINAKHGEVSRAMRNRGVEIFLMNQNLSINGCSNAAEDSERRDITRFLISCGIPRMELVSSMSEAHLYAKAAGLRLGINITLLEITRWVQLFKQLLIKGNQFLWSLHLSWEHTYLPSLGEVCSNIVEEGKLRFLVHFDVSSADLHYGFSLSLPGGWPVEQKLKDFIWYSKETCVQRNCMYLQSLGSQYAAYQISTLKSNSSLLGPITSIHPYILPATSLLELQFPTVSDKQSVKPCVTGLFNSELADQMLFIAANWVMEQSTENDLKLYAIWFNWCNHLLQPYCNFFENYGNILKKESDHPIWHSILECYREIVAYHKIDVVAHPIPLLSMRLLDMTCSVTLKDCHNRLRNSRNGLSLLRLTLQQWQLETKFPDHGIMEVTMLPALKSLRCLEGEVLKMVVKSRKLLQIYSRLIDYHRSIWKMILLSQFEGLPVVWNLLKKEILKLQPKFPVEVGIFLMESVNLNSLQDFNLHYDKPTLWVYGGHPIVPSSGRIFYKIQDILAFSAAVWPRKNLLKGHFDDNQHFVDAMLSANQDLRNLAMEGLSMASLAATITEEEDSTVLAQLDEVHKRLVEKVDWEKKNLEFLSKASTTEIIANIEYMLKYAMDFQLGSSSRSPFEFTQHQIIWWIHHAWATVDNAYKLALECSAVHVKVASSILEMWYNYHTFLWTYCSGRPKVQFSVTHDETCDLAHLTKMDAIDTILQEDLRVMDYQKNRLVLRISSRNLWEGVSFAGNFVLSLHSAADSLFKQIIVVHKKHFKQEEYSKLESILFQQSEHRVKKEDLDTACALLSRSSHGVLASLAGSHELIGSLLLELHSPFSQGYLMHLGAAWVYIGELRFRLLLSSYNPDPAFESAFMHSHILEKISLLELEGKVRHQCEELAGSSSEEDGYDQKLLQELKTKEKSIRAKVVFRPPQSRHKSLIVACCEFEERLSECKSLLTSLNGDGVGQLEIDRVCNWQITSRNFIKRLTEEYVEYVDLIQPIQVAVYEMKLGLAIALSGYLEREYLKKIKEDDIERALGAIFAIMQFPSGSATGNVSVDMPDLTKYVNDDQLEIRYNEVSDLAMLKKLAAVSSQLHVGEVADKLRSHSQMLVSIHHISLVRTTYRVCYSLILDKTSYLSLKETFDQFTSMWVDMKSSLKARENDDSQYYKFRSRIIDIHDIFKGDVPSLSDMDAEGNAVADTEEKLEQDFLKIMERTDEKNSAVEDSWDLIPESILKCIVTIHNQLFGSPDLVEKPSKCQISDDLKIQSFMDSYQLGARILKDLPELTSSTFDEKLMPEHLLRVCLEYRQTCAPSLECNTYNAYKDPNPSILFKMVEPLTALQEKVRYFLDEWPGHPGLLKILDIITSLLAIPLSTPLSKVLLGLQLLVGKAQTLQENDSKFFLKDHLPQLFIIVSSWQRLELECWPILLQEVLEKYESNALKLWFPLRALLTQSCDISKNEEISIIKSVEEFVQTSSIGEFKRRLHLLLAFHGELSDGAGVGAYSSNSLKKIQNILYNMFGYYMQFLPLVLGEIEGGKGSIEKDLKDQVKLYRWEQDPHSASIENFKRTRQKVFKLLQCFNFVTNSNHDILQKPVMVLLNQESVARKVPCWLDQQMPESEFPVDLGKLSGRFLWYTKWANQAKLSFQALQHTNATDIGVHNEEFARVVFHNTNCQQAESELEDRLYFFWAAIERICNAADFGSILKSGKKNQKKTALSNLFKTLEECGLSKHRPMGREGNELAAPSPFLEQSYITTHLLQQVISKKMPEDASVAHATLLSTNNWKNANQQYFKCLAMMQQLRQISLKFNKDLGLEEVNRATSFMDHLLSIMSEQRHFAYNMFEQLNEFRHAILLLGSGGDSDYLSSCQSVLLNSMWQQKQFFDNILATTMDTNLLLRSFIDCHHDPCDNIQVEVSAMSTLFEKFIARFSESKDLLDKYLLGSNYMIAGSHKNMPLATREMEQLVAANCQLISMFREDIQVLCHQDVSMRSVKKVLLSRFEELLEKGNSPMAILSRKVDEDKHMLSSDVLHNLEASYAEAFKEIFSLAVGVVGKLTDQGISTDGTHDSLEGNITLWKDILQTYVMNLQMGHLFDASKKLTVSVRRLVDIKPELPSSIGMQLMHLHALLGLVLSAAEGILSELLEAHRTTSEMTHALGDLLIHLFAEGFGSTDDTTEDASDGPQQDATGTGMGEGEGKESASSKIDDISQLEGTANEMDALRKPDQAPKNDDDAVEMQDDFNAELSDVSEDPEGNDSGDEDDDTNLENQMGDTGDASEMVGKKSWDKDEDDDPNRSTEKYESGSSAKETQKNDRELRAKDEGALEEDPMETDCDEQGKNNNLEDDPSTCEDVDQDTNDLMDKADAYDDRTAPELPEPKDDSEDVDMDGTEHIDEMDADGEELSPEEEKLAADGCLDASDDVEDVDAAQHGDNEIDGEQEHAEDGQMETNNMEKELHNIESLEHPSQGIQPNNAEMDYNRESESNLANSTDMNSAAAPSVNFSSNEVPSLEISMPNSGDGSRLLSNSKPELQTDTPPSQIKQTNPFRSIGDAMADWKERAKVSADTQDHQPEAEHHIDDESATEFRYVPDSEQSTSQALGNATADQINDDLQVKQSSMEDENRVQKEEHNTDRAPGDDHNLEVPHLQASQSRTNKSENANNLEHREIQTDTYVQDSVQGETDETFGDFVSFKQPPADEKTVMRDDLANDRELSTPMEINITDVDMKGPIVDWKSVELTTMKLSQELAEQLRLVMEPTLASKLQGDYRTGKRINMKKVIPYIASHFRRDKIWLRRTKPNKRNYQVVIAVDDSRSMSEGKCGKVAIEALVTVCRAMSQLEMISSLSFEQDNKLEDEPVADLLMHLNTMLDTAVARSRTPSGQNPLQQLVLIISDGKFHEKENLKRCVRNVLNRKRMIAYVLLDGHEESIMDSLEVSYQGTKLTMGKYMDSFPFPYYVMLKNIEALPRTLADLLRQWFELMQSANE

SEQ ID NO: 107205 - protein, 51 aa, Oryza sativa
  Clone ID: PAT_MRT4530_1157C.1.pep
MDEGFGGPSRPWGAPSSVPTGQGTPAPIPPDTGWNVGALPSVPSPVDRSQA

SEQ ID NO: 107206 - protein, 57 aa, Oryza sativa
  Clone ID: PAT_MRT4530_11580C.1.pep
MAAKECAVIDTNDNSTAMAPLVSEGVKTPSQGAIREHNTAQGAAVHAFDDHCLRSSR

SEQ ID NO: 107207 - protein, 87 aa, Oryza sativa
  Clone ID: PAT_MRT4530_11581C.1.pep
VLWLSYSPRQLCRRIRQSVASAPEAVRKLLVFMQGDCSPQMSADGRPTAPVGESVTGQEGPVNRLGHANHTCHAWLVPKPHLCTLLV

SEQ ID NO: 107208 - protein, 175 aa, Oryza sativa
  unsure (1)..(175): unsure at all Xaa locations
  Clone ID: PAT_MRT4530_11582C.1.pep
MARSTTPTPASPSVCRRVRLSSGAGARSPPPPTRQPNGGGLLPSAFRVALPHATVAVVSSSRGGGGLGARSTRRECACSPTTHPGSFRCALHRGAASPSRPSVXAACGGLREXARRSAMANSLVRIAAVEDGDHVRRAVAALIRPSSHHQRRRAAFRPRPSRLSAMSAAAAASSP

SEQ ID NO: 107209 - protein, 52 aa, Oryza sativa
  Clone ID: PAT_MRT4530_11583C.1.pep
YTGIVRKIFQHSLSFRSFAEGMGYDFLVATTKVVNGNTILRPIITNSKEVMI

SEQ ID NO: 107210 - protein, 299 aa, Oryza sativa
  Clone ID: PAT_MRT4530_11584C.1.pep
MGPTDPPSPYPIVETCDVCGPRHVQAADREWSSSRVWVWPPPVPDAAARRRPRRAVIARPLTPDRRRFAAQSPSAEEGLSPGGAGGQLCTGTAELVDFNWETLGFQPVPTDFMYVMRCSEEGVFTKGELVPYGPIELNPAAGVLNYGQGLLEGLRAHRKEDGSVLLFRPDENALRMRVGADRDRRRGAHIFLMSYALRCRYPLLAKAVYAKERAKERGHSDVLYLDPVHKKFVEELSSCNIFMVKVEECLITIDELLDADEVFCTGTSVVLSSVGCIVYQGRSPENVALNQYILLSSDG

SEQ ID NO: 107211 - protein, 280 aa, Oryza sativa
  unsure (1)..(280): unsure at all Xaa locations
  Clone ID: PAT_MRT4530_11585C.1.pep
FCPEYGLYKLTTFTRAELVPYGPIELNPAAGVLNYGQGLLEGLRAHRKEDGSVLLFRPDENALRMRVGADRLCMPAPSVEQFLEAIKLTILANKRWVPPTGKGSLYIRPLLIGSGAILGVAPAPEYTFVVFACPVGHYFKDGLSPISLLTEEEYQCAAPGGTGDIKTIGNYASAVYAKERAKERGHSDVLYLDPVHKKFVEELSSCNIFMVKDNIISTPLLTGTVLPGITRRSIIEYARSLGFQVEECLITIDELLDADEXXCTGTSVVLSSVGCIVYQG

SEQ ID NO: 107212 - protein, 138 aa, Oryza sativa
  unsure (1)..(138): unsure at all Xaa locations
  Clone ID: PAT_MRT4530_11586C.1.pep
VSVTDKVYLISYDLWNIRVWYTSYSTIYXNIRIWHTSRERCWNLLQIMENISTSQVISKVLLGVLLGYQDDPRYKRDPXEGCKASNLIANTPTIVYKPGVCRAKXPGDLVGYIDYDLIIVPTYPNTLIIRSTSITRQH

SEQ ID NO: 107213 - protein, 108 aa, Oryza sativa
  Clone ID: PAT_MRT4530_11587C.1.pep
MTMNEERRTVDHRAAYAADTEMPTPGSRPAFSAEKRVPLRSTALLRNATHNRALTTDTTAGICAALTSASSETTGQRSDSEAPPPQPYQLPRDQWILKNDPNDLLLHY

SEQ ID NO: 107214 - protein, 103 aa, Oryza sativa
  Clone ID: PAT_MRT4530_11588C.1.pep
MAQKYSWYIMVTEFIRKRTDIPLYVLVIKTVYKGSAPIIFAHIEYVLVVKTVSKDSFDRRLIETVIEETIERLPFDWDLSNRSFDCRPIEQGQFDRSQSNTVG

SEQ ID NO: 107215 - protein, 100 aa, Oryza sativa
  Clone ID: PAT_MRT4530_11589C.1.pep
AVEKGIFSNSYKLGKAMFSQSLRCGTPGGLFNLRFKKKDQLICIRAFLSVDSLEAPAVSELYALGKAADLTPLSDFQSLVRMSSSQSSEIFFSHAWSDAW

SEQ ID NO: 107216 - protein, 825 aa, Oryza sativa
  unsure (1)..(825): unsure at all Xaa locations
  Clone ID: PAT_MRT4530_1158C.1.pep
MAKLGPGQGLGCEAAVGLLAPSRKREYKACNKLTEGKRPLYAIGFNFLDFHYYEVFATVGGNRVTTYSSLKDGNFAILQAYIDEDKDESFYTLSWACDLDGTPLLVAAGSNGIIRVINCATEKLLKTFVGHGDSINEIRTQALKPSLIISASKDFHPSDIYRIASCGMDNTVKIWSMKEFWPYVEQSFTWTDLPSKFPTKYVQFPVLVAVVHSNYVDCTRWLGDFILSKSVDNEIVLWEPKTKEQSPGEGSIDILQKYPVPECDIWFIKFSCDFHFNQLAIGNREGKVFVWEVQSSPPVLTARLTNPQCKSAIRQTAVSFDGSVDLDIKKTKILKDEVSAIVIDVGSYSCKAGYAGDDTPKAVFPSLTDLYWGNLNSWSRLLISLCCRGSEKTYNLVTYSKTISCKVVGSIEQTGETDEAKADKEAEAASDSKNGAKPMDVDKAKTKRKLYVGQELEFRRDHMEVISPMKDGTVTDWDIVDNIWNHAFRQRLLINPEEHPMLIAEPSTNTGQQREKAAELMFEKYKVPALFLAKNAVLTSFASGRATSLVVDSGGGSTVVAAVHDGYVLQKSVATSPIGGEFLTDCMMKSLESKGVVIRPRYSFKKKEVGPGEYKVVDLDLPNTTESYKLYCMRAIASDIKESVCRVPDTAFDEVAYANVPTTSYELPDGQTIEVGADRFKIPDILFNPSLSQTIPGVDGFADSMSVRGLPRMVIDSVNRCDVDIRKELLSSILLSGGSSSILQLKERLEKEVLEESSGNTRVKVLASGNSVERRFSVWIGGSILASLGSFQQMWFSKADSQVNVIYLTIXYEEHGVSYIQRKCP

SEQ ID NO: 107217 - protein, 179 aa, Oryza sativa
  Clone ID: PAT_MRT4530_11590C.1.pep
MVPGHHGAPYECHIYIFIWDSMASELQGAAAAARIPASYQQQQQEHSPPAAASIITQQQQHSPPPAAATAASITQQQQELFRQKFQQQQHSPEELALIGVTAPVVRSSGRATPRRLGDVEQHLGGLDGRGGDLGGGDALHVAEEEAAAAAAVEDDVIGAAAAEEEAAAAMEEPVADGAV

SEQ ID NO: 107218 - protein, 239 aa, Oryza sativa
  Clone ID: PAT_MRT4530_11591C.1.pep
MWGPRIFFFSFLLSFLFFPLFSSLIFTSGRKGRGGRRAWPSSASLERHATRGGNGGEGKWPAGDGGRERRGRAVGNKGRGAATGTMRRWWMGVRGGPIELAEVGPCGKRPEALGGGVGSGSERGGGGLWLSVAWRCLPRMKGAEQGKRRSLEWREKGEEVDKEAGVVMVLVAGMMDGSARRRSQSMVWPSNLWLRSQMMGHADATAMVDDLAVAILGGRLADGEDGTIGVGGGGDEVLL

SEQ ID NO: 107219 - protein, 177 aa, Oryza sativa
  unsure (1)..(177): unsure at all Xaa locations
  Clone ID: PAT_MRT4530_11592C.1.pep
MVHQGKHHQRHYIIYSCRAGEHLLEWAMPIPSPFLRYAFPLPSEEAGHQFDRHLXLMNYVEAEVMRKPVGYLNPCRISKSNHTYTLDEKKLPAHIKAMTPKERKEYIGQRHQEKILNVATCVAIVLESMQDKECVYAPYAFDAFKRYYQKGRQWKNSRERILIRNKWPCHKQPMGPY

SEQ ID NO: 107220 - protein, 139 aa, Oryza sativa
  unsure (1)..(139): unsure at all Xaa locations
  Clone ID: PAT_MRT4530_11593C.1.pep
TSGRKGRGGRRAWPSSASLERHATRGGNGGEGKWPAGDGGRERRGRAVGNKGRGAATGTMRRWWMGVRGGRASRRRXHGGRGCCGGHHLQHNHEAIELAEVGPCGKRPEALAVAILGGRLADGEDGTIGVGGGGDEVLL

SEQ ID NO: 107221 - protein, 455 aa, Oryza sativa
  Clone ID: PAT_MRT4530_11594C.1.pep
MSPSSSSSLIHGISISVSDDEEASGRVRVRVRRKRHRHPASAARRRLLRRAARLCAPLLLATLAVSLLLYESYRLSPSSPTPPPAANLTRVDHTGAVRAADGARKPCLKILGPEKLQNLELPEVPEQNLSVQKVVYKSSLLHLGDDDSSRTEISRFNSFTGYQTLNEREESFKMKELTTLHCGFYNENGGFKVSDVDKDYMRSCSVVVATCAFGGGDDLHQPIGMTEVSIKKVCYVAFWDEVTRAAQEEEGNKIGENLMIGLWRIILVRDLPFSDQRLNGKIPKLISHRLFPMARYSIWVDSKSQFRRDPLGVLEALLWRSNSSLALSEHGARSSLYDEGKAIVKKHKATPEEVKIQLDQYRQDGIPDEKRFNGKKALAEASVIVRDHAPLTNLFMCLWFNEVVRFTSRDQLSFPYVLRRLRMPGVHLFPVCARKDLVNSFGHRRKAKPLARERR

SEQ ID NO: 107222 - protein, 124 aa, Oryza sativa
  Clone ID: PAT_MRT4530_11595C.1.pep
MGPSPARAAPPAGPELLYLGCRRRALDLLRAPATPPSAASTPPHPHLGSLPAVARALPQPSCVARVIVGSPTLPCGHPRQAPEPAAPHGAEVHGLPSTGFPPQTPVSRHGGLVTPRFSFGVKIH

SEQ ID NO: 107223 - protein, 109 aa, Oryza sativa
  unsure (1)..(109): unsure at all Xaa locations
  Clone ID: PAT_MRT4530_11596C.1.pep
PTRPPTRAIKFSKLQANQSSSKYSYGIGIRQVRPLRHRARXPHRLGSGGGLRRIRRRRRVLPCAEGGDPEPGPIVPELHRAEKRRHRRTDCTPTSDRRGSSWILAGVSL

SEQ ID NO: 107224 - protein, 435 aa, Oryza sativa
  Clone ID: PAT_MRT4530_11597C.1.pep
MMPQPQPGMAPPPPPPQAGVAGGGGAPPQWGAIPPPVPHQQQQYAPPPPQMWGQAPPPPPQMWGQAPPPPQPAYGQPPPAQAGYYGAPPQAAPAVPAGPNEVRTLWIGDLQYWMDENYISACFAPTGELQSVKLIRDKQTGQLQGYGFIEFTSHAGAERVLQTYNGAMMPNVEQTYRLNWASAGEKRDDTPDYTIFVGDLAADVTDYILQETFRVHYPSVKGAKVVTDKMTMRSKGYGFVKFGDPSEQARAMTEMNGMVCSSRPMRIGPAANKKATGVQEKVPSAQGVQSDSDPSNTTIFVGGLDPSVTDDMLKQVFTPYGDVVHVKIPVGKRCGFVQFANRASADEALVLLQGTLIGGQNVRLSWGRSPSNRQAQPQQDSNQWGGANAGYYGYGQGYEGYGYAQPQDPNMYGYGAYAGYPNYQQPLAQQPQQQQ
